United States Patent Application Publication US 2007/0161031 A1 - sequence listing, part 21

SEQ ID NO: 26135 - DNA, 2300 bp, Homo sapien
gtttttgaaatctaagtaatgagagaaacaattgttaacttctcaattaaacttgataggaaaggaaataatttcagaagccctgtgtccatgagtaggatatgttttattgcctccttgtttgcggtgcaatgactctgagtgacaatcaacttctatagcaccttttttttttttttcaggaaataaagtagcatgttcctgaataattcccccacccccttttattttcctggtagtcaggcttcctccaaaataccttatttgacctttatacctttagaaacagcaagtgcctaattcgcctctgtgggttgctaatccgatttacgtgagcggaacctagtattattttagctcccctaccgaaaaaataatacacatggataatagttctattaccagctcctgcttctgacttttttctctctgtttcgcaggcccgatagctctgggaaagcagaacttggccttttccaaaaattttctgcccttggttttggggatcatttgggcaagcccgaggtgctgtgcatgggggctcctggaatcctgggaagggcagaaagccttggccccagactcatcgtgcagcagctctgagcagtatttcggctgaggagtgacttcagtgaatattcagctgaggagtgacttggccacgtgtcacagccctacttcttgggggcctggtggaagagggtggcgtagaaggttccaaggtcccaaactggaattgtcctgtatgcttggttcacacagtgcgttattttaccttcctctgagctgctaatcgcctgcctctgagctgggtgagataaatatcacaaggcacaaagtgattgtacaataaaaaaatcaaatccctcccatccatccttcagtctgccacacacgcagtctacgttacacacatgtcacgtaaagcaggatgacatccatgtcacatacatagacatattaaccgaaatgtggcccttcggttgcatatattctcatacatgaatatatttatagaaatatatgcacatatttttgtatattggatatatttatgtaactataaatttacatgcgtatggatatgaaaataaatgcatacacatttatgtaaaaaaatttgtacacatgcatttacatatgtaaatacatacatctctatgtattaatgtttaaaaacactcaatttccagcctgctgttttcttttaattttcctcctattccggggaaacagaagcgtggatcccacgtctatgctatgccaaaatacgctgtaattgaggtgttttgttttgttttgttttttgaaatcgtatattaccgaaaaacttcaaactgaaagttgaataacgggcccagcggggaaataagaggccagaccctgaccctgcatttgtcctggatttcgcctccagagtccccgcgagggtccggcgcgccagctgatctctcctttgagagcagggagtggaggcgcgagcgccccccttggcggccgcgcgcccccgccctccgccccaccccgccgcggctgcccgggcgcgccgtccacacccctgcgcgcagctcccgcccgctcggggatccccggcgagccgcgccgcgaagggggaggtgttcggccgcggccgggagggagccggcaggcggcgtcccctttaaaagccgcgagcgccgcgccacggcgccgccgccgccgtcgccgccgccggagtcctcgccccgccgcgctgcgcccggctcgcgctgcgctagtcgctccgcttcccacaccccgccggggactggcagccgccgccgcacatctgccgccacagcctccgccggctacccgaacgttctcggggccagcgccgagtggatcaccggggaccgcgaggcacccgcgcgccgcagaccccgcgcgggctggagcacccggcagagcgcgccacagcgccgtggcctctgctgcccgggctgcgccagagccgcggacgggcgcgcagagcgccggggactccggagccgatccctagcgccgcgatgcggagcacctactgcaggagatcgggggcctgggacgcgctggccgaggtgtgatcggaccccaggctagccacaaagggcacttggccccagggctaggagagcgaggggagagcacagccacccgcctcggcggcccgggactcggctcgactcgccggagaatgcgcccgaggacgacggggcgccagagccgcggtgctttcaactggcgagcgcgaatgggggtgcactggagtaaggcagagtgatgcgggggggcaactcgcc

SEQ ID NO: 26136 - DNA, 2300 bp, Homo sapien
gatccttttgtggctaactaactcacctggtgtagagaaagacagttgatagatcaaaaaagtatacagataacagagagcaagtgatatggatatgaaagacattagggagcatacaaatgcagtttggccaggatttatttctagttatggactgatgaggagacatggggaaaaattgtcaaattaaaaaaaatctttttggcaaatttaaactttgcctctatcctttttctcttaatctgctacccagatatgcacttcaaataggaatgtgggcctactggggcatgaaatagttgagagctattcaacaatgaggagaatgagagaaatctatttagaaggacattttagaatttaagccagttgaaccttaatagtcacagataatttaacatgacccctaaaccattaggggggtttttactacaaggacttggctctgtattaacaatgtcatccttcttagaaattgataactatagaagttatcctatgtggagtaagataagaatgactgctcttcatgtttacaagagattagagtggataagaaccaggtgaaacaggaatcccaagggatctccttccttctcagagtcatagccattccagggaatctgcacattttctggctttcccatttctatcagatggttacttaggaacaaatgaaaatcagcaaaagtgccatgataattatcacaaattcgtatgaaataatgaggcagttgaatgcattttttctgtcttatctctgtttgtcaatgagctaaacagtgtgttcaggtccctctgaatacttggaggagcaagattctttagccttgtctcactgattcccaaagtttatctaagtctttccagaggaggacctctattgtcaacacttgatagccaaacccttcctttgtttttttccttctatacactacttgttaatcaacttgcacaaaaccaatttctggttcaactttgtcctgagctgctaactggctatgactttattttacaggtgcagtaactttgttagctgttattttgaggagctccagccatgggctcatttgatagatttaattgccaacatcttgaacaaaccccttgattttaaaattttaatttagcatgtttaacatgaaagaggattgccgaataagtgtcccatttgatttactctataagtaatacagctgtttgtctttatttgaaaaataaaggtagacacttagaaatgaaagatgaaagcttggaatgtgacctgtaagtccagaaatcacagaccagaaagcaagaaaggaacatgaacagcacatgtcaagtatccaggaatttctaagtataatgcagaacttggggcatgagaaataatctctctctctctgtgcgtgtgtgtgtgtgtgttttctttatctgagcatgtttttttatatactgccttttctggtaacttcattaggtctgtataattatagtttgcttcaaccttagtctgcatcagtattcattattatctatttggtgcattgtagcagcataaatataactaaattactagggtcaaaccataatgggagctgttgtgatggtaattagagcagaaatatagtccttttttggtaaaacttgcagaattgtagcatgaggtgtgttcttatagggtacaattaaagccaggttgtgggttcaaggtggtaaaatgatggataatgaaggtacaccattaatcacagttccaaaagatgctctgtatcaattcttttctctctgaaaggtagctcagaggttgatgctaagacaaaaaccaacagagggcttagaggtaagatgccaacttccgtgccttcactaattgtcactagaaagctgaaactgtatcgaactctttaaaaggaaaaaaagaaactagtagaaagcatctcagtgtggttattgaaatcattaaatttgaacttagtggagcaatgctttaattctatgtgtctttgccatgttggactgagtctctcacataacatctttagaatttagaatgtgctataacttggagcggaatcacccttattgtctttacacacagcccataatcctgaaaagcagaaacagaattccactcttaaccccctcagtttgcagaatgtctaagtgtagtgactctagactcaatgtgaggtatgtggaaatgcttcagaagagaacaaggcctcggctgggcgcagtggctcacgcctgtaatcccagcactttgggaggctgaggcgggcggatcatgaggtcaggagatcaagaccagcttg

SEQ ID NO: 26137 - DNA, 2300 bp, Homo sapien
ttacgttaaaatgaggcctttagagtaaggccaacctgactggcatctttagaaggaaaggaaaagatgccaggagagctgtgcacagaggggtagataagcatgttgaggaggcagcaagagtccagccagccaaggagaaaggtgtggaagcagacccgtcccctggggtccccacaggaaatcacccttgctggaaccttgatcttggcgttccagcttccagaacggtgagaacatgcatttctgttacttaagtcactcagtctgttgtattttgctatggcagcccaagcaaacttatataaccccctacacagtctcttggaaccatccacctggaagaagtaaccaaaaggcagcctgaggaaacatccatgcagagggaagacagtcattaaaattttgactcctggaaagtccatcttcctgtccctgagaacatgtcttggtatttcttgaaaatgtgaatgcttatggtgcttatgacctttgtagttagtatccaccttagaaataaaacgtaatgttaattattgcccccttctaaaacatatatttaaagaaaaacactgaatatatacccaagactaggattttcattctttactgtactgaggaaatgcagtaaacatcccattatccattgatatttgttgatttcagttgtcatcccaataagattggcaataactttcctaacaccaatgtggcagaacagactgagatatgagtaataaaacaagtgacagtttagaaataataaataaaatactacatgtgtaatgtgtattaatgttatgtattacatatttaatagctatatcttgaatatagagatattaactttcaacaatttgcttattaacatgaacacacgtggtacatgtaatatttttatatattttctgtatgctttgcatttacatattttactttttaaaatgactttgcatataataatcaaatataattaatacattattatatgtttaattatatattttatgatatattgatatctgatgaaatattaaatatcaacagagtatatgtattatattagtacagtcatgtattgcttaataaaaggaattccttacgggaaatgtgtcattaggtgattttgtcatcattgtgcaaacatcatacggaatgctcacacaaacctaggtggcatagcctactacactagtctacatgttataacttattgctcctaagctacaaacctgtacagcatgctactatactgaataccatatataattgtgacacaatagtaagtatcagtgtatccaaacatgtctagacataggtaatgaaaatagagtactataatcttatgtgaccaccatcttataggcgttccatcattgacccaaacgttgttatgcagcgtgtgactatattatatgaacagaaaatattttgcttaaatatttaaataatcataatattgtattgccttacatgtagatatttcactttttaaaattatgtgaaaattattaatgtaattttgccataaatattataattataatattgtagagaaatattttactaaatataaagggaaataaaaattatcctttctttttacttctttaagtgatgccacacatattatattccagggggctcctaattgtaacaactatttttaaatagcttctgtgtgcaagtgaccttaggggctcttcacgtaagcataaggttaggtccagtagttcccccttatccccagtggatccctaaaactaaggatagtactgaaccctatatatggtatgcttgttcctatatatacttaaccattaacaaatttataaattaggcacaaaggattaacaatcataactggtaataaaatagaaaattgcaacaatataatgtaataaacgtttcgtgaatgtggtctttctctttcaaaatatcttcttgtactgtacttccccttcatcttgttgtaatggtatgagatgataaaatgcctacgtgatgcgatgaagtgaggtgaatgacataggcattgtgacatagcgttaggctacagttgactttctgaagattctccagtcggaggaccatttgcttcgggtgatcctggatcgtcaagccatgttgatgttgattggatgtcaggagcagacgatgtccagcactaacaggtggggaacatataccccacagatatgctggacaaaggaatgagtcacattaggggtgagatggaagcaggaatcatgctactcagaacagtgttccatctaaaacttataaattgttatttgtga

SEQ ID NO: 26138 - DNA, 2300 bp, Homo sapien
gggcctagagtcactgcctgggtttagaatctgccttggctgcttactgtgtggctctcttaacctctctgcactttcattttcttacctgtaaaatagaaataatgagagaaccttcatagagttgtggcaaggattaattgagctaatgcttacacagttttaaaactttgcctagcatgtagtaaatgtcagctgttgtttacttgtctcccttctgtcttcccaaatcatcaccattttgactctgtattatctacctatccatctatctatctatctatcatctatctatctatctatctatctatctatctatctatctatctctctatctatctatcatctatctatctatatctagttctatttctctggagaactattggttggttctatttctctagagaaccctaacaccctccctttctataatatacattctcagaagcagtttcttggttacttgttaatcatctttcagatctcagtgtgagttgagttcctttgttctaccctttaaatcaaagatcaagatttctgtctctttgaatactgatctcaacttcagtcaacatgcaactattaattagataacttattcaggaaatatttattgaattcttgcaccacacatggttccaagctttgaacacatagcagtggaacatcatcatactatacattggtgtaattacctgattaatatctattcactcctttatattataagtttataaaagcaaggaccttgttgtgttaccaatgtgtcactgaatcctaattcaatgcttcaagcgtggtaaacgttaatgaatgaataaggtttttgaaaagcaggaacattgtgttgaccttactcatagtatctttcacaggactgtgcgcatgcacacactaggatgttctacaattcaattagagttctgtacattttaatatgtgtactgttttcatgttaccttaagctccttatgattatgggtactaaatagagtacaatcaaatggcatttcaaaataattaaaagagttaatttggggatcagagttttctactggaagaaggattaaattagtatgtattatagaaggccagatttctctgtttagatgagtaattcttcctgaatcagggtaaaaatcatgccactttataagatgctataagtcttatgttccacaggaagggcgggaaagaatccagcgcccttaagaacttcctattgtctaggcaccttaggcattagatcttacaaaagctctgggaggttgatttttatcattagatcattttaagtcatgataagacagagacttagagatgttgcataatcttccttgcctagatccctagagtcatctagtagtaaagatgggaattagaaaccaggtctgttggacagaagccaaggcccatcccagtcagtagaatgggagagatgacacaccattttgtcatcattcaaataacccctttcaggtcagaatctcctaaattctctaaagaaaagtattacaggagagtgctggccaggtggagagactcacagaatcagatacacacacacacacacacacacacacacacacacacacacgtgtgtatatagactgtatgcactgtgtatacatatacttcttcaaaatatattcctattataaactagggaatacaatttgaggaaatgtaaaaatgaacatgtactttttttggtttgtgtatttgattgagccaagcctgggacagatgacctctgaactggagtaatatggtgtaaacaatccccttgcctttctggtatgcccctttctctttctctagaccttcttctcagagctctgacttagcttctgatgtagctggcagaatttcttctctctcattcccaccaaagtatatatctgttgaattgttgaactggattatgtcagaagcattaattggaaatcatcactctgtagagaacaacaaaaacacaaaatctcatgaccaaggaagagcaaaagaacttgtcgggatttctcgacctcacctctcagaatgttgacaatgaactacaaccaaaacacaaccatggcaacaaattagatatttgttgaatcaggccaagacacagaaatatactgcatgccaaaatgtaaaggtgacatgagtgatcaaaagagagggaaagtgaaaggtcaagggagaaactctcagcatgtaggtacagaaccatttccatgaggtcagctacattccaaagtggctgcggcactggatgggagctgttgggacatgctgcacagcccaagaca

SEQ ID NO: 26139 - DNA, 2300 bp, Homo sapien
atgaactttcttgggcttgtgattgagggctgttccacagggtatggaactatactatttggcatgctatgtttatgaaaaaagcaggctccaagttcaagagcaagttctcctacaggtgtaggtggttggaatgtagatagtgaacaactggcaagcagctttaagtggcggctcctagattgaaactcaggtctaactgtagttaaaatcattgctttctcaagcatatcctactaatgtgaatcttccccaggtgttccatgattgagtgaaattatagactgagaccacaggtcttttggaatagcacttccctataccctctccagggcaagataagactctaagaattagtggtaggccatgtgcagtggctcacacctgcaatcccagcactctgggaggccgaggtggttggatcacttgaggtcaggagtttgagaccagcctggccaatatagtgaaaccccatctttactaaataaaaatacaaaaattagccaggcgtggtggacatgcctgtagtcccagttacttgggaggctgaggcagaataatctcttgaacctgggaggtagaggctgcaatgagccgagatcacaccactgcactccagcctgggagacagagaaagactccatctcaaaaagaaaaaaaaaaagaattaatggtaaacctaaatgcccattaagagacaaatggataagggaaatgtatagatatacacacaatgaaatattattcagccttataagagaagggaatcctgtcatttgcagtagaacccagagaacattatgctaagtgaaataagccaggcacaaaagggaaattattgcattatttcacttataggtgggattttgttttaaaaaagacttcaaatgcacagagctagagaatgaaacagtgaataccactagtgggaagcagggaagaggaaaaggggtgatataggtcaaaggatacaaaatagtagacacgtaggatacataaatctacaacagggtccctaaccttttcggcaccagggacaagttttgtggaatacaatttttccatgggcagtgggggtaggtggatggttttggaatgaaactgttccacctcagatcatcaggcattagattctcataaggagtggcgcaacctagatccctcgcatgtgcagttcacaataggaggcggagctcagtctgtaaagcttgctcaccggctgctcacctcctgctgtgcagcttggttcctaacaggccacggaccagtaccagtccatgctggggagtttgggacccctggtctagagagcaaacgtgcaaaatgaggactaaagttaataaaattgtatcatattaggaatttttgttaaataagttgattttagctgttcttgtcatacacacaaaaaagtaattacgggtgagatgatacatatattatattggcctccctactgtaaccatttttctgtgtatatgtatctcataatatcatgttgtaaacctcaaatatacagaatgaataaaacaattagctgtcaatttggccttaatgttccatgttaaagccaaatgtctatgtttgtaatcagctaaattttatattgtgcagaagccctgaatttcacggatgccccatatttcatggatgccccgttcagttcataagctcttgtttacatgatttgtgcatgatccaaatgtggaaagaaaatgagtgggcagcctattctgggtatcaagcaaagagcacaggcacagaccatgtgcaataagcagccttaggcaaaactgaaccaagagtggtttcatacaggtattcctctaagtctttaattttttacttattcctttcccctttttaatgtgatagacacctaatcaccttctgctgccttcccaacctcaactttggtgttctttggcagatagtgacttcggtgttctttggcagatagcctacaaatgaaatttcaaaggctaagcatataatgtttgctcacttgatgtaagcaacagagaactaaatctgaactttggcaaaagtctattaataattgacaaataacagaacagtgaggatgtagaaagcaatacattaaaaaaaaaaaaacaacgaactccatctgggatagcaataacctgtgaaaatgctcccccggctaatttgtatcaatgattatgaacaacatgctaaatcagtacttccaaagtctatatatgactattacaggtctggggcaaatgatgaagaaactttggctgataatattgcagcattttccaggtaagaaaatt

SEQ ID NO: 26140 - DNA, 2300 bp, Homo sapien
cttattttaaaagtttctcaaatagaatatgaccccctcaccttcttccaaaaatagttaagtggaatattttaataattcatgtctacagttccctttaataatttcattgatttattatgataccaagggtatttcatttggaggtctaaaatatccccttctttgtgactaagaggtaaatgcacatttgaaggggtgatatgccttatgttcttcgagcaatgtaatctgctgtgtgacataaattttggctctgatctcacactgaggttttcactccataggcacctgcttgcaatttaaattgaaagaatcaaaacttggtcttggataaaggaaagatccaattttctgtctgtgtcctcaacgtaaaacaaagattcaatagtagtatacagattgccagaaaccacaggctaaagagatgtggcaatttcctgaaagattttatgtttggggggtgggggcgggaggggggcaggtagggtggaaaggagttgtgggaggggagagagagacagagagagagagagagagagaggagggagagagagagagagagaggagagagaggagagagagagagagggagggagggagggagagagagagagagagaagagagagaggagagagagagagagggggagggagggagggagggagggagggagggggagagagagagagagagagagagagagagagagagagagagagagagtctgcaagcccaccatgatggtctctcaagcccgctcagacatctgcccaccatccactgcaagcctctttcaaatggtcacttcctattataaggttaaactataatcaacaaatccctttctttctcctaactcaaaactgtagtttcccatctccttaaagaaaaggcactatccaccatttgctttctattgttaaaaggggcaatgcgtatcttcttttctttatggcacaattattaatattactcagaaagtcctacctttacaagttataataagtatcaacatttatttgaaatcatactgtaaaatttaaaaggcatccatatttatgttttattctcacaatgacatctccaggtcttcaaacggaagactacgacacaaatggcctgccttcaccgtgctgcaatttcttcaacaggtaacttgcttagcctgtgctacgtattcatactgcacgtggatgtcactgaatgtcctttctcttccaatacatatctgtatctaaaagcacacggtttgcttgcagattttcttccttcccttctcctccctatgggaagctgcccactccaccccgaaaacactgtcccccaaagcaaggggacgcgctgcaccctcggctgtcaccgcgagggctcggcgcgcatgcgcggcgcgagcggccgggccccacagccgcaggtcgttggtaaggcgggtccgcggaccccaggtcgagcccagcggcagtgcaggatcgcaagcggcccggcaccggcgccgcaggttgttggcaagcctggtccggggttttaggttgagcccaagcggcaatgcgggatcgccaccgggccgcgcgggcttgggagggtgacgcccgcgaggacactgcggcgtccggggcgggcgggcacactcacaatttcagcatccactcgccctccatcaccagcgtccagttggaggcggtcatgggctggacccggctctgctccggcggcagcgcggcctcctcggggcctgccgtcgccgccacagccgcgatccaggcggccaggagcgccgttagctgcgggccgcagcgcccacccgccatgttgggcgccgagcgaggcttctcggcggggagtgtggggaagggcagcggccggcccgcagcctcgctcgcccgccgggtttttcaaggaagcgggagacgcaagggccaccccgcctacgcctagcggcgcagactggcggtgctcgcaatgccgcggaggacgccacctcttatcgccgcttgcccgtcgaggccacgccccctcccgcctccacttgccgttgcccggggtgtcggttacctcagcaaccaccgccctttcttcctgaccgccaagctgacaataaacagatgacccaacgttgcctaagttagaacatgcaccgctgctgcccaggctccaataagggcagggttggcgcgtgtgggcttctctaaagggaaacatggccagtaattttaaaatccatcccctcttcaatgatagcaaatataaaagcaacgggctgcaaggtacacgtatgtttaatgaaaaatggagggac

SEQ ID NO: 26141 - DNA, 2300 bp, Homo sapien
gtgggaattaggggagctacaaaatgtgatttggatggggacacagagccaaaccatatcagttatacagaagagcaattggatctgagaagagacagcagctcattctgcatgagctatcagaggtacagtgtggactacatgacagagactgaatgattcactggacaactggagaagagtgttctaatcagaatgaaggagcaaggagacactgaagtacacaatgtgctttgggaatggggagtagctttgtgttactaggacacagggaactctgggaatagtggaatgtaaagtgggcaaaactgaagctgggctgtgagaggcattgtgtatcatgctaagtgaagttaactttagtataagaaaaatagacattacagcgtattgttgcctccaaataataatattagtgttggcaatattgtggcaaaaaccacaattatgtttgcaccaacctaatatgtaagctttttgagttagaatatgtgctaggcattattcttatctcatataatcttcacagccaccttttggagcaggttctattactacccgcattttaagagaactttggtgtggactagttttagccccaaatcacatggctaggaagtgtcagggctaagatgccaatcatggtctgacagcaacaggtcccttaccctggtctgtgactccttacggcaaggtcagtcccatacttccttgctactttcttcctaccatccttagtctgaaggctaagacttcagtttttgttaaagataggaaatgctttggtaatggctgtctttcatgctgaagatgctctctctccttttagcttttcattttgtaaattttccaacatatgcatgagtaggtaaagtagcaaaatgaacttagcttcaacactgactgatgttgcaccacttttctttcacctatcttctttccattccctacattttatttctggagcattgtaaaacaaattctacacatcattctatcatgaaagtgataaaatgacagaattcctgtttatgagtcacttctttttacaagcacagtaaaatgttttccattgagtttatggaattgatatgtatgtacttaataacagtgagtcttagtagcattcattgcaaagacattttcttaaatttcaatagtttgtaaacccttgagtgttttattttaatgataagggctaggtccacatagtttttagctaatactaattaatgcataatgcaggccagatcttctcttcaggcaaaattaacttccctctcctataagtattgattgaaatttgctctcatgtgccctgaagtacttttagtcttattgctgtctttgttttaagccgagggcagaaaccacatccttttcatggtctattaaccacattaccgaggttcatggtttgcacaactagtaaacacatacaaagcaccctttgagaaagcttcctcatcctttaattgtaatccagtcttatatattaacggtgtggtggtcccaaggtacagattcatctaatgtgacctggaaagaaatttggaaatcacttaaggctaccctcattttagatctgacaaaactgtagtcaagagaaatgtgaggtccattttactgcaggtggcaatagtcttaattgactcattttatcggctagtacccatgtttttaagagtttctatgaaattaacattttttgtaaaaaaaatgcaattgcataggctagtttcatcaatatcctaaattagtgatgcttcaatatacacatgcagagtacttaaattttcctctctcttcagcaggagatactcaccacgtccctccatttttcattaaacatacgtgtaccttgcagcccgttgcttttatatttgctatcattgaagaggggatggattttaaaattactggccatgtttccctttagagaagcccacacgcgccaaccctgcccttattggagcctgggcagcagcggtgcatgttctaacttaggcaacgttgggtcatctgtttattgtcagcttggcggtcaggaagaaagggcggtggttgctgaggtaaccgacaccccgggcaacggcaagtggaggcgggagggggcgtggcctcgacgggcaagcggcgataagaggtggcgtcctccgcggcattgcgagcaccgccagtctgcgccgctaggcgtaggcggggtggcccttgcgtctcccgcttccttgaaaaacccggcgggcgagcgaggctgcgggccggccgctgcccttccccacactccccgccgagaagcc

SEQ ID NO: 26142 - DNA, 2300 bp, Homo sapien
gttgtaaggacaattgagaagttctggagccctggaagcagagtttcattgcagtactctgaagtagagaaaatcgacttgagacggtgactgataccttctgtgaggtaattagcaagccaaggctgctggctagagggactgtggaccattcaggttttagtttagggacatgtgatcaaaatgaaaccagtcagtttttcatgaaattctttgtagcaattggcttccaagcacaaggcaagaccctcaaatgacagcaagagtcatgggtcttgttcaccaggttatccatggtgattacaatagtggctagtatacagctggctaccaataagtatattttaaatgcattgaaatatttaatagcaaatttctgtattggattttggtaatcttttgactgagttcataagcattgggccttggagtcctgagggcagagaacagggagaatgaaggattaagagaatgtagtgtttctctccatttttctctcttcgtattctttcttctttttaaaaatcaacctttttgagatataatttatttaaaacaaactgcactcaatttaggcgtacttacagaacttacaagttttgataaacacacacacgatatagaacatttccgacatgctcatcaggtgctcgtagcccttccctgtccatctctacctatccctggccacaggcaagctttctgtcaacatagaatatcttgcctattctgcaattcctacacatggaatcaggcagcatacagtctatcgtgtccggcttcttttacaaagcttaaagtcgcgattcatccctgatcttgcatgcccactcatttttattgtggaatagtattccaatatttgggcataccacagtttgtttatccattcacctgttgattgacatttgcaggctactaagaagaaagttcttcacatcactttacaagtccctgcagacttgaacgttttcatttcttttggacaaatacttaggagtggaatttctaggttgtatgataagtaaatatcttactttataagaaactattctccaaagtggttttactattttatattccctccagcaatgaacaagagttccaagctatttctctctccgcccccccacctcccgcgtgtgtctctctctctctctctttctctctctcacactcactcactctctctctccctctcctctctctccttaataaaaaaaaaaaaagagttccagttgctccacatcctttcaagcatttggtattaccagtctttaaaattttatccattctggtcctcctctttcccttcttccctccctccctccctttctttcttgaattgagaaatgtttgtggaaggagtgaagacaaacattcctggacctatgttcctaaatgagcaagtttctattaataagactctcccccacccgccacacatcctacacactcaaggagaggagcgggagagggcaccctctttcttcctcggaaaataaaacctttgctttctttaggatgggctttctgtctcgaaagcacaacgtaaccgtttgcccgggtttcaagatcagcgcgctgcaaactctcaggcgcggccaggtttcctcaaagagcctctcaactgcgctcttctctgctgataaatgataattctcttcaaaaagctggtttgtggctggcgctggagagctccagctagagccaaaagccaggggttgcctctttggttcctcccgatgggccccttttcccagccagttgggatccaaagacgctccggagctcgagcccaaattcccaagaaaaccccaaagagcgtaaggctcctggggacccctagcacctctgcaaccagggcacggggcatgctcagagcgaatgcgggaggcaggcgttggctgcaatggggctcgggagccaggaggtgccgctgcgtccccgcttcctggcgcctgacccagcgtgcaaagttgggctgggagccgcggggggaaggaaggacccagcgagcgagggtggcggggaaggggggcgggggggaggaggagggaggagggaaaagagcggttagggggggcgccgggcgtgtgtcactcgctctctccctctgtgtatagaggatgtgctgaatggtgcgctttgaggcggcggcggcggaggagcagaatccgccgcgactggcagcctcggctgaccggctcggcttctcttcgccttccgaggctcctcatccaccgcgggctccagacctcgcgtcccgcccggggcatggccgggcgctgcgcccccgc

SEQ ID NO: 26143 - DNA, 2300 bp, Homo sapien
agcagtcgcatttcaagtgctcagtagtcacaagggagccacagcagctcctgtactggacagcaccagtatagggcatccattctcaacaggggccatgtcgcttccaaggaaacgaaaagtggttttggggaacaaaagaaatcttcttactgtttttgttttttttgttttttttttttttggtataaggcacagttatacatacagcatataaacagatattcagcctatctgcaatattgaagtgtcatgggggatgattagaaaaataaaaacctaaaaagcctcccttgcagggcaataatggaaaaagttgagaagcactgttatagagtgcgtacttgaaggtttaatttccagtgcttcccataccagcttaactggctttccttgaggaagtcacttagcccaagccttggtctaggtatctgtaaaatgggaataataatagtgtctacctcttaagttattgtaagtattaaaggagaaaagccacgtgaagttcaccacagtgattggctcagagcaaatgttgagaatgtatcagttactattcagtcagggatttttataaaaaggtatactggtattagaagtgagtttggattagtggtgcctttgtcatttcgtctcagtttctttagtatttattattgacttatatcagtgcattgatgagcaaatcattgtaatgttaatgttgattccagtgactcttttttttcttgctgaattgtttctcattcttcaggatttcgaggttttgttaaggtcttttgctttgccccttgattgtttttgatttggcttaaagactctttagagattcatgtaaattactaaataacatcttcttaattactatattaatcttcactatttatgatataggaatgacagtaaaacgtattatatcaaataaagagcagcaagtagaaatttactgaacattatctgctattactaacttaagacaagtatgtttattggttttcttttttacagacaaacatttatcagaaaaaatacaactttaagtaaattagagttgaattcttagaagcaatatactcacaagatatggtttgcctgcattctaaggtcacaggtgttcttggaggtaaacatcatcctattcctgacccaaagcctcacctattgtaggcctacatccgtggttttgtaagtgtggcccctggaccaacagcatcagcatcaccatgagcttcttagaagtccagattttcagactccgtcccagagctactaaatgagggactctggagaaagagcccagcaatctgtgtttttacaagatctctcagtgaacttgatgcataggcaagtttaaaaaccacaatcttatgaaatacacacatgttatagatgttgatggagaggtaaaggattaaaatatagaccatctgagagctgtcttcatcattctacagtcaaaggtcccaagagtcgcaacccatctgcagctcctttgtcaatgaaggatggtcatatatttcaagtttcaaacctgggtatatgttctgacaattaagaatatttgggatctgggttgagtggctactttggtatggggagaatatagatactagcagctatgtgggaggtgggaaaacaagcaggtggaattgaaaatagacattcatatatttctgggtcagatcctactttgcatggcaagaatgccaagttccagctgatcttggaatgttagaggtgattatgaaggaagcgggcagggagccgagataaatgatcacttaacagaggaactgtggccggaagagtggggtcaagaaaacattgaacaaagaagggttaattttgaaggaggggaaggaataagctagaaatggaagtatctgaaacaaactaggcagcatagaacagtgttcctaaatataaattttgaaaagttttttttttttttttttgagacggcgtctcgctctgtcacccaggctggagtgcagtggtgcgatctcagctcactgcaagctctgcctcccgggttcatgccattctcctgcctcagcctcctttagaagttttattctgctcacttaaatatttgattgtatgggatccttgcagggaatcgccaccaagattttgattagaattttgtcagatgctctgataagaaaagaaactgacctgaaaaagataagttacacctacagtttattctaaagtcctctagaagtgggaatgtgtgctgtgtgcagcctgtcaaaacttttattttggcaacttctagaagtaacaaaacaggactg

SEQ ID NO: 26144 - DNA, 2300 bp, Homo sapien
agttcaattcctgggtatccttgttgactttctgtctcgttgatctgtctaatgttgacagtggggtgttaaagtctcccattattaatgtgtgggagtctaagtctctttgtaggtcactcaggacttgctttatgaatctgggtgctcctgtattgggtgcatatatatttaggatagttagctcttcttgtttaattgatccctttaccattatgtaatggccttctttgtctcttttgatctttgttggtttaaagtctgttttatcagaggctaggattgcaacccctgcctttttttgttttccatggcttggtagatcttcctccatccttttattttgagcctatgtgtgtctctgcacgtgagatgggtttcctgaatacagcacactgatgggtcttgactctttatccaatttgccagtctgtgtcttttaattggagcatttagtccatttacatttaaagttaatattgttatgtgtgaatttgatcctgtcattatgatgttagctcgttattttgctcgttagttgatgcagtttcttcctagtctcgatggtctttacattttggcatgattttgcagcagctggtaccggttgttcctttccatgtttagcgcttccttcaggagctcttttagggcaggcctggtggtgacaaaatctctcagcatttgcttgtctgtaaagtattttatttctccttcacttatgaagcttagtttggctggatatgaaattctgggttgaaaattcttttctttaagaatgttgaatattggcccccactctcttctggcttgtagggtttctgctgagagatccgctgatagtctgataggcttccctttgagggtaacccgacctttctctctggctgcccttaacattttttccttcatttcaactttggtgaatctgacaattgtgtgtcttggagttgctcttctcgaggagtatctttgtggcgttctctgtatttcctgaatctgaacgttggcctgccttgctagattggggaagttctcctggataatatcctgcagagtgttttccaacttggttccattctccccatcactttcaggtacaccaatcagacggagatttggtcttttcacatagtcccatatttcttggaggctttgctcatttctttttattcttttttctctaaacttcccttctcgcttcatttcattcatttcatcttccatcactgataccctttcttccagttgatcgcatcggctcctgaggcttctgcattcttcatgtagttctcgagccttggttttcagctccatcagctcctttaagcacttctctgtattggttattctagttatacattcttctaaatttttttcaaagttttcaacttctttgcctttggtttgaatgtcctcccgtagctcagagtaatttgatcgtctgaagccttcttctctcagctcgtcaaagtcattctccatccagctttgttccgttgctggtgaggaactgcgttcctttggaggaggagaggcgctctgcgttttagagtttcccgtttttctgttctgttttttccccatctttgtggttttatctacttttggtctttgatgatggtgatgtacagatgggtttttggtgtggatgtcctttctgtttgttagttttccttctaacagacaggaccctcagctacaggtcagttggaataccctgccgtgtgaggtgtcagtgtgcccctgctggggggtgcctcccagttaggctgctcgggggtcaggggtcagggacccacttgaggaggcagtctgcccgttctcagatctccagctgcgtgctgggagaaccactgctctcttcaaagctctcagacagggacatttaagtctgcagaggttactgctgtctttttgtttgtctgtgccctgcccccagaggtggagcctacagaggcaggcaggcctccttgagctgtggtgggctccacccagttcgcgcttcccggctgctttgtttacctaagcaagcctgggcaatggcgggcgcccctcccccagcctcgctgccgccttgcagtttgatctcagactgctgtgctagcaaccagcgagactccgtgggcgtaggaccctccgagccaggtaagggatgtaatctcctggtgcgccgttttttaagcccgttggaaaagcgcagtattcgggtgggagtgacccgattttccaggtgccgtctgtcacccctttctttgactcagaaagggaactccctgaccccttgcgcttcccaagtg

SEQ ID NO: 26145 - DNA, 2300 bp, Homo sapien
agctacatgaatcaggggactgtggacttgatcctgtcacctgcagcattaacagctcaggtgattccttagtggaattgagtgataatcatggctccagtaaaatctttatctgggcctgatttggggacttcctgacagaggacacctgtttggggatatttgggacatctcccttaaattcctctaatggaaagaatatggttccctggaaaatcctgagagcagggcattcaggtaaaatgccctgctttcactccaggtgtttgatcaaagataattcggggctcccaatttccaacagtcaggaaaaatgtcatctactttggcacatgctgacttaccttaatcaatcgcagtggttttcaagcttgaacacacaccagaatcaagagggcttgttatgatgcagactcctggactccactgtcccggagtctctgattcagaatctgcatttctaacaagctcctggtgtgattctgctgatggttcaggggccacacttggagaagtaaagctccatgatactgagtagcatctttctgtgaaagggaaatggagggtttggccatttctttagtgcactctggaacatgtcgtcccagcacaactgtacttcttatcagcagcagccacagagcaggctgacctggtagaacccctgtgcaagttatcactggaggaagaagacttgaacccagggatgcccggggctggccctaccaaatcagccacttctctgcctgctcccaaaggtctcatagacacagtttctaatgacttgtccttcagcaacgacctccaatgcttttcaggatcaattctctgattagcagtttttcttctctccctaatactgctgaggaatgtggcagtgtattctgatggccgcataagccatttagtaagctcccatacagaccaagagaggcctggtgagaaggggcacggttgctgtggaggactttgcaaatcctttgaatctctccttagcctctccctgcagttccaagaaagcagtgactttggggtttcatattcaaatgccagagaactcactttccacccaaagcacacacttggttttttaaaaagaaaaaaatgaatacaaaatagtgacttttcctgtggaccatttcaatatgatttgaaccgtcaataccaaccccctaaccccagtaaaaaaaaaaaaagcccatgatccaggcttaaacattcatggaaaagggaatgaaaataagaataagaatcacattttatgatcaatttgaattttcgtcaagaaggattttcatcgctgttacttattcttagtacagtcacagtcctgctaaaatgtattatcattgcagcatgtagagataactattggaaatcaagttcgacagactgtagatcaaattcaaaatccataaaacccaaaggaactggataactttgtaatgatatttaacattccacgaaatgagaaaaaaaattattgctttttgaaaggtcaagggaagcagtagcattgaaacaatatgaatgttcccctatatcagctgtgtttacaagttactgggcgtaggatttgtctagtctagctggcggacgccgccttgtaacagtggaatcatcttacatttgccctgctcttttaatgtttcaaaggcgtttgcatccattacttcatttcatcttctcagcaccctctgtccctttccaagaacggttattattctcctcattttatagacccagagtggttcagaccctgtcgctcagctcagcaaaccctgcagtgccagcctttttccattataccaggtccctactggcaatatattcagaatgataccacctttgctattctgttatgtatatatgagttgcacacacctttccccaaggtgcctgctacttttatctttcctccaggaccccctccccaagtggacacactgtttgcctgtctgcccttttctacattttgagattctctccctctctttttctctctccgttgtctctctttccctattcagctccctccctgccatccttccttatctatcctctttcatctcctcataaacactcctttgcagcagtggtttacaaatttcacttgataatttacatggaaatatgaaagggttctttctccaagtgtcttgcaattgacttggaatcagcgagttaaacaaaagggactgagcctctaactctgggaatttcaaggctccagttacagcaaatgacatgctgtcccctccacctatgtctatgcaggtctgccttgggaaccacctcac

SEQ ID NO: 26146 - DNA, 2300 bp, Homo sapien
aatgagataaccagtgttcctatgttgatgttacttaattgaaagcaggatacctaaaatcaaaaaagaaacagaagatttattgcaactaaatatatatttgttatttggctttggaatattgaaataaatattcaaagccatttttataatttttttaaaccatacctataagcttttcatttttcctagtgtgatatttgatttttaaaatttttgcctaaagtatttctttttttttgttagaaagtatttgaaaaacagaaaggttgtgatagttatgatctgtgcatttctctctgtattttcacaaataattcccatcaaatgaacatttaaaaaactttttattatggaacattttgaatatacataaaagtacagtgaatatcacagtgaaccttcatatatccatcattacactgtaacaaactcatggcagtttcgtttcatccattactcctccccatcagtgacctcaactggattgttttgaaacaaatccatatttgaagcaaaaatagatatattatttctggttggtcagttatgaactgaagatctataagtggccccaccccagttgttactatgtcatagattatgatttggcttagtgtacgtgcagtgacccatgtgtgcatattgatcatcaatccatcgtggctttcttagctatcttggctttcttttgttagcagagcttacctgcaactgtagtttcagaaaatagaacaggcagctcttaccatcactatactatattggcagtgaaggggaccacagtactgctggttgacatatgaagtggtgaagagcaagagaggaaaggccccagatgctggcttacactggggagtccacatggggcattggtgttgctctgaaggagagaggttctgcagctatctaagcttagccaagaagagtggaactcattttggctatttgcagacatggacatggttgcagggttcacgatcctttcagtaggatgttgtgagaatttcttatttaaagtttaaaaaggatttttattctgaagtgaagcaaacacaagctaatggaggatttctcatttggggagagggactcctctggactgtggtctccttgaatttatgcattggcggtcatttcaaatctttggagctcttttgggtcagaatcctggtcattgtttttgaatctatatatcattatccccattggaagttaaattacagacggaaccaaacatatatcatggtcagagacagaattacattcttgtgaacattatcccatgggtcattttaattagatttgaccggaaacagtttatagtagtggatgattaacttatattaaactaaaccatttactttcttattttggcttgaatatgtaaagttaaaataatttatattaacaagtgattttgaaaagtcatatttagtatttgttagtgactagtaggtttctgtgtcaattgtttattgaaagtaatacatgtaaaataaaatcagaggtatcctgtttttatttaaatttttatgtagtttttttgtaatctaaaagtcttagctaagaaaaatagagcccataaatatagtttattggcttggacaataaaaaatcaatagaaagaggtagcagctcatagttctcttaccttctgctacctacacagcccatcacaaccttttcacatcattttcccactggaaaagcagaaacaagagtggagttttatatatttccttctttgtttatacatttactttatggaattaagcaaaatgtttgaaaatatgtcattgggatagatgtgatgtaaaaactttaattctaattttgagcaattttcatttacttttatccattttccatttgattttatccattttgttctttaaaaagcaaatcattggaattaaaatctgtaaaatgttttatgtagatagaaatgaagaaatatttcaagtctaatttaaagatttccatttgtttaatattataaatgaaacacaacatggtaagattataggctggtcttaaaaattcacatttgctatttattgttactagtaggtagtttttcttctattttttcttcacaggaaaagacaatttctctctgattcagaatcctgaaaatgtgatctcccttaaaaaggtaggtgtatgtgctttttaatttgtgactaaaaaaattttatcttgaataaattacaatccagatgatttaatcgagaagcaattttttatgccactaacacgtgccattgtgaattgaattaaaacctcagattcatctt

SEQ ID NO: 26147 - DNA, 2300 bp, Homo sapien
ggctaaaaaacggtgaaaccccttctctactaaaaatacaaaaaattagccgggcgtggtggcaggccaggcgcctgtagtcccagctactcgggaggctgaggcaggagaatggtgtgaacccgggaggcggagcttgcagtgagtggagattgcgccactgcactccagcctgggcgacagagcaagactccatctcaaaaaaaaaaaaaaaaaaaaaaagaacctttttttaatttccttacttcaacccaaatggatgcatctgtaaaattgtatctctcataaatcattctaataatatttgcggtgattataaaaggaaaatacatggggcttgctaattatgagaagacatttgtttgtttgcttgcttaacagttacttcatgcattgtcctaatgcttctttgcagaaatcttttagtagttagtgcctctctttttgtgcagtaagcaatggatcagactgtaagcttttactttactaagtgaggcgatggcaagattttaagaccaaattaggaagtttggtttttctctggaaactatttcatttttagtccaattttagtctagaaaaatagggttacaaacaaagcctaataattcattgcttaacagaagttaaatgaaaaactgcagtttgcatcaacttcctggtttttcgcaaaatcatcccgcatattctttttagctttgtgtggaactggggcttatcacactttaatgtggatatgagtcacctggagttggtgttaaaatgtagattctgcacgtccaacaagcatccagatgatgcagatgctgctggtctgtgggcacctttgaggagcaaggtttctgtgttggttaattttatacgtcaacctgactcggctaagggttgctcgatagttggtaaaacattatttctggctgtgtctgtaaggatgtttctagaagagattagcatttgaattggtagacagagtagaaaacagtgtcttcaccagtgcaggtgggtatcatcagcagttcattgagggggtgaatagaagacaagtgcagaaatggtgaattcttctctttctgcttgagcttagacatccatcatctcctgctctgcccttggacatcggtgctcctggttcttgggctttttgactcaggctgggatcccatcaatcctcctgacctcctatctcaggcctttggactcttattgaattacaccaccaactttcccggctctccaacagattgtgggacttcttggcctccctaactgcatgagccaattcttagaataaatctcagtttatatatatctctctatatcctactggttctgtttctctagagaaccctgactaatacagtctcagacaactggcttcaggattcatcttgcctaactgtgggggcaaaaccatgcctggggaggggtggactgctttgaaaaacaaagaggttttggagataaagttagcctgaaaatttttctgattcagacaaccttgcatcagaaaaattttgatgagccttgcttaggagtgcaaaaagcagacgttacagttttaagcagaaagggctcttgatgttaagtaaaggactggtagagattacagaagaatttcaggtactgtagtaattacagaggcagaactcttttctccttagcaacagtctatgtgtggggagcagaagcttgttatagcagaggtcactacagagaaatctgtgtgtgcaggcagagtcaaaagcaattgaaacaagtttgcactaatgactttggggaccagagtgccctgacaatggaataggagggccatattatcaggggtgacctctaatttgcaattaaaatgacttctgggcatgtaaatggacaactgggtgggaggattgtgtaatgtgggtggcactcagtgaatttctttatcttagactttgatgaaggaaagttattcccctgctccttgcaagctcgatagtgacagatggttgttgcttccttgctggtttctgttcctagaggaataaagtaggaattggtgttcagaattcaggctatggaaagatactgatgtttgggtggacaatttaggtataagaggacattggctgctgttactcaaccaaggcaaagaagggttgtggaaagtcatgaagattaggggtagccaaaactactcatgtgatccttgagcaggttattaacctcttctagcatcaggttagtctgctttcatgagggtaataaggcctatctttggtgggttggagattttatttatgaggggcctagcagaatattta

SEQ ID NO: 26148 - DNA, 2300 bp, Homo sapien
caatttctgtgtaggaaacagaagctattggtacccaggttctgtttcaccagaaaggctcagtctccacacccgctgatttcatgcccacgttgatcagttttcatctcgttatgccaggcatgtccaaacctaacagaggcttcagttagctgggatacccctgagattgctatgcaaagattgttctcctgagagcaaatgccagatcctgccagagtcttactagctaggttaacacaaactttttatgaaataatagtcaccctgaacagctactttcccctaaattaaaaaggctacaaaatttttgtcttaccccaaatttaatgtataaaaattacctgaactctagagatgaaaaatgtaaacatagcaccctctatactaggaatcttaaccatttattgatgtcacacacatattctctcccatatttgtagatttgttaaagagaattcacaggcctccttatatttgaatacaactgtctcaagaactcttaaaaatgtacttcttgaagtattcttggacctggcatgaaacaataaagctgtgaatgaacacataattcatttacctacagctacttcttagtctattttgggaagtcctactctgccactgaagtggtgctttctcccactcaggaagaggaactgtcagcactctcattcagaacttgccttctacttagcacggatggcggaaagtacaaaaacgctgggcatgagatgctgttaaaaatccttctgtgctcacaggggaggcattccaaagccagccctcatggatagaagtaaaactccatcctcaagtcaagctggacttctgaatgtcgagttaaaatgaaattatcatggtaacacattacctgggcttccaatcagggagcgattgaaggctccttggtggctaaggtatggctcagagccaagtgtggtgttccagggtaccaagtcctctgctcaatagctttcattctgagtggcaccaacacatttataatggagagtctctcctaacttttatcatcaccaggaagtgtgttcatcaaggtgttatctattctactagccttgatgctcactgttctagttaaaaggctatccaaaaatactatgtcttggggtactactgagatttgttgaaacattggataattgttccccttccccctcacccaacccatcatgttgacagtaaagtcccttatccttgaggcagctgacatttcagaggggctcaagggtgcttagcttgaaaacaagaacaaaatatgtctgatcacgcccgtgtcaactgtggttaagtgtgggaaccaggataaggacaactgaaggcatggattgagttgtaaggggccgcctccttttccctaggcccagttattgtcaacatgagggtttgttctagagctactgtcttatctgccacattcctttttcataagaaggcaatttggtagcatcagaatttatcattgtttttgtccaaaaatgtgtgtcccaggccaggcgctgtggctcatgcctgtaatcctagcactttgggaggccgaggtgggtggatcacctgaggtcaggagtttgagaccagcctcaccaatatgatgaaaccccgtctctactaaaaatacaaaaaattagccaggtgtggtggcgtgcacctgtagtcccagctacttgggaggctgaggcgggagaattgcttgaacctgggatgcagaggttgcagtgagctgagatagcgccactgcactccagcctaggtgacagagtgagactctgtctcaaaaaataaaaaataaaaaataaatgtgtgtccctccagtgccgcttgccccttgttctcccaagcaccagggggacccctggtcttagattcaagttgcatcactagactaaccagctctgggaaccagagggacactggaggaactagtttgggaaatgaaaaacatctgcaatgagaggtaattttattctcctcttccttttaccctagtctcactctccatagtaggacctggatctttgcatcagagaaaacataatgaacaataactggaatgtgtgtttctttcttttctgccctagtattactagaacatttgcatcgggaaaaacagaaaaggtgatctttcaagcactcaaggagttaggtcttcccagtggaaaggtatgcattaacttaataatgtatttctaaaaccattttgtttatttatcttctcatatgtaatgagctagattatttatattaaactgatctaaattagatttggaattatatgtcag

SEQ ID NO: 26149 - DNA, 2300 bp, Homo sapien
tttattattaaggcagataatcatgaattaattcagttgatcttttaacaacttatatagtgaagatatctgcaataacatactgcaagagaaattgtcaaaatcttttataggtgtctctcctacttgtgtaatgataaatatcttttggttttcaaagcatcaagcatactggaagtagtaagtattcggttaatgtttatggatctatttgtactttgtttatttatactcattggcccatttggtttaactagccatcccctgagttattttcccaatttttcagatgagaacaaataaaatcttcagaaggtcacaaaaataataagtagtgaatcctggactgaaatctactcatttctgtcctcataaaatactggagagagagagagagagagagaataaatactttattacatgtctcattgttttccagttttacagtactacaggaaaataagtgtttaataataattgctaacatgaaaaaatgtaacacatacaaatgttatctcttccactttcaactgatgagaactgacgttttatcaatcttctgtataaaatcatttctgttaagttctgtaaaatttgcatcaattcttctatatataatcatctttgtaaagttcttgagaaatgtttggatgaaatactgaactacaaacataaaagtcaagatgtcaaaatataatgtcaattttaatattactttatactttgaattgctagtgatctaatgattgatataggaatatgtttgaaagccaaaaacattatatagatactttgtggcagatatgtcagaatgtgattatacttaaaacagcattctataaatttgaagaatgtgaattaatgatagagatttcagatttcagattattatttgatattgaatatagatttttatggaagtcaaaatatggagtaaaaatattatataaggagaaatgaagataatctcacagagttaaagcatgtgatttttgtattttaattctaactgaccatgtgacatttgggaaggtcatttaatttatttgagcctcagttttggggtatgtaaaaccacagtaactcatatctttccttgcctaccctctaagattggggagaatcaaattagataatgcaggtgaaatactttgcaattttccctttaatatgacattgttttataacattatattactgatgcaacatttatttgcattatgaaatatcttctaaggaataaaatatttggacatcactacaattgatgaggactgcatgtgtatttttgaaagctgtattctgatttacagagcaaaaataaaaaataagcaagctaccaaatatgtaaatacaggaattagcccagtagtatttgttcttctgttccactacaggctttagagtaatatcagtgtgtgtttttcttacataactatgtgacattacttagggcataattctaaaatttctgtcctaggagacactagataactctcaaaaacttctgatttgcttgcatccctttttggcagagtggtcacagtataatgcgggagggtaggtgaccccagagttcagagtcctcatgcacccgggagcaaaattcacaggaaaataagcccacatggagctactgcattgtctgatggcctcgttcgaggaggcgtcaatttaactttaaacccatgagctcattgagagcaggggagagaaggggatgtctccaaattcaggaaactgttgccatagcattttcccttctctattcctgcatagccctcctcccccgaatcagcaacaatttttgctccaccgttttctttcgggaaccagatgcgttttcagaagacagtactccagtgataaggtatctacaccacttaataactgtacctggtaaggagatttaataaggctgagggtggtattaagtttctcagaacagactcatctttgcggatgcagttgcagaacaggaaacagacccagggagaagtttagtccccccagatctcattggccctccgcacaagccaagccacagccactcctgccacacaatcggattgctttcagcactcgcagccgtggaccgccgtgcggtcctttcctccgcagtgagccgatttgctctgccagcagctgtcggtgccgcgctcgacaccgagtcctagctaggcgctcacagaatacgcgctccctccctcccccttctctgtcccccgcctctcgctcaccccggcccactccagcggcgactttgagggattccctctctggcggcctctgcagcagca

SEQ ID NO: 26150 - DNA, 2300 bp, Homo sapien
aataaaaatcctttcccaactcaggtgcctgggtgatgaagggcctcattatgagtgaaatagacaacttataaagaataaaataaatttaaatgtggtctttgacggtgtctgcagataggaatattgttatttgggggatgaacgctcgttttgccgaggaggatctggctgagttgtcggagggatgggccagaaacgctagtaaattatacatggtgcagaatccactgtcaggtagctgcagtcgatgactgaatatcccgtgcgagccatgctgccatgcgcaaaaagacactgaaggccatcacatcctgactgaaaaggaaagtcgcactgcccccttgcagttttagcgcataagaaacaaaaccaggatgcggaagaaaattaaaatgcagctttgcccttctccgtggtccttcaaaggccaaatcataagaggtcgttttgaagcaccagggaacgacaggccttcaagggacttcttatctaggatcaggccacgggtgacgtttgggtccccacgcctgcggttcctggcggatctacaaggcctgagacccagaagactcatgggcgctcccgcctcttccgccctaaagagcaagccgagggaagacttggcctgggacctcaaagcgtgggacggtttccaaaaccttgaggaattctctctccaagcctgttctgcgagttcccaggctccctccccagccatgccagcctccactcaccactgactgcgtctttgaagtgggttttctccgaggagtcgtagacaaactgcactttgctcagcctccaagtcgcctcaggtcccttggacatgttgtggctttcctgttgagccggggaggtgcgcttcaatcgtccccgcagcgtctgggttcttaaacctaggggccgccacttcccacacccacgcggagcctgcggcccctctgcccgctgggctcggagttacctttacaaagagcattttgagtgcatatgcgcgatccacccagaacacttgcagctccgactggctgtggccacagcggcccttcacctcagctccccgggtcaatgcgatatcggcctgttctgtgatcagctgggaacacagacgccccgcgccccctcagctcgcccggccccggggcgggggctgtaaagggcggcgcgtccaaactctgggttgcacgcttgggcgctcctttgcgcgcgcgcatcccaggttccgggaacatgcggttagatgctctacgtgcagccccgatagggaagcggagagaagggggtttactttcaaagcaggcaggggaacagaaggcattacaagctggaatccccatgcagcattcgggagcagcctgccggggtgtgggaaagaaggcgggcaacccaggtcttcgaagagccttgaggaagggtgcccttcgccctggagccctaggagcaagctgaggggggggaaagattccttacatctacgtagttgctggcccacacatcataaggtacaataaatttggctgcaaactctgccatgagacacgtcgtcccattttcccgcaccacaaatatatctttttcagggttagtggaaaggcctgagagattttccacttcttgttctgccatgatttgagccattgtatctgcggaacaaacaaaacaattccatcagttcagggctcagcccacgcgtctcgggcgctagggtggggagacagtgctctgcaggctttggagtgacaaagttctctgccagcagctgtgcgctctacgagccgtttctctaacccgggtctaacaagcctcattccttcgctgttaatttataatgaaaatacagttaaaaaaattaaaaatcctgactttgtttgtaatatagctggctgttttctacatcttgggattttaaagtaaatatttcttgccaatgctctgacctcacgaagctggcctgtctaggctctgtctggaatatgccacagaggtgtatggctctcaggggaattccctgccaccggcgaggaaggccctccctcctcccctaaaagaaaaaaagaaaaaacaccgcaaaacattaagggccatattttttatctcaagctaattgactttactttgccggctctgttctctgcaaagagtgcccgtcctctctcccagtcgccaaatcgctactcacggaacaacatcaggagaactcgaagtctgtcgatgctggggacccctcttccttggagatccatactcgcagtgccccgaatgaggccggctgtgctgctgcagaggccgccagagag

SEQ ID NO: 26151 - DNA, 2300 bp, Homo sapien
cacttctctttctgtgattattcaagtggagatggtacacttgcatgagctttgggacatgttgtacttctttaggcaaagccagcttgtcttccagagagatcttcttggatggccttctacaccctgttgaattcatcatagccctggtttgattttgaagagtgagaagtttgacttctcatcatgaggatttatctctcttagtttgagtttcctcaaaagcagatctcctgaaaaccttcaaggagagacaatgcctcagtttcccatggaggggtgaggaagttggaatatttttcaaccaacatgtgcccttcattggttgagggtcactcctggagtgttaactccctgacacatccagccttccctgaacattctgcctgactattgggccaagaagaatagggatgccttgaaataggaggaaagtctctgctggaggacccaggggatatgcatggcactgacaacatctacttcattatttcgcaaatgtaaattcacattaaccacatccaccaaacacagggagtaatgcatgaaaagcaatcatgctgatctattaatattctatgagaaatacaaccaccagaaattccaactatgtgtgctttgacagtggcagcttctttatggtcataaccaaatgggaagccagattatcttcacaaggagactggggcgtttagagccggtgacatgagcttcctggctggtgtcattgacctctgaccaatggcatacatcccctagcggggatattccttcacagggatggtctagagactcctgcaaaaccctctttcttggatttgactctgttttttctttttatagacaccttgctgatcatccttctcctaatagtgcactttcttatctgtaagaattatatttataatcatccaattatacctcccccagctcatcttattttagttctgagggtcaccactaatctcttggtcatagctccaggtggctgctctcatccattacctttggattctttatcatttcttcactagaggttaaatttaaccttagttttcggaaatttgttgctgttaactcccatagctgcctgcagacattttcttgataaaataagaaagtgagtacaagaagtgggtaataatttatttttgttttttattgttttgagatagggtctcactatgtcacccaggctggaatgcagtggtgcgatctctgttcactgtatcttcggcctctcgggttcaagtaatcctcccacctcagcctcctgagtagctgggaccatgggcatgtaccagcacacctggctaatttttgtattttttgtggagatagagttttgccatgttgggcaggctggtctcaaactcctgctcaagtgatccgccctcccccggactcccaaagtgttgatattacaggcatgagccactgttccttgatggcaatagtttattttaaaaatatttgaattcattaggccaagtgtggtggctcatgcctgtaataccagcactttgagaggctgatacaggaggattacttgaggccaggagttcaagaccagcctggacaaaagagtgaaacgcccatttctacaaaaaaaaaaaaaaaaaattaaaaaattgactgaatgtggtggcacacacctgtagtcccagctccttgggaggctgagtgggagggtcccttgagcccaggagtttgaggctgcagtgagcagtgattacaccagtgcattctagcctgggtgacagagcaagaccctatctcagaaaaaaaaaaaaatttttttaaattatagatctgctctttcttgacactccgctatagtagaaagaaaactggagtatgttaggttgaatgacatgaagttggcaagattcaaccatttttgacatataataggtcaatttcatatagttcagcctacataaagacaataatgttctctatcaaaaagtgagtcaaaatatcttatctctgttagggctatgtggcttttaagcagatcctcccacctctttgggtcttagttactcgtctgtaaaatgggtttgactagataaattataggagctttcccacaagttttatgaagattggtcattgctatggctgctataagaagtcttgtttcaaggatgttttttcttgttgtgacatcttgctttcttatattcatgttctcttacgtttatacccaggagtctcctctgtccttttctaatctttcttgctggacagttttttccttaagacagctctatctgagttgtttgtccctatggcag

SEQ ID NO: 26152 - DNA, 2300 bp, Homo sapien
gttacctgtaagaattgccagagctgcctgtcttaagttcgtgcccctcctaggaacagcccatgctcaatgattgatgtggatgtaaaggactgactatctcagaccaactcatggtcattctgaaggatcaccctagctagtgagctccataaggggctgacaaaggctgcaattggcttgcatcacagcttagcttctacctctgcctgctcctgcttcctgtatccctcccacccacagatgttggtccttagtcaaatactgcaggctaaaccctcaagaaatggcattacatataaagaaaacccttaggaattcatgcaatgcagtatttacagaaatagcattattattcatctataatttttaccttgcacgcttccaaaataaatttgaggcagctaacaatcatcatcatatttaactagcagaaacaaatgtacaaacacaaactttatgtataacaggaaggctattttaagtgattaaagttcaatatttcaaataaaaattttaactgatactaaccaatgacaaataaacgatatctcagtaaaaatatgttctggcttttgcatctatgtgagcacacatataagaaagtcaaaagtagaaaatatttatgcatatagttgtgggggtgacgatggtggcagtgggtaggttgttagggctgtgtgcagctttgagaaggaagagatgagtatgatacacaaggacatgggactactgagggagaaaagtaatcatccatttatcctgtggtttctgttttgatatggccagtacaatattaaaggtactaagtgaatggaaaacaagcaaggggaaatgataactactatactattagctagaaaactgtctaaggtcattgagtataataaggaacggagagatacaaatccttattttgtaacctgctatctagttatgggatcagattccatatccactactagctcataagggtactcttgtggcagctgaagacagacaagagcgtggcttcttcatttccaagggtgaaaactcaggactacttcgtgaatgtctttcattcactagagtcttgataatgctggagacttcaagagtctgggagggcagtaggcaactgggaagtttaagttgaaccacaaatatcgttgcaaacttcagcccaaacatcactgaacacaaaggcctgacatctcttggtacaaaaatgcgctctatgtttgtcataatctgtcggctttcttaactaggcaagcccaagcttgctattagatgtacaataaacactttgatgcccagtctgagtttttgtcccagctcaggaaaggcaaggggacagccaaggcagactggttcagacttgaccggggcagctcatccagcaactggcttactagccagctagcaaagtgagcatgaaaaggtccaggaatccttcttcccctgggccttaaattcgaaatcagacagcagccaaggagaagctgggtggtcacagcctagccccacaaacactccttccaggtaaggctcagcaaccccaggctggaggagtctctgtggacaccagagaccattgctaggctggcggattgaaggatggccactgagaggtcacagataaggggttctctagatgtttgctactcggagtggtgggagggccagcagcagcagcatcacctgcgaggttgttaggcttgcagaatctcaggacccagccaattgaatctgaatctgcattttaattcacaggcacatgaaagtttgagaatcaccggtccaggtggtggcaaagaggccagcccactgttctgcttctcagcccctcctcctccccacctctgctagcctcttaagcaaaactcaatcctgcaatggtcctgaacaacatttctgcaaatcccgagtgttgggggagagggcgtgcaggagctgcccccgccggggacgactgggagtaaacgtgattggattggtcgcctgctccagctcccggctcctggctcctgcaccctgagtgtagacacgccccccgaccctccccctcacctccacccccggccgccgctacagcctgcctcccgccggctgccacgaaaacccggagcagctgcgtacgctcatggacagtcctccgaggggcgaagccgggcagctgggcatgctcagtagctgggggaggtttgggtggagagtagaaagctgtggctctgcctctcaccccctcccgctggcccccgccccccttgcccctacccagccagtagtagttccccagcgtgcgcccggggaga

SEQ ID NO: 26153 - DNA, 2300 bp, Homo sapien
aatatctctaaggaatcaaacttacagattaataattagtaatcaggtcacgtaaagtaaattataaaagagcattgataccaagattggcagaaagttttttgtgtgacaaaaccaagttttggctaagatacacactgctgatgggagtctaaattgctgtatatgtcgggaaaacaagttgtctttatcttgatgttataaataacctatgacccagaaatttaactcctagacatatactctagtgaaactcttgaacgtgtgcgtccaaagacatttataaacatgatcttagtagtattgcttttagtagcaaattctggaaacatcccaaatgtctatcaatagtggaattgatttgaaaggggtgtggaatggtaatataatggaatagcctacagctgtttagataaaggaactccaattaaacataccaacaaagatacatttcaaaaacaagacgttgaaaggaaaaaagtcatcaaaacaatacacaacattctaccacatttttataaattctcaaaatatgcaatattaaacatgcattatttagggaggcattcaatgtagcaatgcatttttaagaggctgggatgataaatgtaaaattcagaacaggtattatctctgggaacaggaagaggaggatgcagtgttgggaagaaatacatataagtacagcagtagaggcagacttttttttccttttcctttttcctttatttttcctagctttctttttctttagctatggtatttctttagctatggtatggtatggtatgtactttccatatatcatacagtatattttggtgtgcatgaaatagtccttaataacatttttattattttttatttgacgtttaagttcaggggtacatgtgcagatttgttatataggtaaacttgtgtcatgtggttttgttgcacaaattattttctcacccaggtattaagattagtacccattagttatttctcttgatcctctccctcctcccactctccaccttctaccctccaataggccccagtgtgtgctgttcccctctatgtgtccatgtgttctcatcacttagctctcactcataagtgagaacatgcagtattgggttttctgtttctgcgttagcttgccaaggataattgcctccagctccatattcctgcaaaagacataattttgttcctttatatggttgcatagtattccatggtgtatatgtaccgcattatctttagccagtctatcattgatgagcacttaggttgattccatgtcttcgctcttaacatttttaaacagtctctgagtagaatagggtaggctggtgtaaggaattactgtttttaattggaagcaattacatactgcattaaaaagcatatatatatagacacacatatatatgttttacattcacataatcaaaccaaagctttcagaattttccgccaaaaagcatgtgtggagggagagagaggggtgttatggtgcatttgtaggccctgaaataaagtgatctccatatttgcttccatttgtgtataaatattttttaagcatatatgcatcctagagtatggaaagaaaatttctgggaagatttgcaagaatctgtggcagttgagagtaggttcactttcgctttattgtgtaatttattgtatttttcatttaattgtactttgtaaactaaatatttattgtatattttacttcattttttaattgccatatgcagctttaattttataactaaattacgttctgacccagggcaggaggtgggagaagagaatgagagaagggcggaatcctcaagacagcagcattctgcgctccgccctggaacacccagcgcagctaccccatcccgcccaggccggccacctggcgtcgaagccaggcgcgaggggcggaggcggaggcgggggcgggggcggaggcggaggcggaggcggaggcggaggcggaggcggaggcggaggcggaggcgagcaccgccccaccgcgcacgctgcggttgccccggcagccgcgccctgcgtggcggaagctcacaatcagcccggtccctccggcttccaccccgccccctgcgctcacctgcccgcgcgctcgccttccggggacccggggcccatggacacatacacccagccctgctgtcccgcgcgccagctcaccagccctacccaagggacatcattcacgcctgggcgcctccgccgggctccgggagcccaaggtcgcggctgggccagcgctgagcgtcagaggacgagag

SEQ ID NO: 26154 - DNA, 2300 bp, Homo sapien
tgatcaaatgcttgtttctgaataagctccctgggcttagtctcttctgtacttaattgtaaagcatttgtgctggctggattcatttctcacatttcctcatgatggtcctctttcgccccctcgtccccctgctggagcaattggcaactccctgtaagcatgtgagagccacatccaagggcagaggagaggagctcgtggagtcctcctcctcctcttcctgggccctcaactccctgagttctgcagcaccagccagctggaagttgaacaactttaccacagaggagcataagtctcacaaggaatgaatagatctttatttactaatcataaaggaggagacagaaagctccaagtcaaaacgacaggaaaactgcctttagctctttaaagtgggatgttggagtcttttatacacatggaagtttctaactaggattaagctggaagctgcagagggtaagctaaaacaggatgaaaatcctttggtccttagtgctgggtgaacatagaagaagaggcttgagaggtgggatcaaaaccccccagacaccctgagtaagcaaaataaatagctaagtaaaaacagcatatcagaattagtatggaattgcactatggaattactacgctatggaattacactatagagtcactgttcttaaaactatccaatatagaaattttataacctttattgtccccatagtcttttttagtttttctactactagtaaaattatcagccttagtataaaaatgtgtgtgtgtgtgtgtgtgtttgtgtagtaaaatagatttatttttctttttttactttttatttttttgatagtaagtatatatatttgtggagtatgttaaatgttttgatataggaataccatgcttaataatcacatcctctagaatggggtatccatcccctcaagcatttattctttgtgttacaaataatccaattacgctcttttagctatttaaaaacatacaattgttattgattgtagtcaccctgttgtgctatcaaatagtaggtgttattcattctttctatttttttacccatcgtatacaattttaatttttggcaatactaaggaaagtattaatcttgaaaaacatggtctgactgcttcttcaaagtcttacttatacatatacttattatagacaacacagcctttttggtagcactaaatggattccctaacatgttcaaaaaagtttatttctttggtgaatatttataaatgatgttggaatcatcattttgttaaataagggaccaaaaaggaaaatgaattttaatgtctaacttgcacataaatataatgctgaactcctcagatttaattacaattactttttcctctgtgaaggttgttcatatggccataccacaaaacagcagattagtataaattacattatttaatgaagaatacggaaaaaatatacttaaaattatacacagatttacagtttaaatcattcaaaaggaagtgggtattctgcatcttttcaggttcagatctgagttcataaggtcctaggtaagctgtttgaatccagcttctttccaaatttaaatgtatccttgctcttttcctgttggcctgaagtcccctgagcaagtgtaccaatatggtgtgtgtttcaaatatctctagggataaatgttctaatcctattgtaaattgtaaacgtatcttcttcagaattcaccaaagtgatgctcacagaaaaaaaaaatcacagctcaattttgtaattataacagcaaaatgtgcacatctctatatacatataatttggggacacattttttactaatcacgagaaattaagaaaacagttggatgagtgtcacttatagccatgcaaatgccttggcaccattcataattaatgatgctttatgttttaggatgtgacctgaaatggaagaatttagatcataaaacgcccagggctgtggctaaggaaggcggcttcaaagcagcaagcaaagaaatacgccgagcagagagaatcgctaataaactagccaggccaggagccaaaaatccaaatccactgtgggcccttagactgcacgattggtccgtagaacgtgaggctttcctccgggaagcctttgcggttttagacaggggtgatggaagcatcagcaagaacgacttcgtgatggtgttggaggaaaggcaggattatgcaagctcagaacagctggctgccatcgctcaccttcatgagaaaacccggggaggaggggtcaatattaatgaatt

SEQ ID NO: 26155 - DNA, 2300 bp, Homo sapien
aacagcatatcagaattagtatggaattgcactatggaattactacgctatggaattacactatagagtcactgttcttaaaactatccaatatagaaattttataacctttattgtccccatagtcttttttagtttttctactactagtaaaattatcagccttagtataaaaatgtgtgtgtgtgtgtgtgtgtttgtgtagtaaaatagatttatttttctttttttactttttatttttttgatagtaagtatatatatttgtggagtatgttaaatgttttgatataggaataccatgcttaataatcacatcctctagaatggggtatccatcccctcaagcatttattctttgtgttacaaataatccaattacgctcttttagctatttaaaaacatacaattgttattgattgtagtcaccctgttgtgctatcaaatagtaggtgttattcattctttctatttttttacccatcgtatacaattttaatttttggcaatactaaggaaagtattaatcttgaaaaacatggtctgactgcttcttcaaagtcttacttatacatatacttattatagacaacacagcctttttggtagcactaaatggattccctaacatgttcaaaaaagtttatttctttggtgaatatttataaatgatgttggaatcatcattttgttaaataagggaccaaaaaggaaaatgaattttaatgtctaacttgcacataaatataatgctgaactcctcagatttaattacaattactttttcctctgtgaaggttgttcatatggccataccacaaaacagcagattagtataaattacattatttaatgaagaatacggaaaaaatatacttaaaattatacacagatttacagtttaaatcattcaaaaggaagtgggtattctgcatcttttcaggttcagatctgagttcataaggtcctaggtaagctgtttgaatccagcttctttccaaatttaaatgtatccttgctcttttcctgttggcctgaagtcccctgagcaagtgtaccaatatggtgtgtgtttcaaatatctctagggataaatgttctaatcctattgtaaattgtaaacgtatcttcttcagaattcaccaaagtgatgctcacagaaaaaaaaaatcacagctcaattttgtaattataacagcaaaatgtgcacatctctatatacatataatttggggacacattttttactaatcacgagaaattaagaaaacagttggatgagtgtcacttatagccatgcaaatgccttggcaccattcataattaatgatgctttatgttttaggatgtgacctgaaatggaagaatttagatcataaaacgcccagggctgtggctaaggaaggcggcttcaaagcagcaagcaaagaaatacgccgagcagagagaatcgctaataaactagccaggccaggagccaaaaatccaaatccactgtgggcccttagactgcacgattggtccgtagaacgtgaggctttcctccgggaagcctttgcggttttagacaggggtgatggaagcatcagcaagaacgacttcgtgatggtgttggaggaaaggcaggattatgcaagctcagaacagctggctgccatcgctcaccttcatgagaaaacccggggaggaggggtcaatattaatgaattctttaaaggaaccagatatttaaacaagtcttttgtcttaggatcgtatggacctaagaaaaaggaaaaagggatgggcaaaaaaggaaagaaagggaaatttgtcttaccccttccaatctgtgtcattcctgagtacgcgtttccacgccggcaggatggtgggccaccgtattacatgattgagacctacaagaatgtcactgatagcagccggtttaatagagatcatcccccagaacatcccattcaggatgactctgtttggtacattgatgattcagagaaggtattttcaaacattaatattatcaccaaagcaggggatctggcttctctgaaaaaggcctttgaatcaggaatacctgtggatatgaaggataattattacaaaactccgctaatgacggcgtgtgcaagtggaaacatagatgtggtcaagtttcttcttgaaaaagggtacgcgtctccgtcgggtgtggcctaaattttcacgagtcttcacatttcaaggaagtgaaaagatgaccgaattttagtaatatagaaaagtgctactttattaaagtctataataaggctttaatata

SEQ ID NO: 26156 - DNA, 2300 bp, Homo sapien
atttttttttctccctctgcaggtttttttttctcttcaaacttccgcatgctgcctttttttaaagtgtcacactttggaaaaaattctgactacaaaggattttgcagtacattgcattcaaacccctttccccctattccaacttgctttataatgaaagtaagagccatactcaagagacttttattggcaattaagtatctaaggactttgcagattttcttctttattgtatggcaatcttaaatgtttaatgaatatttaagtaaacaaatttcagcaacatgccttttttaggaatttggctttaattaacatccaaacactgttaattattatggcaaaaacatcaatacgtcaaaaaaaagccttcaggccagggaatctttaagaaacaattatgtctactaatttcgattaaaggtatcctttattaaattcttaacaacccgtctctttctaaacgcagcgccttcacaactcttcttcccttccccctaccccgcttccctccctccgcaatggagcgcaatcaaaggccgtattattgcctaagcttggctctcaggccagctagggatgtgtgtgtgtgtgtgtgtgtgtgtgtgtgtgtgtgtgtggtggggcgggggtggggggcgagggtgcaaggggagaggttgtacgccgcttttccgaacccagctctaaatggtttctcctaagcgagacaaggattttccatagcctaaaagaggccatcaagttttaacattgcgaggcacgacttctaatcgcatccttcccggaaaagtacaaacagttcctcagacgaggtcccccacctcccacgcgctccccagccctccctccctgcggagagccccgcgacagcctccccaacacctgtgaatcatccgggaggctgccaccgccgagcgatccgcgcaccacccccttcccgggcccgggcacggccagggaggacagttagggttgttgctttataattatcacttttaatctctaatacgaccagcacaagtagcctttgtctccccgccctgatttgagcatccgagggccccccgaggcagcctgcacgggtaccccggggtttgcgcactgagtgaacccccagattcggccgtgtcccagccgtccttgctctgaatcccccacctcctcccggccgtttggacggttccctcggggcgtctgtgcctccgtggggtacccctaagacacccagcatgaaaccccagcaccgactgcaaattccaccgaaagcagagtcatccgtttttgccctcggcaaacaactcaacttcaagcctcgagtccttgcaaacccacgctggctgggctaactccgcttcccttctccttcccccgactcctgcaacagctcagagagcctggctctgacgtagttcaaaataacgtgcgccagcctcgctgcccggctgaccacagcaacgagagccacaagccctcgacgctgcttcgataacatgaagcaatcactcataaaaatagcaacccacgtagcctggccatatatggagctggcgagggtggacggggatgcccctacggaccctcttcggagaaaacaaatcgccgctgaaatttcccccacccctcccatcactaccttttacccctcctctgccttcccctctccttagatgactcaaccacagattccactgaaagggggtgggggtgggggtgggggggaatatatacacatacacacaaattatacatatattatacatgtattataaaatatacacacacatacatatatacatacacacacatatacacatatgtacacacacacgcacacacaccaaagaacatcaggaatgcagttgcgggatgaacgcgtttgcccaagaccgagtgttaaaatggagtcataagagtcgccccgtgcgggtgtttatagaaggtgaaaacacgcaggtttgcaggccagcgcactgggaaccgagtcaagcgcgccgcagcccgggccccgcccccgcccccgccgtgccccgcccccacttcctcccgcccctcgctgggcggctattaaaagctgctgacgtcaaaacggacggccatctttgatgagggcagagctcacgttgcattgaagacgaaacctcggggaggtcaggcgctgtctttccttccctccctgctcggcggctccaccacagttgcaacctgcagaggcccggagaacacaaccctcccgagaagcccaggtaagaacccccctccccaggtcgtggctctggctcgggatggctgcatac

SEQ ID NO: 26157 - DNA, 2300 bp, Homo sapien
ttctgtaatttgaacactgaggtggtaatgcagtaaatgccgatgaacaaacaggcatcagagggtctgtgtgaatgactcctggctcatcctatgtccatctgctcctgcctcttctcaccgcattgccctggattttaaaaattctaacttaaaatgggaaatttctcgattttttttccctggaagcttgtcaatgatataaatgttaaattcatggttcaatgatatattttttaaatttctcagtaagctattctaaaattagctttctaattgtgcacattgcttcttcctctcagctctgtgccctttgccatcttcactgcggtcctctacttcccccgctcctccccagtcttccactagcaaacaaacccagcagtaattactaatgtccaagcacgtaattccggcagcattaggcttttcatttgacgcaactacgcagacagctgtctggacatgcagcatgaagttaaagcatttttaaagattcctgcccatattttctctcctccactactaaaacacagttgtttatttttgtctgcagattgcaaagttataaacttcttttatacgtttacatactcatatataaatgtccacccaaataattttacatccatgcaaaataacagatcaacatatacatacatggaaacacatggtcatctataaaaagaaaaaacactaggaaataattaaatagcagcgaatgaaattaccttctgtatatggacagggaattttagtgtctgtagcatacagatgataggaggtatgactatctaaacacaatccaagttctcatttggggtcttttaaggggatcatgatagcgtttctttaatgcattgtatagattattacatatgacgctgttactcttttttgctaatgactcaaatggcataattttgactctggtcatttttatgccagttttatctacatcaaacagagagaaatacccctgatgacttttgctctctcagatgctccaagcctcagagtagaaaatggttaaagtagttattaccacctcagcaaaatcccgcagtgccataagagaaattgcagtagacctttaggtcagagttaagttctagtttaacaccatggttctttacctgcattaccctgaaggacacacttggattctcctgaggaaggccagtcttaatattgtcaaaatctaaagctatcagcctgcgataaccagtgctgatagcaaatacttccagtaactctgaaaccgtggccaaagaggttaaatctattcagtacaggaccagtaaaatttctcagatatgtgtttttgtggatgaatgcttgtattcatgcctgattgcaaggatgggggaagaaggaaaaggaagagtgattcattcttaaagttgattctgcttagttcagctaatctcacatttttatcaaatggaaacatagagagagatgtatcatccctataaacagatagcattggcttcttcatatatacagtacttatgctcacccaagatctgtagacagatctactctgtgttaaaaaacaaaaccaaacaaaaaccttgataccctgctggaggataaatccatattttttaaaaaatgtatttattttctacgtaaaataagggtcagagggcaacacagaagatttccacaagtagactattttgttgaagctatgcaggaggtgaggaggggaacaggaaattgtctgcaaaggagtctctgtgaggaagatttatttctttcttgttttcttttaagctactatgactcctctattaagggtctccgtaagaccggggtctcagggagacaatttggtctccagccctggcacatccagccccggccaggcatttctgccgcaggcagatgaggcgctgcggccggaccgctgtccccggtgctgaaaggtcgagggcgcccgcgcgagccctcggtgttgctatccagggtgctgagcgcgggccgccgcagtccccgaagccagcccacccgcgccagccctccgcagagccctcccacccggcacgacccgcccgcctcccgccagcctgcagttgacgtggagcaggcggcataaatcaagtccgcggggcatggaggctgctgtcgctgcagcagctcagcttgcccggggcgggaactccccctttctcctttcgcctccccagcacccacaccctgtctcccccttaattcttccctggataatagcaccctaacgacaacagtcataataatagggttagaacgacaggggaggaaaactcaacagc

SEQ ID NO: 26158 - DNA, 2300 bp, Homo sapien
ttgtgaatatgttgggaaaacagaaactcctattccacagttaggcactgtaacctgatacaaatgtcttaaagaataatttgaaaatatcttcacattttaaagggcactcatctttgaccaagacactccactcctagaattttacagtgcagatatacatttacagttatatgaagtaaaatgcatgtggcttactcataatagtgtaagactagaaacaacttaagtatctgtcggtggggagaccaacccaattaattgtggtacggccataaaagaattgttctgccaccaatataatacatgaggtagatctttatttactgacttctgtggagttggggtgggagcaagaagggactggaggaagatgcctcatttggggtcccctggggagcaaatgccaggaagcaattagaagcaaaagagatttgttggggaaatgtctgtgataggtcaaggggagagctgccgggagcaggcagaggcagccttcagactatgaagcaggtctgatgcctataaaagtagatgggtactgctctgagaagccctcggccaggccaatggggagcccgagagcaaagattgctgattagaggagccctgtgttgggcagaaatgttctagcactagtagcccattgtgctcagccattggcttgaagcatcccaggaagagcctggcctcaatgtaaacactgtggcagcctacataggtgcacagctggaggcatctggctgtcacataaaggctttcggttttacattatttatttgtattaaactttttcaataaatatataccaattgatccaaaaaatggagaaaaaagtttgaaaaaaaagttgaacataaaccccaacatttttccttcaattttcacaatacaaattgtcaaaagttgtacacaaataacaaagtctactagagttccatgttgaagatactgcagtagcaatggaagtcttaagaactcccccaatgggtttgttattattacgtgacttgttggctggatctgtgtaacaatgtcccaggctttgaaactgaggatgcagcaagtcattgcttttaaaaaaaataactaaacaacaggtgcccaatagaagagtggtacctgatttccggtgcaaaattgaaacctatacactcaaacctaggcattatcattcaggacataggcatgggcaaggacttcatgtccaaaacaccaaaagcaaggcaacaaaagccaaaattgacaaatgggatctcattaaactaaagagcttctgcacagcaaaagaaactaccatcagagtgaacaggcaacctacaaaatgggagaaaatttttgcaacctactcatctgacaaagggctaatatccagaatctacaatgaactcaaacaaatttacaagaaaaaaacaaataaccccatcaaaaagtgggtgaaggacatgaacagacacttctcaaaagaagacatttatgcagccaaaaaacacatgaaaaaatgctcaccatcactggctatcagagaaatgcaaatcaaaaccacaatgagataccatctcacaccagttagaatggcgatcattaaaaagtcaggaaacaacaggtgctggagaggatgtggagaaataggaacacttttacactgttggtaggactgtaaactagttcaaccattgtggaagtcagtgtggcgattcctcagggatctagaactagaaataccatttgacccagccgtcccattactgggtatatacccaaaggactataaatcatgctgctataaagacacatgcacacatatgtttattgcagcactattcacaatagcaaagacttggaaccaacccaaatgtccaacaatgatagactggattaagaaaatgtggcacatatacaccatggaatactatgcagccataaaaaatgatgagttcgtgtcctttgtagggacatggatgaaattggaaatcatcattctcagtaaactattgcaagaccaaaaaatcaaacaccgcatattctcactcatagatgggaattgaacaatgagaacacatggacacaggaaggggaacatcacactctggggactcttgtggggtggggggagaggggagggatagctttaggagatatacctaatgctaaatgatgagttaatgggtgcaacacaccagcatggcacatgtatacatatgtaactaacctgcacattgtgcacatgtaccctaaaacttaaagtataataataataaaataaaaaaatttaaaaaataaataaataaacatataca

SEQ ID NO: 26159 - DNA, 2300 bp, Homo sapien
gacaagctcattcctgccaagctcataggcaggatgagcatgtggcatgcagaacagatcaataccgtctccaatgcattcatctcatagcatagatgatattagcaggagttactgttgatgcattaaaaatcaggcatactacagtgaaagcttcactgtcagcaacttttattgatgaacgtttcaacattttccagaaagtgtaccttgagacagaggctagcctcaagaaagaggcacccagggaacttccttttccccaaccccaagagtcaaaattacagatttagaaaaggctgcgggtaagtttggaagatgagaaacacatatgcgaaggtttgattttttccaaaataaaagagacaggtaatttggcccagggaaggattctataaattagagaatatgacagagattctccctttctactgcccaccagttgccaaattttgtcaatagatgctgccactgcacccaacacagaggcaatgagctcttcagcaagaagtgctcaagccttactcaaattggacccatccctcccaaatttttctccttggaagatctacccgtacactggctgaaatgttgaaatgtgtagattttgcatgcacaacatcacaaaacattcaactgttctcaaggttctgcaacgcttttttggaatgtagcagaaatgtgacatgtggttataaaggtttgcaatggaaggaacctaaaactgagggttctggaagattgtctcatttgactagtggtggaaaaagaaatgcatgagtggattgcccaacatgcatttggaaaattaaactccttatccaatctccctcacccctcccacttcccccttctaaaagaagactttttcctaaaagctctcctgatcctagcttttagaatagaaattgacgtcatttttagcagattatatgaccattcacatcctttaaactttgaggctgatttaaaatatcccacttcctgtttaggagggggaggggctcatattgcaaaaaaattaaaaaattctgctttttaaagagtgatctacagtaaagcctgattaactggaatctagctaactggaaacctcagctgcatgctcttgctcccttccatttttagcaaaaaagaaacaaagaaaaaaaatcacatcagaaatgtaaaatggtttttcttccagggtagtttgcattgtctcacttagtctccatcctcctgcaacttccacatctatgaggaccaaacaataagagttgatcttcacagaaaaggccatcaagcaatcagtataaatgataaccaaggaaagattcaatcaggtcttctaccttaagactttcaggcaggaaagtggctcaggagtctagcaaagatattcactcatcatccatgaaacaaaactttcctccatggccccactgttcattaagaaagtcatataattcatcagaaaaaaaaaaaaaaagcctcattaccaagcattccagttagtcaagatttgactgtatattcctttcagtggcaacttgcccccaggtgagatttccatccatttcatgataaattccaacagatacattttccccccttcatcaactgtgtgtgaagaaagggtgaaggcagggtcccctgggatggattctgatgttctaatgaaatgatggctcctacgaattccacttttgagtggtcactaatttccttaatgcacaagagaccctaaactaagcttcaaagcttgactgaggtgttccctattgtgtgtaaataatgctttaaaaaccatgtgtcacaacgcagtggctggtggtgccctggactctctgagggcttcgccctgtctcggcatgtttcaagggacgatggtagatgtacggcagtgatgtgagtctatgtgcagcattgtgggtgcagtggtttgccttctttcagaaacgcatacttcccactcctttgactttgccaaagatggtatagcagacatttgacatagcagaaaacatcacaaagtccatataacttcttttaatctgaggagggaggagatggggagttggaaaaataaaaattaaaaaagccagactctaagccctattaaatttagtttggggatctcgtttcattgaatgggtccatggccctttggtgcaattaattttgactgcactaaggcctgcggcattatagacttgattgtgggagttgctgaaattccattggtacaattttccagtttgtctctagggttgcttggcccccagtctgcaagtattagagccagttttaatagatgg

SEQ ID NO: 26160 - DNA, 2300 bp, Homo sapien
atgcatttggaaaattaaactccttatccaatctccctcacccctcccacttcccccttctaaaagaagactttttcctaaaagctctcctgatcctagcttttagaatagaaattgacgtcatttttagcagattatatgaccattcacatcctttaaactttgaggctgatttaaaatatcccacttcctgtttaggagggggaggggctcatattgcaaaaaaattaaaaaattctgctttttaaagagtgatctacagtaaagcctgattaactggaatctagctaactggaaacctcagctgcatgctcttgctcccttccatttttagcaaaaaagaaacaaagaaaaaaaatcacatcagaaatgtaaaatggtttttcttccagggtagtttgcattgtctcacttagtctccatcctcctgcaacttccacatctatgaggaccaaacaataagagttgatcttcacagaaaaggccatcaagcaatcagtataaatgataaccaaggaaagattcaatcaggtcttctaccttaagactttcaggcaggaaagtggctcaggagtctagcaaagatattcactcatcatccatgaaacaaaactttcctccatggccccactgttcattaagaaagtcatataattcatcagaaaaaaaaaaaaaaagcctcattaccaagcattccagttagtcaagatttgactgtatattcctttcagtggcaacttgcccccaggtgagatttccatccatttcatgataaattccaacagatacattttccccccttcatcaactgtgtgtgaagaaagggtgaaggcagggtcccctgggatggattctgatgttctaatgaaatgatggctcctacgaattccacttttgagtggtcactaatttccttaatgcacaagagaccctaaactaagcttcaaagcttgactgaggtgttccctattgtgtgtaaataatgctttaaaaaccatgtgtcacaacgcagtggctggtggtgccctggactctctgagggcttcgccctgtctcggcatgtttcaagggacgatggtagatgtacggcagtgatgtgagtctatgtgcagcattgtgggtgcagtggtttgccttctttcagaaacgcatacttcccactcctttgactttgccaaagatggtatagcagacatttgacatagcagaaaacatcacaaagtccatataacttcttttaatctgaggagggaggagatggggagttggaaaaataaaaattaaaaaagccagactctaagccctattaaatttagtttggggatctcgtttcattgaatgggtccatggccctttggtgcaattaattttgactgcactaaggcctgcggcattatagacttgattgtgggagttgctgaaattccattggtacaattttccagtttgtctctagggttgcttggcccccagtctgcaagtattagagccagttttaatagatggctgtggtcctctggcgaaagaagaagataaaatgttaaattctggtgtcttacaaaaaaaaatgtgaaaatgggaccaaagaatgtctcttgtttttggactaaaaagcatatggtttctactatgtaaagaacctaaaaacatctttgattgcctttaattacaacactcaccaaaatatgctgcacatgtttctattgggcacaataggtatgcctggattttaagtcttttctccaaggcagctcagtgaaatacagcccatggagaccataccagcattaaaccactctcctccattacaaccccaggatagtttaaactaggagtttgtaagcactctctgccctgcccctcagcccaacaaagaagctactgaacctgcgtttcaaatcctcatgaaggctattactgtcctgctagtgcctttttcgagaatggtcaacttctggagtagtttggcttaaatgagaatgcttcactttctactcatgcctgtagctggtgcatgaagaagacgtagaggggtttccctttttggtgctagatggcttgttctctcttctcttttcctgcattcatttcactatgcttcttttactttttgtctctgtggacaaaggtttgtacatcaactctggatgtatggtgactgtttggaagtaccgatatattatctaattcaaatcactctagaggcaatgcaaagaccatcactcttggccaaccaccaatcctttatgtccttcatggagctttggaaatgttagttccacacgtgttgggaaaaaaaa

SEQ ID NO: 26161 - DNA, 2300 bp, Homo sapien
cacccccaaaggtcaccggtgtcctcactgaaggatatttgagggcggggacaaggaggaggctggctctctgtaggaggcgaaagaccgacctctgaaatagctgccgatggtaaatgttgcggtcggcacggatgcgggcggcgaggaggtcttcccgccggtggggagagctggaggagtggcgcctcaccacgctcccacctgcgctgccgccttctacgccgaacctgtgactccccgtcccctccctcgctgggaggggccccgtgtgcccctgactgtctggagggtgcacggtgtaccccaggctgtcgggaggtgggggccgccctccgacggcgttagagacgttgtgcagcgtggccctgccagctacgtgaaagcagccgcggggcttgcagggctgtggaccttgtagggatgaccctctaaggtcatgctcgtcttcctccccgataagaccatacccaaatcctgttgccgtttcagagactcaatatgacggtttcattcattcattaacatcttcagtttatccataaacagatatacacgtgtctacagcactgccgagttagtagatacggcagtgaccaagagggacttgcacggtcctgactccatgttctagtgatgggggagaaacaatacgctccctatccatgagttccgcatgtgtgaattcaaccaactgcggatagaaaatattttggggcggcggggtttggtggctcacccctgtaaccccgcactttaggagcccgaggcgggcggatcacttgagtcaggagtttggggccagccaggccaacgtggcgaaacccggtctctgctaaaagtacaaaaaaatgagccgggcgcagtggcgcacgcctgtaatcccagctacttgggaggttgaggcaggagaatcgcttgagccctggaggcggaggttgcggtgagcggagatcacgccactgcactccaggttgggcgacagagactctatttaagaaaataaataaataaaaacattctgggggaaaaaagatggttacatctgtactgaacacgtgcagaccttttttcttgtcattccctaaacactgcagtgtaacaactacttacatagcatttaacgttgtattaggtattataagtagcctagagattatttaaggtacatggaaggaggtggcaagttgtgtacaaaactacacgattttttttttttttttttttttttttgacaaagagtctcgctctgtcgcgcaggctgaagctggatctctgctcactgtgcaacctccgcctcccgggttcaagcaattctccctgccttagcctccggagaagtttgggattacaggcacccgccactgcacctggctaatttttgtattttttagtagagatggtgtttcgccatgttggccaggctggtcttgaactcctgacctcaggtgatccacccgcctcggcatcccaaagtgctgggattacaggcatgacccacggcgtctggcctactacacaatttttaaatcagggacctgagcatctggatttgggtatccatcatgggtcctggatgcaatcccccaaatactgaggggtgattgcacattgatattgagcaagatgtttctagattgtcctaggttgggtttcctgagaatcagactctgaggagatttagaggcaggacatttactagagaagactttttggatgattaccaaggaagaaaggaagcaggattgggcaatagaaaaagttaagctgcagtgaagtctcaaggatgttctccaccagtcccacaggaactctagtgctgggttggcccttcaaagttgaagagaagggccaggcttttataccccttgattgatctgtcgttagatgtctgtttccctggaaagggcctaacttcaactctcttcagccaagtcaatcatggacggaggctggcagccgaggtctgtctcagctcttccaggagctggggaaataagcctttcattccttaggggggtcagggtggcacatcacagcattcatcacaaaggtagggctttgaaggaatcacgtgctagagaataatggggagggagagggaaaacactttaggttgagtgctgagagaaaggctctctgagtaggtgacatctgaactaagagctgaagcagaagaataagccatcctctgtggaccaaaggggacaagattctctacttttctgctacgcactaggaatatagcagagaagacaagtggctgctaccttctgttatcgtgggtggcagtgactagt

SEQ ID NO: 26162 - DNA, 2300 bp, Homo sapien
gccacgttggcctggctggccccaaactcctgactcaagtgatccgcccgcctcgggctcctaaagtgcggggttacaggggtgagccaccaaaccccgccgccccaaaatattttctatccgcagttggttgaattcacacatgcggaactcatggatagggagcgtattgtttctcccccatcactagaacatggagtcaggaccgtgcaagtccctcttggtcactgccgtatctactaactcggcagtgctgtagacacgtgtatatctgtttatggataaactgaagatgttaatgaatgaatgaaaccgtcatattgagtctctgaaacggcaacaggatttgggtatggtcttatcggggaggaagacgagcatgaccttagagggtcatccctacaaggtccacagccctgcaagccccgcggctgctttcacgtagctggcagggccacgctgcacaacgtctctaacgccgtcggagggcggcccccacctcccgacagcctggggtacaccgtgcaccctccagacagtcaggggcacacggggcccctcccagcgagggaggggacggggagtcacaggttcggcgtagaaggcggcagcgcaggtgggagcgtggtgaggcgccactcctccagctctccccaccggcgggaagacctcctcgccgcccgcatccgtgccgaccgcaacatttaccatcggcagctatttcagaggtcggtctttcgcctcctacagagagccagcctcctccttgtccccgccctcaaatatccttcagtgaggacaccggtgacctttgggggtggagagggaggcgcctacaagccccttcccctctcttcggccggacacaaagcgggcttttccacctagagtcccagcgctctcacctgcgcaccagccgtcgcgccgccccaggccgccaccgccagaggccccagaaacagatctcaagcagccgctgctgccgcggatcccgacaaccttcgcgtcgcgcgagggcacggagcacgcgcagctctgcggtcgacgccgggccgcccccactccgcttctccgggttttccgtgaagctccagccaacagcggccgtcaccggaaaaaacggggagcgaagtttattcagcgtatattccagcaaattgttgaaactgaaattttaaaagaacgcataaaatttaaataacatatcaaaatggcacagcttctgccttttggtgagcgcttgacaatgatttattgaatgaaagaaagaaatagtccactgcgctctgctctctgtcctgacatgaccaattacaaagcgcttggatttgtcgctcagcgccagtatcccgcctctctgtgcggttgtctggaaaatcaggatttttactctcccgtaactcccgggatcgggtttggaaaacggacatgcgccgtgagagctagttgccttctactaaagcatccgccctcagtccttcctgagggcttacagggaagtgcggagtttcgcagctcgtactcttcacagattagataattcacccggcatttccccatcctgcttctgggttccaggacaaaacttttattctcttttaacattaaaaaacatataggaagttatgttcaaacatggctatttttattaaaatttatccggcactgtgaaagctacctttcctttctcacaatctttcgcaccgaatatatgttccattcttgagctagtcattttccaatgttaagaaaacacaccacagaaaagcgtttttttttctctcggtcagttcaactgcctagcaccgtgagttaccatgatacgttatttgctaatgagagtcattggggtcccagcctttaaaaatagcctgcgtccggcgccatttttgttttgggcccactttgaaagccgcgatattctgaacagaggccatttttcttttgggcagattccacgggccatcgaagtgtttcgctgccatcttaaatcctggctgtggcctcaatcctgcagcgaagctgcccagatcattttgtgtttgggcggcggctgagttcccaaacgcgcgcggagaccctgggaaggaggaagtaagcgcgaaagtgcttcccttaagcttctgaaggttggctgcagttccggctacctgtgtagtccgagtttccacagccaggtactactccgccagtgaccctggacagtaacaaaacatataaagcccgagcccaaaccccgccaccatcataggtaagcacatggacctctgacaacctcagatgttccttcaagtgaactg

SEQ ID NO: 26163 - DNA, 2300 bp, Homo sapien
ttccttgaactttaaggtacacttcttgaggaagattctgattcagcagctctggggtgagagtcatgaagtgtaattctaacaagctcccagggatgctgatgctggtggtaggtgaaatgaacttggagcaacaaggccctaagtaactggaatattagttttaacgctagccaactggcttacaaatatcgttatgtctaggatccaagaagtaagtgtcaataccattaattcctacacccggccaaaaaaattaaaaactaaaaataaaaaaaaatagttcaggggaaggagaaagcaaatacttgtttatacagtctagcagtgctaagaaccataaaatactgttatttgtctcaacctagtagatgtcaaggtgataaaatgtaggctccatgagttaatggattttttttagctaactcctgaatccttatggcctagcacaaattaggtactcaagaaatgcaatgaataaatgaatgaatgggaagtatatacaaacgcaatctgtatttacctcacatctccaaaaatgtctgggaagggggaggtatttgtactgctggatgcaggtagccatgatttgatacaaatacctggcccatctactgcattccctttgtgcaaagacagttaactttcctgaataatatctccaccgtaatgcccatgctcatggcatcctgatgtttagcaactttttggctttttgaaaacaatgaagaaaggtggaagtacagggagaaggattcggaaaagtctcaaaaaatcaaagccaaaaaccaggagggaggagatgggcaaacagttcagttcacttgaaggaacatctgaggttgtcagaggtccatgtgcttacctatgatggtggcggggtttgggctcgggctttatatgttttgttactgtccagggtcactggcggagtagtacctggctgtggaaactcggactacacaggtagccggaactgcagccaaccttcagaagcttaagggaagcactttcgcgcttacttcctccttcccagggtctccgcgcgcgtttgggaactcagccgccgcccaaacacaaaatgatctgggcagcttcgctgcaggattgaggccacagccaggatttaagatggcagcgaaacacttcgatggcccgtggaatctgcccaaaagaaaaatggcctctgttcagaatatcgcggctttcaaagtgggcccaaaacaaaaatggcgccggacgcaggctatttttaaaggctgggaccccaatgactctcattagcaaataacgtatcatggtaactcacggtgctaggcagttgaactgaccgagagaaaaaaaaacgcttttctgtggtgtgttttcttaacattggaaaatgactagctcaagaatggaacatatattcggtgcgaaagattgtgagaaaggaaaggtagctttcacagtgccggataaattttaataaaaatagccatgtttgaacataacttcctatatgttttttaatgttaaaagagaataaaagttttgtcctggaacccagaagcaggatggggaaatgccgggtgaattatctaatctgtgaagagtacgagctgcgaaactccgcacttccctgtaagccctcaggaaggactgagggcggatgctttagtagaaggcaactagctctcacggcgcatgtccgttttccaaacccgatcccgggagttacgggagagtaaaaatcctgattttccagacaaccgcacagagaggcgggatactggcgctgagcgacaaatccaagcgctttgtaattggtcatgtcaggacagagagcagagcgcagtggactatttctttctttcattcaataaatcattgtcaagcgctcaccaaaaggcagaagctgtgccattttgatatgttatttaaattttatgcgttcttttaaaatttcagtttcaacaatttgctggaatatacgctgaataaacttcgctccccgttttttccggtgacggccgctgttggctggagcttcacggaaaacccggagaagcggagtgggggcggcccggcgtcgaccgcagagctgcgcgtgctccgtgccctcgcgcgacgcgaaggttgtcgggatccgcggcagcagcggctgcttgagatctgtttctggggcctctggcggtggcggcctggggcggcgcgacggctggtgcgcaggtgagagcgctgggactctaggtggaaaagcccgctttgtgtccggccgaagagaggggaaggggcttgtaggcgcctccctctccacc

SEQ ID NO: 26164 - DNA, 2300 bp, Homo sapien
gcccggttttgcttgcttttctgagcattttcccacagttatcagtgaacgaaatggaatcctactctgctttgagtatgaaacatatttcggctgaattccaaggcagggtctatcacaagatatttttatattcagagatgacctgctgtgtcactctgagagcgctaagctggccttgagttatgaatgaaactcccttttaccctccctttttctctttttcctttatcttataggtgctttctcttctcttggcagcagtgtgcttctggtggcacagcacggtattatttaatctatacacgcttctatttcctatggcttggtttctgacacagcaaagcagggattcataacctagttcatgttccttgtctaccccacctgccttgagtacatttcttcagtgccaagatagcagaagcttcatttaaacgctggtgttttgtgagactgaccttactgtaaattacgaaggaaaattttagaaaaggagggaatttgctaatagcttaggtttggctgggggtggggaggtggaattctgagataagcttggaagataaaaggtgccttcagtttaacagctggcatcttgccagtatccagggaatttgtttagttagtagactctgattattcttggaatgttagatcttattaacagataagttcatcaataaatataacccatgggtgtgcggttgtttctccctttgtactttcttccctgggatctgcccccaactccaccgcccaagtgaggttgacttctttgtcttgcagagtcactttgcatctaccccctcctgtttcctagagttacccgatacttgtgggagccaggatggtctcacatagacagagttttcaaaggggttctaaaaaggaaaagggggcctccctagagactgcctcaccagggcccaaagtgtaaccttagcaataccccctcggtacaaatacctggttaggttagcttagaataaattctttgtgtgtgtgtgtgtgtgtgtgtgtgtgtgtgtgtgtgtttcctcatgcactagggtcagggtctggaaagttttgggaaactatatgctaaatactctcatatcatatagtgaggtggcatttcctgatctcaactttgagctgcctgcatgcatgttgactccagtgcgtccctgccaggtgaaaggagtcatttgtcaacctgggaagagtgctgacaaaggaaggggagttggtttggatttaaacatccaggaactcaatgcaacaaccaacagaatttttattttggcattatggttttgtttggtggggtattctgggaggccaagaatgtacgagattttggaaagtcgaccctgtttctgaattgctaaattgtttgtttgtcttgcagaggtcctatacgttgcttgtggaggcgtgggattccagtaatgacaccgttcgtaagtatcgcttctgtggacttttctctaaacacacgtggaagtgtggggcttggccaaccagttggagctggatctgtctccttagtacttagcatttctgccacctcttgccttctgttctcccctgtaccccagggtgaaccttcagtggaatgtattccttaacttttctaggatttttgcttggaatattaagtggccagaacagaatcccagttaactcattccctgattatgaaacctagattatcttcgggatagagatcttaatggttttacaactttaaaaccttgtagtctgctaaaggatcaaagtagtgactttttaaaagtccatttaaactttaagtgagtgtttaatctctcatcagaaagataaagccataaaggtggtgctgggctctagagaccgaccttgaatttcacttggtgggcaggtgagcttctagtctctccgggtttcccacactgctccacaaacctttcattgaagcgcaattccagagcttcacagccattacctgccttgtccctttctgaaagatggctctgttttcagtgcaggttgcctttcaggactgaggggttggttttggtggataagccatggaggatgtgattgaaatgacatagtctggcttacaaagtagtcttgctctttaattgtaactttacagtgttttcgctcacgagccgaaacttcaagttccctttttgccagcagagtttgggttgcggtcgctggaaaacttgatgctcactgaaatctcttggtctgtgcatgaggaagagtggatccagcttcttgtcttggctctctgttctctgaatgccttgtactttttgctt

SEQ ID NO: 26165 - DNA, 2300 bp, Homo sapien
atctcagctcactgcaacctccgcctcccaggttgaagctattctcctctctcagcctcccgagtagctgggactacaggtatgtgccaccacgcccagctaatttttgtatttgtagtagagaccgggtttcaccatgttgaccaggatggtctcaatctcttgacctcgtgatccacccgcctcggcctcccagagtgctgggattgcaggcgtgacccacagctcgcggcccattttacttttaaaccgttatttagcacccaaactcagggatacttgggagtagaaattagaacgggacagataagtggggagactggtgttgatggaaacctcagtgagaaaagtgtagatgggattacagttgacaactggttgccttgatttaggataattggggaaagggaggctggggcacattgaaacacccaggttgtcgctgcctaccccagctgctaacatgaccagctgtaaacttgctctgttcttagaaacctcccttccaaaacatggattctcccgccagtgctcaagatgggacacattaccactaagtaagcacttttcttaggagcatttcttaggctgttaaaatgccaagactcctaaccatccttggtagctttgaacctatgtaaagaggtcagttagctgccctagtttattcctcagaatgatgagatttggcactgaaaatattgttcatactgagcctcccatcaaatgcaataagtagataaccacaaatacccacccttttatgctcataactcagcatgttggaaactattttcccttgacctattgccagcccatcacgccccacacccaggagaactcaagccccaaaccggccgctgaatagtcacgcttttctgcaggacatacctactattagggccaaaactttgtccacccttcaaaggaagtcgatgtttccatataaaggtcccctcaaatgcaacagcaagcccgtgggagaggggttagcagaggctacggccagcccacgggctttcttcgaccttgattatgaccaggagtgtagctgttaattgcgaggcttgcctcaaggtggaaaacagtatcggtttccactgccaccccagagaaggcaagttccgcggctggcggtgctggggacacggtccctcccaggcccatctcttgccacccagagagctgctcggaggccgcctacaggtgcaatcccggcactgcggccggggcgtcgggccggggagggcgtccaagcccaccagcatctccgccggcccttcccaaagcctgaacagggccccggcgtgcccgccgccttctacccccggtttccccgcgcctctgccccggcgcggtttggataggaagctgggagccctcccaggctccgcagactcggatttgggagggggtgggacgcggccgaggcttcccctcgaatctgcggcaagcctggctccaggaaagtttttcaaagttcccagcagcgtctgcccaggtcgcctccgcggggcgagcagacggcggcaagcgcgccagcctcgccgccgcctctgccgccagcagagcgctctgggcggctcgctcgcgggaagcgggccgaactcccggcgggcaggcaggccctcctcccggggcgaaagccgcagctgacgcaggcggttcggaaggcggaagctgccccgctccgaccgctcagtcagcgccgcggcgcctacacctggggccccgacgcgcgggcaaaggcgcacggcccggggcgcccgagggggcggtccccgctgggggcctccaggcgtccctgagcaacgatcccttccaagtacctccccgcactctcccttccctcctggcccgaagctcccgagggcgggggttggtgtggggccctggttcttctacgccgccctgagcatcccgctgcccccaaccccttccaagttcctcctcgcactaccccctccccagcaacgtgaaggggaggggcgtgcccagggtgagcacgccctctcatgaatattaataagcgcgcatgcgccctgcccggcgtgctgggtagaggtggccagccccggccgctgctgccagacgggctctccgggtccttctccgagagccgggcgggcacgcgtcattgtgttacctgcggccggcccgcgagctaggctggtttttttttttctcccctccctcccccctttttccatgcagctgatctaaaagggaataaaaggctgcgcataatcataataataaaagaaggggagcgcgagagaaggaaagaaagccgggaggtg

SEQ ID NO: 26166 - DNA, 2300 bp, Homo sapien
atattaaacaactagtttaaaaaaagttttcaagattggggacttacgctcttcttacttatctcacaatgagataaccacagaaaataaattaaggcccttctgaaaaattgtacgtttttctagacttttactaccatcaagaaacaaaataaaatagactatcaccttcaggaaatgcaaagcacactgacatgaaggttgttttcagataaacagtgtatttcattaccaccagggcatgcaatatctcaaccactacccttcatggcctttttctgtttttatgagttcatgccaacaacaagcaatgagcacaaaggctgtgcgaaatgctgcatttgttggagtgtttgtgttggcttccttcaaatcggctgatttccaaatctccttctccaccccaccttagttatatttatactgttgtgcagaagaaacttggatccatatttaaatatgaaatgctttgtggccattcgtgcaaatctctttatcggggtctcgcacattaacgcccttcacaattgacccacaggccaattgtttaacataacgtttccacagggctgcttccacggagtcacagccttgtttttacttttcttagctttcctggacaatcaaaaggaagtggaacagagccggcttgctgaaagctggagctgccccagtgtctcctcctaccttctgtctcgggttttgtttttctgcttctttttctttttctttttcccatcatttttcacggtagagaagcctgagccagactatgtagctagagcctctcagtcctcgtgtctgctgctttttccctccctgctcaaagttaatgtgaaggctgactacgaccagtctcaggaagctaaattgtgccaccttgattttagcaaaattgggttctctgttgattcacaaaagtattaaagtaatacaaaggtgtgtgtgtatatgtgttggaggtgggaagtggagagacggaactctcaatgggaactctcagcttatgaaatgtaaatttcttcattcctctttaacttaggggtcgctttaacctagagaagtcacactactttccccctttttaattttttttctttagaagagaagggatgcaatctgtaaaaactgaaatggaaagactcatgacacccaagtcactttttttaaaagaacattcccacaggtgctatagtcagtaatttagtctctaaattgcagctttctcttctgtaagctgaagattgatttatatttatggagtgcttactgtaactactagatacactaggtatacatataacagacagtaatatgcctgtctcatatgatgattgtgaagacttttaataagctatctcacatacagcacagagcacagagcagtagtgagtgagtatacagaaatgtcaatcatcactgataattatcatcatgaatcatggtgagacttaagaggtctaaggactgagaattaatgtctctattatggttaataaagtgattgagagcccaagttttagagcctagtatgctttgactccaagctccattccactatttccacatatgtaacttttagtaagttatttaagctctttaagcctcagtgtcctcatctgtaaaatggagttaataaagcatttacctcaaagcattgctataagagttgtgcttatatatgtgtacttagcacagtgttttacatatcaatatatgctttacagatcattatatggtattattaattattaatattacctgcttatttaatgtatttttattttaaagatataaaattggcccaaagcacaaatgtatacctactccttcacataccttaaaaatacagattattttcataatcagttggtttgataataaacatattcttcagtccttggaaatgtttcaaccaaagtgtcaccaactcatataagagttgaacatgaagagagcaatcaagcagagaaactaagcctgggagaacattgcatggtgcattaatcaaggacagcaatctttgcagttgtaacaaacagccccacatcatagtggcttaacacaaagtatagttacttactgcccacgttatagttcagtgcaggtctgcaggaagggcctgcctccactcatgcaggtacctgggatcacctgtccattggctacactgccctttagggcctccaaatccccagctgaattattcccatccatctagtaggaaaggaaaaaagaatgttgaaggatcatgcaaaatgttttaggggccagtcctggacgtaaaatatgttacattg

SEQ ID NO: 26167 - DNA, 2300 bp, Homo sapien
cacacctggctgatttttgtatttttagtagagacagggtttcaccacgttggccaggctggtcttgatctcttgacctcaggttatccacccacatcattctcccaaagtgctgggattacaggcatgagacactgagcccggccaaaaccagttatttttttcagccactttgcaacccattttgagaatatactggcaattacactgtttttaataatgttgtagccacacatggataaactggttcatggtttacttacagtccgagtcccaggcaactgtggatacctttacaaagtttaaaccctctccatatcccaagtggtatttttacttttgcactggagcatataagaaaaggtaggatatggcagaattgcataagaatcacctgggcgtttgctcaaaattccgactccaaggcctcactgaagatcaccagaatctgagagacctccaggtgtaggctgcactatcactgcctcctgaaaggtcctgtggggtgaggatggtgattaaaaactggagtcctcagcgggacagcactaacctgcctccagtgtagctagttaacatctgtagatttcactttcttctaactctacgaagacaagaccccaagttcctgttatacagagaaagttgtgattttgtatatattttattcattttgcttaaaatcctaaaatctgacaaaaggaaacaggaaatattttattatggcctactccaattaatctaaagtgggtttcagcttgattaagataacttggagagttggttaaatctttgtcttgcctgagtaacttgcatatgtatattttctaaacttttggacatgaatttcaagtagcaaattctattcatcttaatggattcttttcttggaagatgtcagtggttcttcagaacattccacacgaactctgtgtccaaatcattaacagcagtttttactatgggcacataagacagaaataaatctgttttaattacctgtttggattctgataccacggctgtttgccaaaccttactgatacttcttgtattacctctttgaacatatctggtgtagaaactggtgtatctcttttgcaatctctataggatactatgcacgaatctacagtaatgataggtactgcgtcatttttgtggagtctgtctggtgaagaaagtgtccttggagccggttttattttctttgtcactagatgtcactgcatacacaagtgtgctactgtcgcccagggtaatctgagccctgattgctgggaaagaggcaaaatagattctggaagccttcactgtgatcctacttggaaggtatctgcactttggatctctttgaggctttctcacaatctcatttaattaggctaatcctccctaatactttgtcattttacagattgtgtgaaatctaatttaaatatgtgcaaatcttttgctattcaacgggacctttgcatggtgaagccaaatgtggtaaacgtatctttattcaatgtttctttctggtttggaattataaacagaatgtaaattgactacttatatgctacctctaattcaagggtatatcctgttaaaacaccaatttgttctcaatcagaatgaaatactcaataagtacttaaaattgcctgcttgctaaccaatcgcattacatatctgcttcaagctatttaataaaaaaaagcttcaagtaaaacttgcagtccttctatctccaatgttcttgcaaattccatgcttatatttgcatctattggggcccgaggtatgcttgcttaggaagaggacccttatccatgatttttcctggcctggttagctgtgtttgcaatatgtgcttgagagattaattcaggttgatactacagtgttctagagaggcacatttacatcttcactttttattcttagcctccaaaaggatttgtgacaatcttttcatgaagaaaatccttccgggtcagtagtggaagttcacctccatatttttattcacccagataccatggaaacagcagttttacctaagacaattagcatttagaattctccaactctcttcttaatctgcaggaccagacatgagcagatattactggatcttggacaagtgggtctctaaggtaaggccttgaacccttgcttgggatttcatctcataaataaacacaaataagttattaaaaatccaggttataatcccaagtgtttggtgtggtttgtggaaaatgtgcacctcagtttcctcatttatgaaaggaaactgagaaaatctg

SEQ ID NO: 26168 - DNA, 2300 bp, Homo sapien
tcaggtgaatttattgtgggtaggttgtgaaatggggtcatagtcccatagtttattttacaaactttcttacactgaaccaaactacagaaatatgtaatttcacctcagctggcgacatttgttctcagaatccagaaagtttttatgtgctaaaagtcatattatttctcagggactatactattttagatttatatatatagtgcctattccctgaattggctaaagcccttttacatatcagtaatgctatcctttgaacccaaagataaccccttggttggtggtgctttcaagaatggggacatttggggtgagttatggtggccccaaaatcgtttttcatagcatataactgtcaaactatgcctttgggttatcactgggcctgctggtctcactgccattgctcactgggactacttctttgtcttaagtagcccatggctgcccacacaaaaataatagtaataataaagtggggtatgactgcttgctgtatgttagatttttcttcttcaagctgggatttaaacacatttgcctatgatgatatgttattatttgcctccacaatgcagctcttttctccttcttgattccagtctactctcaatgtaccttgacatagacttcagtgaccttttgatatctgttcctcaggtctaaaggaattcttcagtggtaagcatcattgtaatgtttgttgattgtcaacattttatagcctggctagaaatcttactgtttatttttcaccagtgacttgaagaagatttggaaaatcaataccttattttctttccaactcatttgaagcaaaatagcacaagtaagaaacaatttcgctaataacagcaattcagggataggtacattaagtacattttcaggctcataggtacagtcagtgccaaatcataatcagtactcttcttctcactagcattgtagagggaagactgctagatttaggatccaaggaggtgaagacgatttcttttgcactgcttactgactatgtgactctggcaaatcccagaatttttctgagctttcattccctcatacataaaatagggcttaggactccagtaggagtcattttgccttcacagctgagctgaccctttcttagtgacaacaatccattctcacttcatatcatatggtggggctctcagtgatggggccaaagccctgccctcagcaggacaagcgacatactctaatccaatcacagtcccttccccgaatttacatcttgagtggagattcacagaatggcgagtgaaggagctgagccactttgtaatcccatgaatcctggctattttactgagtgagggcttacaaattgccatgtgctgttccatgtgttctacataaattaccccatttagttctcacaaccactgaacttaaatgtttatctatgagacagcatatcattgtcttaaatcagatttctccaaaagtagaacccatggcagaatttggaaccacacagtttctttgagaagtaattccaggaggcatcagatgtcggtggtgagacaaagaaagtagaaaaggccataaagattatattaatgatcctgacacagcttttatgatgtgccctatgcattgtaacctcttcaaggatcctaaatcatgagcaaaactaggtatttagatgctgcatgtgagtggatttttgtatgatattcttttatggtgttttgtagaaatcaagggagaatgacttttatgtttggttcagcatagcattccacagagtggtataagtgaaaacagtagctcagaaacagaagataccgtacattttttaggacttatagaaatcatgcggcgaactttgagatttcacaggctatggaatgggaagttaagaatataaaattgggggcagcactgtttttttttctttctaaatcatcaagatctggtaaaccccagataatgtcaaacttacattaagacaaataaacacaaagccatatctgcacatctactgaatttttgtaattcatgtgtattcaaatttgggtccatggtaaagaataacttctggttttgaggagccaagatggccgaataggaacagctccggtctacagctcccagcgtgagcgacgcagaagacgggtgatttctgcatttccatctgaggtaccgggttcatctcactagggagtgccagacagtgggcgcaggccagtgtgtgtgcgcaccgtgcgcgagccgaagcagggcgaggcattgcctcacctgggaagcgcaaggggtcaggg

SEQ ID NO: 26169 - DNA, 2300 bp, Homo sapien
ggatatatatctatatatctattttaaatatatgtcaattaaaaaaatttcaccaaattgagtttcaaatatctgattggcttttattagcgattcatgaactgggcagcatccagtctacaaagtagaaagaaactctgatgagctaaacagagtgggtgagttttatgggcagaaaaaagaagagaaaagcagaaataaagaacaaatagagggttggtcatttcaaggttacttttcttctacagatgtaagcaaaatcttgttggcctagttggattccactgttatctctcttctgatttctcacaaggtcaaatcttgcaagtaaataacgcaagttttggtttggttatgtgacactagtatgagtgactccattttgaacctgctgtctgtttgtttgtttgtttgtttgctttttgcagtttaagagagagaaaagagagaaagagagagaaaggtattggcttatatggttgtggaggcttggcaactccaaaatcttcagagtaggtaggcgggctgcaggtctagggaaaaggctgcaagtcaatggctgtttgctgccagaattccttcttgcttaggggaagtcagcatttttctactaaggtcttcagctgattggatgaaaatcatacacattattaagagtaatcagctttcctcaaagtctactgatttcattgttaatctcatctaaaaaataccttcactgaaacatctaatgtttgtccaaatatctggataccatgacctagccaagttgacacataaaacttaccattatacaaggtaaatattatgatcccatgttacagatgaacacagtaaggctcacagatagtaagtaatttagacaatatagtgtattatgaggtatttggactttatcaaagggacttttgttgtccaaagcccaggtgtctttcactatgtatgctgtctctcaaattaatggtttttcatctgagcagaaatacgttctcccagggccaaactcttgctaaaagaagcatccacttgtcctaacagtattgtataggtctaatttatccaccgatatacattttgccaaggatgatgatctgatctaatgaagtaggcgcctgtcatgataaacatctctctacccaagaggcagtgacataagtaagggagtcattctgtccttcacagtctctggaaactttttgatcctttccattcctgataccaacccttgaacttaggaccctactacttcttacctagaacatatattacagcatttcatgtctctagttttcactttatattcctaaattctgcattttatcaagccaccaccgggctccccttctccccttcttccgtgcctctcaattatccacggaataaagctgaagtcgtgctaagcattaaagattatttccagatgagcttcaactacctttccggccgccgttttcatctttcactaagaacaatacactcagattaaacttgtccccgacaggatgcatggattcatatgctgtttgatttttttttttttttttgccacttatgccttcgtgttcacctttcctctttttcgcttctcaacgaagtttccatgatcaacccaaccagcagctactctccttccccagatcactgaagagtgtagtcgttaggtattacgagacctctatttatgcaccctccttatctgttagagagagggctggcatcagtgcctaaaaaggagccccaaagccaaatgcaatcggccctctattaccggaggatgccctgtatcccgcacatccactctgccagtgcaagtgttcaataaatgcttaatacattcattgatgaatgacccagagagaaaaactgcagttcgtgggacaaggacgaagtggcctctcagagatgcgggagtgctggctctcctccaccctccccgccttctccaagcccgggttcccgcccacccctcactcctgcttgaggacagggcagacattgcgcatgccccgtatccaaggccgcctccgggagcacctcccatgccgctccgctccctcccggtgaccgggcacgcgcgctcgctcccgcagagcgtgccctgcgtgcgggtgcccgccgagcccgccgggcgctggatctccgagtgccccggccggggcctgaggagcgggcacagggcaaggcggcggacggctgcgtcgcccgaggcgaggaggagcgctggcggtgagtgagggcgccgcgggcgagcgggtcggcgcctccgcgcgtgcgcagcgcgggaccgcccgggcaggggc

SEQ ID NO: 26170 - DNA, 2300 bp, Homo sapien
tatttttctaaataactgatatctgtaattttagaaaacatgttctacaatattgcatacttctctttctcaaactgttacatccactttactttttttctttaacttagtggtgtaagagccatgtgttttggagacttcttggtgatgggtattgagccatatgcaaaatgagtaaagatcacaaacccttctaagttcttgtatctgtgttttatgttttttctattttgtctccatccagctaccaattaatagtatgtctgcctaaaagcagctggtttccctttccattctaattgattacttctgacctgaaaagccagatactagatttgttagaaatatttatgagattaatcccagtcagaaaggcctacctggcatgggagctttcctgcaaggaagtggtcaaggaagttcagtggcacttgagcaagagagaaatcctttagtgttaaccctattctgaataattaggtcaataggagcttacttgtttcttcatgactttctctatgtgctttttaaactggtttctagatccctctctaacattgtgtgttaaagtgtgtatgaagatgatttggaggtatctgtatgtgtgtgttctgctgttgagaacatgataatcataataaataagcagtgcttcaggatccatctaaaatggagacaggtaactgtgctacaggccctggttctcttacagaggctttgcaaatggttttaagaataataataacaacaataaagaggatatttcttggttcaatttagtgttctagggatttaaagactgatttctggtaaccgcctttagcagattattaattataacaataacaatcgtaactcttatttgctgagccctcactgtgtcaggtagtcattattcagacaaatgttaaaacaaggagggctgtggtcatgaagggtgcatttgcctgaggggtagcaaatggctgctgtgctttgaacaaatgagcgtgatccaaatagataggggtgagattaaatattttaattagtccctctttacaataaataagcatatgcagaacctattgccggtgtttttgttttttttactcaccaacgctagaaatggttggaggattcacacctacaaaaatcaaatggtagcttatattcttctaattcaaagcagagagaacctgtttgcattttaactaggtggaatccgaacatttatcattttgaatagccttgttatttgttctgtcttagaagttgtggattatattctttaaaattaagacaagactaaatgtagccttaacagttaagttgaattttgagatcctgaacatggccccatctgaaatatttttagtgaattacagcctttgaacattgatcatcagatttgtttttatttgaatcttatttttacttctagagtttatcttatgctttagtgtacttaggtgtacgggtataatcttaatctaattaacagtattttgtgacctgagacacctgtcaaagaccattatagaagctagaaaacattgggaggtaaactgaacacatggcctcagttctcttctttagcactagactatgacttgcactcaaaagaggctaagaaaaagaaaaataacgtcctttgcctttaaagtgtaataaatgtgttttgctattaatagcccttttcagtttatagactggaggattttgttttaagtatttgaaactaaatgctgctgggaaaaagattttagtagaaatatagatatctgtccctaccctttgttaattgatcctgcttaactggggacataatgtatgtctactgaagagaaatctgtgggcataaactcctcccttcctgttgtcaaatatatttcatatgttattatcttgtttaaatatacagtagacaagaaaatgcaactgctgttcctttaatatcagaactatgcatgttacaataggtgtcactgttttgcttggtccaatcatgattggtgacttcagctattggctcggagcactggctgtctgactccatctgcagggctgtaatacctactctcctccgatccattcaccacacaacttcagccggctgaacagactcacgcagctccagcccatcttgctgacctaattcagaaaagaagtgctacagctctgtgcctgtcatctttgcagtgtagcattttcaggtgatctaggaaacagttatttttatgagcaaataagagaaacaggaatcatgatggggatatatttaacagacccagtactggataaaacttaaagccagtttc

SEQ ID NO: 26171 - DNA, 2300 bp, Homo sapien
ttttcaacaaacattttacttattccaatgaactgaaatccctagagcaacagataaccttaaagtaatacactttgctgtgctagaataaagattaggaaaaatcatataaatactacttagaataataattagattatgatcacttggtgaactaccacactgtctagtaccgtacatgataaagaagctgattctataacctgtttaacacatactggtgcctgcagaagacccaccagacagaaaactatcttttttataaatatataacgtatctttaagtttcatacttctgtattaccaatgaaagttcttctgtataaatccacatgaaactgtacgagactatccatatctttctaagatttcccctgtaatgtcaaatgcaagtactttttacccttgagagtgtctgattttatatgagtatgtatatgtatgtgtacacaaagatcagattatttcaacagatggtaagtttttcatttgctcttaggagacaataactcttagaatactcagaaatctcccaactggtgttacttaaataaggtacttaacttctgaaattgtgaagcaaaaacatttgtttaaagactttttcacacacaatgctttcagagagaacatcttctattaaataatgctaataccagaaagttatttgtctttaattttaagttgttaaaaatcatcactatacatgccacttgctcccaaattctacgtcaaggtgcgattataaatgctgcataattccatatgctttccacggaaagctaaagtgttcttttccgaaaacatttacaaggtaagcagcaccctctttcttcatcagtcttcttttctgttatgcagaacttaaatttaactgtgaaaccagcagggtacaaatacagcataaacaaactctttccaaacacacgaatgatgcttacttcagcatagcgagaaaagcagcaggttcgacatctggtatacggatttcatctttgtcctctgcaagttctccgtaaaacatcgcatggaacacagagctcccaacagctaaaacatactgtgtagaaagggaaatcttatttcatacactaaattgaaggcatttccagcaaatcaatgcagaaaaacaacactaggcaatcaggtttagtaaacatagcgtacctaaaatctactgctttgaaaaagccaaggtacacagggtagcttgccatggaagcataagaccatgctgctaattatttcaaagctttaagagattaatgcacatgtcccctcattactaaatacatacaataatagcttacataactaatttctaggagaagggtaaacatacgactttcctgacctgtcacaacaacttcccatgtctggagagttaagaggggatgtgtgagatataaagcagtatagaaggaaacaaagaaaaaattaagcgtggccaaagccctctggagagggtgcgctctctccctaatcgagtgaaacatgcactgcctgacatcggcaagctgcccacaccaagttacaggcttatggaaagggtccctctttgtaaacgtcaggactaaaccggtcatgcagctgttgcttactttgtgtcctggcaaccgttgagtcccacctggtggcccaaccacaaaatgtacatctgccatcaaatcattattgaacatcatcgcatttctataaacagaggcaactcattaattcacagcagcctgcatttttaacatccccttccccaacatacaaaacccacaaaagacttgcaagctaagcaacagtccagtaacttcaaggcaaaacaacaaataaaggttctaactaaactgttcataatcattgcaaacataagggaagtaactaaagtttaaaataaaagttatacaaacttttaataaagctaaggacaaataaaaggttcccattttctatggcccatagacaaccctgtcacttgaatgttacagcttgcaaaaacatttttatctaagaggaaaacagctgtactgttttggaaaagatacaaggcaattttccattaccaataaaaagcttctgggaaaagaggaaacagatttgtgttcaaatacattacaggttttgcaaaagcagaaacttcaacacaggaaaacttttaaagtaaatagactagcgcggcacttacctctctctaatggtgggataaagaccctgccagtttggggccgggataaggttgttgttactgagattctgctggtggtactgctggacgctggtgctgctggagttggctggctttttacggg

SEQ ID NO: 26172 - DNA, 2300 bp, Homo sapien
gactatcttaaggatgtttgctactgttcctcccttacttttttccctttcgaaaacagcctctatggctaattagtaggaataagttttggagttctatagcactatagggtgactacagtgaacaataatatatagcttcaaatggctagaaggagaatatttagtgttctcaacacaaataaatgataaatgtttgaaatgatggatatgctaattaccctgatctgtcactatacattacatgtattgaaacatcactatgtagcccattattttgtacaattacggttagtcaattttttaatctaaaaaagcttcttataaaagtgaatgatatcagtcatttccacattagcatgaatttaattctatgggccactctgctcagattttaatatacattaagccagaggttcttagtttcagttgcacattggaattacctaatatactttatgcctgggcctccacttctaaggaagagtgaattataattagtctaggatgctgcttaggcagaagaatgtttaagatcttcacagtgactccaagattgagaaccacttgccttccaatcattgaaggaaattctttggtcaatgttaagaaatttcatggggggctgcaggacctctgacctctgaaagagtcagaatcttcacatatcaggcaggaaaccatcggggcctaccctaggagttactgctatttcaggacactgggaggagcttcatgaaaaggttgaatgatctgctaaaaagggagcaaaccccgcagattaaagattacaaagtgctcaatggctgtgcctcatgtgggtgtagcctggccccagtgtgcatttggcatggtgccctttggaatgcacagcttggccctggattgtcatttattttttctatgcctatctccccagctagactcagcttccctggcatttttaaacacccagttaaactttgtgaaatagatttgggacactctcccgaaatgattttcaaaagtgtttgattctaaccgactttagagtatgattgaggaaaatttttaagcaggcccaggaagaaacatttttaaacatatcaccagtttttacaggacaatgaggatcttttgcctttaaaatatcaacaaagagatatttaggtcttggtaaacaaaattaaacagcagctaatggatagatgattgtattattaattcttctgtcactttaaacgttttctagaacaacatagaaaacaaattaattaatttaaaattggcaaacaaggagaaagataaatgaattaataacactgatttctcattcccttacaatactgttttcagaatcattttaaaactgttcttcaaaacaaaacaagataaaataagacaaaacaaaagtgtttcttcttgtaacgttttcaggattcccacttgtctgatctagccctaggcagagtgtccctacactaagaagtcagagcttaacgtgtggatatattggatagcttgtttttagaaagagacattaaaaagtttcctttttcaaattttttaatctagtgcctgtcaaaaagttatttacttcagttaaatttaatcttacctactgcatagtaatcatggcattttaggacaaaaagagaccttagttttgtccatcaaatgcccttactttgcagatgaagagactgaaaaccagagatgcggaggaatttgcccagagctgcccgtgagctattgacagaatagggctctgaattaagcctcctcaagaccccattccttgcttgattcatatcacatattgtagattttcaagttatttgttttgaaaaaaaaggggaagggaggagcaggaatatattttacatcaagtatggacttgtgaactcctggttattaagtcatcttcttcaagataagcctctttgagaaagtcccttatttttagaagaccataattgtgcccatgccaaccccccctgggtggcatccatcttttctttccttttcttccttgttattgcatttgccttgagaatacagcacaaggccacaccaagaaaagatggagagagaaagaagctatggtgtaaaaaagagtaatgaggctgaccttttctgagtgagtgcagtgctgatctaattggtaagtctatgtcatgtctacctctctcaccctgtcttcatcattctcgttgagttcccactgtgtacatggccacatgtacttctgaggcaattcttccagcaactgaaataaatagcagcgaactcagccaaggaatctgcagaaattgatagcc

SEQ ID NO: 26173 - DNA, 2300 bp, Homo sapien
attgggtccaagcaagccaatccttaggttcctggatgatacatatgggcaccactgttggagggctacacctgaggcaaatctgtcctctgggcccctaatgatgcactcagatgctggctgcagtgtgtggggtgggtcaatccccaggaccctggatggcacatgggcaggccagtccctgggccttctgaaggtatattaagatgtgtagtggacctgctgctggagaaggagggatttgctatcaggggaagtggcctcaggcaggcagctctcaggctctggagaatgcaggctttggtttcttttgtccatgggacagcctccctagtgtgctgcaacttctttttactcaaaattcctcattccgctgcatggggtagaatgcagggaacccagccacactgctgggttcagccagtgttatgatgctgttgccttctgggtgtacataagggtatatcaacaaggcttcaatattgtgggaatggaggagccgttgatcctcaagcaggatgtagtctagtgggaggtaggctctcaaaatggcagtgtgctgcagctgcttggatcttgggaggtgttggggacctagtgtgaactccctttctgaaacagtgctattgcatggactccaggcagctcactatactactctctgggccaatgagggcaggagtctgtgatgggatgtgtaccactggagacctcttccttatctttaccatgcaatgggaagtttgtcctggctctgagccaattttggccagttggcttctttgcttacctctccctctgtgcctcagagattccctgttgctttcctgctgcatgtcagtattctctcctagatgctctgttttatgtatcattatctactcaccatttttatctttctttgtggaggaggctagcgctgggtgccgctagtgagtcatcttgaagctctgattctagataccctgattaaagtggaacatgtgagatgaacatacctgtttaggtaattgaatagaacttattggccctaacatctgcaaatgcctccagttttaagtatataatttcttataaaacaagcacaatatttcatctgccagctccataacaaaagcacattatttctgcctcactaggttaacacttcctgaccagaagcctgatgtggaacaattcaagtatcatgaggtcattgtcttcggagatctttctcagagtacccatagatctaaataggggagacagcacatctggctgagttactgaattgaaaataaagatatttaatgttaacacccaaagaaccagaagcttatggtaaggaaacatttgctaataaagatcatgttaatttgctttgtcaacaaaaccccagagactagcacctgcaagagcatgtagaacacgggtctcccgtgccataggagacaggcaaagatgcggagaatttgctagttgaggaagtttggggtcacagggaggcaattagcaatatccccacaaataataaaaggtaagttaaaatgggatcaatctttttcttttctttctttcttttttttttttttttgagatggagtcttgctctgtcccccagactggagtgcagtggcacgatctccgctcactgcaaccactgcctcccgggttctcgccgttctcctgcctcagcctctgaagtagctgggattacaggcgcccgccaccacgcccagttaatttttttgtatttttagtagagacggggtttcaccgtgttagccaggatggtcttgatctcctgacctcgtgatccgcaaaatgggatcaatctttttctaaaattatcttttagttataaaaggaagacttgcaaggagcgctgctgctatgattccatgttagaccttcatgcagaactctgtaacctagctctttatgggtaagaattgtcccttgttcattattttctaattattaaggattacatcatttccagttgactgttggtgttgattgtgttttattacattttaatcctaggaatattaagaagccacatgtggttggtgtaggttgctgtctttaaatccagtgacccggaggagccaagatggccgaataggaacagctccggtctacagctcccagcgtgagcgacgcagaagacgggtgatttctgcatttccatctgaggtaccgggttcatctcactagggagtgccagacagtgggcgcaggccagtgtgtgtgcgcaccgtgcgcgagccgaagcagggcgaggcattgcctcacctgggaagcgcaaggggtcaggg

SEQ ID NO: 26174 - DNA, 2300 bp, Homo sapien
attagtcctttgccagatgtattgattgtgaagattttctcccactctgtcagttttctgtttactctgctgattgttccttttgctatgcaaaagctctttagtttaatcaagtcccagttgcttatctttgtttatattacatttgctgtttggttcttggtcatgaaatccttgcctaagctaatatctagaagagtttttctgatgtcatctgctggaattttttcacatcttatatttaagtccttgatccatcttgagttgatttttgtataaggtaagagatgatgatccagtttcattctcctacatgtggcttgccaattatcccagcaccatttgttgaatagggtgtcctttcccccactttatgtctttttttgctttgtcaaagatcagttggctgtaagtatttgggtttatttctgggttctctgttctgttccattggtctatgtgcctagctttatatcagtaccatgatattttggtgactatggccttatagtatagtttgaaatcaggtaatgtgatgcctccagatttgttctttttgctttggttatgcgggctcttttttgcttccatataaattttagaattgattttgtagttctgtgaagaatgatggtggtattttgatgagaattgcatatacgtacaacaaatagcactatgaatggaacagtatctcacatttcaatactaatatttaatttagatggcctaaatgctccacttaaaagatacagaattgcagaatggataagaattcaccagctatttgctgccttcaagagactcacctcatcagagaaatgcaaatcaaaaccacaatgagataccacctcacaccagttagaatggcaatcattaaaaagtcaggaaacaacaggtgctggagaggatgtggagaaataggaacacttttacactgttggtgggactgtaaactagttcaaccattgtggaagtcagtgtggcaattcctcagggatctagaactagaaataccatttgacccagcaatcccattactgggtatatacccaaaggactataaatcatgctgctataaagacacatgcacacgtatgtttattgaggcactattcacaatagcaaagacttggaaccaacccaaatgtccaacaatgatagactggattaagaaaatgtggcacatatacaccatggaatactatgcagccataaaaaacgaggagttcatgtcctttgtagggacatggatgaaattggaaatcatcattctcagtaaagtattgcaaggacaaaaaagcaaacaccacatgttctcactcataggtgggaattgaacaatgagaacacatggacacaggaaggggaacatcacactctggggactgttgtggggtggggggaggggggagggatagcattaggagacatacctaatgctaaatgaagagttaatgggtgcagcacaccagcatggcacatgtatacatatgtaacaaacctgcacattgtgcacatgtaccctaaaacttaaagtataataataataataataataataatttaaaaattaaaaaaaaaagagactcacctaacacttaaggactcacattaacttaaggtaaaggggtggaaaaagagattccatgcagatggagaccaaaagcgagcaagagtagctattcttatatcagacaaaagaaactttaaagcaacagcagttaagaaagacaaagggagacattatataatgataaaaggcctgttcaacaggaaaatatcacaatcctaaatatatatgcacctaatactggagctcccaagtttataaaacaattactactagatctaacaaatgaaatagacagcaaaacaataatagtgggggacttcaatactccactgacgacactagacaggtcatcaagacagaaagttagcaaagaaacaatggatttaaactataccctagagcaaatggacttaacagatatttacagaacattctacccaacaactacagaatatacattataatcatcagcatatggaactttctctaagatagaccttatgataggccacaaaatgagcctcagtaaatttaagggaattgaaattatataaagtactctatcagaccacagtggaataaaactggaaatccactccgaaaggaaccttcaaaaccatgaaaatacatggaaattaaataacctgctcctaaatgatcactgggtcaagtatgaaatcaagatgggaattaaagaattcttcaaactgaatgcaaatagtga

SEQ ID NO: 26175 - DNA, 2300 bp, Homo sapien
tctgaggttactagttgatccaaaatgtatttagttgttcagagatgccaaatcttgctcaatatttagtctgtgttttagtattgctccaaaccttaaacctaaacctaccactgacttcaacagaactcttcgcttattttaactggagatggtatgaagcaatgagtcaccactgactatacataccagcagtgcctgatgccaaatggttggtgtgttaatataattttgtacacacaacaatgcacacattccaatacggtaagtaaaatagaaaagtttcaagagtgagagcacgtagtagatatttctcagaaatctatgtgtgattacctaaccttagcaattgcaattaggggaaggaaacggagaaagcagaattcagctgtgttttaagatttattttatatataccttttgtcccttgtaaaaagaaaatttgaaaaagaagaagaaaaagaagaggagggtgggggaggaaagggaaaaggacaaatgtgaaaagaggaaagagatggagaagaagaaaagaagaaagaaaagagacatctaatgttaaaaaagttttatttcaaaatctttattaaaaaaatgctttgcactgagcaatagagctcagggaaaataacgccctctcttcaacttgtctttctaagtaacgtgaggcagttgggccaacaatagtgctcccctctacctcttcatctctccatttcctaaatcttagaagaaaataaacctacaagagtttagcccccaaatctcagtgaaacagccatggaagggagagaccagtgaaaatctacttctactttgatgataaaggttgagagaaatgcgataaaatttttgaacttgagacacaaactgggctgaacacacttggtattaactccgtctttcaccttggcctcaggccttatcttattcctccagcattccttgggatggtaaaggcaggtaccctcatatgcaagtcatagttaggagaagcgttagcatgtccacctccaaaagctacattaatctggagtagaactgaaccctgtccaagggagctgagttacaggacatgaggctctggaaacaggggccatttctttctttttgtttgtgtgtgtgtgtttgattgtttgtttttgtctactgccccaataaattggtttcttttcttagagtctgatgctaaagaagtctcgactcaggaaaaccacaagggtggacttgggaagactcaacaggttgtaatgactctccagcaaatcatgtcaccatgccatttgatgatggtaggaagaaacaaagccttgaagattcatgcattgagagaataagagttagtgagtaaaccagatgtgtttcaggactgggaccctgcagtcatcaaccacctcacacctgcgtcagtaacaaacccaagctacagcatgatttttgttctacctcagcagatattttatagatggaaaaactgaggcataaagtgggtaaatacctcccccaaggtcacgagataaagataacgcagtcatcaaatattctgtctcctcaacatctgtcttactggaattcttgatggattggtacccccttattatagtactgattttaacataggttggttttgaatactgggtttttaaaaatcttttcaaatcatttgtaaattatggaaatgtatacatcacatgaaacttaccattttaatcatttttaagtgcacagtttagtttaagtacattcacattgttgtgcactgatccatcactatacctttttcatctgctccagctcaaactctgtacccattaaacaataacttccctttgcctcatccctccaggccctggcaaccacctctgaatgctattttatagcaaaaagaaatattaacttttgagcttggtttacaaccaaaaaccacaattacatgcaggagagagggggtgggaaaaagaggttaactcagaactcagttacttagaagactctgtgagtgtgctgtgtgtgtgtgtctttaaaagactctccacctcccagcccgcctcctcacactttgccactgggttgttcagtccccaggttccctcagtccccagaaggagccagcatggacaatctcctttacagtttcggaagcaggtttgttgccatggagttcacattttgacgggagttgagaagtataaaggtaaccatttgttttagtttcaacgatctgacaaaaagataggctgttgctcttcttctggaaaagcctgattggtaagattcctttaagggctcagccccaaaga

SEQ ID NO: 26176 - DNA, 2300 bp, Homo sapien
ggtgaaagggggggattcagaatgaaagacatattgaagacagcaggaagaacagaacacatcccttggttcccctcatggaccaggcagagtcatcacatcattaatctaaccttcaccgaccactgtaaggcaggccacacactgtgctgaggaagagaaactgtgaatgttgaaaatgcttgtgagcaacaatgcccacacatacctaagagagatggaaaagtgatgggcagggaccaggcccaggctcggaagtgggaatgaatgtgactaatgaaggagggtgaggaggacatgaacctaccccaaagcagaggatctcgattcccaagagctctttccaaatcaccttcatgaggaaggaagacatagcgaagacacctgcctaagtgggattctgagctgtgccgttattctaaagagaaggcatctgatcctttaaagaccccactgctaatgcagaggcctgtcatcagcccattagcttttctgcaggacacttggagagtcccaggccatgagacactgtataggtgggctgatggagggtctctgccacccaactgagcacctgcagatgccagctctgaggccctcaccactgcggcattagattactggagcttcttagggctttcagcaagcttacttgggaccttatatttggcctcaggagtcaggcatacaggtgaaaaatggctcctaccactgaaaaccagcattctggagtggctcagcattccaaagagtgttacacaaaacacaaaattccaatagttctctgctgccaaaggcataaccagagtttatctggtcctaatattctggtttaatttcccacaagcctctactcaaactgtcctttgctgtcctccaaacatgctgcctccattcgtttttgctgtgtaacaaaccacccccaaatttggtgtctaaaaacaccaccatttatttagcttaaaactctgcccatcaacaatgtgggctgggctcagctaaggagttcttttggtctcatctgggcttgcttctgtacaacagtccattgttgagtcagcagggcactgcttggcctggggtagcttcagctggaatggtccttctctgttccacatggttgtcatcctccagcaagctagctcaggcttattcacatagcagctggagagagttctgagaggacaaaagcactcaaggcattttgaggcatagacccagaaccaccacaccatcacctctgccatatattactgaacaaagaaaatcacaaggccagcccagattaatccgccttttgatggaagcaactgcgaagttggattgcaaagatgcatgggtacagacagtgagagaattacagctatttttgtaaacactgctatacatgccttctgctttcttgcttctgttcctttgttcaacttctctcttctgccaccctccctccacgttttcttttcccccttaattatcttcattcttcaaggcctaatcatatctcctcattggaaccttctctaactacttcagctagaaggaccctctctctttcctctgcatcttgcaggcctgttgcatgtcctagtttgcatggactgtgacttattctaccatgcttgttcatgggcacaatcatatgtaatattctcaagggcaaggaccacatcctgtattctttgggcactgaacacaaagtcagtgctcacacatagtaggtactcaacaaatgcttcaggaatcattttttcttcacacatctggttttgccttaaagttcaactccaaacctgcagcatcctgctttgctgtagattctaggtttttgagggagagactatgaaggaaatagaaaaaataaatagtttgatgaaaaccattgaaagttggaccccattcatcttttgagcatgagatcaaatgtcttttgctatgaggatagggatgggactagatgtaattcccaccaccagtgttgagatttatttgccttctttttgggtttcccctctttatttaaggacctcgtggattatttacgggttcactcgcatagtgctgtttatgcttcatccatgagcccaccgatagcagagcaaatcatcagatcactaaaacttatcatgggactggatgggaccactcaaggtaagaggatctgcagagagcacagctcctggacctctctgtctcccttctgcctcattaatctccccgcttctcaaatacacacctttatcttatagaaccctatttgtaaatcaagccatgtgataaatgcacaaaactgccgttagcac

SEQ ID NO: 26177 - DNA, 2300 bp, Homo sapien
actctcaactgcctctactaaaaaaaaaagatataatcataatccaaacagctggcagaaatgagagttttattgatcttcagaagaaccaatgaccaccatcccttacctgggtagagcattatagtggaggggctaacaacacagattctggaatctaggattctagaatccaattctggcttggccacctaccaactatgtaaatttgtgtaagttacttggcttctccttgcgtataacataggattacagttcttacactaatttggttgttgtgatgactaaatcaataaatgtcaagagcttataacagtggtgacattacatatgggtgagctataattattgtcgttattactattgtcctttagaggctacctgatccaattagtagccaccacctgaattactcatgacacatttggttataagaggcagaagaggaaatgtattggctgacacagcagggacgtccaaaaaaatggtctggcacagctggacccaaaggttcagatgatccatcaggactctcagtgtcctgcgcagtggcttctatgtgagtcaatatcattctcaagcaggcttcctccaggttaggacaaagatgtagcttgataattatcccatgcttagacttcttcctcagtggatctaaaagaaagactcaaatagtccctagttgtgctccatcatcaaaccaataatcagggggatgaattattccaactgattaagactggccctcataccaccttgtagaaaagaggaagggcagggccaaccctactcaaacagtatggttctctggaggaggatgctgaacacaagatgccccctgttcaaccctttgaaaaggcacaatctggggccatttctctaagaagggaccagatgactatgattgacatgtttactgaaatgtttaccctatttccatctgaagagttacaaacacccatgagtgatgttcaaaatattgtataacctctagagcagaatctctgaccagttcgtctgaacatctcaccactcagaatggaggtctgctaaagacaaccaataagacgaaagactgtagtggcacattcctgccgaacagcaatcctgcatcaaatgcaaactttgggctgatttctaggggacttcaatgtttaatcctattcattcttattgagcaaacactatctagctttggctggcttacttacccacctgttttgaagcaggacccgagtagacaggcatcttcaggatgggactttctgctctttcatcactttttcatctcacatgcgtgaactctgcactgggacacacacttaggacacaggctataagagctgaagcaccaataaccttgacatggacccatgtatgtactttgcttgtctttctgttctgggccaatgttgtccttttttctggcttgggaaagcaggggtccccctctttcctcccttctattagtctaccaccaaatgcctcaaaaaacagccctaatctcagcaggacttatctttgtctatgaatatgctatccctacaaattcagattggatgaaggatcctttgattagagatttaaatgagggacaatttaatgagccaattcagcttagctaaaaagcatctaccaatatctgctatgaagtgtggggggtgggggaagtggttatgttccttcttatcacactcccttctcttgagttgatgtttttaaggtactttgcacagagtctatacaaaatagatacctcccctgcctcccaccagccctctagcgtatcctggcttcagttgcttgcagcacctcgtagaaccctccacctcccttcctgccttccaggtgcaaggtagtacctgggcatcagtgcccacacctgctccccaggagatatctcccttccctacttcctcctcccagctagtgctgctggcctgcagaaagacttaaagatgcttgccaagttgaccggacctttacttccctctttctagtgggaattgatggatttcacgcctgtctcttttcagggctgcagagagtacagcaacttgcgaaaaacacaagatacttcagacaaagactgcaggaaatgggattcattatctatggcaatgagaatgcttctgttgttcctctgcttctttatatgcctggtaaagtagcgtaagtatccaaggcatctcataatcacacctaaaccccaaggtgacctaagatggctttttggcacaggcgttagattatgcatctggaatggggtgagtgagttcagaattcactcgtacggcttc

SEQ ID NO: 26178 - DNA, 2300 bp, Homo sapien
tcaagaggcagaatggttataaaagttaatgtcagacacctatagtacaagcactcctaggaaaggtaatctattacttggggtataaacaaataccagatttgttacatgcattttaaaaacactaattgagaattactctgtgcaaggcattgtctcaaagattatacttgtcaggatgtatatactattataccagctgctgtgcaaacatccctacatcacaatgtctatgaacaaagttttatctcacttgctcaaggttcaatgcagatattcctggtccaatttttctcttttgagcagtaactcaatttgagttcctttcacctcagagtcctttgccatgtagaaaggaaagagagggctgggcacgttggctcatgcctgtaatcccagcactttgggaggccgaagcgggtggatcatttgaggtcaggagtttgagaccagcctggccaatacggtgaaaatctctctctactaaagagtacaaaaatcagccaggcgtgggggcaggattctgtaatcccagctactccgtaagctgaggaaggagaattgcttgaacctgggaagcagaggctgcagtgagctgagatcgcaccactacactccagcctgggtgacagagtgactctgtcaaaaaaaaaaaaagaatgaatgaatgaaaaagaaaaaaaaaaggaaagagagagtgtgtgcagataatcactcaggatgttttatggtcaacctggaaggaaaaaagctcttcacagcccaaacctagatccaagtatacctagaaaatgtctcatagccatgaacccagaaagaaaactagatactgggatggaggtggggagtggggcgatgctctgaaatgttctaccacaaaggtgatcccaatcaaggtctagtgggaaaacagacatgcaaacagacacaagtgccccaagtgtcataaaatcagtaataacgatatgaatagggtgctctggacgctctgctgaaggaggtaggattttaaacatttttatcagctattggtacaatttcataaatgtgcttgaaacttaattggtttagtctattaaatttgtaattgtttttccacaaaaattgtaagcccgtgttccctaactcaaaaacagagccctgctggcaagcctggttcggcaactggaatcagagcgtgggtgtttatcaatactcgttatatgtgcttactggaacataaattcacctggaatggggatctctcagcgtgaagggattttaataggattcattcatacatttgttcaacattttataaagacatctgtccccaaaattcaatttacaatttttacaacattttacaaagactttgatctccaaatctccatttacaaattattttacaagaatttacattcattgcaaaggtttctttccagagttttttaaaggtcatttttgccttgggtccaaaactgttacttttagatgagaggagaagcagctgaggtttacatgtggagactgtgtgtgatgaaagggcaggacacagcggcccctggatcctaattcagaccagcctgcctctggcaataggaaagtcatttgttcctgcgagcccgtatcataatctggcacaactggaggttagaacaatccttaaaactctttggctgtgggattctagtttgccatcttaatttatacattctatttcggcgctgattctccagccctttcccttttaagtgatcctaattagaaaacacacaggaggatccttccaggatttaaaagctgctgggatcccctctttgatctcccatctgaaatacggacggttattgtttcgcgtttccccccactccccccgacccgcactccagtgacaattattggcattttagagcctagagatagaaataagatgtctgacaggcccggctgcctaaaaatccaaagcaagcacccctccaaacatctcccctcctccctcgcaccgttccccacccaaaaaaaaataatgaaaaggaaaaaatatagcagactctataaacagctgccaatttattaataagatgctggagttagttagaattttaaagatgcttcaggcatctttaaggaggcagcaagcccttcctctcccgggcacaaataagcccaaccagcagaccctaccttaactaccgctatttaaattctgcaaagtaccgcggtgaccggaggaaccttcgcaaaggcgcaagggtttgccttaatttggttaatacttggttgagatgccttgcgagaactcgaaagcagttgaatta

SEQ ID NO: 26179 - DNA, 2300 bp, Homo sapien
cctggctattctccttgggaaattatgtcctgacctttggcattgcttcctaaaggggtagactcccggagttctttctcccaaagacttcagggatatcatcctataaagtctccttgcgtccctccagcctcgagtaacattactcagcctccgaagggcaacgaaagactggtagcacccccaagcaagcacattctccacacttcctctgctcatcccaaacctcgctccttcccacctccccaccaaccccgcacctgacccgtgacagacagaactgaaggagcgcagcccgcagacctggaagccgggtgcagcctccaggcacgtgcccccgctccgcctctgcctaagtcaagtggcccgggcaaaactactgccaaaacagttgctcttaggtggggcaggggacctgcctccctgcatccacccggcactagctcagcacccccgccccacaaaccgtccccgcagccgcgcacggccctctccggcggcgcactcacctgcagctgggcttggctggcgttgcccgcggccgcgtcgggcccgtcggcggctcccgagccgcgcagcacggtgatgtgcagcgtgagcagcagcagccccagcagcagcagcagctcggccgccaggcgcaccatccttttgagacgcgcggctttaggacccggcgcggcggccggcggcggcggcggtgacgccgggggaggaggagtaggagcccgggagcccggcagcgcggctcccgcctcggctcccgccagggctccgcttcccgggcccgcggggctggcgctgggcgcggcggggtgtgcggggccgggggagcaggagctgccggcgccgccgccgccgccgccgccgcaccacggcggagccaccgcgaggccgggggtgtccaagccggctgcggagcaagccccggcgctgcctggcggcggcggcggcggagacggagactgggtcccgggacagcccgggacccgggccgggccggaggccaccctgctggcagggggctgcggggtcggcggcggggcgggcgcagccgagcccccgagcgcacatgggcgccccagatgtggccgcggcgccgcagctggagcgggagcggccgccagagaagcgcggggaggaggaggaggagaaggagaaggaggaggaggaggaggaggaggaggaggaggaggaggaggagtaggagggcttcagctgcggccgggagttacctccacgcttggcgcccccgccctcgccgccccgagccactcacccggcaagccacctccactactctccgcgctcctcggggccgcctgccgcgccgccccgcactcggagtcccggggagggccggttccagatgggggccccgggcacaccgaggttgtcacggtttggcggtagccggggcgccctcggcggcagcgtcagcctgccgggctgtaccaagtgcccgctgccgaggtcgctgtgacgggcgcgggtagagcccttgtgcacactgaggctcggggctgtgggtgggtggggtggtgcctgggctgctttagaaacctttattggcaaactggagctggagttgcagtgatggaaaacggagggggcgccggacaagccatgcgtctgcctgcgacccctgcctgaagcagtcgggggagaggaggagtgccaaagtgtcgttccgaagggtcttgacacttgctgggccgcccgctagccgggcacggctgttcgcggatccgcggcgccccgtagagcctgggaagggaggggagtccgactctctaggcgttcgtctggtcacgggcgcaggtgttggctggaagctgcagagacgcagtgcccgcggctcaggcgctcaggaactcggagtgaatctcagctctagtgggcttgcctctgtggggggctcatcccgggggtgccgcgcccagaggggatttgggggctggcgtcgcgcagctgtcgatcccgggccaccgcctcatgaccgcgctgcagcctcgggctcccgcgtgcggctcatgccttgcagtgggcggttggcgaatggaagggctctgggatccggctgagggcgcggagtccgagcgtcagatgctagagcgaactgtgtcggtccgtggcaccgcgcacttccctccttgaccttgctcgggctcccgccttaccgaagtgactcggagtagcggacgctcagtccggccgggacttttatactgcgcttcccctcctcctacccgttccctcccttcctcctccccagcgccggcccagcccttccctcccag

SEQ ID NO: 26180 - DNA, 2300 bp, Homo sapien
ctcaaaccctcaaatgaatactaagcactgttccaaaatccaactgcccttccttcacaaccttacttgctccagtatccaagatgaccattttatatcttctctcctcaaacgtcctacttgtgctcctgccctcacttcatatttcactgatggaacaggagtcatgagatggtaactcttttattaccatcactctatttatactcctgtctgcatagctcattttctttctcttcccaattgttacacagaacaagctttcctgcttctgtgaaaggccaatgctcacacatagccccttgccttcttgaagaattcactcctcatttctcctctctcagttttgcatcatcaatctctccctttctattggatcgttctcatcagcctcacagatgccctggtatctctgatcttacatgaaccaaaaactcttttttgaccacatgttcatatatctcccctttttatagtaaaacttttgcaagacttatttgtatattctgtctccatttcctcaccttccatttgttcctttacccaatagacactggagtctgttcccatgatgcctctgcaactgcagagcagttggtgacctcattcaggtcaccagtcatggctgcgttgcccagttgaatgagcacttctctggcctcatcttttttgttctcacagcagcattcgatagaagtcctctctccttaaggcattcttctcccctggcttctgtgacacacctcttggttctccttttaccactttcatcatgacacctcactctcagctccctgtccacttcacagcctccctgctattatcttcacttacatgtcccagaggcatctcatattccacatgtcccatataaatccactgacatgaactctacccttgtgaaactggaagctgtctttgactcttcacttcttaactctgaaatgcaatccaacagcatatcctgttggctctgtctcagaactgtgccttgcatccatccactcttctctaccctggtccacatcccatcacctcttacctgaattattgtgaaattttctaacatatctatgttcttccctctcattatccactgatcagatggagccatcatttagaagctcttcaatggctgcttcctcaccaatcctagaacagccatattctttatcatgacctgcaaaatccttgcttttttctgcaagttcatgtgccactttcttccttacacactgttctccagtctcttttccatcccttagtcatgccaaagtccttcctatctcaaggctttggtgtttgtgattccgtctgcctgactggctctcctgagttctttgcagagctggtccttttattcccccagctcaggactcaagtgtcacttttccatcaagtccttccttgaccaccctcttttagtaggaactcccagttattccctatcttttgctccctgtttatgtcctgctaagcacctatcacaatctataataattcctttattctgaatcaattattgtcagttttctttctagaacataagcttgttctctattgaatctccagtgcctagcacaatatctgctgatcacagccacgcgatatgaaagtgctgaatgaatgaatggaattgtagaatgccatgtggctgggcagtgctcaatgcttatatgtacattatttcatttgccttactgcagtttggttgtatattaaataaaagagacaattcatgtccatttaattacctttctgctcctgtaacaacctaagagcaaccaccatgtagcaggatcccagcactttagatgtacacttactctaattctctttagctaagtggggctataaaaacttttacagatgttcagaaatgggggattgtgtggcttcatgaaagatgacttgctttggagtctggtactggctgtaggataaatgaatggtatggtcttagccaaatcttttaatttctccaggttttagattctttgtcaatgaaatgagacattggggcttggctttcttgcctacaacaacattctagaatttggtgagtgtctgcaacctgccttctaaacagagtgcctcaccatggagtgcaggtgggttggagcacagatgaagccccggtccaacctgggcattcctgcagccatgtgcagtgacccttgtgtatgtgagtacctgtcatgtgcccacgtatcctggtggcacaaaaggtacttcatgtagattgtcaggaccaagacacagaacgttcttggggcacaccacaataattcccccactag

SEQ ID NO: 26181 - DNA, 2300 bp, Homo sapien
agggaaacaggaaggaaatgaaaaagagaagaatatgaagtaaacgaaaataatgatgaaggtaaaaagatgaggcaaaagaaaatgaagattgcctggtgcggtggctcatgcctgtaatcccagcactttgggaggccgaggcgggcagatcacaaggtcaggagatcgagaccatcctggctaacacggtgaaatgccgtctctactaaaaatacaaaatattagtcgggcatggtggcgggcgcctgtagtcccagctactcgggaggctgaggcaggagaatggcaggaacccgggaggcggagcttgcagtgagccaagtgagccgagatcgggccactgcactccagcccgggcgacagagcaagactccgtctcaaaacaaaaaaagaaagaaagaaaatgaagataaaggtgaagaagaaaaaataaaatagatgatgatgaagaagattttttgagtacttaagtgtcaagcaaatggctaaagtccttacaggtattattttgtttaatgttcacaataactttatgaaataggtatttatgattgtactcattcgacagctatagtaactgaggcatagaggattaacttgcctagagtcacacagaaagcaagtgatcaacctggaatttgaatccggacagtctgattacagagttcatattcttaatcattaaactctttggtctttaccaagagaagggtattggaatcagccacacagggacacagatagcatttgaagtcaaggtttgggggctttcctgttgttttctcttccagagctcacatccagactcaaggtggtagatttaagtgccttgtcaggggaaggctcccctctgcctccatttacaaatgtttccttcttgttttctgtcaccgcggagagcagtgtggccaggagccctcttcataccttttcttctcgtgtgtcctcaccctccttgcatcctttctgcctctcagttcctggctattgcagcttttctgggctcccttgtaacatgaaggatttcgtttttaaggatctctttacttgtttgattcgttgattcccagctttcctggaaagactcatggggcaaagtctccctggcctggcagttattacactgtaaaagtttgtcctgtaggtcaaccctgcaaataagtttgaggtgcctcacataaaatcagagagagccccttaaaggaaatcaagtcagggaaaccagcagggaaggccaaggctcaccagcaaatgttaccacagtgcctcactccctcctcctcttattgctttagcttgcaccggattcctgattgtaaaggaagcttggttaggggtggtagtttgggtgagccagtaagtttgagtagagctgggttcagttcctcagagcaaattatgagaagcccaactttttctttctgaagcatcaccaacaatgctaagtgtcctagaatatgagataactcttcttggctatgcattgtagcatcctcagtgagctagacaaagaatgagctagacaaatattcaagggaaaactaccacctaacacttcccacttgctgctctaagtactttctttacaccaactcatttcattatttcaactctaggaggtagggcaatttgttcttcccatttacagatgtaaaaactgaggcacacaaaagttcactggctaccccaaggtcacgtggctagtaatgatttcaacgcacacagtcagtcattaagaacaagatattaaacactacgttctactgcctctggtttagtttgtcaccctgacaccatcctgacatgtgtcccccactgcccaaaaccccatccctgggctcagtgagtgagttcctaggacttattcaggcacatttggatctgatttcacgttgccaatgtatctggggttttaatatagtttctgcactacgacctgctttttactgtttcctctgttggcaagtttctgcccgtgagtagtaatgaatacaaaaaaggctttgttcaggtgtatttatttttttattgttggggtgggggagataactttttccatgtaatgatggaaaaatgagctcttgtctgtgtttaggaattgaagacacttttaggacagctgccaccgaagtgagtctgcttgcgggaagcgaggagtttaatgccaccaaactgtttgaagttggtaagatttttttcttttttaatccaaatattgacttagtgcctcggagattccttttgcttttgcaatgccatccttggatccacgtaaatgtttcattttccttttctgg

SEQ ID NO: 26182 - DNA, 2300 bp, Homo sapien
gactagctgggattacaggaacgcgccaccatgcccagctttttgtatttttagtggagacggggttttaccatgttggccaggctggtcttgaactcctgaccttgtgatctgcctgcctcggcctcccaaagtgctgggattacaggcgtgagtcactgtgcccggccaaaaaataaggaaatctgtacttttttttttgagacgaagtcttgctccgtcgcccaggctggagtgcagtggcgcgatcgcagctcaaggcaacctccacctcctgggttcaaggaattctctgcctcagcctcccaagtagctgggattacaggcacccaccaccatgcctggctaattaatagagacagggtttcaccatgttggccaggctggtcttgaactcctgaccttgtgatccacccgccttggcctcccgaagtgctagattacaggcgtgagccaccgcgcctggccagtattttcttacaaaatataaatattataatttcttagttatgaaaaaatatctcagatgacagtgattcaaagttgcttgaggtttcatagtccatactgcttagatgtgttttcgttttagctgaagctcgtaattttccaaagcctgagttttcaatctatgtttatgcttctagactaatggtcccaagctcatttcatggctgggccaaatatcatggcatgatacagacatgatggcattataggctgacagatgaaccactaaatcaactttgtcaagtcatacatggctaaatgatagcctatttcagagaaatattgtgagaaataaccaaaagaaaataaaggtaattgaggcagattcttgtgaaatctttggaagaaaaacatggttaggaagacaaaacacaccaccacaaaacaaaaacaaaaccaggcatttaaatttactgttactcaattaaaaatcagcacttttgtagtaaaaattttttcctgcatttgtgaatctgtataaatatttgaatgcaacgatgtgtatatataattgattttaaatgatttgtcttataaataaaatgttatataataaaaattaaatagactcttaaaccaagaattaagggaatttaaaaatgccagataacagtgcttgtcagactatctctgttataaaagaccagctttcaaaaattttcaatccattgtgggtcaatacttatgtaaaatacaaataaaaaactccccaaataccacccaaaaccaaacattcaaacaaatttgaaacttaaaaataaaagctcaaatttttgcttgatttagcagataaaattgttttaaaaaataacatgaggaactagaaaagaattgtgaaaactacacatattgattattgaaaatgtgcttataaagcaactaacatgaataaaataatactctcttgtgggctggtaataaacactgggatgtagagtgtgttctgagtaacctgcttttttttattttggaataggcagctaagtaacttctttatgtttcttttcttttcttttttctttttgagactcctttttttttttttttttttttttgagacagagcttactttgttgcccaggctggagtgtagtggtgcgatctcggctcactgcaacttctgcctcctgagttcagtgattcttctgcctcagcctcctgcgtagctgggattacaggtgtgtgccaccacaccagctaaattttttgtatttttagtagagatgaggtttcaccatgttggtcaggctggtctcgaactcctgacctcaggtgatccacccgcctcagcctcccaaagtgctgggattacaggtgtaagccactgcgctcgcccctaagcaggtactatcagtggacagagagatttaaattctaacctttttatattacccaattaaataattttatccgacttcaatgggaataagaaaaaataattttaataaatagctttgataccttttttgtattgctcaattaaataacttaaaaataggatttttgaacattatctttgcatgaatttgtgtaagtaacttatgtgttggtggaaagaaatgtataccatctttgcctgttttcctttagggtaattcctctcctgcaattacttttggatggaagtatgcccctttctcagtagaagatggtaatcttggagaatgaccatggagaaggggatgagttctggagaagggctgccttccagatcatctcaggtttcggctggtaaaataacagccaaagagttggaaacaaagcagtcctataaagagaaacgaggaggc

SEQ ID NO: 26183 - DNA, 2300 bp, Homo sapien
tgaggcaggagaatcacttgaaccggggaggcagaggttgcagtgagctgagatcgcaccactgcattctagcctgggcaacagagtgagactctgcctcaataataataataaaaaaaagggtccgaagaattttgttacttttacttgagcagtattcacctaccagaggatggcctgtgtggcatctgggtgtgatacccaagacaaaagtatacagagcagcactgggagatgattattacaatgtagttaaattccaggaagaatgttgcctaagaaatggaagggagcatgtctatgtctttttaaaactttaacatctttcttttattcctgctggttccagttaatattgctgtgtaaaaatccactttaaaggtgcaaaagaacaactattttattatgctgatggattctgcgggtgaggaattcagaaaggtcacaatggggatggtttatgtctgcttcctaatgcctgggccaaactttctggcactatataacaagggccccattttctccagcttccaataacatcttccttagctccctttaagccctcattggcagcttcctcaagtccttttagactcttgttaatactttggatcccttcctgctcttgctgcttcacctagttccaaagccagtgccacacgttttacttttatgatgttattatgttatgttttgttataatatccatcctacttctaggtaacaaaatcggtttcagttactattgctatgtaataaactgttattcttactatgtaataaacttcttccccttgcccctccctaagaagtcagtggtagaagagaaagaaaaaaagccccaagttacataataaaaccacataggttatatttataataatggtatcagtggttctcgaactttttggtttcagcatacctttatactccccaaaatagtagagaacactccaaagcttttgtttctgtgggttacatctattaatatttactatattaaaaattgaatacaaagctgaaatgtggctgggtgcggtggctcacgccagtaatcccagaactttgggaggccaaggcagtaggatcacctgaggtcaggagttcgagaccagcatggcaaacatggtgaaaacccgtctctactaaaaatacaaaaaattagtcgggtgtgtatcgagcgcctgtaatcccagctactcaggagtctgaggcaggagaatcgcttgagcccgggaggcagaggttgcagtgagccgagatcgtgccattgcactccagcctggttgacagagtgaaactccatctccaaaaaaaaaagaaaaaaaccaacaaaaaactgaaatgttaaaaagttatttaaaataacaataataaaccattatgtgttaatataattaagacattttaatgaagaataaatattttccaaaaacaaaaaaatgtggtaagaaaagtgttatcttttgcattagtgtaaattcctctatagctggcttaaagaagccagttagattctcatttctgcctttacattcagttcgacgtgatgttttggtggaagtataaggaaaatccatcagtcatgggtcatcaaaacccatgactgggtttcggtcttacatcctagccgataaaagaccgcctacactccttccccctgggcaaggctcgtgccccaactcctacaagcaatgcaggctgaaccttagttttccctaccgtctaacagtgctctaaggattgaaagaaagtaactcttaagcgacacctagataaaatgatggtcagtttaatttcatttctcatcacagtattagtcaatcaaccactcagatataatcacatcctgcgggcttattcaggggcggggtgggtagagataagcaatagcgcatgcgcagctcagaacgaagccccaggtggagttagcgctgcacctctgaggccaggtgagccgctccgaagcggagggcggagtcagagccgcttgtgggaggctgcttccgaccacgtggtaccccgaatgaccaatggggagacttgatgtcagccccgcttcctcaccctggcaacgggcgggtgactacttccggtgcagtgaaggctcggggctgaagcgggtgagtgtccctctttcccacgctgtccgcgccgctgccgcctccgcgctgctgcctctgtgtgtgggccccgtacgctagctgggacgtcctctccgggtccgagagggggcggcgcgcaggacaccccttgccccgggcggggctagaggagggggccaggatgtccctagttcc

SEQ ID NO: 26184 - DNA, 2300 bp, Homo sapien
gagaatgaaatatgaaacataaatctgtttatagaccatactcataaacatattaagattcatgacctttcagtggtaatatggggagttcacagatgtatctaaagaaataatgttttatttggctgaataatccaacgatcagtgcttatgataaaatcaattccctgtttggatactgtgcatttttctgttataataagcaatttaaatgtcctttttttcttccctttacagagactatttatactcccttattattttgatatcactctgagttttccatcattttagtctttaaaatatatgctacattggtgactttttttttttttttttaaatagagacagggtcttgctctgtcacccaggctggaatgcagtgatacaatcacagcttactgtaaactcaaactcctgggctcatatgatcctcccatctcagcctcctgagtagcaaggaccacaggtatgtatcaccacacttggcttgttatacgcacgcgtgcgcgcacacacacacagacgtgtatatatatatattttgagacagggtctcctgttgcccaggctggagtgcagtggctcaatctcggctcactgtaacctctgcctcccaagttcaagtgattctcctgcttcagcctcctgagtagctgggactacaggcatgcaccatcacgcccggctaattttttgtagtttcggtagagatggggggtctcactgtgttggccagcctggtcttgaactcctgacctcaagtgatgtgcctgcctcagtctcccaaagtggggggattacaggcgtaggctaccacacccagcctatggtcttactatattgcccaggttggtctcaaaactcctggcctcaagcaattctcctgcctcagcctcccaaagtgctgggattacaggtgagagccaccttgcctggtcagtaggtttgatttttaataccccaaatgtcaagtttaaccacaaacctggtcaaattcctgttgtctttcagaagttaccatatttataatttgctccaagttacaagtctggttttatttacatttacttatacagcatatctaatttgactgtcagttgtctataatatttagaccagatgagatccaagagtgttaaggccttaaagatgtgttttaattttaagaagaattaaggtatccttaaactctacagcagcatatccatccttctaaagtattccaaaaatgtgaaggacagacagaagacttttctgttgctaccaaacagaaaaaccactggagagctcatgaatatttcaaatgcaatttacgagcaatgcaactctagaactgcctttaaatggagttgtcctcttaaaaagttaaaatcggttttcagatatttttccagagagtactttgagatgcataaaatggaataaatcagtgctatacaaaataatgaaaatattttacacttttatttacaagttaatttcataaactatacttaacatgactaaacaacaaaaagttcttgacttccatcctttatggctagaaaaataaattattttaatagttatttaaacatgcctcctgcttccagagaaattaatgtattaaatatatatatttttcaaattatccctaacatttacacaaacttgagtagatactgctctatttttacacagaattgtaaacagccttttaaaaagctagagtaactttccactagttagaactgaacattgtaaaatataaaaattttataaaccctataatgcaggtaatttaattatgactgatctgtaggaatatacaataaaaatttgtcagtcatccacaattaagtacaattatttatggagaaaaattttactatgtccagaaaaagattttattcatgttcttgaaagatagctttgttcccaataaatattccctcctattatttttgtacattttaggaaaagatgtattcagttcaaaaataagtaacatccagttatttgactttttgcttttttcttgcttgaaactgctctgttttggtttttatagatttaatcaacattgacaaagcaggatcaatggacttcctttgtgattccttttcaatctcactctcttttttctttattgcctgagtaagttcttgttctttccgttctctttgccgggccttctcctcaaggattttttccatagcttttgttttcttgaaattgggatctgaggggtccaaattgaacaagtgggaagtgtacattgcctgaaaccgtgcatcgttaacatttacctgcaaatc

SEQ ID NO: 26185 - DNA, 2300 bp, Homo sapien
ctccctagtagctgggactacaggtgctggccaccacgcttggctaatttttttgtattattaatagagacagagtttcaccatgttggccatgctggtctcaaactcctgacctcaggtgatccacccacctcggcctcccgaagtgctgggattacaggtgtgagccactgcgcccagccgtttcttgtttttaattatgaaaatttatacattgagaaaaattgagagaataatacagtgaacagcacctgtgtttggcagttgttaacattttgccattttacttttgtatgcatatacttttatggtatatcataaaaatgtatttatacaagatgttactatataatagacatatttaatagtagtctttttagttcactatagtctagaagataccatatacacttccccctcccataacatttgcctttcaagaacccaggctagtgatcttttggaatgtcttatattctagatgtatctgttccttgccactcggtccactatattttccataaactggaagttagacgagtggttccattagattcatgttgaatggttttggcaagcatacttcataggcaatgcttatctttcatattatatcacatctaggggcataggatttcatattgttccaaagatgacttgctgagggtggtacagtgcccagcgggggattttcttaggctctctaggtggtcaaacaaaaggcttgagtgggtcacacttggctctcatgggtagttagcccaggaaacacagcagggcagtattgggtgtttctcttcatcgagtcttcacggcagttcactcagcagtacagcttgggtacaaggaaaggagacacagtgtacagtagtcaccctgggcgagaagtctcatgttccaaataggaactgagagctttttaacagcacctagacatagcttccagatccctgttttaccagttacaggagtcacggtatcaaggaagcccaaagttataagcatttagagaccccaatacatgttattttccagtcaggaaccactttacctggtggtattgcctggtaatagagctagaaagttcactaaagatcagatttgtcttcagagaaggagaaagcgttttttaaaacttatatttacaggtagtgactgtcaaattattattataaagataagttttttcattttgcagatgagagtttgatatatagtgttgagtttatatattcaaatcacttgggggttttttctttgtctcttccagtattcttatgctaagaaaatatttcttctatttaagatacagtagctgttcccttgtattttctcataggggttctttgttttattttgtttgatatttaactcttaaattcacctgcgttttattttcttatgtattatgagataaggctttaatttgatctttttttccagaatgaaacaaattgctcaacagcagttattaaacaatcttttctgtttctaatgatgatgctatattttattatatactgtttcatcatttttattgtgtaggaattttttggttattttcacttttcagtacacgttaatacactatgtcactagtacatggaatctatgtaatctttctaaagatttccttgaatggaattttttatttagaatttcattaaatgtgtatactacttttattatgaatggatgttgaatgttaatcagtattcttatgtttatggacatgcttattctgtatctgtggaaatgatctatggtttttcttttttaattggtaatgtaaattatacattactttgaaagaaattcttcctttgtaacatgcagtcactccatgcagaagcattgtatttattccattcatatacccacagtcttctttcagtaacgtgtttttttcttttagtttcaacacatttattgttaagattattcctagatatcttatatttttgttcctagtataaacagaatgttgctgatagtcctgtaatttttaccactcttatgttggtttgttgtgccaggtataaataaaaaatcggtaaaatctgcaaaagatggcacatctccagaagaagaaattgaaatagaaagacaaaaggtaaaatacgattattgttacatgcttagtggataattcataggtacaatttaaatgaagttgtacatgtcactaattttaaaaaacaacttattttagcagtggcatttataactaaattgtaagagacataattaaatattttagcagtgtagtttctaaatacagtgttttttttaccaaacat

SEQ ID NO: 26186 - DNA, 2300 bp, Homo sapien
atcagaatctgaaaggtcgtaaaaacgcttcaaatcctctgtagtgctatggctaatggggcgccctcttttatccacggcatagttcaacttgaacttcttgtcatgaaacatggctcgaaatctcttgtcaattttgacttttcgatccttttctggcatttcccaaaatctcgggtcctttgcaacccgtctaaaccgctggtcactcattatttcttgtttggatgacatttttaattcttaatctcgaccaaatgcttgaagaaaacaaatactgaaaaataaaacaaatgttttaatggtaataatggttagtacaataattaaatgttttaaaacacattcacaatatattctaagttaatatattctaagttaagtgtacataaaatagaggtaacaagtctaatttcatctctccaacgtattctgggtcacatgcaaaaaagcagaaacataccaaaatatcctctttccatgacagatcatttagagaaataaacttaaggtagacaaagcagaatcccagggctttatggaggggaacaaatgtttattcatccattgctctcacttagaatttctatttgtataccagtatgtgttactaattgaaggcaaatgtagttaagattccctaggccgagtgcggtggctcaccagcactttcggaggccaaggcgggcggatcacttgagcccaggagttcaggaccagcctgggtaacatggtgaatccccacaagaaatacaaaaatgagcccggcatggtggcgcgcgcctgtagtcccagctactttggaggctaaggcaagaggatcacttccacccgggaggtcttggctagagtgagcctaacggcactacagcacaccagctggggcaacagagtgagaccctgtctaccaaaaaaaagtaagaaagaaagattccctagcctccgttggcctcatttgtttcttcacattctggtctcattctgcttactccttatctccggctactgccaacaaacagcctttagttctgtaagactagcattctaactaaacagaccaaaatcaactcaggtttagctaagaaagtttcctttttaaattcgatcatccttcaaaagtaataaaaagtttaaaaataaaaagtaaatttgagtctccaggtaaagtctcacaccagttaataaatatcacttctttctataatatctgattctaccagtgatgaaggcccaagtgagctcattcccccaaaacatactagaacatatacatatgtgtgtataaattaatattgttcccttgtgaaaagtctccaatggtttagcatctctggatgggaattttgcaaagagccaaaagtcgttgattattaagcaacccccccccaaaatgattaaaagggcaatatttcttatttaaaaatcaagtccttttaattacactaactaggaaaaaaaaggaagctatcgctggtgcatttacacatttttcgatgtattacagcacttaactctctgagcaatcttacgaggtaggtaccacctcaaccaggagaagtactgcatgtattgtaaatgtttagaaggaaagcactcattatatgtcagataatccgagagaggggaaggcgaccggacctcactcccgacacgcgcccgcatccccgtagcccaccctccccttctgcccgctctctaattcggagaacacagggctggcccctgaactagggtctcctttccacctcctgtaccgcaggggggcagctaacagactgattcgagaagcgaccctgaaaaggatcgatgaagactgaagaatgagaccgaaaaaggctcaggaggaaggggcaaaacccctcgcagatccgaaagagatcctgttagagactagttttttccccgcgccacacacacacacgccctcaagcccttcatctcgagctcttcaactccagtccatccccactcaccgtccgcagtcctaccaagcctcacgtggggctcacacccacaatcctccgcgtgacgctccgccgtaatggcaagcgaactaggccaaactacttgcacgttccctcgagaagatctttggagtagacacaaaagccgcgctggcgcatgcgcacaaaaagcgccggcaattggggtcgcagctggagatgctgcggccggcagggctctggcgcttatgtcggcgaccttgggcggcgagggtcccagcggagaatcttggccgtagggaagtcacctctggtgtctctccccgcggtagcacctcgcccagaaccctgaatatt

SEQ ID NO: 26187 - DNA, 2300 bp, Homo sapien
cttcaggtagtcaaatttggtcggctcgggctgccgggctgcccagttcttctgtttccttttcaaatcccggtcgaaaatattcagggttctgggcgaggtgctaccgcggggagagacaccagaggtgacttccctacggccaagattctccgctgggaccctcgccgcccaaggtcgccgacataagcgccagagccctgccggccgcagcatctccagctgcgaccccaattgccggcgctttttgtgcgcatgcgccagcgcggcttttgtgtctactccaaagatcttctcgagggaacgtgcaagtagtttggcctagttcgcttgccattacggcggagcgtcacgcggaggattgtgggtgtgagccccacgtgaggcttggtaggactgcggacggtgagtggggatggactggagttgaagagctcgagatgaagggcttgagggcgtgtgtgtgtgtggcgcggggaaaaaactagtctctaacaggatctctttcggatctgcgaggggttttgccccttcctcctgagcctttttcggtctcattcttcagtcttcatcgatccttttcagggtcgcttctcgaatcagtctgttagctgcccccctgcggtacaggaggtggaaaggagaccctagttcaggggccagccctgtgttctccgaattagagagcgggcagaaggggagggtgggctacggggatgcgggcgcgtgtcgggagtgaggtccggtcgccttcccctctctcggattatctgacatataatgagtgctttccttctaaacatttacaatacatgcagtacttctcctggttgaggtggtacctacctcgtaagattgctcagagagttaagtgctgtaatacatcgaaaaatgtgtaaatgcaccagcgatagcttccttttttttcctagttagtgtaattaaaaggacttgatttttaaataagaaatattgcccttttaatcattttgggggggggttgcttaataatcaacgacttttggctctttgcaaaattcccatccagagatgctaaaccattggagacttttcacaagggaacaatattaatttatacacacatatgtatatgttctagtatgttttgggggaatgagctcacttgggccttcatcactggtagaatcagatattatagaaagaagtgatatttattaactggtgtgagactttacctggagactcaaatttactttttatttttaaactttttattacttttgaaggatgatcgaatttaaaaaggaaactttcttagctaaacctgagttgattttggtctgtttagttagaatgctagtcttacagaactaaaggctgtttgttggcagtagccggagataaggagtaagcagaatgagaccagaatgtgaagaaacaaatgaggccaacggaggctagggaatctttctttcttacttttttttggtagacagggtctcactctgttgccccagctggtgtgctgtagtgccgttaggctcactctagccaagacctcccgggtggaagtgatcctcttgccttagcctccaaagtagctgggactacaggcgcgcgccaccatgccgggctcatttttgtatttcttgtggggattcaccatgttacccaggctggtcctgaactcctgggctcaagtgatccgcccgccttggcctccgaaagtgctggtgagccaccgcactcggcctagggaatcttaactacatttgccttcaattagtaacacatactggtatacaaatagaaattctaagtgagagcaatggatgaataaacatttgttcccctccataaagccctgggattctgctttgtctaccttaagtttatttctctaaatgatctgtcatggaaagaggatattttggtatgtttctgcttttttgcatgtgacccagaatacgttggagagatgaaattagacttgttacctctattttatgtacacttaacttagaatatattaacttagaatatattgtgaatgtgttttaaaacatttaattattgtactaaccattattaccattaaaacatttgttttatttttcagtatttgttttcttcaagcatttggtcgagattaagaattaaaaatgtcatccaaacaagaaataatgagtgaccagcggtttagacgggttgcaaaggacccgagattttgggaaatgccagaaaaggatcgaaaagtcaaaattgacaagagatttcgagccatgtttcatgacaagaagttcaagttgaactatgcc

SEQ ID NO: 26188 - DNA, 2300 bp, Homo sapien
atgaaaagcaaaaggaacacaacaggcacattactgtccacggatattagcatgaggtacacaaagtgaaaaattagttagttggggtttattgtagatgagtatgtaagtggtcacttaagaaaaactctattatttgatgactaacaaattttgtggaactcataaatgaacaacttttctgagtgacattcgcaagttagaaaaagccaaatctgaggaaagtgcacctcccctgctccaatcccatcccaatttaagagtcataaggtaagcaccaccttttgctggcctagcttcatctggtagcaataaagacgtgggagtctagtattccccacattccactcattccctcataaacaccccagagttgctcttaggacttaaaagttccaaacacagatgtacctgctttttgagagaagggcaagggagaagggagcgtagatgtttttcccaggagtccaccttgtacgtcattcctaatatgaacaccctatgtttattataaaaagaactctcatatactttatcttatttgttctagtctcacaaattggcgaggcctcaatcaagttgtagtccaggtgctttctttggagggaaagggctatgagcgcacatcttctaagtacacgacatcagcagtgtagtacgtgcaccatgccttacaagtgagacacaaaaaatttattggtagtaaacttcctataatagacattaccagcctaagacttcctgagaaagacaccctgtcaatcatctgatcagacctgtacttgcacagagctctgctcaagctatgagttcaataactgtttgttgcattatacttgactccaactttgttccactcctgaataaaaatttactgaggcctgaacttgagaatgcgtgtcctgaaagtagaaaccctcagtctctggctcacctgggcagggagaaaggtttctcaaacgagccaagacaaatcagaaatcttaatttgatcttcctaaaacataagtcagatcactccactgattaaaacaagagcttcacattcccctagagcagtgctgaccaaaaatcatgagagccacatatgtaatttcaaattttctagtagccacataagaaaaaaagtaaaaacgagagaaattttaattgaaaaatttaaatttatatttaatatatttcatgtgacccaatatatcaaaaataatcactgcaacatgtaatcaatataaaagctcttaatgagctattttacatccttttttcatactaagtcactatactcgtgtgtattttacaacacatctcaattggactagtcacctttcaagtgttcaacagccacatgtgtggccggcagttaccatactggctggacagtgcagatacagaagaaaaccccaagtccctatcctgcaaggccctgatgatttgggtcctcctaaccttctctcccactctctccctctccggagcttcactggaggcctctataaggtcctttcagcctcaaggacgttgccgaaatgaatgcatgaatgaatgaaagcatgttacaaatatccgaggccaggccttgcgtgattacagtagaggccgaaagaggcagggctgctggtcaaggtcagacggctaggtggggtgagctcggggcctagccggaactagcggagaggaaaacaagcctccgcgtcgcccgccccgccgccccgccgccccgcgggctcacctcctccttcaggtagtcaaatttggtcggctcgggctgccgggctgcccagttcttctgtttccttttcaaatcccggtcgaaaatattcagggttctgggcgaggtgctaccgcggggagagacaccagaggtgacttccctacggccaagattctccgctgggaccctcgccgcccaaggtcgccgacataagcgccagagccctgccggccgcagcatctccagctgcgaccccaattgccggcgctttttgtgcgcatgcgccagcgcggcttttgtgtctactccaaagatcttctcgagggaacgtgcaagtagtttggcctagttcgcttgccattacggcggagcgtcacgcggaggattgtgggtgtgagccccacgtgaggcttggtaggactgcggacggtgagtggggatggactggagttgaagagctcgagatgaagggcttgagggcgtgtgtgtgtgtggcgcggggaaaaaactagtctctaacaggatctctttcggatctgcgaggggttttgccccttcctcctgagcctttttcggtctcattcttcag

SEQ ID NO: 26189 - DNA, 2300 bp, Homo sapien
gattagaaactgatgcctcggctgggcgtggtggctcatgcctgtaatcccagtactttgggaggctgaggtggttgcatcacctgaggttaggagttcgagaccagcctggccaacatggtgaaaccccgcctctactaaaaatacaaaaattagccaggtgtggtggcaggtgcttgtaatcccagctacttgggatgctgaggcaggagattctcttgaacacgggaggcagaggttgcagtgagctgagatcacgccattgcactccagcctagacgacagagtgagactctgtctcaaaaaaaaaaaaaagaaagaaactgatgcctggagcagttcgttaaattgaagggagactgtttcagtggtccaagaatgagataaactaaacctaggtggtaatggtaggagttaaaaggaagagtatttaggactctacaaggaaagaatcaacagtttggtgactgattagatctgaagatcaaagggaggaggcaaaactcactttgaagtttttgagtctggattagtaaaagtaggggaaagaatgttaatgatcagataaagggaatagaaaatggcaatagaaatatggcagttggaaaggggaattgatttgataaatagatgttttccttgtaggggttggagggagcagggacggtgagtatgctgagagacaaatgtccagggaataggcagttgaagatgactttggacttctgagaagatggccaagctgaagttagggattggaaagtggtcattgtgaaatcatggaagttgataagctgtctgagggagagcggggagctgcagaattctgagaactaagtcttaggtatttggtttagtagagtttgatgacaggaggaggaagcaacactaaaggtgaagaagggaaggaaccaaagcttttacaaattatttacttaatactgcttttaattgcttcatgacatattaaatataaatttaagacagtacttttattagaagagcctactgtgatttggattctggtttacttcagaatctaccttttcctgtaatggtcctcattgctgagaatagtcaatcaaactagttacagcttgtagtctgagagtgagcaaaatctgtgattctggaattctctctggccattattttccttaagttactaattagaaattggttttgttttaaagctggaaaataaattgattacttctctttaacgaaaggtaatatgttactaggttaatgctgtgaatcataatgatttctctgtagctttttctgcataataaggcaccccaacttgatggcttaaaacaacaactatgtagcccatgattttgtgggttggcagttggggctggatttggttaggaaatctgggtctggcttggctcatctgtgtgtctgtgatcagctgccagatcgtctgggagctagctggtttggagggcctcggtgcacacagctggctgatctctgccctacatctctcctcctcctctaggctagctcaggcttgttcacacatcgtggctgggctgggctccaagagagcaggtggaagcatgcaacacatttgagacctagacgtggaactggcacactgtcacttccactgcattcttttggccaaagcgagtcacaaggccagccaagattcaaggggaggggaaatagactccctatcttgatgaaagttgttagaaaacgacgtttcagaggccatagatgcagggaggtttgtgatttttgcagcctaccccaattaaatttttttttctctttcagcatttttctgattataaaactaagttgtatacctattagaaaacttgaaaacatacaacatatttttataggcattaatattagtgaatgtatagttgtctttccaagtatattatgcatcatgattttctgacagttggttgcattagatgttatttgttaaattatgtgattattaatttggcagaataaaagtggttgtcataaaatgttaatttagacactatatatttattttttaacatttatatatataaaaatttgaatcattttgttttcttgtatttattacagattcattatattttaaaaccagatggagtgtttatcggtgcaatgtttggaggcgacacactctatgaacttcggtgttccttacagttagcggaaacggaaagggaaggaggattttctccacacatttctcctttcactgctgtcaatgacctgggacatctgcttgggagagctggctttaatactctgactgtggtaactatcaagtt

SEQ ID NO: 26190 - DNA, 2300 bp, Homo sapien
agtcacccagtctatattattttgttgcatacaggctaatacagtctttttataacaattaaattattaagaatggagtgactatcacctactaacccagccttattttatactatgctccataccacccccattccccagtctctgattccagcccacagagcatcatttcatgttctggaacaccatatagcctttttcttttttgagacggagtttcacccttgttgcccaggctggaatgcaatggcgcgatcttggctcactgcaacctctgcctcccaggttcaagcaattctcctgcctcagcctcccgagtagctgagatgacaggcatctaccaccatgcccggctaatttttgtatttttagtagagacgggatttcaccatgttggccaggctggtcttgaactcctgacctcagatgacccacctgcctcagcctcccaaagtactgggattacaggcatgaaccacggcacccagcccacatagcctcttaacatgttcattgcaacacctgggacatgatttgtttagctgactcactctcgttcttcatatttcagcttgaacatcactccctagcaaagccttccctgactctgaccctacctgacctttgtttgccgcttccccttatatgccttcattgctcattgattttcctataaagaagtttgggtttgttgttgttgttttgagatggagtctcactctgtcgctcaggctgcattgcagtggcacaatctctgctcactgcaacctccacccctcaggcccctggccccaggattcaagcacttctcatgcctcagcctcctgagtacctgaaactacaggcgcataccaccacgtccagctaatttttgtatttttagtagacacggggtttcgccatggtggtcagcctggtctcgaactcctggcctcaagtaatccaactgccttaggctcccaaagtgctgggattacaagtgtgagctgccacgcccagccaacattaaggatcttgagagagagagagattgttctggatcatgttggtgggccctaaatgtaatcacaagtatctttataagaggggcacaaagggagattaaactacagaaggcaagtgatgactgagcagagactgaaatgatgtggtcacaaatcaaggaatgctggcagccacttagaagctgaaaaattccaggccaagaatggattcttccctggagcctccaggaggagctagccttgtctttgattttagccctgtaagaatggttttggaattctggtctctagaactatgagagaataaattcctgttgttttaacccattacgtttgtggtaatttgttatcacagcaatgggaaactaataaaaggaataaaactgtaaattcaaaacaataaaatgtctatttctaaagtaatgacctggacagactgtaaaagttggatattttttgtaggcataatttctcaactagctctgtgccttggatatttttaatatttatatgttttccctaaatattcattttgatttctcgtagctttgaaggtaccacttgtgagatgtctgtattatctgaggtatgtaaagacattgttaaacagtctttgtttgcctttgttccagtaaatcctcagcagtttctaactggaaaagaggataaagattttcatccagattgggaacaaagcagacttggcccattgtttcttttccgccatagcctagagataccagcttacaggatgatgtcagatcagttcatgtaccttaattgtgtttttacataagtgtagtttgtacctctagaggcaacataaaaataagaacttccagcacccctgaacacagttgaacgtgtggacacgtacgagtcggacttctggtcccttcctttcatgttagagagccacccctaatttctagcctaccccttatcttcagccagaggaatagcagtggatcctttccacagcctacattctccagcagctgccttcattccggcttgaaaggaacactctggcagcccattggcccaagagtaaggaaatggttgcttagcaactgactcctgcccccaccacagtccctgagaagaggagctcttgggccaatcacctagtttctgcctgtgttacagtgaagagaagctgcttaagagaagatgaagcccttgtctctgttaatagagatattgataattcttggggtcacaattaaaagtaagtttttttgtccttagagttctctatgagggtctcttctctttgctcaaacagcgccaagg

SEQ ID NO: 26191 - DNA, 2300 bp, Homo sapien
cgatttgatatgagagtgaagttataagaggtaccagggatggtgcttaggtttccagatttttcaactaaacgggtaatggagccattcgaagagatggggaaaactgggagaaggagcatgagttcagtttggtacacggcacatttcaagtactttagggatgttaaatatttaacagttttgaatgataatggtattttgtcagagtgattaatactaaatgctggaacaaatgccctctacatacttttaatgtgctttcacacaataaaagttccagttctttgagctgacatgaaagaaaagataatcaatagtgtaatgttcctaagaaagcacatgtggaaggactggctggaggctggagtgcaaacagcttctctgttgaagggaaggtgtctagtatgatgtacttgtcttacctttcacatttctacataagaagtcaatatcttttctacaaaatctgcaactgttcccatattgcttaatattagcattgctattttgcccccttacccatcctatgaaatgtttttcttttcttcctcacctttctttcaaaatctattgcattatcaggttttatttattcttccctggtaatgtctctaatcaaagacctctttctatttctagtgccaataaataagtacatatttttattactagctcaaatgtcacttccttcttgaagccttctttatttatcccaaatctattttttttcgtatttcacagcattaaaagaaaaacaggctgggcacggtggctcacgcctgtaatcccagcactttgggatcacttgaggtcaggaggtcaagaccagcctggccaacacggtgaaaacccatgtttactaaaaaaatacaaaattagccaggcatggtggcgcatgcctgtaatctcagctactccagaggctgaggcaggagaattgcttgaacctggcagaaagaggttgcagtgagctgagatggagccattgccctccagctgggggacaagagtgaaactctgcctcaaaaaaaaaaaaaaaaaaaaaaaaagacaaaacaaaaattaccttaccatgttgtgaatcatccttatgagagtgtcctactactaaaaatattccattctttacaattctttttggggcctcccccctttcttccttttctcttctattattttttaaaaatgtgttccaaataattatttgcccaatatatataacaagtacccaaactgccaaataaatgtggatttacaacatccactcaattagccttgaagatgatctgatatatagaaacacaacaaatttggggggagggtaccaaacttctaaattataggtcaccctactcatgtggcggactttagtgaaactggattttcagaacccgccaggtgagtattatccagaatcaagccagctttttggacctgcgtcttaacattaagcaattggtagaataaagtaagaccactcggctctggttaacaggcatctggatttgttttgacgtaagacgtgttttcaatataacattttggttgtccgcaacttcttggttcttaaaaccgtcttgagtatcgcagtctacatttgttctttctaaacttcaccaaattccaatgaaatttgtaattttcactacaggtttgaggagccaactgcatacgatgtggaaccatttgccaatactttcatttcttttggtcttttttagttgcccacccagaggaaagcatcagattacctggtgaaaatcctcctcaacagggcagttggagtgagcacggacaattcgtgttgaccctcggtctcctcccacttctacatcctccaagtccctgaggcggctttccgctagctcgcctgtcacttggcgcacctggctctacaggccacgccctcaagtcttccaagaggccagcggtaagcgcggtccacctccctctcccactaggcgtcggcttcacgccgcgcccacgtctcgaggacagctccagccccctcgctccctggctccgccccctcgctccctggctccgccccctccagctccctagcgtcgtcggcgtcgagcccgagcctgcgcctgcgcgtgcgccctggggcccaagttggggcgcgccgtggctagaacacggagagcggcgggcagtgcagccaatgggaggcggcgctgcctagcggctggtaggcggtgcctgcgcgggtgttaggttagcgcgaggcgtgacctagttgacaggctctgaggtgctgctgtggcggcgtccgcggggctgaggcgggtggg

SEQ ID NO: 26192 - DNA, 2300 bp, Homo sapien
taaagtaactactactgaaaaaaacaaagcaaaattattttacactactttatctatcaggctattactctcgacagcatttgatttataacaccagaagtgttagctctctataaacccataattattaaaacataattaaatgactaaactttcaacatttttaaagatcattttaattgtgttgttcggttctattattaaatcttcctgcagtaaatttgaaaaaaaaaattccctcctcacgcctttgttcgtgcattgtggaagccgatcctatatagtggattctttttccacattaattccctttcttacctccactgttttgccttcgtgttcataaaggccgggacttgcaataaaaatctacaggttttaacgaactattaacaaggaaatcaacttgatacctagtcacccctatatccttttgtaaagatgaggtaccaggagaaatgcgcactaccctcaatagacctcacccttgctatacaggttttagtttattttagcaataggagtgcaagaagtttttgctacatttctgtaaatagctaaagaatgaaaaggaaagaggtgtgaaaaggagggtgaaaaacgccagagacactcaagttagaatattaccaaactgtgatgggataagcgggagatcttggtgggagacgctggatcgtacacttgtgtttcttaaagaatcagtgccactgtcaatctagctgatttagataaaccttatacgcacaaaattcagagatgggttcatacagagtgacattagtcacaaaatcttactctgagcaacttcagcccatgaatggggatggaatacagagaaacacactgttgggagaacagcccattcagacttctctgaaggcacttatcctcacggacaacacgctcgttttagggctcccctagagttccaggtttcaaaagtcacgctgcggcagcgaaggaaggaaacctagacaaggggtaaacacccgatggtgggtacgctttgccattcgggggctggggggacaggggcgagaaggaaagaaatgagggtgcacggagcgcggaggcacagcggcagctgcagcctgagcgcccgccgacgggcacctgtccgcgggacacccaggccggcagtgcccaagtcccagctgcggtgcagaggaacttgtgccgcgcccggggctgccgcctgggggtccccgccgcaagcgaggcgaacgcagcaccgcctcgggagaaggtgacggggtgccgagggcaacagagaggggcgtgcgcccacacgtgcgcgagctgcaggtgcccaggggcggcgcgtgcacgccggagtgcgcgcgagtgtgcgcgtgtgtacacacggacaccggagggaggcggcaccggccgggagggcgcgaggcgggagctcgggcggagggcgccgcggcacacacagcctgacccccgcccccaccctaacccccaccgcccgcacccccaggactcgacgggccggttacctttctcctctctccacacctttttcttcttgttgctggggtacatgttgccgtgggggtggctggctttaagctgcaagttccccaggctcacgggcaaacagggtgtgtgtggagtgggaggggtgggagggggcactcagcagggaaaaagtgaaagaggctctgcgtcctgcgctgctcgccgctcgccgctctccagtcgccgccctcctccctcagcccgcgctcggctccggctcccacccgcctcagccccgcggacgccgccacagcagcacctcagagcctgtcaactaggtcacgcctcgcgctaacctaacacccgcgcaggcaccgcctaccagccgctaggcagcgccgcctcccattggctgcactgcccgccgctctccgtgttctagccacggcgcgccccaacttgggccccagggcgcacgcgcaggcgcaggctcgggctcgacgccgacgacgctagggagctggagggggcggagccagggagcgagggggcggagccagggagcgagggggctggagctgtcctcgagacgtgggcgcggcgtgaagccgacgcctagtgggagagggaggtggaccgcgcttaccgctggcctcttggaagacttgagggcgtggcctgtagagccaggtgcgccaagtgacaggcgagctagcggaaagccgcctcagggacttggaggatgtagaagtgggaggagaccgagggtcaacacgaattgtccgtgctcactccaactgccctgttgaggaggattttcaccaggtaat

SEQ ID NO: 26193 - DNA, 2300 bp, Homo sapien
aacaggtaaaataaacaaattaatcttccgtcttttcacaccaatttagaactctttcattctctgggttaaaaatgtgaaaatcaatacatattgttagagccttatttggtgaaatatatatatagtccagacacaagataaaagacatttattttatgtctggttatcattatgatcatcaccttggacacactgtggtctgacctgactcaggggacaatcagtttttaaatccccaatcagcggattcatcatctcaagtatatattgcctcaccatcatccctggaatatcagaaatgcttgactcttggtaacattttaagcaggttctcacttgttatttttataatggtttttaattagtttctaatgcaatttaacataagcaattgttttctaaacttaaattaaccacattattttatatgttgaataattttcaagtttaaaaaacttttacagaagatactttaaaaagtaactttgtaattataatttcagcagcttggttttccattttcacacactgagaaagcaacagttttcaagaaaagatactattggaatttgacaataatgagcaaagccctaaaggcatcacagtaaaacctcacattaaacaataaatcatttaaactttcctctgtgggcactttgcaatattcactagagactgtttgatccatctgctaactgctatttttgtttcaagttgcgtaaataataaattatatgtatctgtaattgttttcacttttcttccgttaatatagcctatgaccatgttggtatgtagttagcaaactaaaagaaactgaatttttggagagaaccagaaacacaaattgtggccttatttaacatactcgttcagcagagtatctgaattatggaacagatgctatacttgttggatgttagatagcaactgtgggagaagcaaattgctactactttagtccttactttgagggtcacatatttccaggatactcaaatgttccctacatatatacaaagtatcagagtggatgaccctgcataaccaattcgaatattactcacctcctctaaactctcaaaaaatcttcgtgcatatttgataatgggcaaagcagtcaacattaaattcaatgatctctttagtcaagccaaaagtcttcttttggaaatgaaaaatacacttattaaaaactggcaatattcatgtatgaacctagagagaaatgccccacctggttttgatgtgctttcctaatggtcactacaaggagattgaaataatagtgtcccttctatttcaaatacaatttttttttcaaactcagtatgctaaaagaaaattagaacagtattctccagaaaaactaaatatgacttgaacttctatgtcaccttttgggcaagaacacctgagtgcttagagtttcaagatcactaagtagtccttagatacacccctaaagagaaaggggatgatgtcaacattctgcagttgggagaattgagacctgcaggaggaatcaaacagggcactaagcaaatcaaaagaaaagcttttaaaatagtcttttcaactctaaattgtggattgtgtgactttgttaaatcatgttcagaaatgcctaaaaagttaccttggcatttctgtcaaaaatatttgttaatgtatttgctcacctctttgacatgtacttgttttcttctttttaaacattttatcattttatgcatatgatttaaaagtaaatttttaaagactggcttgaatttgaaagccatggtgtttaattcaaagtgacacaatcagataatagaaattatctgtttgatgacaatctcaactttggctcctactttatttgtataagaaaatgagaagtctaaaaacaaagaggtcaacctatcccttctgactaaccactatgatgaaagatgtgttattttaagacattgaaattaaatgtctaggaaatttctctagtatgttaaagttcattattaatagttcattaaaaccttttactttcacaggagatgctcagtcccagtatattttaaggaagagaaatataaaggaaatttagtatgcctccttttctttaaatgaagaatttagtttcctttacttcttaaaagagaatacctgttcttgtataacgtgactgcaccagacattctgaaaaatcagcaagaagcaaaagctggaaatagctatttcacagcaggtaatcatacctcaggatgtagctactgtacaaagtttatacttggataatcctggatgggaataaa

SEQ ID NO: 26194 - DNA, 2300 bp, Homo sapien
tatttgtcaagtgatgaaaccaaagcctagggcaacaaatatgaagtcatataacaatggcagcccagagaagggaaacctccaaactgctaactcccaggccagtacaatttatttttgatacctataacccaattcaccaattgatttttcttttctgtttaaggcctgcctgaatgaagacgaaactgattaaatatggctataaacccacaggaatttgaccaggcaaaaattttcttttttaaacagaaccaactcctatctgaaaatggcttctagaaataattatttaataaaataatttaatccatgtctttgtttcatagtaacagaaaaatatccacctccctttcctcccaaaattcagctgctgcatatcagtttaattgtactacctagcagttcaaagaaattggcttttcaatggacattagaatctaaaactcctagatttaatgggtctgtcctctgaggcccacaaaagtgcaatcatagaacaatagggtcaatacatttcttatcaagggttcacctactttgatatcacccattcttggaagggaactcaggtcaaactgttatcaaacaaatatataaatagataaactaaatgaagctaatgaagagaccacaatcaaatagtcctgggaaagactattagctggccttcttcagaaataaacatgcagggaaaaattgagaaaggacaaaggagaaggtcatgcacctctaagaatagagcaaataaagatattagtttaagacaacggtcctccaggtaaatataaaagctaagttcttaccaccaacatgaacaagtgaaatacacttatttgatggaaaacttacgggcacaaagcaattgttgaccaaatagcagaaaccagtctacaaaaatcataattaaaaatacaagtataattctgttaattaggcatagaaatttataatctccacgtcttacaattgtccagtgtttattcatgtacctaaattaaactaaaataatttcaatccaggcaaaccaccctgaaagatttttttcttaagatgtttatatctaaacccatgctcagatcagcaaaaacatttagaaaggaaaatattctattaaattttttaaaaacattttattgggggatcgttaaatataaataatccattttaaataatataaacacgtagcagaagtacataaaacatactttcattttctaaaacatagagaacagtaacttcttcgcctccaaaagaacagaccatttaataccatttaaaaaaatcttttggcattcctattgcccttcccataactaaatgaatcagtgacacgtgtatatatatacatatattggagatggagtttcgttcttgttgcccaggctggagtgcaatggtgcaatcttggctcactgcaacctctgcctcccgggttcaagtgattctcctgcctcagcctcccaaacagctgggattacgggcgcccagctaattttttctacatgttggtcaggctggtctcgaactcctgacctcaggtgatcctcccacctcggcctcccaaagtgccggaattagaggcgtgagccaccacacccagccctgatgtatatatttgaatctgctgtttattcatatgttgaataaacattcacagttgggattactggcatacatcttccacaattataacattattttagctagtgaataataaaactaatttgattttggttaacttcttttcaatacagatggtttaaaaataagacaaagcctgtctttttctattgtgatcttaaaaatatctttctaacatgctttttaaaaaaaatacataagtatgctaccactgccttgtagtaaactttagaaaatgttgagattccaaagggctgcctacaaaccaaatggcatcctagctttggcaggctgatgcttcattttggctgctctcgccccctctagcgtttgcaaagctcatctgtctgattatccagttacctcactgaacaagatcttggctaagtcctgcccatctatgacatcacccccttcttcagccactgcgaggtgaagctttaaacttcagacttggaggtgggctgtgtgcagtaaactggaatgctctccctcgctcactcctcagtgtaggagtgatctgaagcaggacaagctcagcctgcagctgccgtgggctttgtgtggactggacgcagagcttgggagacgggggagggctattactccaattcactgtcaatggaattacagctatagcggcagtgtatatagga

SEQ ID NO: 26195 - DNA, 2300 bp, Homo sapien
taggttgcttatcacagtctccagtatttgaaaattcatctctcttcttttggggagccagtaaatagcaacaggagattaagctgctaataataactaacatttatagttagcttattgtatgccaggcagcatactaagtactttctatattacattaaataagattatctttatatccctctacctgcaggtttgtctcctacggaagactgtaagcatttgcacagtgatgactatattatttttttctgtattcttaatacttagcaacatgcctggcacatagtaagcacttcataaatgcttgttggatgaatagtgtgtatgcattgatgtgatgtaattggtggtgagaagaatcagcctgttcacagtaactttagtcatagttctttttatatttgttttttgttttcacttcaccatggttgtcttccactattcatcatgtagtcagtacaagccctggttgtcactctgttagccatggatattttcagctcttatattctgacaactaattattccatgggaagtcttttaatcaggattctctttgtttatattgaaatgactaatatctttctcacacatctcatttcagcaatatgagttgatgctgtattttggatcatgtattttagaccaggtggccaggcagcagcactccccaccaatgcagacaggttaggttttcagtctgtgcttggtgcatctctagggggttaatgaagccttcccgtcgaagccgctgtgatgagaggacaggcaggactcctgctccctccccacctgctctgagttctaatccgagcagctcttcttctgtctggtttacatattcatcttttgggtgaaatggtgttaaatataatatatttgaaaacgattgggttaaaaaagctattctatttaaaatatcaagatggccatacataacacagatagataggtcctcaacattagcaggttgggtagtgtagtcaactgctgaaaataaatacagcacaacccaacaaaacacctttcccctcaaacactaacaaagtaaaataaaataaaagcaaaaccctgaaacccaagcagaaatgtaaagctgaagagacattttctagattggtcagtcacagcagtgtattcagaaggcagttcttcctccgggtttgagaggcctgtagccatgtatacagaaactatcttgggtaaggtgcctctactctgtcgggcttactatttaagatccttagtgggtgtcagaggcctttggcctgtactgcacaggtcttttcttgtttgtggaacgtcaaattcattttctctccaacaggccttttggtttcttaaaactctccggttcttgtccctgcacgtttttccctctcaatggcatttgactcaggttgccagtcattaatttccttgtatggaattaaggagatcttctggtccattctgtggctagaggcaataagagaacccatcctcatagatctagtctcaacatgaagcattagaatgtaaactcccaactctagaatataaataaggtcactgaggacagggatttctaactgttttattcatagatgtttccctacctcctagagcagtgtttagtaatctgtaggcactcagtaaatattgtttaaatgaatgaaggaaggaaataccggtctcacagtcacgccttttatacttttgagaatgaatttctcaactgtcttatccctcgatctgttattaactatgctaaaaatatttcctggctttgagtagcattgtagaaggtcctcttccattttccgattttcatagatgatcttccattaaaaaaagacgctggcatgtttctgctgtagaaaaaaggaagcaaagggatagttacaactccttctactcttctcccccagaaaaacctttcgaggcctcaccaatagatggcttgctttctcctccaatcaccagcagacagaggggccctggtgtactgctgtgttctccacaccaagggggaaatgaataatgtgtgagattcctctctggaatgttgagtgtctcaaccttccttctacaattatattttctgcttcacggtgatgacagcatcacctgtgggttcagaatcagagacctccagcttctgtccccattttggggtaatgtatgtgccacctttcttggattttatttaatcagtgagtctcctccccaggagattggggactcaactatctctaaacattttctcatcttttcttcacctagggttcctgggctcctgttgggcctcactggaa

SEQ ID NO: 26196 - DNA, 2300 bp, Homo sapien
taattgaagtccacttaaaactttacaacgtttaccaatatgcatcacaaagcttcttagagaaaatcatgctatgggtctgtatggcagatgcacctaacagcaataactcaagcataccctgagaagaatccaggagtggtcaagctggagattcactcctcatctatgaagaacatctgaacccctggcctatcatttggaatgcagactatacagggatcaggggccttttgttttgggttaaaggaaggttgcttggtgaagattgctaagtgaacatgctatataatatgcatgctttttacaaatggtagtggttttcctatccagcctcccattccgagaatgctctgtatataagtcttctataaaccctatgtctcattcactggctccgggtctcttaccgagccatccctgttggaatcaataggggcctggcatgacagtgtctatatgtgttttctggttgcttcctaaattttattctgaataagaaaattttcatagttctactagaataaggacctcatctatcaattctgtgccttcagtgcctacagtagtgcctgggacttggtaggtactccatacattaaaaaaatatatttttaaggatggggtctcactatgttgcccaggctggccttgaattcctaggctcaagtgatcctcctgcctcagcctcctgggaagctaggactacagatgtgagccactgtgcctggcttttgtttttttttttttttacttaaaaaaattgccataattaaaaaaaaattacttaaaaaatgaatgaaaacatgggaacaggagatagacttttttttttttttttttttttttaagacacgctctccctatgtttcccaggctggcttgaactcctggcctgaagtgatcctctggcgtcagcctggcaaagtgctgggattacaggcatgagccactgtgcccagacaaaatgtttaatactgttattgagtaccagctctgagaaggtgtcatggcaggcatttgacatgcaccatctcaatctcccaacaatgctaaaagttaggtgcctgtgacatactaaatttatagatgaaatgctaaagtaaagagaaggcaagtagcttgcctgagacctcatagctcagaaatggaagaagtcaaacctggatagttgaactccagagtctacactcagaacaccacagttaatatacatgttttaacctctgcttcccatttttccttatgtaagaactcaactgtgtttaaactggtgagaaatcattccacattgacaacaaggtttgtgaaagcaagaaatgtagttattttcatttatacataaatttacatttttaaaaagtacgtattgattgtgacttaataccaatatacatttggcctctgccctggttcctgacacaaaactcatgtacatttctttttttttttttgagacggagtctcactctctcacccaggctggagtgcagtggcgcaatctcggctcactgcaagctccgcctcccgggttcacaccattctcctgcctcagcctcatgagtagctgggactacaggctcccgccaccacgcccggctaatttttttgtatttttagtagagacggggtttcaccgtgttagccaggatggtctcgatctcctgacctcatgatccgcctgtgtcggcctcccaaagtgctgggattacaggcgtgagataccgcgcccagcaaactcatgtaaatttctaagtgatggggtgacaggagaatttttctgttcatgacagaagagcttctgaaactcttggaattatccgagtgataggggtgagaagagcatcttctgttactcttaataagcccctttcaagcatacccgagtttacgttaataaggtgactcagaggatgggagccccttgccagaggaaccaaccatgtgactaaaaggttggaattttcagctccactctccctcctccaggatggggagaggggttggagatgagtccagtcaccagtggccaatgatgtcatcaatcacacctatgtaatggaacccccacaaaaactccaaataaaggggttccaagagctgctaggttggtgaacacatggaggtgcggggagggtggcgagcccagcgaggacgtggattccccacggcccttcccacataccccgttctttcatttggctgtttctgagttgtgtgctttataatcaactgacaatggtgagtcaagtgtcttcctgagtcctgtgagccattctaacaaattattgaacttgagg

SEQ ID NO: 26197 - DNA, 2300 bp, Homo sapien
actaatttctgttacagtggaaggaagaaaaacacttttctagtccaggatccactccagagttactgtttgcatttagctgtcatgttcttccagcctcgtggttcctaatccttttttctttcataatcttgaaatttttaagagtataggcaaattattttgtaagaagtctttcagttttaacttttgtggtattaaagaatcgttttctaagcaatggggaaaggattccctatttaataagtggtgctgggagaactggctagccatatgcagaaaatttaaagtggaccccttctttacatcttatacaaaaattaactcaatattgattaaagacttaaatgtaaaacccaaaactgtgaaatccctagaagaaaacctaggtgataccattcaggacataggcataggcaaagattttgtggcaaaaacaccagaagcaatttcagcaaaagcaaaaattgacaaatggggtctaagtaaactaaagagcttctgcacagcaaaagaaactatgatcagagtgaacagacaacctgcagaatggacgaaaatttttgcaatttatccatatgacaaagttctaatatccagattctataagaaacttaaacaaatttacaggaaataaaacaactccattaaaaagtgggcaaaggacatgaacagacacctctcaaaagaagacatacttgcagccaacaaacatgaaaaaaaagttcaacatgactggtcattagaaaaatgcaaatcaaaaccacagtgagataccatctgatgccagtcagaatggtcattgttaaaaagtcaaaaaacaacagatgttggtaaggttgcagagaaaaaggaacgctgttacactgttggtcggagtataaattagttcaaccattgtggaagacagtgtggcgatcctttaaagattagatgcagaaataccatttggccgagcaaacccattactggatatatacccaaaggaatgtaaattattctattataaagatgcatgcatgcatatgttcattgcatcactattcacaacagcaaagatatggaatcaacccaaatggccatcaatgatagactggataaagaaaatgtggtacatatacaccatggaatatgacacagccataaaaaggaacgagatcttgtctgttgcagggatatagatggagctggaaactgttatcttcaacaaactaatgcaagaacagaaaaccaaacactgcatgttctcacttataagtgggagctgaataatgaaaacacatggacacacgggggaacgacacacactggggcccttaagagtggagcagggaaagggagagcatcaggaggaatagctaatggatgccgagtttaatagctaggtgattaggtgattggatgatctgtgcagcaaaaccatcatcgcacatgtttacctatgtaacaaacctgcatatcctgcatgtgtacccctgaacttaaaatagaagttgaagattaaaaaatgaaaaaaaaaagaattgatttcaaaaaaactaaaaatataacatacaaatataacaagaacatacaacaaatgcattatttaattcattaattaataaggaaactagtaagatgttaaaatcagtcttaaggagcatttgaggagctaagatatatggcaattttacccgagatgttagaataagatttctggcttagatacaaaattggtgaatgtcttagaggaccataaaccataatccttgggattataccttccattgaaaagaaataatttacatctctactggacaaaaatctatgggttaacgtctgcattctaagagttgtaaagtagtccaatcagtagtaagccaagccaaacactactctgcaaaaacactttcacctgttccaggttttggatatgtttttgacagtggtttttaaattatgtttcattgttggccaggactgagcagagggaaaactgtgaagaaggtacaatatgtacttgaaatcaggaagtacccacttcagccaccccataatatttctctacccctcccttctgccttgaagtgcctgagtcttatccataccagatatgccactatcgagaagcagatgacaggctcaggccttaccagggatgcacttgccacattttggaaagactacataaaaaacctttaaaaattggagccctttgggcctcaggtatccaaagagcacattttttggaaactcaacactcaggaaggtcgcatagagccagtttatgcaggtgagtattttgctcactcttataa

SEQ ID NO: 26198 - DNA, 2300 bp, Homo sapien
tttaggatagtgatattttcctgttagacaaggccttttgccattatataaagtccctctttgtctcttttaaccactgttgctttaaagtttcttttgtctgatataagaatagctacccctgcttgcttttggtgtccatttgcatgaaatgcctgtttccacccctttactttaagtttatgtgagtccttatgtgttaggtgagtctcctaaaggcagcagatggtttgttgatgagttcttattcattctgcagttctctgtctttcaagtggagcatttaggacatttacattcaatgttagtattgaaatgtgaggtaccattgcattcatcatgctctttgttgccagtgtactttggttttgttttttgtttttgcttgtaacttgtatttttgttttataggtcctgtgtgatttatgctttaaagagttctgttttgatatggttccaggatttgtttcaagatctagaactccttttagcagttcttgtagtggtggcttgataatggcgaattctctcagcatttgtttgtctgaaaacgactgtacctttccttcatatatgatggttagtttccctggatacaaaattcttgactgataattgttttgtttaaagaggctgaagatatggccccaatcccttctagcttgtagggtttcttctgagaaatctgctgttaatctgataggttttccttcatgggttactggtgctgctgtctcacagctcttaaaattctttccttcgtcttaactttggataacctgatgacaatgtgcctaggtgaagatctttttgtgatgaatttcccaggtgttctttgtgcttcttgtatttggctgtctaggtctctagcaaggccagagaagttttcttcaattattcccccaaatacgttttccaagctttgagaattgtcttcttcctcaggaacactgattattcttaggtttggtcatttaacataatcccagacttcttgcaggctttgtttatattttcttactccttttactttgtctttgttgtggattgggttaattcaaagaccttgtctttgagctctggatttctttcttctacttgttcaattctattgctgagactttccagagcattttgcatttctaaaagtgcatccaaagcttcctgaattttttattgctttttctttaagctatctatttcattgaatatttctccctttacttcttgtattatgttttggatttctttgcattgggctacgcctttctctggtccctccctgattagcttactaattaacctccaggattctttttcaggtaagtcaaggatttcttctcggtttggattcattgctggtgaactagtgtgatttactggggggcgttgaagagccttgttttgtcatattaccagggttggttttctggttccttctctgggtaggctctgtcagagggaaggtctagggctgaaggctgttgttcatattttttcgtcccatggggtgttcccttgatgtagtactctccctctcttcctgtggatgtggcttcctgagagctgaactgcagtaattgtctctcttctgggtctagccacccaaggagtctacctggctccgggctggtactgggtgttgtctgcacagagtcctgtgatgtgaactgtctatgggtctctcagccacggataccagcacctgttctgctggaggtggtggagggtgcaatggaatccgtgagggtccttagctttggtggtttaatgctctgtttttgtgctggttggcctcctgccaggagggggcgctttccagaaagcatcagagccgccgctgtgtcccctgccacagccccgagtttgtttccaggcggagggtgagacgggcctgaaaacttgcccaaggccatccacctcccagctgcgaaagaaagggctttagttcttccctcctccacctgtgacgtctgcactccggatttgtgccctcccctgagttcttgccaggaggcttctcagctcattcaaattgttacaaagttcgactagagaattccttctccctgtggagttttaccccctgctcctctggccatccttccaatggatccttgtggtgccaggcaggaatgggctgcttggggacctaggaagcccccagggcctttctgctgcttcttctaccctcccccacacctttactcgactcactaacttgactcagctccaggtaaagtcagaaatttctgcaaacagaccttcagcttctccagtgggggtgtgtgtttgggaga

SEQ ID NO: 26199 - DNA, 2300 bp, Homo sapien
aaggatttccaagtactttataaacactattcattaatgtgggcttccctggggaagttgcagtgccttgcagagatacaaagcatcctgtacacaatcaataactattaaggaatgacaataataagaaatatattcatgtggctgttttttaaaagtaactaacaaatgagaattaagtaactttcccaaagtcttccaatgacttcatggtacaactgaggttagaaatcaacttatactgacacagttattctactagttgttctgtgctcgcaaattgatgataaattatgccagttctcagatatgcacataacctggtgtccactctataactgggaaaatcatggccaaaatgaggttagcataatagcattacaatgggatttccttgttctctccctttctcactctctctgataaaacagcaactgcatttttttcattaagccctaagtttaaattttcttctaaaaattacatttctctgtattgtcctttacattcctgaatctagataaccagtgagcctacacatttgtttaaaacaggcacacactgtgctctgtgcagatgttaaatacagaactggcaagatgaaacattttttttctttgctttttttttgctgaagaatggaaagtatataaagatgttctttaaatagaagaatcatcccatgaataaattcaaaagctgttatatagctttgtcatcaattaatgtttgttgagtacctacaacgttcaagatgctggagagagaataaattaggctattcagaagacaaaagcctttccctttaggagttgacagaagggagaggaatggaaaggtttcatgagatgtgtctgcctgcacaaagtgaaactgaggctagagatgatcatccagagaaaaataaaaaaaagttgtttcctctatgtagatatgaataaatgttgggtatttttgctggatgaaaggagtaactgcttcagttctccacttggcattgtccaaatggctctttgggaagtcaacgattgaagatgtagatgtgtgagtgcaagtgtctgtctggggcaactcacaaagggaaagtctcctgctttctgaatagcctaatttattttctctccaaggtataattcaatacacatatatctgaggttgtgggcagccccatattatcatgggaagcaaaaaccaattctgtgtttctaccactttcttcctttaaaatacttgtttcttccgtgttgagacatgctatttcaagtagtaggaataaaactttaaagatgttgatttggaattttgaagttcaggatgaaagcaatatatgggtttcccatgattttgtatgaactttttccaaaaatgtgctcttgccctcagtatgatcccatagatgataaaactcaacaaccaccccaaagctgactgacaagtataaaaacaagagggtggtctatgtgtatttaatctctctttaaaaattacagatttccaataatggctttgtttagccaaatgttttgctaatcgctatttgacattgtaccagaataaatctcaacatattctctttacttcatatgaaattaatttgcaagtagagaaaccacacacctttaggcagataaaccaaatgttttgtttgtgtggaattttaggcacaggaagctcttgtctaagatctcctgctttccttctaaaggagtaacttggaaattactctatctggagtactggtcctcaaacttcactgtgcattagaggcccttgaagggcttgttaaaacacaaatagctgggttctggttcagcggagatgggacagggcctgagcactgcaattccaatcaattcctgggtgatgctgctgctatgagtgtggccacactctttgagaatgattggtgatatggtttggctgtgcctccacctaaatctcaacttgaattgtatctcccagaattcccatgtgttgtgggagggacccagggaggtaattgaatcatgggggccggtctttcttgtgctattctcatgatagtgaataagtctcatgagatctgatgggtttatcaggggtttctgcttttgcttcttcctcattttctcttgccaccgccatggaagaagagtctttcacttcccgccatgagtctgaggcctccccagccatgtgaaactgtaagtcaaattaaacctttttttgttcccagtttcgggtatgtttttatcagcagcgtgaaaacagactaatacaattggtctaggctctagagtattaacaggtaaaagtagaaa

SEQ ID NO: 26200 - DNA, 2300 bp, Homo sapien
acgcctggtcgactggaggaccaccttagtggaagggggacaattagggcctctggcctgccatgtgcacaatcataacaattgcttttgtttaatgtgcagatggaatatttgatccatttcaaccaggcatttgcattcttggtatgctgtcttaattgccaaagtttgttttaagtctttaacttctatgatcctttagtaaaatgaatgtttcctttaacacctatttttattagtttttagactaaagaaagctaaatactattttatatttaataatgtttcttgtatgatttttatagtagataagttaaattttacttttatattagtgtgttattaatgttaaacttaattttaataaaaccttgtagacatatttatctaattttttatgtttgaccataaggtaagattttatagactttttttaactttttataatttttgttaaagagcaggttgatgctttaagaaaaacctgttgcatttttactttaatgtccagttcacagaaaaactgggtgatatctttttaactttagctaatatgtttacacacagaattttctttacaattaacgttttaaaacttgcttaaatttttaaaacaataatttttttaacttttaatgtaggtaaaaatccacatttttatgtccctttataatttttttactaaaggtatattttacttttcttatacaccttgcacataaactgtttctttaatggtactcaggaggccttattacttttaaattatacaacattttttgcataaatttttttataacattttttctttcacgacttttgcagacaatttttcaacatgtcttaactttttgacttattacatttttttctttaaacaactagttaatttatttcaggacaagaatttactatataacactctttttacataaattttgcctcccccccccgcccttctcttttttaaagcgaactttctttatgtctttggactagactgtctaaggccacaagattagaagttactataatacatgttacactgttaacttttagcaaacttcacttttgttgaaaaccttgtaagtttgggatttcaattatcctttgctattaataagatcttgtttagtctgaattaacttagaattggtatagatggcctctttttctctctgctggtctttccttgcctctgccagccacttatgctgctgttctcttaactgctgttggggggaagggggtctaaaactagctgtaactgtctatgtacggaaactggcctgggtgccttggcttacaggttaccttgtgccatacttttgaaacaagggacctgtccaggcttccttctgatggccaacctacctctaatgctggccagtctatttcacacaaagttctaagttttcctggtgtcacagtaacaccgtaatctcctttaaattctttcttgaaattttttaacatagttcctagtagggtgggcttacttacaccggacctgtttttgtttttgttttttctcctgagacaaaataccatgctcacaccacacacactcaccacaagacaaagaacgggtatggagggcacacacacacttttaccatttatagtaagccaaaatcacgaaattcaaaatccgagttccaaaagattcaagacaagtcaaaaccaaaaccaaagtatctagcaattcaagtcaagtcaaaaccagaacaaaagtgccaatgcaggcacactgtgggtgatcaggccactcttccactcagatggagtggggcaagttccaaagactagtcttaccaagtttcagatgtccggactccaagtgccagttccttcccagtgttcagccactgtgttaatcctccacgggggcctgctatgcgctgctctggcaaggcgttccactggggcaatttcctacccgggagtgctctttggatcctgtcactcaggctggccggagtcccccgcaggatgctccacagggcaggcctaagccgcctaaggggctgcctcggctgtccatcagttacctcgtttccccgtcagggaaccaagaaacgtagcaggattagccgcagacaaaacttctcagacaccgagttgtagaaggaagggctttattcagctgggagcatcggcaagctactgccttaaaatccgagctccccaaatgcacaatttctgtcccttttaagggctcacagcactaaagatttcacatgaaagggtcgtgattgatttgagcaagcagggggtacgtgacaggggctgcatgcgcc

SEQ ID NO: 26201 - DNA, 2300 bp, Homo sapien
cctcgtaaaattccacaagtgtgaaatattaaattcatgtgggaccagactggacaacagtgtcctgaacttggctctcccattgccttctcagtgctttatgaaccaggtttaatccattttcctgccttttttcctaccacctgctcattccagctgccccattgacatggatcaggtaacccaactagaaatacctcccatcaccatagcagggataacagaggcaagttgttaatactcacacttaatcctgttttcttgtcagagtcctttaacaatgacgatgataatagtcatgatgaaaaccatgaagaataactctgtgtacctcagatcctgctttaaatgctgtgtgtgcattgtcatttactcttccaataaagggtgccatcgtctacagtttacacatgaggaagctgaagcctgcagtggttgtataaccactggggatgagtgtcacacagttagaaagtggcagagttgcaagtcagatctcaatctcatcacccatctctgatccacttagccctctagtcttctgaccatgtatctgccacacgggaaggccagcttgtcccttgccatccatataaatctcactcagacttcaggatacctctcaaacccttctttgctctgtggagtcttttccactggccattggccctgtgctgaaggacaattcttaacaaccccagcaggagttttcttaactgtaaacattgctaattgcctgcctacatccagctcatttttttttttttttggccattgatgataccctattaatattgctccccaattatttggccaccaccaggcctctgacatcatttttttttttttgcttatgtcttgtcttttgaaaatactgtgtgttccacaaattgatgctctagaagtacttgctaatcaataaacccagaaagggctgagttaaactgggcacagcctcgtgtgggtcccatgagtgcttaccctcatgaccctgtgatccatttctgaaaattcagaacttggctttcatgttcaagatagagcagtcaaattgctgctggtgacaccagagggttgacagcatcatggtgtgttggcatctgaagccagaatctctgatttttagagctgaaggaattgagggagattagttgacgctctcatttgatccatgaagaaattgagacccgtgtttaaataacttccccaagctcacacagtgagtggactgcagtctcctgcttcctggggccaaattcactggcaaggttggccctctggcctgatggggctggattcaagtatgcctgggccggtgggagaatgaccttacacacatttgacctcatatagatgtatcacttatcactggaggttaattttatggtttattttagtttctcatggaactcaacctactttcctaggcctgtcttttctgcttccccttcccatgccctctgccttagcccaaagtggatgcctggttttcatgcccttgccccattgctcgtattgctttctgcacttagataatcttctgccgtcatctccaaatgacaacattcccactggcctctggagactcaacttagaactgccatggctatgaaatttctcctagattggtggtttttaaaactctttaaaacatagatctttttcatcaaacgtaagtatttaccagaaccctgatgtgtagtccacaaccaactctttttgaagcagcagttagaggcctcagaatcctatacacctacctctaggacttgcttggagcacagtggagagatctttgctcttggtagtcaaaattactctaccttctggatgcctgcagtgctcgtcctggacccttcttgtggcccatggcactttatgtcttgtcttatgggtatgtggcaccttttctactagaaggtaaagttctttgcacacagaggacagatcttgttcccccatgctatctaaagcaatgtctcacacagtaaggatgctcgggaaatactattaatgaatgaattatgtggctcctatctgtgtaggttagaatatgaaatccagcagctgaaacagaagatttatgaggtcgatggtgttcaaaaagatcatcatgggaccctggaagggaaggtggcttcttccagcttgccagtcagtgctgaaaaatcacacctggttcccctcatggatgccaggtactggacatgaaagtgattccaggcttctcatttgatgtgactcaaggactcattgtttctctgttgaactactttgtatctggagggctctattaaggg

SEQ ID NO: 26202 - DNA, 2300 bp, Homo sapien
tggtgggtcaggaggtggaagcccagtattcctgctctaactctgtgttcttcctctggaggccatcccaaccctaaacttcagtacagtacccagtggagatcatttgttctccaacagaaaacacaacatgtcacctccccaccagcctgcaaaattatgcattttgtatattccaatggaggctccagttgttttcagtgttatgcactaataaactaacattttggaccatttggtgatcaccatttgtcccaaactagtgattaaatgctaaatagtatgtattttttagctggaacaatgaactgtcgattatcatgactttgatatttgaccccaatgagatgaggacagcataagcatttttatttaatgttgtcttgtaacaacttctgttgagttttagtcattgggctgaataaagttattcacatttaatttaaattgggcatggttctttctctttgagctcaggggccttttaaaattatatcatgcataacacattatgattatatgctctacaaagaaatgatatcagaagccacttcaggagaataggcaggtgatatgttggacagttaaaaaataaaaaaaattaaacaggatgctgctggaaatttaaaggaaagcagttactcttcttttttttattttaatggaggctttgacctggttgtatgtgcattttcagaacatttcagtaaagttagagcaacatttgaacaatgaccagataacaaccagtcagtgctttgcatttcaggaaactcatagaagaaatggaggaaaagcagaaatcagacaaggctgaactggagcggatgcagcaggaggtggagacccagcgcaaggagacagaaatcgtgcagctccagattcgcaagcaggaggagagcctcaaacgccgcagcttccacatcgagaacaagctaaaggatttacttgcggagaaggaaaaatttgaagaggagaggctgagggaacagcaggaaatcgagctgcagaagaagagacaagaagaagagacctttctccgcgtccaagaagaactccaacgactcaaagaactcaacaacaacgagaaggctgagaagtttcagatatttcaagaactggaccagctccaaaaggaaaaagatgaacagtatgccaagcttgaactggaaaaaaagagactagaggagcaggagaaggagcaggtcatgctcgtggcccatctggaagagcagctccgagagaagcaggagatgatccagctcctgcggcgtggggaggtacagtgggtggaagaggagaagagggacctggaaggcattcgggaatccctcctgcgggtgaaggaggctcgtgccggaggggatgaagatggcgaggagttagaaaaggctcaactgcgtttcttcgaattcaagagaaggcagcttgtcaagctagtgaacttggagaaggacctggttcagcagaaagacatcctgaaaaaagaagtccaagaagaacaggagatcctagagtgtttaaaatgtgaacatgacaaagaatctagattgttggaaaaacatgatgagagtgtcacagatgtcacggaagtgcctcaagatttcgagaaaataaagccagtggagtacaggctgcaatataaagaacgccagctacagtacctcctgcagaatcacttgccaactctgttggaagaaaagcagagagcatttgaaattcttgacagaggccctctcagcttagacaacactctttatcaagtagaaaaggaaatggaagaaaaagaagaacagcttgcacagtaccaggccaatgcaaaccagctgcaaaagctccaagccacctttgaattcactgccaacattgcacgtcaggaggaaaaagtgaggaaaaaggaaaaggagattttggagtccagagagaagcagcagagagaggcgctggagcgggccctggccaggctggagaggagacattctgcgctgcagaggcactccaccctgggcatggagattgaagagcagaggcagaaacttgccagtctgaacagtggcagcagagagcagtcagggctccaggctagcctggaggctgagcaggaagccctggagaaggaccaggagaggtgagattgggaaggaagggtgtggcatacagtgggtgccaaatgagtgctcatttttcactcctcatgttgtgtttatccttttttttttttaacttattcttttagccttcatattctttaatacataggcaaatgcttatatttgccagaactgagaaaagtactccta

SEQ ID NO: 26203 - DNA, 2300 bp, Homo sapien
cagagcaaacatccagaatctgacctagatacttaggggaatttagtttataatcaatgtgctattcaaaccttagggaaattattagagggattattaagctgtgtaggaggaaaaaaaagtaaattggcaccacaactcagttttacaccaggataaatggtaactagattgaagatttaagtgcaaaaatattaaataataaaatgactataaaaatccgtgggttaatttttttcccggaaacctggaggaaagaaggcttttaaaaacctgacttaaaactcagaaactataaaataaacaatgttaaatttgaaatggttaaacaaagaatagcaaaataaaacatcatacttgacagaaacactgtaagcaaagtaaaaagcttaattacaaaataggaaaaatattttgaattcaagttttagacaaaggactaattttcctactatataaagagctcctataaatcagtaaggacagattcaacaaccagtagaaaaatgaacaaagaatatgtatgactaggctgtttgtagaaacggaaatacagatgatttttaaatgcaggaaggaatgcttagcatttcactcatagtaaaagaaaaacaaaataagaatacttggaggtaacatttgtcacccatctttggcagatgtaaataatcctgataagactgtattgtggagggttttgggagacaagcactcttataccttgctactgctgggtgtaaattgccctctatggagaacaattttgcaatagttatcaaaatttcaactgtctagaaattccacctctaagaatttattctgtataaacattcacaggcatttgaaaagacttatgtgcaaggtgatttgtagcagcattactcataattggaaacaaaatatgaacaactgctgtagtctccatggttaaattggtcgtggtacatgcatatgatccaatcccctgcagccttaaaaatgaatgaggaaacaccttaactgatacagaatgttctttaatgtattaatccatttaaaagcagggtacaaactaatgcttattgtatgctaccatttgtatgtaaggggaaaaagataattatatataaatatgattgcttgtgtatgtataggttatttctagaagggtatgtaacatttggttccctgacagaaggggaagtggggagctatagcatagggacgggggaccttttacacagtgtaactgtgtagcctttgactttagaaccatatgaatgttccaaaaaagttaataaaataatttgttaaaatgatttaaaaaacacttttgggttttgcatgaaggcagtgcttttgcatttttcttgtatgtgctatgactaatgtgaatgaggttgatgataatataatagctaacctttttttaaataccgtatgtcagaggcctctaacccccgggctgcagactggtactggtccatggcctgttaggaagtgggtcgcacagtaggaggtgaacagccagggagcaagcgttactatctgagctctgcctcctgtcagatcagtggtggcattagattctcataggagcatgagccctattctgaactgcacgtgtgagggatctaggttgtgtgctcctaatgagaatataaccaatgccttatcatctgaggtgtggaacaatttcatcccgaatctgttccccctacccctatctgtggaaaaatggccttccatgaaaccgatctctggtgctgaaaaagttggggaccgtggccctatgtggtaggtacacatgatcacgtgaggtaactgaggcacagtgaggtgaagcagtttgtccataactatgtaagtccacggctagtaagcagcagagctgggattcggccccagccacccagctcccaggtctgcattacataccaccaccctagagagacaagtgaggtcttcagacaggtcagcagattttggagttgtgtattatttcatagagggtaattttgtattccatttcctatatattagggggatttcttcaccccttccattttctttttcagatttatccaaacatttagtacagaattatggtgacgtagaagaacttatggatgcgggcaatatcaaccggaccaccgcagcgactgggatgaacgacgtcagtagcaggtctcatgccatcttcaccatcaagttcactcaggtaagggctgctgcgggaccagctggctccatccctgaggtctttacttgctgattagcaccagctgaggactgatcattgttgaaccaggagcagcagc

SEQ ID NO: 26204 - DNA, 2300 bp, Homo sapien
ggcacactaaagtctgagatgagcaaaccccttatcttataataatcttccctttcagaaacttccttcacgccccaatagaaatattttctgctaagaaagtgcccgttccgtatcgtctgtgatgatcaagccttactgcttcctattgaaaagctccaggcatgctgtttgttgtctaaagcgtctgccgggctgcgatggtccgttttgtgtcagacagcaaagtcgtggatggaaagggggcttataaacacgtgtaggttgttggaattacattaacgaatgaatgagcaaaaccttctaaaccaccgaccaatgaaaccccgatacagaaaatcgctgtcatgagtaagttagcactcctgaagagtttgaatactgaactggccagagtctgcgcgccgacgccccccaggtggccggagtgacccggagcaggcgtggctgtctctcagacccgcgcgttgggcccgaacagtttgtccccacgcagctcccatataaggcgggcccctcccctgccccagccagctaggtcgccgcgctggctccctggcggcttctcaaaccaacccgccgctactgcgcatgcttggcaagctcgcccgctccttaatatcctgctccggctgttcctgccacccgttggtcaaattcgcacccagctctgctccagacagagggaaaacccagtgatttccgggctctagaaacaaagggaggctatgattccctgctggccctaggggtccagggaaggttatggaaagataattctttgtgtaagcgggttgcgtacttgcagacatcatcccacttgatgcattcaccactctatgccgttgttcctgatttgcagatgagacaagaagcctcagaggcgcccagtaattcagaattacaggctgacaaggctagtgttggagctaggacttaaaaacaggagttccgcctccattccttgcgtctcccattatagcttggcttcctggaatggctgctcctgtggctcgcaggtgggcttctgggtgtgcgcaaacgatttcatgcatgctcgattcactgaatgaatgaatgcatttaccttctacacaggaagggaggtggagctcacttctaccagaggccctaagccttaagataccagttgtcggcctggcgcggtggctcacgcctgtaatcccagcattctgggaggccaaggcgggcggatcatttgaggtcaggagttcgagaccaacctggccaacatggtgaaaccccgtctctactaaaaatacaaaaatcagccgggcgtggtggcacgcccagctattcgggaggctgaggcaggagaatctcttgaacccgggaggcggacgttgcagtgagccgagatcgcagcattacactccagcctgggtgaccgagcgagaccctgtctcaaaaaaaaaaaaaaaaaaaaaaaaataccagttgtgttcgcctttaactcccttatgattaaaactaaaaattactaaagtgtacaaaagtgcaaaacaagtctaaataaggtttgattctagccaatataatgacattcccgcacacatttaaaacatccaacaccctattaattttcgtttatcggtatcccgagttaaggggtccaaaacatacggtcggacctccttagggtagcagagaaggccctagcggagtttgccaccaacaagctgtgatcatctctgcgcctcagtttgttcgtgtgtaaaatggatacgttaactcatgtttggctgggtgaagccaggttcttgttaagggctgaaaaactggctttggtcacctgaccccaggactgtgatccttgccgctggctttaaattgctgcgatcctcttctctccagttgttcaggccatgagggtgggttctagttttcctgaaaccatccgctccgggtcgcccccataacctctgcgccaaggtccacaacgtggcctttccagacttgcagatcccggaggctgcttccaggccccgcggccccgcccctctgcaccgcccggccgccgccaaaccgtggcgcatggatcacgcgggccggagccgttctgggcatgctcagtggcctggcaggtggggctgccgcggaactccaggtccggccgggagcagaggggcgggggcgagagggaagtgggcgggagccgcgatctgagtagccagcgtcgccggcgaccgcggagttctgggctagtgggaccccgcgcgggctggttcgggatgagcgatggcatcggtcaaggtggccgtgagggtccggcccatgaa

SEQ ID NO: 26205 - DNA, 2300 bp, Homo sapien
acatgtgaccatagtttagctgctataatattcttaatatagttacatagccaggctatgcaaggtttctcacaaaaccagaaaagctattcgatccttatcattcccttcctgtactgttctcaataactggcttctcaaatcgttcaggaaaccactgagaatcattaacgggttattggaatgcccagagtgactgcccaaggacaggaaaatgcactggctctttttagaagaacctggaaaagtgcatgcagaccattgcggctgagttggcaatggatgatttccttctcacagtgtaatgtacaatagctgtaatttaattgttaatagaacacaacatgcagtctgtcttcaggcctctgtgtttcttgtggtattttcttcccaggttggagtgtttttgtataatcacatcttattctcttttaacagttatcaactcttggctagatccccttatacaatacagagtatagtttattctcagtagtgtagccatcctcattattatcaaacagaactaattgctgagatgctcatagtaatatgcaaaacagcttgtcctttgttatttagaaattgtttatattaagtttatattctcttttaatttgttaaagatataattctttgactgagataggacatttcttctcattggtttatttattttagagatgagatctcactatgttgcccaggatgattttgaactcctggactcaaccagtcctcctgtctcagcctccccaaatgctaggattacaggtgtgagctactacactcagccatttcttctagttttagatctatataataaaacgatgcttttctgtgatcccttaacattctctacactcaggtgcatgttcaaagcatatttgttttactgttgcctagttttccatgtcattcattgaattatccaatgcatattaattatcagtcacttttcccattactaagggtacttgagtgaacagagcagacaaaaaccccacccttaaaaagcttatattattttcaagttgttgcaactttgggtgtttttaaaaaataaaaattcccagctgataaaaccaacttatttgacagctacctgcctcaccagtagaaccaagttatagccagaattcagaaataacatttttgagcatttattgtgtctgacaatgtgccaatcactttacatttattttagctcatttaatgcttacaacaactagaaggaggtactattaggatccctattttacagatgaaaaaagtgaaggtcagagagattagttaagcagagggtacaagattaggttccagttgactcttaacaaccatttcatattccaggtgatgctttacagacatctgatgaatggatggatgaatgaatgcatgcactttgggaactcccattcagcttggcataaatactaactccttagaataccctagaaaaatctagaccttttgttggaagaaaagagtgggaagggtggtagggaattattttttcgagtgaattgaggcagatgatcttacagatgactgggttctagtcagcatggttgccttatctggtgagagatgagaattgggcagacaccagttctgtctgccctgggccctcaaactgagtagcctctgagattcaagttcatcagcacagtgttggaggacagttcctgcagagccccatgaatcagaggagactcggaggcaggaggaactggctatcctaaaggtgattttaaaccggggtagctagagcccaaagaagggcgaaaccaggactaactgccccatagcatgaggggcagcgcctgtaaaattacataggatttgtaaaggtggaaggcactgttgcgccgggtaaagcttcgcaaggtcgtggtaggggaaatgattcactccccttcactattccctcgcagcatggtcctcacaacccccttctctttccccatttccatttccggactcttctcctgcccgcagggcagacgcacgcgcagagagattgccagccctggctgccagagacccggaagcatcgatcggctctgtgctcggcttctagacttgtcggcgctcgattgaggagcgtggctacgttgcttccggtgcctggctccgtttcctgcttttggttcttacagtagtcggcgtaggccttaggtgggttcgtgcgccttctacctcgctgtttcggttttcctggctcctcggcccttttctcccctgttgcagctgggagcggacgaagcgcgaagctggggtgggtacgcgtttggccc

SEQ ID NO: 26206 - DNA, 2300 bp, Homo sapien
caagtgcctcttaaatgacaattgtcttttaactctcctatgctgagggctggtttgagactggaacagtccataaaacagctgcgcaatcaggattaagaagatttaatcaatgctttagttttcccagaaatttagacctttagattgattacaggggaaaaattggaaaggcattctgctttcaaaaataatatcgaattcaatctttccttgatgtgaaacaggaaataaatgatttattctaatttgtcaattccaagttgacaacaatgaattgaaatagcattgaaccatgatccctctggtaacctttagataggatggttcaaaatgaccactttaggacaggtgcggtggctcatgcctgtaatcccagcattctgggaggctgaggagggcggatcacttgaggtcaggagtttgagaccaggctggccaatatggtgaaaccccgtctctactaaaaatacaaaaattagctgggcatggtggtgcacacctgccagcccagctacttgggaggctgaggcagcagaattgcttgaaccctggagacagagggtgcagtgagccgagattgcaccagtgcactccatcctgggtgacagagcaatactccatctcggaaaaaaaaaaaaaaaaaaaaagcaacaaaaaacaaaaagaccactctggcatttgctgtgcctcagtttccttgtctataatgaaggtatgaataaaacagactttccaatcaggaccagctatataaaagatcctcccttgaaagtcacacacacatacacacacagccacacacacacactcacacacagccacacatacccacacccatacccacaccaaaactcttttacatacacacacagatgcactcaaaccaatacaactctatcacacacacacatatacccaaaacaaaaaacctttttattatattttgccttacccatttatcccttgggaaattgtattgcacaaaattatttagtaagttaaattcttgtccctcattttatgaggttacgactttggggttgggggagaaggcactgctccgaagtcacatcatcaaccaaggtggagaaggcatcctgagaggatctctattctagaagcaatggataagaacaggggaagggccaccttatgggagagatgccagcctcaaacaccctataaaaagcagtaacttactgtctgtctcttctaatagaaagcaacacttggggccaaaatattttttttaaatttactgctatatctttagtgcccagaactatacctggcacagtaagtgctcagtaaatatttgctgaatagacggagctagggactggcggttccactttggtgcctctaggagtgctcctctccccatgggaaacatgctcagaagcaggaagttccaggtaacataaacttgtaacttcactctcttctctttgacctgtcacccttgagcatttgagactgaattgcaaaagtcttagagagaagaggtaggggaaagattgacctatttttcccaacccacccatctctttccccactggtagggtctaaatggggcatcaattagtatgttagaattcatctctagcctgggacaggcatgccttctaagaatcctatcatgaaagatttgtaagcataagaatctttcatttatctattacgtaaatccagatttattaattgaatttgtttaaatcaaattatttgtgctatagatctcacattttcaacaaattcctacaactagtatgtctttgctcataagctgaaggaaaattaggggtgaattaaaactaaaaatggtttgaaattctcatagtcctctcagcaaagccctactgattgatacaatagaccactgctaaagcggctttaacaatagtggaccattttggatattatctgtgtatagaaagacacagagtttgactctgtttggaaaatcagacgctaaatagcccctgaagccgagcagcctgttatgaaaacggaggggtggtaggcccttctaattggccagggtatttacccagagctctggctttcacataaaaggcaggaaccactgaagtcagtccccgcttccagtcagagttcaagttaaaacagaaaaaaggaagatggcaagaatattgttacttttcctcccgggtcttgtggctgtatgtgctgtgcatggaatatttatggaccgtctagcttccaagaagctctgtgcagatgatgagtgtgtctgtaaggacttttttatgcttttcattatctttctattacat

SEQ ID NO: 26207 - DNA, 2300 bp, Homo sapien
taaattcttgtccctcattttatgaggttacgactttggggttgggggagaaggcactgctccgaagtcacatcatcaaccaaggtggagaaggcatcctgagaggatctctattctagaagcaatggataagaacaggggaagggccaccttatgggagagatgccagcctcaaacaccctataaaaagcagtaacttactgtctgtctcttctaatagaaagcaacacttggggccaaaatattttttttaaatttactgctatatctttagtgcccagaactatacctggcacagtaagtgctcagtaaatatttgctgaatagacggagctagggactggcggttccactttggtgcctctaggagtgctcctctccccatgggaaacatgctcagaagcaggaagttccaggtaacataaacttgtaacttcactctcttctctttgacctgtcacccttgagcatttgagactgaattgcaaaagtcttagagagaagaggtaggggaaagattgacctatttttcccaacccacccatctctttccccactggtagggtctaaatggggcatcaattagtatgttagaattcatctctagcctgggacaggcatgccttctaagaatcctatcatgaaagatttgtaagcataagaatctttcatttatctattacgtaaatccagatttattaattgaatttgtttaaatcaaattatttgtgctatagatctcacattttcaacaaattcctacaactagtatgtctttgctcataagctgaaggaaaattaggggtgaattaaaactaaaaatggtttgaaattctcatagtcctctcagcaaagccctactgattgatacaatagaccactgctaaagcggctttaacaatagtggaccattttggatattatctgtgtatagaaagacacagagtttgactctgtttggaaaatcagacgctaaatagcccctgaagccgagcagcctgttatgaaaacggaggggtggtaggcccttctaattggccagggtatttacccagagctctggctttcacataaaaggcaggaaccactgaagtcagtccccgcttccagtcagagttcaagttaaaacagaaaaaaggaagatggcaagaatattgttacttttcctcccgggtcttgtggctgtatgtgctgtgcatggaatatttatggaccgtctagcttccaagaagctctgtgcagatgatgagtgtgtctgtaaggacttttttatgcttttcattatctttctattacataattgaaaatatatccactaatagcataaaatcgaattatactttgaagtgaatcttctccaatgtgtatgttatcagctttgtttcttctggtctgcatgtttggtatcttactacggagaattcacttggctgagttttgttgcagctttaatatcttggctgtcttctttctcttggatagacaccagctatgaactgggaattatcagtcactctgattttctagtttttctaatatacattgccttttactgttataaaattcaggagcctaaaatgtaatcatttaaattttttttcttccagatactatttctctggctagtgctcaagaagattataatgccccggactgtagattcattaacgttaaaaaagggcagcagatctatgtgtactcaaagctggtaaaagaaaatggagctggagaattttgggctggcagtgtaagataatttaaacacctattgacgaatattgctcttaacctttccttgattacctaccttcaacctattttaatgcttaatactagttgttaagaaccatgtagtgattgtagatggaaatgcaaaaattcaggtatatttgctattgcattttaaagaaagaaagatcaatttcgtaacaaaaccaaatgtaggttaatgtgatattttggtaaaaaaagagtcaaatacatgggggcttaaacatcccaaagaatttgaatcttatccgaaaacgtctgagaagatttgccaagtagaaggcatgtgtgttggcagtgagtctaagtatcaatattcttttaggaaactttgcaccctaattaattcgaaagaatcagcgttcttcagttaaaatatacaggggcggtccctggggagggatgaagcagggatgattttctgtcctcatctgcaaccctaaaggtaagttctaaattaatgaaggattaaatttaaagccatttaagtctgttcatttgaattgttgaaaactgagaaatttgcatca

SEQ ID NO: 26208 - DNA, 2300 bp, Homo sapien
acatctaaatgtgagtatcccaatcatgcctcaggtggttttggttttttaaaaaatcacccaaggtctcttgatttctagtattaagccataaaatgggagagttctagtcttgttttgcaggacaacatcttcaaagagactctgggggcctgtggcacatctgagccagaaccaaacacccgacgtcattgttacagatacaaaagtaaataaatgaaaagaagctccaggtattggtgatttttatatctcgtgctgtcaatctgtttgtgtcagttattattttttcaagtacacaaaactgataaatatgagaccatttgggggaggttacacaaaaataagtatgcctgttggccacaatatgttattaaatagtattgtggtcctcagcatttctcaaactattgatgatgcttcctacattacagcgtatgttttcacaactcttttgaaattatagactttggctctgaggtatctaatccaacagtctcttttcacagatagaaagatagagactttgagaggtgcaatatgttggcccacagccaagtggtatacatacctagtactagcagagcctgcaatagggtccctggcaacaggcttctaggtctatcctcaaaatgtgctgctgccattctctctactgtccaccttgactattgttattggaaaaaggagtttgagaaatagttgtctaaaagagcaatttgtgtgcacacatgggtgtgtattagcatttcaaataacaatgtatcaatagatatccaagggataaatacatttcctcttccacttgcttactacattgttgtgtattgaaaatttagtatttgaataaccaaaaaaattatctttccatttgctattctgtcctgacaatattatgatgagctgtattttatgtaaaccactaaagaggacttattttaattagtcattcaggttttatatcatttctggccaattttacacagttttagttatttaaaatgtagctatatgagattcaacatttaccagcatttcatatttggaaactatttaagaaatgaagtggccaggcgcagtggctcacgcctgtaatcccagcactttgggaggccaaggcgggtggatcacaaggtcaggagatagagaccatactgactaacacggtgaaacatgaaaaccttgtgttataatcaaacggatggactatgagggggtaagctgttaaacaatagagtaatagaaagggggaacaaaggcagaaatgagcctctgagcagtagtgagctgaggggcccagagttgatctgtttccctttattaatactttcaccgtgttaatacttttccagaaaccttgcctccaccatggccctaagtcctaacagatagcttaattttcttagaggaattcaaataacaataataaataatgtcacatagacttctaatgttttaataaaaaccttcagcaacgcccacatttttacgtgacaattttttaaagggctatgagggagccaactatgtcagcaaacagacatgctctgaagacagggtggtccatggcattcaaagtgtattcatttctaccgatggtgcttttcttgcataggttctgacttgtgtagatttggacttcaagctaaaataaaaagagaggaatatgtgtatacatgagaatgtgtgtgtaacgtgtcgatggtataaatagtctcttcctctctctctgaattgcatgcacttaagcccctaagaaaagatctcttacctcttatctaagtaaagcagaattttgagctttgaagctaaatgatacaatgagatcagtgtaaatactctttaacacaacaatatttgagtagctttgaaacagtcgtcctcatttcgttacatacagaacgttcgtgcttcctccctctcaggcaagaagcggagtccgtcgtcagcagttagcagagtccagtgcgagtgcacgtttcttaaccggataacttagttgcccctgccccccgtcgctgcgcccgaattcgcctccagtagaagacgttcagcgggcgacttggcccggcgcctgggatcggtggctatgcgttccccaactagcaccctcgctgtccttgtgcagtggaacgtccccaggtctgagaatgcacctcccgccgtgtccaccccggccgcgtctctcctgaaggcagatcttggaggtgcagccaggactcctagaggagcctcctccagtcaccatcgcgggtggggcgagccgggtctcctgctgggcttcccagccgcttcgctcc

SEQ ID NO: 26209 - DNA, 2300 bp, Homo sapien
ctgtcctgacaatattatgatgagctgtattttatgtaaaccactaaagaggacttattttaattagtcattcaggttttatatcatttctggccaattttacacagttttagttatttaaaatgtagctatatgagattcaacatttaccagcatttcatatttggaaactatttaagaaatgaagtggccaggcgcagtggctcacgcctgtaatcccagcactttgggaggccaaggcgggtggatcacaaggtcaggagatagagaccatactgactaacacggtgaaacatgaaaaccttgtgttataatcaaacggatggactatgagggggtaagctgttaaacaatagagtaatagaaagggggaacaaaggcagaaatgagcctctgagcagtagtgagctgaggggcccagagttgatctgtttccctttattaatactttcaccgtgttaatacttttccagaaaccttgcctccaccatggccctaagtcctaacagatagcttaattttcttagaggaattcaaataacaataataaataatgtcacatagacttctaatgttttaataaaaaccttcagcaacgcccacatttttacgtgacaattttttaaagggctatgagggagccaactatgtcagcaaacagacatgctctgaagacagggtggtccatggcattcaaagtgtattcatttctaccgatggtgcttttcttgcataggttctgacttgtgtagatttggacttcaagctaaaataaaaagagaggaatatgtgtatacatgagaatgtgtgtgtaacgtgtcgatggtataaatagtctcttcctctctctctgaattgcatgcacttaagcccctaagaaaagatctcttacctcttatctaagtaaagcagaattttgagctttgaagctaaatgatacaatgagatcagtgtaaatactctttaacacaacaatatttgagtagctttgaaacagtcgtcctcatttcgttacatacagaacgttcgtgcttcctccctctcaggcaagaagcggagtccgtcgtcagcagttagcagagtccagtgcgagtgcacgtttcttaaccggataacttagttgcccctgccccccgtcgctgcgcccgaattcgcctccagtagaagacgttcagcgggcgacttggcccggcgcctgggatcggtggctatgcgttccccaactagcaccctcgctgtccttgtgcagtggaacgtccccaggtctgagaatgcacctcccgccgtgtccaccccggccgcgtctctcctgaaggcagatcttggaggtgcagccaggactcctagaggagcctcctccagtcaccatcgcgggtggggcgagccgggtctcctgctgggcttcccagccgcttcgctccggacctgcctggagcctacaaaaaacaagggctcgtccttgcactctcgccccccatggatcacccctagaaggtgctttccccaaccctcctggtgccaaggagagcaaacctccccggggatttgcccaaagtggtgggaggagggttaatatttgctttgttattcggataaggggaggcaagtatgccttgggtgtgtgtgtgtgtgtttgagagagagagaaagagagagagagagagagagaggtgtttttgcagcgggaaacaagcaggaagaggcacagaggccggcgcccctgctcccctcggggcctctgagagcggcacacaccgtaattcccttcccagagcctacagattcccacaaacaatgacatcactccgccgccgctggcctgattacagctggggggattttcctgggcgcgcggcgggccaggctgagatgggggagctctccggtgctgaaaggggcgggggcgcgggctcgctgcgctgcgctgcgctgcgctgcgcccccagaaggcggaggcggccgggccgggccgggccgggggtgggcgggggcgggcccggggcggcccagggcggggcccgccgcttcccccgccctcattggccgctggcggactcacgtcacccgagctggtgctctcccccagcccctagggaattggagctgaggaggagctgaaaatgcagatttagcatcaagcacagacctacactcgctctttctctccggtacacacagctccccacattcgcacccctgcccgcgcgccgggccgcctgactgcacggcttcccctccagccagatgctggagaacacacactgattcgctgctttccaagaccctgttcagtctctttc

SEQ ID NO: 26210 - DNA, 2300 bp, Homo sapien
attttttaatcctatcaaaatttagaggatagactcagaattttaaaaatgaaagaaaatgaatggatcttttacgactccaaacatctcttatgatgaagagaacgagacccagagaagtgaaacaacttgctccaggtcacacagtttacattgtcagataaagatcagatccaacaagtaaagggattaaaattctcctgttgacttctagaatttaccagatgttaggagaagtgattcctccaaccttaagactacagcatcatctttaaaacatttccattttcaatttctctaaagatgcatgtgctgactttaaattacttttgctgccttgatcattaggaggaaaatgttaattgggttcaggggaacttgatgctgtaaatagaagtactatgctctgaaagagaatggtgagggaacagccttgcacacgagaaaaacaatccattctgttagaagtcaggttcctacaaaggataaatgcttgaggtgatggataccccatttaccctgatgtgattatcatgcattgcatacctgtatccaaatatctcatgtaccccataaatacatacacctactgtgtacccacaaaaattaaaaattaaacattaaacaaaaagtcagtctgctggtcagccacttcctaagagatgcttgctgacccctggacccaagtttctcagatttcctgatgatcagaatcctggagtgcttgttaaaaacacagataccctaagcccactggagatccatagaatcagaatccccaggggagcccctggaaagctctatttttcaccagcgcccccacccccaccagtgccgtccaggaagttaggaagctctcccctgaacgaggtttgctgcatactgaaaatactaaatgtttggaggaatccatggaatcaaaacctctgaacctggacatcatttttttaaccatccccaggtgattccaatgtgcagacaaggttgagaaccactgtcccagactaccaatgttctcaaacatcactgtacagaagaatcatttggattaaatgcaaattctcaggcccacaatctccaagatgctgattcaggacaggtggaaattcacatatgtcactaatggtcctgacacagggggattgaggatcacagtgagaactcctgactaggataacacagaggctccactgatgcctccctcagcatcctgagctcccccatcatgacagccctcacattttcaatactgagttgtccctctgtccccctaggctatcagctggtggggacagggacatccgtctgacatgcccagagttagcacgatgcctgaatgtggtagacactcaacagacatccatacaatcacttcattgcgcagtaccttctcatatatctgcatcttattttcccgactcatataaaacatttgagaacagggaagaacatgtcacatttcttgtcctacagtctccaaaacagtgacctgtatatcgcagatactccataaatttattttttaattatttaataactatcacctgtaattcttgggctgctatggtacaattaaagcaggttgatgaaataaatacctactttacagaatattgtagtctgtcaattcctaaatcattcagaagggatactagaaggaacctggttttactcttcagacatatgcaaatagcaggtcaaacagtgtcatagactcagttacactggagagtgaactatgctgtggtttatctcaaaagtgaaaagttccttgttctgaaacattatttctctctctctcatgctctctctctttctaaaatgcaccccatgagaataaatctgcagagaaacatttaagggagcccttctccaggcatcagaagtacagcccattttcatggcaaagatgagaaatgagaaacctgctagccagccctctggtcatttagatcctcatttgtcaacacttctgagattaataaactcagaatccccttccagcaaaacactcagtttttagccataatcaacttaaggaacttttacaccattttacatcatttacaccattttacaccacttacatcattttacaccatatgtccaagacatgttctgaatctcctcaaataagcattgaccttccttggaacttgcttcttttctttttttctttttttttttaattatacttttaagttctagggtacatgtgcacaatgtgcaggtttgttacgtatgtatacatgtgccatgttggtttgctgcacccattaactcatcctttacatgaggta

SEQ ID NO: 26211 - DNA, 2300 bp, Homo sapien
atatttcagcactaactcagttggggcctcccaatggactgggccctcgtctgtcatattcatggtgtaaccctagtgcctacaatagtgctgggcatatagtagacaggtgataaatattttttaaatgaatgagggaatgaaaatattcagccagcagcagccggacacaagggaaatgtctgactgctggcaataggaccggcgggccagcaaggcaaatgtgggaaggaggctctgccttggttggaagggctctgcctcctctcagtgccctccggtccctcgtccacccccacaccagaacttgttctcagatgcagatgagttaggtctagggcaaatacacttgttgaagaatgcagaggctccacagggagatttggagagcagccccagggctggctgtgccgcttgacagaggaggcccttgtgaccacgaagcacactcgaggagcggtggggtacaggaatcaacagccgtggcaatcgccactctccataatgtgcagggctgcacagaaacagcttccaaggtggagtgagtggtgattgtcaggtttgtgggtttccttggcattaatcttcccggagatggagtcaatttgaaaagcaattttctaaagaggctttatcaagagagtcagtgaaggatgctcagctacaatcaaaggggaaaatacacctggctgtgaccagctgcaccagctgtgtgtagaatgagcagagccagcccaggccggccccatcagccagctgggagtgacctgtctaacacagctgcccccagcccctctgggcaccctgaggggactgttcactgagctcctttaaggctgtgccaaaatatgtgatccagctctgaagtttaagtgaatttggaaataaatgttaaaacctggtatcaatgccggaagcagcatgggagtgagaggtcagcgtgtgctcggccctgtgccacctgggggactgtggaccagcactcccgagctgcagaggcttcctgcacaagttcatgcccacctgactctgctacagggggaggagaaaacctcaccatggccacctgctgcgtgtcgtcatgtgactgccacaaaagcaggcatcttgggcacttgagaaagagtggctgtcattgttactattgtgattattctatcaaaacaatcacagccttataactttttctttttttttgagacagagtcttgctctgtggcccaggctggagtgcagtggcacgatcttggctcactacaacctccactgcccaggttcaagcaattctcctgcctcagcctcctgagtagctgggactacaggcatccaccaccaaacccggctaatttttgtatttttagtagagctggggtttcaccatgttggccaggctggtgtcgagctcctgacctcaggtgatccgcctgccttggcctcccaaagtgttgggattacaggcatgagccaccacagcttcataactttatcttacagttgaagattcataacacaagaagcattccccagggcctcctgggaagcaacacctatttcttgacacaaggcagtttaaacacttacttgcaatgatacacaataaaataaagatacaagccaccccgacaaccccaagtttgtcttttataagactggaacactacgattttgcatgttatctctaataggtcaaagaagaactcttttttttttttttttttttttttgagatcgagtctcactgtgtcacccaggctggagtgcagtagcgtgatctcagctcactgcaacctccgcctcccgcgttcaagcgattctcctgcctcagcctcctgagtagctgcgattacaggtacacaccaccatgcctgactaatttttgtgtttttagtagagacggggtttctccatgttggtcaggctggtcttgaactcctgacctcgtgttccgacccctcggcctcgcaaagtgctgggattacaggcgtgagcctccgcgcctgacctaagaactcttaaacctccagaaagcatgcttcattttctgcagcaaatgagctccagatcatggcctggaaactaacaccctgtgactatttaaaatgtttctgcagagcctctttttgttccaccaccaacctcctcctatttaaccttcttataaattgataattcctgagcatatatctcctttttgctttaaaataagaatgtttcattccttttcttctcataaaagcaatacatggtcactgtaagaaaatcagaaaatgcaagtgagcaaatgaagagagaaacaagaa

SEQ ID NO: 26212 - DNA, 2300 bp, Homo sapien
gataaatacttctattttgttctgtagcaatatttgactgatacatggtatcatagggaacaaatgattttataactcttgctatatgttggttttgctctcgtgaggaagcctgaagtcaatttaccatgctatcagcatggtatatgtgcacctacaaaaatattcatgtggttatcctcaatttgaccatacaattacattttatgtatttttatttattatttttatttttataaataaaagaaatgggggtctcactatgttgccaaggctcgtcttgaactcctggcctcaagagatcctcccactttggcctcccaaagttctggattagaggtgtggtccactgcacctggccaaatctaattttaaatggtttaagaaaatagaacaataaccatgccaccagcacagtttagggccttgcagagctttattccagacggaatctattatcttgaggtaatattttggtgtaataataaactccacaaagatctgtgtaattttctttctctatctttgataactatgactttaatttgtagtataatcacacacaatccatatagttagtaattatatggtactactaatccttttaagaaaacaacccttttgatacttatttttaaagttggagatatgacaaaatatttacattcagaaacattctcatcaagtggtattaatttcttttcttaaatttacttttaaatttgtcaaagtctagctattaattatatatatatattttaaaagcttgtccttaaaatccaactattagttccataataaaaattaaaatggaacataatggcacaaaatcctttattattctcgaattgagggttggccaattaatggcggatcacttgagcccaggagtttgagtcctgcctgggcaacatagcaagaccccatctcattttttattaaaatttttttgtattacattttatgttaaaaaaagaaaaagaaaaaagcaatctttttttctttttctttttttttttttttttgagacggagtctcactctgttacccaggctggagtgcagtggggcgatctcggctcactgcagcctccgcctcccaggttccagcgattctcctgcctcagcctcccaggtagctgggattactggcacacgccaccacgcctggctaattttggtatttttagtagagacggagtttcaccatgttggccaggctggcctcgaactcaggtgatccgcccgcctcggcctcccaaagtgctaggattacaggcgtgaaccacctattacaggcccatgggtggggctctatttgttttttccattcaagaaagcatgtcaaactccatcagagcatgggtgaattataaaaacataaccgtgcatgtctcctaagttattgtaggcttttatgcacgggtattactaagaaattacttgcgccacacctcactacttaatggagacatgccattttattttgcatccatggttaagaacctctgctatacagaagggtcctaaacgtcatgttatgattatgaaaaagaattgcatgcataaccgagcaattggaaataaaaaagaccaaaagaaaaaaaaaagaattgcttaagtaatcagaaaaaaaaaatggcattgttaaagagttctacaattgagtttgaatgcaagaggagacaaagtgacaagccctgggctcttgagctagtccaagtttaaagagttcgcttggggattccttcacagtccccagtggaaccagtgaaaagagcgtcatggctcccgtgtcccctgaccctccattcaatcaaaagcaacaggcctgaacaatcacggaacaaaaacctcattgcccagcgtaaccttccaaccccggagctgtatgggccgctaatccgccgcacaaagcgggccgctgctcttttcttctcccgcgcccgggcccagcgtggcgcccaactgctgatcggctctggaacgtcccagcagcgcgccgggggcctccggtgtttatttagcgggctgcgggctgcgccgggggcctcctggagagccggctcggcgccgcccgcgcgcccgcgccagagcagccatgtaccggcgcagctacgtcttccagacccgcaaggagcagtacgagcacgccgacgaggcttcgcgcgccgccgagcccgagcgcccggccgacgagggctgggctggggcaacgagcctggcggcgctgcaggggctcggcgagcgcgtggccgcccacgtccagcgggcccgcgccctcgagcagcgccatgccgg

SEQ ID NO: 26213 - DNA, 2300 bp, Homo sapien
agtgtaatcacaagtcataaaatcatgaaggataggaatgaagagactagaaatttcacagtaaaccttaacatgtaaaaacaagagagtttttctaaaagctcagaataagtcactttagaaaaaatgaaaggactgtttcacacggtggttaagaaagggaggaaagtgacagtcagaggaggaaaaagcatgtcacagacagcaatgggctggttgtggcaagctctctggttgggactcatttttccccagctcgtcccattattccctgcagacttctgcctcacccgctgcaactacagggcaggaaaaactcagaaccagcaaagcgcccaccccagaggctgccaggtaatgtcagggcagtgctgaagccctgctgggatatggaggtgataccagtgcatgcaggtgggcaacttgtttatattcacaatgggaagccactgtcaaatctaactgaacattttttcatttagatttgaggatgtttcctgaggtcctactgtgtgccagctgcggccatgttagctaccaggaatatgaagatgaataaggagatcacaagtgaaaacagaaatgccaagataaacttggcccaagttcccttgggaattctcaggatcctacctggtgcagcagatcacaccagggagatgttactggatctttgatgagtggagcatccacagaggaaggaagtgagtgtttgttaatgacatcattcgtcacttatgttggcaaatatgaatatggaagagatggctggagggtttattcaaagttggatatttggaggaagagaatgcctgatgtcctaccaaaaaaaattagaccctatggaccaagatacataagatagatgtagatatgtaatgggtttcctccctgtttttttattttctttggggtctgctctggcttacctcctaattttcctgtcttctcgggggtagcaggagggatgtcaaatgatggttcagccaaagaaacccagctcttcctgatgagggaactctgagttgtattcaaggaaaacaaacaccaaaaacagatagccaaaggccaatggtcatgatttgaaatttgagtgccttttactgtaactgttttgctccaatatttccactgccagtccttcggtgaggtatttgactctagataagaggtccccaacatttttggcatcaaggactggttttgtggaagacaatttttccacagacggggtggcagggggatggttggcgggggattggtttcaggatgaaactgttccatctcagatcatctggcattagttagattctcacaaggagcgtgcaacctagattcattgcatgcacagtccacaatagggttcccactcctatgagaatctaatgccgccgctgatctgacaggaggtggagctcaggtggtcatgctcactcgccgcattcctaacaggccacagaccaatactggttcatggcccaggggtggggactcgtgctctggatgacacaaattctagtcttgcctagccctactgttaagtagccataggacctctgcaaggtgcacccctttgggactccttgtcctcacctgtaaactcaagatgttgactaatttgacccttttaactctaaaaggtgatgcttgcactccacagaagagatactgagtgcctggcacagtcttagcaattcgtgaagtatcctgttctagtaatactaacgcagtctcttaaattttgatttataaactctaggccttgggctctagacaaaacagggctctagaggacttgtttttgttgttgttgttgttgttgttttttaatggcaaaagcaataaattgctgtagttttctagattgtagacttaatgtggttctcccaactatccatgtctgggcaaagggagctgattgacacaagagatcaaacagcattagcttcaacatccttacgtgtaaatgaggcaaacaacatcacatcttgcaattggtcctgcttttttttttttctttactcttctttttggaagggggagtggaggtgagtggtcactaaattcaggcccagtcattaagaggtggtcccctagtaaaattttccatgctggaagtggaaggaattgcttgctcatttatattctctatcctgtggaaagccttccctcccaccccttgagccagtgagtcacttcctctctgcaaacctctaaagcctcctttctttctcagcccagacctggccctctggagagggttttggagtcctgggtaggcagggtacctcaggcagcag

SEQ ID NO: 26214 - DNA, 2300 bp, Homo sapien
aggcaggagaatcgcttgaacccgagaggcggaggttgcagtgacccgagatcgcaccattgcactacagtctgggcaacaagagtgaaactcagtctcaaaaaaaaaaaaaaaagatttgagaagtgatgaactctgggattatagaaggaactaggggggtgaaggagttgtaaggggtacggggcacgaaaaaaaaaaaaagaaggaactactattgatccttgggaagtggtaagagaagtcttcagatgcgaagggtgataggaacatcccaggctgaaaaaataagcaggcccatgatcaaggtagttagaactagtaagaggtgttctggaatgagaagtttcgtctgggaggggcagtgggcacttaggaagatatgggagatagggcagaaaaagtaggctgaggccagaggcagacgggccagactgacctgctgagggttatggaggaagccacagcaaattttaagcaagaatgtaacaagaccagtcttatgtttggacctaactctggtggcagagtggaggacgaaatgcaggagaggctggagcaagcaggcaggcatgtatccttaaatgagcaccattcacttttggactagaaaggaagtctgaatattaagaagtgtaagggccacagggtcctaggcaggcagaaaagcaaagggttccagctgcaggaggatacaggggggttccttctcagttcaggagtgtggtctcggactggcatcttcagcatcacctaggagttgttagaaatgcccattctcaagcatcatcttagaagcagtgagggaaccttggggatggggcacacaaatctagctttgaacaacttttccaggtgattctgatgcatgctaaagaaccactgctctagcccgccaaaaatcatgtctcaggtggtaaaggcttagaactgcacaacttactgtcttttttaaaaagaacgagggtaatgagaaatgggttcctatgttgagtggggcagaacaaaagccacatacaacctagattttacgtagtgccggaaaaaaaaatactgaccatcttgtccaaaagtctcatatttggagaattaaaatagttttggtcgaggccatgatgttctcggtaacctaaattaatttataaaattctttgttccctttatttcccacaaaaacacccgcagcaaaaacgctgggattcatctgggccctctgaaaaccgtgtttccgacgcaaccgcccattagaaaaacacaattccaaattaaaaacccggagaactgagcggcggggctggcgccaccgtcccgggacagcgcggcctttcccagccacacccctgcgcgccgccggcctccttccccggcagttcccaaagataaataaatgctccttgtttttccagacctgaaattaacggtgactcacagagcactctgcatggccacggtcgcctcgggaaggaggaaaaatgtgcagacttttttcccctcacgcgagggcaggacaagccagactgggccaatcaggggagggcggcgggaatcgcaccaaagtaggtaaaaaatgcgggaggcgtccccgctgccgcggcccgcgactccgctcccgtgggtcctcccccagtgcgttccccctcctcgggccctgccctcccaacccccaacatctctctccttccaccactgtgtccctctccctcacctctccccttgcccccacctcccccactaagtgccccctcgcccctccccccacatccccctcctctccccacactgtcccctctccctcacctcttccctcccctctccatcctcctcctcccccaactatgtgcccctcgcctctcccctccaaatccccctccttcccacactctgtacccctctcccccggctctcccctccttttcccctccacggcctcgccccgccccagcggcaggcacacctggccaggtggctgcctccccgcgcgggccatgcctgcacagtgggtggggcgtcaggtggccccgccgaggaggcgaaggaaggccacccctcccccatcatcttttgcccgcccctcgccagcaggagccagcccagtccgccttctagcctcctgcagaccagagaggacgcacccccacccctaaacactttctggtgaggcggaccctgccccgcagccttcagcagatgagggaagctcccctccgagactctggatagccgccgggggggcgttgcctggccggctggttgcgtagcaacggcaggcggtgcgtgacgtgcgcagccgcgttccgtcc

SEQ ID NO: 26215 - DNA, 2300 bp, Homo sapien
gaggcgcagaccatggaggccctgctggctctgctcccagaactctctgtcttggcacaacaggtaggaggggagggtggttcccggggacctcacagttctcagggaatgtccccgggtctcaccgaatgtgtttcattgcagaattacaccgagtggctgcaggatctcaaagagaaaggccccacgctgctgaagcacccgccagctcccgcggagccctcctcggtaagtgtggctgcctggcaaggctcctctgttgggctcccctgtccccaggaagaggggctgccccaagtcatttcaacgggaagccaagagaagaacctttgtgtgtggctaactaaacacctgttcttccctctctcaggacctggcctccaagttgagggaggccgaggagacgcagagcacactgcaggccgagtgtgaccagtaccgcagcatcctggcggagacggtgagcattgggaacctgtcagctgggcatccctgggaggctgcagggaaggagagcttcggggcctatggggcaggaggtggcctggtgttttggaaaagcccactggccttgtgactctgggccccgttcttcggctgcatggtaaatggatggcaccctctgaggtcgtcattgtttctaagctgaagagaaggccaagttgaaggttcggggccggtctctaagctggggaaggggaaggacggggtaagcagctggtgactgccaggttgaaccccgtttgtgactaagagcaatgccaggtctagccctgccactctctggccagcccatcctgtgctcctcgtcctgggccattgacacacttggtgctggtggcaaaccccggcagtaacaagcatcctagtggtcctgtgcaggtcacagacctcatttccttgcctggcactgcagccacactggcccactggccagaggacctccctcccaggacagtggttgccttccctccccacctaacgctggcgctcatgaagtcagcaggcggagcacggcaggtcaccagggctgcagggacaggaagatgcggttgtgtggtgcgggtctcgggagggagagggccctgcctcacctcggtttccccccaggagggcatgctcagagacctgcagaagagcgtggaggaggaggagcaggtgtggagggccaaggtgggcgccgcagaggaggagctccagaaggtatatgcagccctgcctgcctcccggcgccgtggagcacatgaagcccaggggagagttgacaggattgtctctgtcacctgtgagactcgtgtgtctcggtggggcttttccacgacaccctatgaagcacagttgcgggatgacagctcagtccgtcctccaggaggcccccgcctaggaagacactgccagatggcgccagggtgaccgtcccagctgggcggagtgggcacccccggggcttcctaagttgggtcagtcccgctcgggtcctagcatggcctcggaaggagacacccccaggtgctcgtgtctgacggagccttccccttgctttgtagtcccgggtcacagtgaagcatctcgaagagattgtagagaagctaaaaggagaacttgaaagttcggaccaggtatgtgctctgctcagagaactctttctcttgtcccgggagcctctttgaaagtgacgttaatgcagaggacacttcactgatttcttcctcatggaccgtgtgccttaagagaggcattctctctcaagccaagggatcttgtccatcctgtttttccttaatgagagacattgactacctcagaggaccctgagacccagccacgggccctgtgcagacctgcccagccctggtgaacagggcttctgccacggccttcacagtcaaggtggccccactgcccccttcagacgccacagggagccctggagaaggtacccttggtacctgcttttgcaagtaaatctaagagcatgtcagtccccaggagtgcccgggtgcagcctgccactttccgtaaggggttctcttgccgcggactagtttctcgtttgcttggtagctggtgggcctcagggatctcccgagaggcctcacctatcccagggccagcctgctccctgaggtgagtgccctttgagcagaggctgctggcgcatgcgtgtgcgtgtctgtgcatctgtccaggtgagggagcacacgtcgcatttggaggcagagctggaaaagcacatggcggccgccagcgccgagtgccagaactacgccaaggaggtggcaggggtgagtctgcccccc

SEQ ID NO: 26216 - DNA, 2300 bp, Homo sapien
cgccctggactcgggggagggctgagcttgtgtttctacaccccattgtgctgtgggggtccagggtgtggggggtgcttctactcacccctgagttccgccaaagacccagggctgactgcctgtggatcagcctgcgccactcgctcaagcgtggagtcatccctggggtggggacagtgtgctgttggcctggcctgagtcacgtggttgccctaagtggggatcctggtcccaggagaaggggatgtagaagctcggcaggtggcatgcctgctgtcctggtgtggcctcggccacaccctcctgcccccttctcacagagccgggcttgctggctggccctgttgctccctgcagaggctgcagcttcccaaggcaggccctggccttggcctccctgtgccaggctctgccagagctggcccaagggatcagcactaaccatttggtagcaggaacctcttccctttgaggacacaggctggccctccctcctccctttggctagtggtgtctttatcgaaagggcgccacctcttcaccctgtgccatgctgcccgcctctggctacggcacccaggccttgtgttcaggcgccatggtcatgggccaaggaaggggcattttgtcccgtggcaggtcctctgtgggccagggtggcatcaaggagggtctctgggccctgtcctgtctgacaccagcttaggcagcccgtgctgccagtgcaggctgctgacctttcacctgtgtcccctccaggacctccgggagaagaactggaaggccatggaggcactggccacggccgagcaggcctgcaaggagaagctgctctccctgacccaggccaaggtcagagcccgaccacactcacacccccaccatggaaagtgcactaggatgcacaaatgcactaagacgtacagatgcactaggacaccagatgctctaggacgcacagatgcactaggacagacatacagaggcactaggaacgcatagaagcactaggacacacagatgcactagtacgcacagacgcactaggacacacagaggcactaggacagacacagaggcactaggacgtacagacgcactaggacacacagacgcacaggtgcactaggacgcacacagtgcactaagtgcgcacagagtggccttggcctcagagctcctgagtccacgccagaccccggctctacatccacctccccctcccacctccttccctgccgtccttcccttcttcacttgctcctttccaagagagggatgggggtgcccccttgatgggcttctccgtgctggtctctctggctgagggtacagagctgctggggtgggactggaggcagtgagcccgaggctgcactctttatgagcttttttggtgttatttctgttgtgtgtccttttgtcgggtaatcctgctgcttgggcctctgaagtcatggcccagggggctctgtgaggagactttttttttttttgagacggtgtcttgctctgtcgcccaggctggagtgcagtggcgtgatctcaggtcactccaacccctgcctcccgggttcaagcaattctcctgcctcaccctctcaagtagctgggattacaggcgtgcaccaccacgcccggctaagttttgcatgttttgtacagatggggttttgccatgttggcttggttggtctccaactcctgacctcaagtgatctgcctgccttggcctcccaaagtgttgggattacaggggtgaaccaccacgcccagtcccatgaggagtctttaagtcacagaggggaggacattgtttgcagcgagcactcggggaacagaggccgcgttggccctgcgctccatgctgtccaggtggggcgtgtgcaggtgtctcccagtgtctgagcccacgggttgcttttggggtgctgggctgtccaggagccagtgaggaggctctggccaggggacatggccagcagcagctgcaactaaaggccctgcccacactttgaggtcacacacgttttcctacctcatgaaagggcctccactcccagcctctctcacaggaatatctgccccaatggcaggagctttgcggtgattcccaggaagcctgagggttgtatcagatgaggacaactagctagggcaggaggtgaaggatggcctcaggccaccctgtgagagctatagttagactcctagaatcttggccttgtagcccccagtgacctcagagactgtctggctaccatgtggtaaatgaagctgtgaccagagatgtcacc

SEQ ID NO: 26217 - DNA, 2300 bp, Homo sapien
ccttgtcttcttgtgcgccggaacccccccaccaccatcaggaatgcttttcaaggaaataaatctgactcttgcaactgaattaagaatttgacaagcagaaggaaccctgggtctctgagctctttgaagaaaaagaaaccatagagagctaaacagctgcactgaggacaagtgacttttctctgctctttaaaaagcctagaggcaaaagagggggaagatcccattgaatcctggcggccttgggacgctgacccccaggagataggggtctgcagaccctgagcggggtggaccttggaactgcacgaggcctgcccagggctgggaagggtgtctccaggtggcagaggagggctgaggatgacccaagtgtggcttcccaaccagccatccatgtggctgtgggaatgcctggtctccatgagctttggtttcttcgcaaggctggaccatctacttggaagggccgttgtgtcggaaactcagcaaagagagcggcctcctctctgctggtgttgggaggcttccagccatctctaccacacctgtctgccagcagtgggccggtggggccacgtgtgttagaggaggaagtgcggaggggtcctggaatcaccgctaagctgtcctccctttccccaggggcttcccagcccacacagaagggcaggcgtcctcattcctcccctttctgggaaccccttggtcttgtacagtcctaggtttgggccccacccctgcctcttagagctgctccccagccttggacaagtgtgtcctctccaaggctctgtgacctcagcttggatggggattgtaatcctcgtcttccagagaaaattaaatgggacagtgctggggcgcagtgtcagctcatcccgccccccacttctgtagctaatcagtgaagcagacctgcaggttcctgtgggcctctcaccccgggcagagccaaaaagatgattgtctttgaaaagtgaggccaagggtcccaggaggtcccagagagtaccaggagcacggaacagcaccagcacccagtggctcctcctcagggttctttcccatctcaggcaagagggacactctggcctttgggacaggcctccctatagtcctggtctggggaggggacggacttcctcactcctggcccactgcccatggagcagccttgacgctggtgggacgcttgtgccctggtcactcaggcctgctgtgtttatgatatgtattcacatcacatcagtgctggtctgtccaggcctgctagacagggaacacccccaccccaggggctcattgtgtcaacctttccttgagttgtcaccctgcctccctatggtttctggttgaggccatccctctgggatgacacagaccatggccagccttcccatcctgctctgtccctgctggagacgccggaccccccagactcggcatccatgttcacctgtgggtatctggcactgatcggagccgatgtccccctgggtggaggacagagcgaccgcctgcagagatgcatgccctacccccagccacggcggaactggcagctggccccacccccaccctagccatcagggcttggtgcctttcagtcctgatgaaggcacttgagtagaagtaggtgtcccaggggccctggatgttggtgactgagtcaagctggggtgttgtcatcacagcagggccgagccagtgccctggagagccagggacagcaccgtgtgtctctgctgttcctgccgcatctgccacctccactgtggccaaggcctgacattgagcccacaaccggccagggccagcagggtttccagggatcccttgttgtctgtcgtcgttcccactgcagctggcttgagtctagctgagaacccggccagcaggaggggtctgtgctctgctctccagcctcccagctcgggtgatgctcttgctcccttctgataggctcctgccctgcaaggcttaccagcccctctctctgctactttccccccaggagatggcagcagaaaaggccaaagcagcagccggggaggccaaagtgaaaaagcagctggtggcccgggagcaggagatcacggctgtgcaggcacgcatgcaggccagctaccgggagcacgtgaaggaggtgcagcagctgcagggcaaggtgggtgtagtggctggcgggggcatgggaagggacaggacccagtccaggtccaggacggagggagccagagaggcccaaagggtgaggcatgaggagggggttgaggatgcccacaggggtctgt

SEQ ID NO: 26218 - DNA, 2300 bp, Homo sapien
tcttggttcaccctttcttgcttccgaggctgcattcaagccccaatgagaacaaaaccatgtgtgtggggaggggcgtggggggtgtcggcagttttagtttttcagaagtgacgtttgttggcagatggctccctgtcctccaggcagtcactcatggactggccagtggacaggccctttctataagaacccagccagccttccctctcccaaaccctgtcactgcctgggcttcatccagggagctagaaatagggtttgcactgatgtgtggaagcagcctctccttgccttctgtgctcctcctgtggctgcaggagtgtggctctgggtgtctgtgtgtggtggacggtaaattcgctgcccagtcaggtcccacaaggccacggggctcagtcacagccagtggggagaaccatggtgagccatgcaggttgagaacaggaccagtgcatttgcgagaaaaaaaaggaagggagaaaagcctatggaaaaagtacgccttgcttaattttgttgcaggccatcttgatggtggaaaaaaaaaaagaggagctctacttccaccccaggctgggacttcctatgggcgagttaggacggtgcagggacctatcgttgagtcagtttcttggtgtcctgaaagagcaggagacactggagcagactcgccatgctcagcctgctgaccccaagcagtcagagagctcttcgtggctgtgaccagaaccttcttggtgtgatgggcattgtggccacgtgtgttgtggcttatgggcctaagtctcagctctttccctcttgctgcacagggcccccagatgccgacggccctctctacctcccctacaagacgctggtctccacggttgggagcatggtgttcaacgagggcgaggcccagcggctcatcgagatcctgtctgagaaggctggcatcattcaggacacctggcacaaggtgggcccaccctcctgctggccatgctcagaggccactgcagctggctagggtggttttgcccttccctctgccacagagaggacattcataggacagcctccacttctctttcctggcagaattctgccaccccgagggatcgctcgcaggtgctttggcttctgtcaagccacccatggcctggctcctgagatggttagggctggggcagggctctgtattggcagggtatgggatctagggagctggggcctagccagtttgtggccacagctcagggtgcagaaagaaaggtatagggacacagtgtggggccctgtgaggttccccagcccaggagcgcccctggtttccgtcgtgctgccgggggcaggttcagaggctaagagttctgagctatctcgtgcctctggccaagagctgtgcccaagaagtgctgcgtggcacattccttcactggagtcagagttcagggtaactgtgctggaggatttagtggttagagatgctcaggtgtgccctgaggccagtggggtcactcccttcctggccatacacatcctgcacagtctcagtggcaccgagagcttgtcagtcgtcactgggggctctactgggtatgagtggccataggagattcagatgaccagggagaggcctggctctcctcaggtcactgtcctcagagtacccggcccccatactgcagccagaggcctacgggctgcacgcccggctcgggtaggctccaggccagaaatggtggccagctgcccctcagaggagctggcaacaccacactcctaaatgccactccagggattcaaagcctttggccttgacagtcccaacacacgctgggtcaggggtcccggcaggctgatggctgaggcggggccgcctttccccacaagtatctggagtcccagtggaacccttgactcgaagcccctgctccacttcatcaagccctcaggcctctgctcttgtccggggtcaggggatgagccaagtcccatttgtcccctctgttaacgcatctctgggtatttctaggccactcagaagggtgaccctgtggcgattctgaaacgccagctggaagagaaggaaaaactgctggccacagaacaggaagatgcggctgtcgccaagagcaaactgagggagctcaacaaggtacagcctgagtgggctcggagatggtttgtcctctcccgtcctcagaggacccccgccccatccacggtggatcccgggctccgagatgctggggcctgcctggaacgtagctggctgtcaggctgctgagtagggactgctgcttatctgc

SEQ ID NO: 26219 - DNA, 2300 bp, Homo sapien
tggaagggtggtctttaaggagagagttcaagagaggccagagctcttgggtcactctggaacctctgtaggaccaggggctgccaggaattcagcagggggcactttgggggtccctggttctggaaaggaataggccagccagtccaggagaaacagaatgtgagccacacacgtgtgagccatggatgtgatgtaaatgtcctcagccacatttaaaaaggccagcaagaaacaaatggactgaatgttaacgatacattttgtttgacccagtttatccaaaatgttatttcaacatacaatccatatataaaattattacagatacttcacattctttttttttcataccaaatcttctaaattccacgtgtactttccactcatagcacatctcgagtcaggccagccacgttgcaggtgcccagtagccacacatggctggtgcccagcacatcggacggcgcaggacgcttttctgagtcaggagggggaaatgtccttgcagccagcagctagacgccggctgaagcagctgccctgcccagtctgtaactacagaggtgtctttgaaacaagtgacctctgtctcctggaaagtgctggcagtagacacgcacctgcaggctgagggggaagacaggaaggctgggaaccgaaatgtgaactaacacgggggtttctcccgagagtgagccatgcatgtttttattttcttttggcttttgggttagaattttctcttgtgtgtgcattaaaattactttatgtacatacacgtatttcagtgaaaagaaggttgaaggggcatgcttttgccaggacctgttttcgtggcacccatgacctcttaggcctttggtgtcaacatggttatttttaaactcccgagcctcaccagggtaagaagttataaaataaaggtgctcatagcaaccagctcgcccacatcccacgttcccctcattaaggtatcgtgccaaatgctttgacttgtaatgaaaatattatgactagtaagtgaaaatattgtgacaagccagagaattgagggttgctatggaaaccagccctctcctttgtcctcccaaggtgggctcagctgaggggctgctgtaggcctgtctgctctctgatttggctcatttttagtgctgtcattcagctgtggaagagtccaggcactcaggcgtggcatcttggttcaccctttcttgcttccgaggctgcattcaagccccaatgagaacaaaaccatgtgtgtggggaggggcgtggggggtgtcggcagttttagtttttcagaagtgacgtttgttggcagatggctccctgtcctccaggcagtcactcatggactggccagtggacaggccctttctataagaacccagccagccttccctctcccaaaccctgtcactgcctgggcttcatccagggagctagaaatagggtttgcactgatgtgtggaagcagcctctccttgccttctgtgctcctcctgtggctgcaggagtgtggctctgggtgtctgtgtgtggtggacggtaaattcgctgcccagtcaggtcccacaaggccacggggctcagtcacagccagtggggagaaccatggtgagccatgcaggttgagaacaggaccagtgcatttgcgagaaaaaaaaggaagggagaaaagcctatggaaaaagtacgccttgcttaattttgttgcaggccatcttgatggtggaaaaaaaaaaagaggagctctacttccaccccaggctgggacttcctatgggcgagttaggacggtgcagggacctatcgttgagtcagtttcttggtgtcctgaaagagcaggagacactggagcagactcgccatgctcagcctgctgaccccaagcagtcagagagctcttcgtggctgtgaccagaaccttcttggtgtgatgggcattgtggccacgtgtgttgtggcttatgggcctaagtctcagctctttccctcttgctgcacagggcccccagatgccgacggccctctctacctcccctacaagacgctggtctccacggttgggagcatggtgttcaacgagggcgaggcccagcggctcatcgagatcctgtctgagaaggctggcatcattcaggacacctggcacaaggtgggcccaccctcctgctggccatgctcagaggccactgcagctggctagggtggttttgcccttccctctgccacagagaggacattcataggacagcctccacttctctttcctggcagaattctgccacccc

SEQ ID NO: 26220 - DNA, 2300 bp, Homo sapien
actcaccattctgccaagggcttcttgctgcaaggctttctccagcttgatgggggcgggggttaaagtccccccagaagaagctgttaaccaatgaggactgggagtggctggataaataaccaggtcctcacccctcagctgggacgtctctggggtgtgttctacagtttcacagcatccccagagacgccgagccctgtgtgcccacaccagtcacaggcttgatgttggtccccttattggctcctgctcatcccacttctccaccaatgtttcttatgattatcccccaaatgaatgattgaacaaaccctactgccaggatctgcttccggaaaaagataaacagtgaacaggataaaggaggtccctgtccctggacaggcccttgagggcagctgggtcttcactggacctatgtgtcattctaggctgcttgcccagcttagcactgtataccgggcactccacaaacaccggtgaatgaatgaatgaatgaatgaacgaatgaatttcctccctgaaacccagaggaaggagtgattgtcctaaaggagtatacccatgttcagaaaggttagatggcccagccctggtcaagtaggactcattggtagcaattgccagccagaagctgggattcttgactttcatttgaagccgggtctcactgctggaaaatgactgagtgttccagagttaatccaggttaattcctgctgattaatcattaatgggctaaggaaccgccaagattaaaaataggaatgaacagtttaatttcaacccaatcgctctttattccccatgaaggcttgtatttttcacatctttctaacaacagctagtacagtactagtgacaaatggggacagggaagattgaaaattgtccaagaaatagatgttaggcacgggattctgcagcaacaggagctagggaagtgatggggggcagtctaggcagcctttggtcgctcagaatccaaaattccaaagaagctggctttggctcaagttcaaagggttggctttaagagacgctgacataatggttaaaaatcaagcctaaaattattttaatttaaagacttgactaattatgaagactgagtgttggctgatattggggagaaagtcagggaatgaggaagtaccagttgctccgttttgtgggacacggatgagttttcttaggttagaacctctcaccttccccaacgcatggaataaaacgccacagagtggattgtaattattgctctgccggctgtgatttggttgagtatcttaaatagaccgtgcctcagttgtaccctccctaacaacgagggcgatgacatccgcttcaattcctcgtgcaccttctggctcttccaccccaattcctccatttactgaaggaaattccttctggtgctgattgcaatctctttgatgataagaacttgctctccctgggctgacccccagcagagcttgtcctcatacccggcggcccgagggggcgctgcttcgggggaagttagttgggtttaaataaagcagcttccttggctgttcgcggttgcgcaaccctgttcagccaccgccatgtcagcccagcggtatccagaggcgcaggcccggggtcgccgggacccgaaccttctgcttcccgcctaggcagagccggatcctagtcagagactgctgggagcgccgcgggcccagagtgggcggagctggccggagacccccccctcggtgggcggggcgttcctgctccgccccgccccgcgcacggccgagcgccgcgccgctcggccccgcctctccccagccctgcccccttcacctccccgcagctcctcccctctcccattggccgaggtggagaccctcctctctgcccaatggccgccgccgcggctcggccacccgcgtcctgactggccagcgaccggcagagtggcggggtgcggaccaatgggaagaggcggctcgatgaatggctggcccgggtggggaaggcaggaggcggcgatcccggcggagggggccgttcgccagctctgaggcagaaagtgccacgactccacacgcgcgcacgcagccagcgagcggccggagcggacggcagacggggcgggcggcgtcagggtcgcagcgtctacagctgctcgggggcggtttcttggcggaggcttggccggctcctctctcccggctccgcggcggctgcgaaggcggcggctcctgccctctcgctttccctctcgcgtctctggctgcaggtaagaaacttggccgggccct

SEQ ID NO: 26221 - DNA, 2300 bp, Homo sapien
tcatgaatgtcttggtgctgtactcatgatagtgagttcttgtgagagctggctgtttaaaagtgtgtggtacccggccgggtacggtgggtcatgcctataatcccagcactttgggaggccaggatgggcggatcatctgaggtcaggagtttgagaccagcctggccaaaaaagtgaaaccccatctctactaaaaatacaaaaaaattagctgggagtggtggtgggtgcctgtaaatcccagttactttggaggttgaggcaggagaattgcttgaacccgggaggcggaggttgcagtgagccgagatcacgccatcgcattccaacctgggcaacaagagtgagactccatctcaaaaataaaaaataataataaaaaaaaaaggtgtgtggtacctcccttgccttgttcccactcttgccatgtgatacactggctccctgtttaccttcagacataattgtcagctccttaaggcctcactggaagcaaagcaggtgctggcaccgtgcttcctgaacagcctgcagaactgtgagccaattaaacctcttttctgtggaaattacccagcctcagatatttctttataggaagagaatggcctagcataggcacctacgggtgggtcctgtgggtcctctgggacatggaacaggacatgactccaggttattccacctgagcagggagggagctgggttatttatctaccaactgataatagtcattgaatgaggacattctgcaacttgcagctgcccgcttgtaggcagggtggactccagcagctggcaaaagcccccaagcaaagatacgcaggtactggcagctgggagtcagattacctttgtacaatgaagttgtaaggccaagaggctatgggcagggcactgacaacgtcagttgtgcttccccaaaacgtggctcagttctggcaatgaatagatcctcagtaaagcgtgctggttgaacccagagagctcagccagctttggccccaaagctacagctcctgtttattctccagcaacccctgaatactgccatcagctggcaatactatttcaggatcaaacctaagataccagcacccttacatgttcttaaagtgtgtagtctcagagcaagcagcctcaacgtcatgtgggaacgtgtaagaaatgtgaattattgggttctcccccagacctaatgagtcagaaactttgagagtggggcccaggaatctgtattttaacgagtcttccaggtcattctaatgcaacctacagtttaagacccactgttttggactctaaaatttagggccacccaacagtttccaaagcgaagccgtttgctcttggttagaactcctccatccccaatcccaagcaccagcagcaaaagggaatggaatctctggaaacattttatactttgcccccttttttgagtttttcttttctttttaggcttagtaaatatacattgtaccaagttatcaattaccaacaatggaaagtagcccaggcatatatgctatagaggataacctaaaagacacctgtgttgaatttaacttgaaggtgggaggatttatatttctgcttgttttcctgagctaatatttaagttacttctctttccttgagtccctaccaggtgggcagtagggggaaagtcacgggtatactggtagaagaaaaagctgccctggaatttcaagtccatcacagaagatgtgcaaggagctgggggtacccacggaagtcactttgtgcaggaaaactgcatgaaggatggacttggtttaactgaattgacgcaggccaggtgagaataggaaccgtggcagcaagtggcagcaggtggattcataagcagtcttccaggctgatgttttctgtacagcagacatccctcactctttcccagcaaccccagctgagaacagcacccagacaggctgatttcttctggagaggcctgaggctcttgctcctgccctgccctgtgccctgatgccagcagccactgcagccctttttgtgctcacccccgacctgtggtgtgacatcacaatgtagtccattcaggatcttgagactgatttgccccatgggcctaagacataagctgaacctctggcctgcagttccagatccaaggtgactgagacaaactgccagctgccactggcttatcaggagcacctggtgagtattcagaactttcccaagcagcatggaaggagatacagccaacagctggctgtcttagcactttaaggtctcattctcacacaggt

SEQ ID NO: 26222 - DNA, 2300 bp, Homo sapien
taaggaaattaaaatttgtgtaatttattttcttcccacctacgctttttgttgaattatgacttttttcttttcttttttgaggcagaatctcgctctgtcatccaggctggagtgcagtggcgcgatctcggcttactgcaagctccaccttctgggttcacgccattctcctgcctcagcctcccgagtagctaggattacaggtgcccaccaccacacccggcttattttttgtatttttagtagagatggggtttcaccgcgttagccaagatggtctcgatctcctgacctcgtgatccgcccgccttggcctcccaaagtgctgggattacaggcgtgagccactgcgcccggccgcgaattatgacttttatgctatttttctttttaacatgttttggtttttgctacttaatatggatagaagagaacagtaattttcccaaggatttcagagccactaagacttagcttctagtcagtctttcaaaatctgtcaagccttttagaatgagatgacctacctatgtttgggtttagccattaggtgttttaagcttggaggttaaggcagaattaaagatactttatgcatttgcctgtactgataaagaggattacttaaaatgttactcagaacttctttaagagaatctagaaaaatccataccatataaactctttggaattttcttcttttagctaagtgttaggcggaaaaatactaaagagatgtttggtggcttcttcaaaagtgtggtgaaaagtgctgatgaagtcctttttactggagttaaggtaagtgacctttggctgttggagaaaattttttacttcatcgggaataggtgaccttttgtttctttgaaagagatacttgtgaaacaaatggttaacttttaagacatgtaagtgttcttcagattttggtaattttcatctacttattcaattttcacttatttcccagagcaccttgttctgtcccaggagaagcaacttgaacctttccacacttggcttcattttctccttttctgtaaggagggagattactcagttaatttctaaaataaagtacaagatcagtattttatcccactctcagaactacactgtccagtttggtcaccaactacaggtgatagagaagcacttgacatgcaacctagctggcacaactaaggaaccaaactttagattttatttacatactggatttcaaggcgttagcacaaagacaagaatacaaaataacgtttccgttaccgttagaggtatgatttactttactacttctcgggccttctcattcctttgtaactgagttacccttacaattactgtctggtatctggctttgccactccagggagcccagaatacaggtgctaagtagagagggcatcatcagaaattaggaaactcggacttggtccagtttaaggtgtatgggactgtcctgtatccatgcattatgggatatttggcattggcatccttggccaatgcctaccagataccaggatttcctcccagtctgaaaccaatcgagaaaaaaaaacctcattcacacacagataggtatccaaggctaagtggccatgttccacctggtagaaccattgtactagcgtaaaattgctgtgtcttagggtgccagttttactggtggttgttaagtgattcttctgtagacattttctgccagcccttgatttttcccagccttggttaagaaatagtatcgtaaatttgtaattccctgatctgtagaggttaaactttactcacgtttatatgccatgttctaagcaatatatttttatattgataaatgtaaaaggctgcagggatagtatatttcatgaaatgtctggttctttttttcttccttctaggaggtagatgacttctttgagcaagagaagaacttccttattaactattacaataggatcaaagattcttgtgtgaaagctgacaaaatgaccagatctcataaaagtaaatatcatttaccgctagtcagagctttgctgatgagcctggctgtgtttggataaaaagacttgtccttgtttctgcagatgttgccgatgactatatccacaccgcagcctgcttacatagcctggctttagaagagcccacagtcatcaaaaagtaagtttttttggaaaagcatttcccctaacccaattgaagagtgccgagtggtgtaattaaaagcataaatgagtagtgactacatggtcctgctctggagttacaagctcagtaagacaagtctc

SEQ ID NO: 26223 - DNA, 2300 bp, Homo sapien
tcttgtatttattttgtttagaattctttttctcaagacagtcttgctgtgttgcccaagctggtatcgaactcctgagctcaggccatcttcctgcactcagcctcctgaatgggcccctggtctgagtattggaatatttacatctgaatgatttgggaaatttgctgtacctcaaactcaagagtgaaagaaatgtccaaccaaaaagcgggcagcctgctctccatgctgccatttgtatttcaaactgagatgaccaaggttaagttcaaacaggcagctctaccactgttgctgaatcgtctttcttggtaaaggtaaattgtcaaacctatttcctgtgcatcttggtttgatcatgaagtgagaccatgaaggaaggcagtaaatgtccttcaacaccctcatccacatgagtaatatggaccatcttagctttgttgaagagggcttgttccagccttggcaacagagtgagaccctgctacaaaaaagggggcttgctgacttgatatggtatgccagtgaacttttgggagggagccatgatgggattgggtagtaggtgaaggcttttagctctgagtaaaggaaactggcatttctgttttttactttttgagacagggtctcagggtctcggcctgctcccaggctcgagttcagtggtctgatcgtagttcactgcagactcaaaatcctgagctcaagtgatcttcccacctcagcctcccagagtgttaggagtaaaggcataggccaccgagcctaggtgattttttttaaggctttgctgtgttgcccaggcttgtctcaaactcctggccgcgggcgatcctcctgcctcagcctcccaaagtgctgggattacagacaagaacctctctgcctggctgggtttcttttattcatttgttggacctgctttcttggtagcagtggtgtattgattcccagtaggatttatctgccaggagatccttacagatcattagttcagctgttttgctttgtgaattcatttgaaagtattataatttcggtacttagtaattagatggatttcttgacatgcattagatatttaaggcagtaatttaactctggttccatgttgattccattagtacatgggcttgcagccttgtgaaatgatgattcagtttatccattcgctgagtgcgctgcactgaccttcttccaagcctcagttcctgttctaggaacttgaggctatgtagcctgaaaatgccctgcagtctgcagtgttctactgtgaactgcttgtgtgttggcaggctaccggtaagaatggttggtgtcagcagggacggggccctctgagacccatctcacaaagatgagtggtgaaaatctgatcacttgctgcagccctttagttttttattaagccgatgcctgagtagctttaatagctattagctatgttagtagactgagatcttctgttagaagtctttagttctgttttccttgggggactaagaaattatattgcaggcctgaattacaggaaggggagaaccaatggctagggaatgagagccaatacctgtaaaagcagagttgggctgggcgcggtggctcacgcctataatcccaggactttgggaggctgaggcgggcagatcacgaggtcaggagttagagaccagcctgaccaacatggtgaaaccctgtctctactaaaaatacaaaaattagctgggtggggtggtgggcgcctgtaatcccagctactcaggaggctgaggcaggagtatctgggagaattgaaccccgggggtggaggtcgcggtgagctgagactgtgccactgcactccagcctgggcaacagagtgagactccgtctcaaaaaaaaaaaaaaaaaagcagagttaatatattgcttatagttagttgaaccagttgtttctcacacaccagtgccataatctaaagctgagattgaacacagataggtacgtattagttatcttcaggatggcagagaatagtaacaattcggagcaccaatgggaacattgtttcctgagagttcaaacagtaacaaagtagcatgtgtttcctaaatatgtatcatgtgaatctttaatatttgtggacattaatacaaatctagagtgtgacagaacatctttgaattttatattctcacttaacaaatattggactaggcaaggtgtggatatctttccagctgaaaatctgatcaaggaggcaggcttcttggctccatgctaagaatcatcgatgatttgtcatattggccct

SEQ ID NO: 26224 - DNA, 2300 bp, Homo sapien
tattgtctctttattcctgtaatgtaaaaaggaaaacaatgtcatgtaactctcttcgctacagatacggacagtttctgtagcctctaaaacaggcaggaaatggccttcataaccattctccaattttgctggaggatcagggtggtggaagtcattttaaaaaccagctgcaatatactgtactaccagagagtggggtgaagcaattgagtccttttacctagctgactccgaatcaagacagctaaaagaatgtaccagaaagaaagaaaaaataaaatgctaccaaaatcccaatccattatctaccctttatggagaaaagtacctttataatgttttacaaagaatcgtggtctcaagtttccactttgttttagtaataaagaactttcaaaaaaaaaaccactctaaacaacaccctcctgtatagaaagctctattttaataattaatgcaatgatacccttgttggaacaatccagccgctttgaaactctggtatttacttactagatgaacaagtttctctatggaggtgcctttaacttctcaagaaatgtgtaagttaagacggctccaaattacattttaagagagccttgtatttttagaggttctttttcatcggtcagaaaaacttacgttgacgattctgcaagaaaggttgctcgcaaaccatgcatcgcaaagctaccgaggcaaatttaaagaaccaatgaaaaagagtggaggctcgtctgaatctttaattggctatgggaatttcaatttattgcataaataatcttttagacctcaagatacacgtgacctagggacagtttacatcaatgggcaagacttaaaaatagacaccaagttcagcaagtatttgagcacctactaaaaattacacaactcccacaacaacgcattttgcgtttctaaagttgtaagcagcatgttcggacgcttgatgcaatttcccaagttgtttgggccccccccccaaaaaagtcttctcagtaaaaggtggggggaaggagggtattttgggggcaacaaaccaaactggtctgtcgcatgttaagtcaatttcacgttcacctactggtcaccacgaagccgaggaaagttttaaaaagaacattccggggtctccagagatcatctctccaagtccgctcggcaccggcgcctgagctggggctaaggtcccgcgtctctggttctgtcctaatagaatccgggacatccacagggattccccggggcagccttcagtgaagaccagggagaggggccgcccgggtctcacgggtgcttcccgcgctggggatggcggcgagcagccacggcctatggacgcgcaagggaaagaatgcagcgaccccggagctcgcagggccgcccgcccaggagtctgaggctgggaggacctcaccttgctgcggtcctcctcctgctgctgcagcaactcgggaaccgcggccatggcgacgcgggactcgagcaggggccgcctggctgtgcgaggaaagaagaagctgggccgccgccgccgccgcctgggcgcctctcgggggcggccacggccccgcctccgccggcctccctgcccgacggcggcaggaggcctccggactccgccaccatcccagctgccccgggagcaggcgagcagggcgccacgtgctcccccagagcagcctcccagtccccgctgccgtccatcttggagccgggcaaagacgccacgtggggcctacccttgctccgctccacgaggaggccgccaaccgcagggccgcgacacggacgggaagcaacggacactctcccagcaagacgcgtctagagaaagaccgcgtttcggtgcggggggaatttattactcagcccgagtccaagatggcagcgagcgctgacgtcaccagatctcgtgagagcagaagggcgcgatttggaggctcccgcgcttcggagacgccggcccttccgctcggagaggtactccctgcctctaactggtggcgcgttggcggaggccgacgaaagcctcgggtggggcgtgagcgccgcggggcattctggacctgctttgccttaggctgtgcctaattcgaaaccaaagcgcgggacggatgaaagtacgggtcgcgagaggttgttcgcgccttgagagttaagcgaagtgtggtggcttccaaggtaccgacacttgccgtaggctgggcttttatttaagtcgtcttttctctaatccagactcctgccacaggggccaccgccgtcctggccccgccaggggtccg

SEQ ID NO: 26225 - DNA, 2300 bp, Homo sapien
aggaagctattctcctcacttgtccaagttagtaaattagaagttgaaggttaaagtgtatttatcctcagatccttatgaagaacctctgattatgtttaccaaggtctaaatataggtcatgtgttctggtctgcttcaaggtctttaaatttacgagtcagtttacgctaataagtaggacagtgggtatttactggattctaaacagaattatctagcaaacaactagaattctgttaccaggtgacttttttcaataatcaaggaaaacaagcaattctaatattgttggtagcttataaaacaagtgaattttatgtattatttagtcaaatatttgatctattttagtttcatctgtaaaatgtggataacagtatctatactccacaggactaccatgaggatcaagtgagttaatacacataaagtgctatttaatgttaattactatctgaagggagttccttgctagtaagttaaaaaaacaaaaccaaacctcattcttttgacaccgttgctctctattatagaaaacatagcaaacatatagaatcagaattgagataattacttgaagtgtattctttaaagccatcttctcccagttccagaatcatccgctgtttccacctctccaacaagaaaacctgttgttttgtcatggtctgctgaaggactcgggtcacacttggtatcacattcctttgcaaggggattttcaaaggaactgaaggatcacttgcatttggtttatcacttctctctggattgaagataggaaaccagttttgtggcactcgtctgtcctcaccttggtttggcagcttatgcttgctcacgggtccacagagcaaagcatcttcctccaccgatcccggggtctgggcgacgcctctggatgacaagacagactgaactaaattagagtatttttcttggtccacttcttcatatgggttcacttttttcttccggccacatgagtaagaggaagtagagaaagccacaagggcagctgattccacagaaaactttgaactcctgagctgcctgcaaatggtctgaaataacttcatcttcattcagatttgttttcactttagtctatttgcaacggtcgaaggcctttatgtttgtattcctattggagagaaaacaaccatcaaagcgaaagctgcatcagaatgatattgcacatcaaaattgtgaactttttcgacatgtttggacagagccctttcttaagaaagtcgacagagcgagaccctgcctccaaaaaaaatttataaataaatcaagactcaatacccgaaggaccgacacatactaaatgcgaattagtagacagcttgaggcaagacgtcccagtttctaatctgcaggaatgtgacgcccaggaagggaggcgtgtgcgagacacggaaaaacacaaagatggagcccgtcccatggcggccacacagtcctaggtgacagacgacgactaattcctagacaccaggctctctgctaagtattctgtgtggatacttctcatttggtcctcacaccctctaccgtgggtctagaatgaacccgttgcacagacgtggaaatcgggttggagggtcccgtcgctcgccggtcagagctggtggcggcgctgaggtcccattactgtgaccgcaaaaagtcgcctcccgctccgccgtgggtgcggacccctggcggggccaggacggcggtggcccctgtggcaggagtctggattagagaaaagacgacttaaataaaagcccagcctacggcaagtgtcggtaccttggaagccaccacacttcgcttaactctcaaggcgcgaacaacctctcgcgacccgtactttcatccgtcccgcgctttggtttcgaattaggcacagcctaaggcaaagcaggtccagaatgccccgcggcgctcacgccccacccgaggctttcgtcggcctccgccaacgcgccaccagttagaggcagggagtacctctccgagcggaagggccggcgtctccgaagcgcgggagcctccaaatcgcgcccttctgctctcacgagatctggtgacgtcagcgctcgctgccatcttggactcgggctgagtaataaattccccccgcaccgaaacgcggtctttctctagacgcgtcttgctgggagagtgtccgttgcttcccgtccgtgtcgcggccctgcggttggcggcctcctcgtggagcggagcaagggtaggccccacgtggcgtctttgcccggctccaagatggacggcagcgggga

SEQ ID NO: 26226 - DNA, 2300 bp, Homo sapien
tttgatagacccctatcacatctgatcaagaaaaaagagagaaataaaacacattaaattcctttctcctcaggaagcacccagcaaatatagtaggtgtgcatccaacgaccatagaataaaaaggttgttatcctgttaagtcttcatccccaaacctataaaggttgcattgctttggaggtttctagccttatacctcatcatcctataatcttttaaaataatacaaataggcaaagtagtcaagacactcactggtttgaaatccagtgaaaggaaaaaaaagctttgttaatggagttgacagcctcttctgtataattggaagttctgaacgaagtgaagttttgaagatttttaaagactgggaataattctgtaacttcatagttgtacttcatttttactcttccattcacccaagctccttctttctagcaaatcccgtttgttggtggataaaaatacatctgcagagtctcccggaagctgccccatcagcctcatagacaagaagccttgttttcctgcaccgctacagaaatgtcttcctcctcctcctcctcctcctcctcctcctcctccggctcaccgggatcaaagtctttttcgttcttagctggtttttcttagagaaaagctggagttcagagttcagtccagagagggtgactccttgagggcagacctagaggcgccgcgcaccggtcccgcccgcagccccggcagagctgcgccccggctccctgcgccgcgcgagtccgccagtagcgccgagaaatccgttaccaggcggttgtgtccccaagggccattcagggcggaagggaacagggaaaaccgctgtgttgattcccgggccctgtaggctgggagcgcggagggtcaggttacagacaggtgaggctggctgttgggtgagccttgggctccagggcatccctgaccagacgcgcccccgcagcacccggcagctggcacacgtctgacgacctcctggaggagggcgaccgcagcgacacaagaggctgtgccggttgtcctgggcgcacccgaacaaggccttgggaagggcagcgcgccccgcaacgtgagcacaactgctttacaaacttggcatattttaccaactccccctccttctctccctctcccctccaggcataaaggttgataggaacaaacagatataataataaatgcaaagctttcctacctccccggtaggggcggctagaagatgtagccaatgttcactatgctagcttcctggaaaggtatttcccagtctcagaatttggggatcgggtggttaggagaggcaacggtgggagtgggcgaggattgggggcttgttttgaagctgcatttgcataatatgctcctggcttttgtttctattgtgtgtttacttggggtgagggggctctcggggggtgcaacgtcttgtgaggagaagctgctttggcggggcaaggcttgtttttcttagattgtatgatactagtcagaaaaataacgtggtctaaagatgccgaatttttaaatttatttttactgcttatggggggggggtgttgtagctgatggaaagcttaagcccctaagcccccaccccccattattaataatcagaatccttggaagtctcccgccgcctcccccttctgaccgcccagatttcatcaagccccaggaaggctccacaaggtccaggggaactgagccattttctggctcgtcgaagacaaatccaccgggcgggggaggggggcaactcgtgggaggccccaactcaccggaggggtgccctgggaggcgaacctggggtttacctcgaagagctcgcctcgaggtgcaggtgatgggggaatggggcgggggttgattaaaaaatgttcttcctttcttaaaaagaggagggggaagaacagactttaaattcttttgcaaacattcatgcctaaggaagggctggaacaggcagccccggccgccggaaccggtcggacaggtagcgagcttgttgacaccgttatgttgcagggcgcatgctcagtcccaagtttcctggtgccttttctattccaccttatgaaactttttccccggcgtggtctcactcgcgatttaaggcataggtgtcgccgagccgggaggctgggagtcgccaggcgtgcgggggagaggcctgggccgcgccgcggcggggggtggaggaagagggcaggcgaggcgggaaggtgggctctggccgccgggagccggggacggagccgccgccgttgcccctagcg

SEQ ID NO: 26227 - DNA, 2300 bp, Homo sapien
atcaaaaggaaataaagacaataaaagaaacaaaaaagagccattttttttctgttcgtatagttatgtaagattttgtatagaagtgtatcatgcatgtatgtgtgaccacacagccttggtgtgccactggaccaattttcacaaacacccagtaccagcacccagtactagagttctagatcagcctagccaacatggtgaaaccccatctctactaaaaatacaaaaattagtgcagcctggtggctcaggcctgtaaccccaactactccagaggctgagatacaagaatcgcttgaatctgggaggcaaaggttgcagtgagatcaccccacagcactccagcctgggcgacggagtgagaccctgtctcaattaaaaagaagaaaagaaaagaaaaagaaaaaaatagttgcttctcagtttgatgatatgcagtcactctcacaaatcagtaatttatgcgacaataatcacggaaaatatactgcttaggcttataaatatttaaacagataaacatacttttttttttttgcaagacctccctcagtcccccaacccacttttttatttgacacagttaataataaatgatttcttaaaagtagaatacttttttttttgcttctagtatcctgaaaataaagaaaagagtacatttcaagaaaacaagttgaaaaattagtcacaataaaatgaaaggcgattgatctaattccctgatgtacactctaaggacatacagctctgttgaaggctcactgatttacaggggaaaatatctaggatataccacgaataaaaagaagtctaatataatttttaaagagaaatatgcaaatacaccctgaactgaatttcttctcaaagttcattacagcaagaactccattttccaattcagtggtacattctctctaggctgcaaaaaatgctgtggacaaaatgacatttggaaaaggtatctttaaagatacctttaagagcaatagtccccttatgccatttacgctcacataagagactggaatagcaaagcactatgaacagtaatgaatgttgtaaaactccctggtgaggcttaatcaatactgcctatagccgtgtccaccggaagaagctcgttctctgtgaattctagtgggaaagaatgattgaatgatgaacacgttttcactggttgctctatcagatacttaaaagtttctgggaggccttgccttttttacccgaggaagaagtgaaaatgcgtcttgcacaattgcttaactattcccaacgcaagacttctttatatcatttatttcccttgtattactggcgcggaaacttgggtgtaaaagtgatcacaaagattacatggggccaggcgcggtggctcacgcctgtaatcctctcgggaggctgaggcaggagaatcgcttgaatccggtaaggttgcagtgagccgagatcgcgccactgcactccagcctgggcgatagacagagactctgtatcaaaattataataataataataataataatccgagcctgaccagtcgccccacagcgtcaaggtgaaaccaggtgaccgcgactacagcgtttaataatgggtcctcaggcaaaaactccacggatgggaaccccgcgcctctgaagctgcctaacgaggcggtctcctggtggcgcctgccccgccaaaggagcaatgagggggctgcgtttaggcgaagccggtattgggcgaagcttctggatcagtcaggggctcagaagggacgtctgtgggagaggggtcagcacggtatccagaccccgcccggggtgaggttggtactgaactgactgaggggcatggaacccccaccctccaccctggtaaggtgccggggccagtttgggccgggactcctagaatttgaatcgggggtggtctaacgctgtcgcctgcggggtgtgcaggaggcccctagtgaagccaagagttcgtagagcctgggcgccgctctatgctcggctctcgattgctcacgcctggcagcggcgagcggcgcacgcgacggctggggctctgcgctcgaggggtcgagcctgggcagtacaggcggcggtgcgcactctgcggcggcctctgcgcctcgggcgggcgggagagagaggccgcggccgccagcgtggggatgtctaggagctcgaaggtggtgctgggcctctcggtgctgctgacggcggccacagtggccggcgtacatgtgaagcagcagtgggaccagcaggtcggtgtcacgtgaccgtctcttccgggcc

SEQ ID NO: 26228 - DNA, 2300 bp, Homo sapien
aggacaggaagacctgcagttgggggagtggaataagcacctccgtttttgtctcagtggtgatcttgccaagggtgcatggttcaagacagttgtgtttcagttgagttatatcaatcccgggactccttcaaatccctcataatgaagctgtaggcctggaggaggtccagcaagtaggtattatattaggtgagtttttaaaaataggtaaaataatttggaaaaaaccccacaaacatacgcaggccctgggccccactcccattaattctactctatatagccactattaaaaaccatttattggccaggcacggtagctcatgcctgtaatcccagcactttgggaggctgaggcaggcagatcatttgaggtcaggagttcgagaccagcctggccaacgtggtgaaaccccgtctctactaaaaatacaaaaaaattagccaggcctggtggcgcacgcctgtaatctcagctactggggaggctgaggcacaagaatcgctttaactcagaaggtggagattgcagtgagctaagatcgtgccatggagccaagatctccagcctgggtgacagaacgagactccttctcaaaaaaaaaaaaaaaaaaccaataaaacaaaacaaaaaaaaccctatttatttattttgagatggggcttgttctgtcacccaggtgggagtgaagtggcacaatcttagctcactgcagcctgtgcctcccaggctgaggtgatcctatcacctcagcctccggagtagctgggaacacaggcacacaccaccactccctgcaatttttttttttttttttttttttatttttatttttgctagagatgggattttgccatgttgcccaggctggtctagaacttctgagctcaagcagtctgcctgccttggcctaagattacaggagtgctgggattacaggagtgagccaccacgcctggcctaaaacctttagagtattttgtgagcaataaactataaaatgttagttattagtaatgactgatgtttttaaaagtctcttcttgggtgccaggtccacgttctgaagtgctgtggttttttagtgcttactaaggtaactaccattgatgagcatttattttttccgctggtagtagcatccttctttttcttctttctctgttatataattaattaataattctgcatgatttttacattgttaactttacatgctagaagccaagttgagattttagtaatctgcattttttctgttggtgtttattgttcagctaggataagtgctaacagaagagtagtttagagtgttactgtagtaactcgccaagtttttaaagcattacatatcaattaaactttaaaaatttaacattggccgggtgcagtggctcacgcctgtaatccggcactttgggaggctgaggcaggtggattacttgagatcaggagttcgagaccagcttggctgacgtggtgaaaccccgtctctactaaaaatacaaaaattagctgggcatggtgatgcacgcctgtagtctcagctactcgggaggctgaggccggagaatcacttgaacccaggaggtggaggttgcggtgagctgcggagtgcagccactgcactccagcctgggcgacagagcgagactcttgtctcaaaaaataaataaaaaaaaatttaacatagtgccagttttttttttctgttatttcccattaaattttctgtactaaatgttcaggaatttcttaaaatatgataagaaatcatttcagtaataacatttagcacactaccaaatttatttgatcgtttattacattttacatttgtacagaaaattaaaatagtaactgggtatttggaatctgaaagttttaagtatattttggtaacactgttatttggatttgaatggcacaaggatggggaccacctgttcgggatgttactgaaatctgtttcttacgtttttagaggcttcgtgacggagttatcagagacattgagaggcaaattcggaaaaaagaaaacattcgtcttttgggagaacagattattttgactgagcaacttgaagcagaaagagagaagatgttattggcaaaaggatctcaaaaatcatgacttgaatgtgaaatatctgttggacagacaacacgagtttgtgtgtgtgtgttgatggagagtagcttagtagtatcttcatctttttttttggtcactgtccttttaaacttgatcaaataaaggacagtgggtcatataagttactgctttcagggtccc

SEQ ID NO: 26229 - DNA, 2300 bp, Homo sapien
tgtaaaagagacctaaataaaaggataattatatttattctctagttgatcagctataaatttatataaaacataggcatgtttgtactaatgaaacgtactgtcaacctctatcacattgttaaattaacacttttggtggtaactcaataaaattgagaaaattggaaatcctgtgttacttaaagaattagccatatttttctaacaaggtcacagagatttagggccaaattccagtcccagtgttgaattcatgttcaagtttataaaaattactttgttaatatttaacttacgtggagaactcctgctattgtatactgaaaagaggttagaattagcagattgaaggtgttttttgccctttttctaggaccagtctttttttccattttcctttttttctgctggcaagagatacctcatacacactccctgattgcctcaatcttgagattttcttttctttcttttttttttttgagatggagttttgcttttgttgcccaggctagagtgcaatggcatgatctcggctcctgggttcaagcgattctcctgcctcagcctcccaagtagctgggattatagtgtttgccagcacacctggctaatttttttttttattttattttttttttttgagacggagttttcctcttattgcccaggctggagtgcaatggcatgatcttggctcactgcaacctccgtctcccaggttcaagtgattctcctgcctcggcctcccgagtagctgggattacaggcatgcgccaccatgcccggccaattttgtatttttagtagagatgaggtttcttctccatgttggtcaggctggtctcaaactcccaacctcaggtgatccatccgcctcggcctcccaaagtgctgggattacaggcatgtgctactgtgctcggccctgatcttgagattttcaatggccagcttcctggcacctgaggagtatggcttgccagccatcatatggtttataccgaaacaggattttcccattaggcaagagactagtaaagatataggtacttgaggaatgcctttgtgtaatataatttgtaaccaagtcagagaaatacatatataactgtgaagagggtcattttctggcatgtggaaatgtttttcttaaaatgggttcaacttcaaatttagtcactgttaacaaattaatagtaacattttcacaggaaatgcagaatttactagttagctggtttttgcttctgagcggtctctgttattgatttcaggttctgcctgaattctcagtggctttccctttgtcctgttgaggacaaattttaagctaccctttgtggtcaggaccctgctaactgtagtttctttgattcccacacaactttgcagttagggtgaacttattcttcacaaacaattcttatccttagggctttgcacagtttttttcttctggaatatgcatctccacagcctccattctccctatacacaaagagaccccttttcacctggccaatttctaatcctaagcctccccctaatataggttgggcctccttttatttaccctcacactgccctgtggtacacagcacattccattccttatgtgtcacagagcatcagcatcacctgagggactaagaaatgtaactcctaggctctgcttcagaaattgatgcattttatctgggctagaatcaagcatatttagaaaaccaagaacaacttgggtgattccaatgcactgtgagcatggagaaccactgtgttgttgtgatcacctgttttctatgcagccctcagggaagtgcaaacctgtgagatcaggcaccattatctgtcttggactttgtattcccagttcctagcccagtgcctggtatgcagagggagctcatattttttgaaagaatgtgtgaagagacctgcctctgggagtcaggaatgtgacaattgggaaatccagcaacaatacctgcttttccagtacctttctcctaaaagttactggatcctacagatcttagtgggcgtatacttggtgttagaagaatagaaatctttctaattcccttccttttccccattttgcaattgtgggttggctgaagaaaagaagacaacatgggaaaggaaaatctgggtgataaacggattaaacctttaggttaccgctgctctagataaacccatgatgtgactttttgtttttctcctaggtcagctgagggaacagctcagttaccttaagggtgataatttttttaggtttacttgttcggatt

SEQ ID NO: 26230 - DNA, 2300 bp, Homo sapien
acaagcagtaccagcatcatctggaagcttattagaaatgctgatgcttgggctccatcaggcattctgattcagaatttgctgcttacaagatcccaagtgacatgtatgcatgtttttgagagcgctgggttaaatgatctaccgaggtatatggttcagaaatagcaacaaccaataactaaacttctgattttccaaaacaagatctctcttctacattattacacaacatcttcccttctcaagaggaaaacagctctgttatgaataatggatgcccaggctccactgcaaactcatttcttggggtggtgttcaggcattgtatttttaaaagcttccaagtacagccagggttagaagagtctcaagtagtcactatagtatagtgatcagggaaggtttcacgaaagagagctaggtatttggtcttgaaggaccagatggattcagaggagctaagggtattccagatgaggtatggcatggagtgggtgggaaatgccaggagaaaaagaggacatggcagcaaagagtgttttagaaagcaggcaatccagatttctagatggaaactcctaattattaaatgctgaggtctgtcaaagatgaaactggaggctggacacaccaaatatctgtatgacagagctgtacatctagacggtggacatctagcatccctgtctatatgcaagtcagctggctgcaagaccacgtgctgctgaaaatctcactgtggtcatgacagtccacccagtggctcagaccctgagattctgttcacacttcctacactcttccttactcgtctgtgttcttccaactcctcatcttgcctaattcctcaggcagcacctcatcctgtaagtcttcatttccaggcttaagagatgtcagccatctgtgtctttattgtacagccagcacaagtgaacacttgaacacaggcatccctgcattgttgttctgaacctttatgtgtattaacaactaatttcttggtgatgactgactcatgaggcagagaatgatgttgagggatgaatccaattgacactggacatgtctccggagccaggactgaactgaattcacaataaataatgtagcctcggggtaccagaagggaatggattcaccctctgagagctacaaaagaattttaggaaattctcatctccctggcccttcagacagtggtcattttcttggtcttccaagagaatgacaaagtttcagaaagcctatctgaggaaggtgaagggcagtgagagggtgcacgggtggaaaagccctctcaagagtgacgtgggccttcccctcgagctccccagatggggcgtcccagatggcaccagcgcaatcttgttctcaaccaggatcccggacaaagacctagagatccaagccgacggcaggccaagctctggcccgagactgaggcttctgcttctcaggagatgagagtttaacaataacttcgtggatttcaaaaagaagaaaaaggtctcagggcaccggaaaaggtgtattcgggttgagggcgtgggctcagaatcgggtctacctcgtacgggatgtgagacttcaggcagactgctcggccttttcaaggctttaaatggagctaaagggtatacgacatgacgttcgcccggtgtttaggaatatggggcgtgactttccaagcaggcggctggagccagggagaccacaggccgctgcaacacaaaccagcacctgaacaagcttggtcagccagcggtacacctccgccaaccccagaagccgaacagatgcgccccgaaacgtcatttccgcgcgccaaggggcggggccggtaccgggtgcggaagtcgctccaggggtcactgggaagtgtagttttcgagacagaggcgctcagaaggagggtcacagtagggccaggcactcttctcgggagctcctacgtgttttatgcacgtggttaagaaaaaagagggagaattcaggtgccacagtggccattctccggtgaccggagcgtgttactcagaaacggatccgtcagaggccaatgggagctgccggccttcagggcgcgcctggtggcgccgagcatcctgggaggtgtggtccgggcgctgtgccgaggattcggggtagtgtagtcctggcgccccgctggaggagctccccagctggtggctggagcgaccccttgttctttggtggcgctggtgagtgaggctcccgcgggacccttgccgcagccgtacccttttctgcgcgaaaaggaaggtcccgaaagg

SEQ ID NO: 26231 - DNA, 2300 bp, Homo sapien
aataccacacaatcttacttatatgtgcagtctaaaaaggttggactcatagagaaagagaatacaatggtggttactaggggatgggggtggttggggaagatgttggtcaaaggattttcacatagaaagaataagttcaagagatctattgtataacatgatgactacagttaataacaatatattgtattcttgaaaatcactaagagtagattttgggtgttctcatcacaaaaaatgataggtatgtgaggtgatgcaatatgttaattagctcaatttagccatgtcacaatgtatatatatttcaaaatgtacacaatgaatatatacattttttgtcaatttaaaaattaattagttttttaaaagtaacaggagttaccataattatgaagaattatatgccctcctgaagtgactaatccttgttatttatattgactaagaagcctggtaagaggtaacacagaagcctaagaatgagaactaaagccaggtgctgtggcttgcacctgtattcctagctactcaggaggctgagaccaaggcaggaggatcacttgaggccaggagttcaagaccagcctgggcaacatagcgagactctgtctctaaaaaaatttttataattagccagggtgaggtgttgtgtgcctgtagtcccagctacttaggaagctgaggagggaggattgctcgagcccaggaatttgggctacgtgatctatgattgtaccactgcacttcagcctgggccacagagtgagatcctatctgtaagaaatttaaaaaataaagaatgagaaattggatatctggtgaggtaaaaatagagcttttatttctaagttgagtatacaaaagacaaaaattagttatttttcatatggaggacagaaatacaccaagttataattcttttttagttaccagtattattgtcaagtttaagcttttttctgtttattggcaagctaaataattgtacatgtttttaagcatatatagtgttgatggacggtatttaaagttttaagtttcagtctcaaataattaacataaggctgatctcattagtttaggcaaaaatacaagtaaaattattgcatgagaacactttgtatagttttgtttttgaattttttaacaaaaatatttattcttataatgatttcctaacagagatcttagaaattgaaaaacaacttaatcagtcttaagttaaaaactgcctgaaaaatatgccatttctggtatttactttgagtaaagtaattgtagattcacgtaatttctggcactgtctgtaaattataagatactagttggacacatatatctacatgtgcctaatcttacatatttatgaaggcaatattagcctatctgatttttaaaatcagtataggttgactctcccttatccaaaatgcttaggaccataagtgtttcagattttgggtttgtttggttggttggttggttggtttgcattttggaatattaccataaacataatgagatatcttgggtataggaccctagtctaaacaggaatttcatttatgttttgtgtacaccttgtacacttggcctgaaggtaattatatttttcctttgaggatgctgaataaactgaattttatgtgcctgtgttttgactatgacctgtcacatgagatcagctgtggaattttctacttgtggctgcatgttggtgcttaaagattttcagattttggaactttgcagattagggatgctgaacctatatattagtcttggaagtttagattagttaaactttctttgagaaagcctacatatcagaaccaagttttatatcactagaatattatgctaatgttatgtttacactgataaaataagggaaaagacattgcatttgtcttatttgcaggctttatcttactttgaaatattgattccaccctttagttacataccagctagtaaggttgtttacatattgtagtaaataagctctgagtgcctcacatttctttcttatcgtgcaacctaataagcaaggtgcctggcttaattcacagctaaacttttttcttcagagccagagcttcagctgcagcaagaaagatttccttcagaaactggcatatttgaatcattaggagttcaattttcaattttatttattttttatttttttgagacagaatcttgctctgttgcccaggcaggaatgcagtggcgcaatctcggctcactgcaacctccgccacgcaggttcaagcacctgcctcagcgtcctg

SEQ ID NO: 26232 - DNA, 2300 bp, Homo sapien
tagggattaggcttcaacgtatgaatttggggggctgcgatcacaaacattcagaccatagtaaatatcttttttaatataagacctgggcaaataggcacccaaatgcaagattatttgcacaatggacaggcctctctgtgaggtctaacaaaagctggaaattctttctcgagtttcttcttatgtgtcttatattttacatttaaaagttctgaaagaagagcacatgataactttgcatttaattgaagtgtgcattatgcccagtggtgctcacctttaagccatgttgctgatctgcttaggtgatagcacatccaacattatttttccatgcttttcctttctctagggaagagagcaagtagcaccatggaattttactgttttggtatttattatgctctcaaatcattgcagccttgtataagcaagtgtgtgactttttcctccagggaggtcactcagaggcaatggcaaagggaggctctggggcccagcacacttcctgcctggctgcctgagttcatcccctcagcgtcctctgctatgctgtgtcagcaggtgagctctagtcctgaggccctgccctgtcacctcttctctgactcagctggtctcacccaacatgctcaaggatcctccctgacagtcagcccagctctccctcctcctcccattcacatccagtgcccagccctgtgggttgcatctcttcaattgttcctggatcctggatccttttcctcctctttattcctacaacagccaccttagaccaagatcatctcttgcaggtttgataaaatcgccaccctacagatctccccaaccctgtccttgcattcctcaacaccatcctttcagagctgccggagtggcctgcacagaggggaccatgacagtgatggcttagaaagtttctgtggcctccctccacttgtcaagaaagacaagcccctcaaaaggcctgcctgggcttcactcaggcttcttgtcttccctttgccccaggatcctgtaggggctcacactcagcaaagctggagacgtgtctccccataaataccaagcacaagctggaggcctgtgtgcaagatgtgagtttacccaactccgatccaacagctggtcacaagctagcgagaagaggaaaagaaagcagatctgtgccaaattcaagccttaatttctcagctctcttagaaatcatatttatttcctggtttccagaagctgggagtcactatgtcagtggagtcatttacttacctatccaagccctggaggacaagcctgaggctgggcaagctggtggcagtgtggctgcagctcatcagacaagccaccaggtgccattcaaacagagttggggtggctgaggatggaggtctttatgtgtcagatttactataaatgtaaaaaaaacccactaatgtaaagtattaacttattagatgttccaaaaatatgtatgctaagcatcagattttttttgtgtgtggaatgactattggagttccaggttttcacagtggttggcgcaatattcattctgggaagacaagctgctagccctgttctgcctttctgtgcttgttcttgggatttagacatccattcacttttcaaaataagaacacatttatagagcacacgctgaaagtgatgtgccatattaagatatttccaaatagttttcttgaggatttagggtgttatgtgatgagtaataaatggagaaaaggaattttgacattatgctacagtgacagaaaaccaagctgcctgggttaagttagatcatcactggagaggctttttctctgaaaactgttctagtgagttgccaaaaatggcatgaggatattaggtagaaaacattgttcaaggacttctgcaaagtaagatccttcaagtcatctgtaacttagaacatttttacttaaaatggtgctcactgtggttggtttccagaacagccacagatgtctactcccatgggtcacctgtgcttatgtgttctagaacctcctgttttaagtcgtaatatacctagaagtccctgcattctgagttccgtgcaactagggtactaggagcacaaatgctccagtgtgaaactgacttctcctggggatggtagggcttcctctgtggtccagtaatggtgacgtccctaactggcagcctgggccccagcgtcaggagttgggctcatggtgacacaaaggtaagtctctcccttgctggaatgcatccttgtctcatctttctccaatttaccactgcaggga

SEQ ID NO: 26233 - DNA, 2300 bp, Homo sapien
caggaacaggcaaaaaataaataaataaataaactaactaatggcaatgatgtgtgtttgatctgcgaaattggggaggtgtggagaaaggcatactttggtgggactgtcaactcttatgagggaaattttggcaacatctttcaacactcaaaatatgcatagtcttaaatccagtgattttactttcttctgtcttcacaaaatattgacacatgactagaaatgttggttagctctgttaatctgtttaaataataatggtgtatgtctatgttttatattttttaaaaaaacacttaaaaagaatttagtcaattcacaaataatggaaaggtccccaagatgtataaatgaataaaaccaattacagaataattacattgtattcaaactttaagaaaactatatattttatatggtgttaaattgcagagaaagataaaggtttccaaagcctgcacatacgctgttttttattttagagacggggttttgacatgttgtccaggctggtctcaaactcctgggctcatgcaatccgcctgcctcagcctcccaaagtgctaggattacagacgtgagccaccgcgcccggccagcacatccactaacagtggttactgctggggattatgagagccacagaaataggacttccactttttgtataatattcaaaatgttattcttaattttcactataaaaattttattctagttttatgcgtaaagatttaaaaataactagtattttatttataattacaacgttctattaaagctaggggatttatatccttactaacagaaatacaacaagtaaaatttatgtagtctaggtaaacagaaaatgtcactatttcattaaaagagtagggttcattgaaagtgaaagggaaattttgagtcaattaatttaggtaaataataccatgcatttccatcacttcacaagagagaaggaaaggccaagagacgatgtggacaggaaagcaggggcctggcagaaggaaagggattgcatatagagggagtttttggggtcaggtaaggatttgggggaaatgggtagaaaaaccagttgagggagaggggatgaagaaggagatgggggaaggagagggaagaggtgagagatggaactgtgtttttgttggcaattcaagtaagaaccaagacatctcaggagcgttcccacggaatgtccaaatgctctgccttccagaagcaggtgctgatgtatttcgggaactctgtggacatacttagcagtctaaatctagattccgggttgaattcccagcactcagttcacccagatctggcctccagcagcaggaccagaagcagcagcgaggagaggcagaagcagcagccacctgggcactcctcaccatcacagaagcggctcccagatggctctgtgggcccaggcccctcttccttccattcagaaaaacacacagcagttaactgcatccgtgtgtgcaattgagaaggtaacacacttcatttcctgttcattgagggacaaaggtatatgtggccttttgtctctctttttgggatttacaatgaaaaggaggggagagtagagaatgagtcactttaccttgcctgttctatgtccccacaagaccgtacccttagaaaaccacaaagggaggctgggtttgcaattacttgaagaacgggaaggtggatgagaatccaagagatgctctttattttctgtttggccaggaaaaagcaaaaacctggctccgaagcagtcagaaatagaagtgggaaaagaagcaagtgatgtgcgttcttgaggtcctccgaagagatgtcttggagacaacagaaataaatgaccctgtaaattttctttatcctactgggcaccttgaccagagcacctggagctgtggccttgcacaggtgttggggaggaactcttctggattaaacatggaaaacccaccaaccacagagatgcaagcttcaagtgagcgtatctgcgctgctagtatcctagcggggtgggaatcagaatgcaatgacctcgatgtgtgttattacataggtagaaggttctagaactatgctgtagccaacccccatgtgcaggtagggggcatttaaaatgtggtgaattgaattaagatgtgctgtaaggataaaatgcacaccagatttcaatgacttggtgtgaaaaaataacataaaatatatagaatattgcattaacaatttagatgaattataaattgaaataatatttattctagtaaaatatttttaaaactttt

SEQ ID NO: 26234 - DNA, 2300 bp, Homo sapien
ggcagtctctttagagtagtttatttataattagtagagtttagatatggttggatttggatctgccattttgttctttgttttctatttatctcgtctagtttttgttgctctgtttttcttttcctactttcttctgtgttaattaaatatttggttaaatttagagtttgacatctcagaatttgtacactgttacttaaggcaatgagtcccacacccacagttatgaattctctctacaactcttttaaaagcttatctctgctactgtccacgaagatggttgtgaagttagcatcagactgaattatagtcaagtctcaaacaaggtgagtaagcctccagaagttattcatttgagaactgaccgattagtaaattgagacaatttatagaaatgcttctgtgtaatccatagaaaggaaaagtttcacacattatgaaatgctactagaggcaagcaatttcatagaattagataaacaagttaaacctcagacaggcacatgaagatatagtgagaacaggagttgttctgtagttctcaggcttattcagactcactgaagtctgatggcatgtctgtgatataattgatttggggaaagactaacaaaaatatttgctgatatgccctttgacatattttcttctataaaataaaccaaactttgtggccatgtgtccttgatcttcccttttatatggtgacgggggcattgccacagagcctgtaaatgtgtttcaaacattaattgattgacattagcagctttagtttcactggacaaaaagtcagaataattaatcaatcaattgagaagccaaggaaaaggagggaaattaacatttattaggccctggcaaggtgctaatggtgttgttgaaattgggatagaagcatgggccctgtctaactcatggggaggctgggagtatctaacgagctaatgcacatgaatgtgctttgaaaccaaataaagcactaactgctctttttaattgttgtgactagagcagagcttgggtcagagaggaacttcaggggaagggaagtgagagaagcaggtcaaggaaggggaagggactgaatgagcaggtagacaaaagcaaagttgagctttagcctgatccaaggggaactctggagaatgaattaaaccacaaagttgtccccagttgaggcaaggaggagagggagcatgacctctagggcaaagcagcatccacctactgagggcactttgctggggaaggaggtccagcagtaagctcttagcagctacacaacagctggggtgagtaacctggccagctagtgggaatggggcaggccaccagcagcacctccaatgtgctagctatctcacaagtagaattggagtaactgttcccaggtcattgttttgttttggtttggttttgttttgctttgttttgagacagattcttgctctgtcaaccaggctggagtgcagtagcacaatcttggctcactgcaaacctccccctcctgggttccagcaattctcgttcctcagctgcctgtgtagctgggattacagggtcacaccaccacacccagctaagttttgtatttttagtagagatggggtttcaccatgttggccaggctggtctcgaactcctggcctcaagtgatcacctgcctcagcctcccaaagtgctgggattacagaagtgagccactgcacctgggccctaggtttaataaatcttttgttagcctgcatgttctagtgttcaggaagtagcaggctcttccctgggacaggagcaggcagccacgtgagggtgcagggggatcagtccgggtgcacacagacttctgtgtctggcctcattatgtagacgcccattttactgcattttgctttcacgacatgccattgaggtaggtcatattatttccactttccaggtgaggaaactgaggctcagagaagttaagcaacctgcttcttccaagggcactaagttagtaagtggcagacccaggattcacacttggcagcctgagaccttcccatcatgacaccctaattccaagacattgaaggactttaagcagagaaatgacacaatcacttataaaggatctaaaggtgactgggacagccacatgcagggaggctggcagacccctgttgaaaggctattgtgatggtcccaatgtgagacgagggggctggggcttcagggagggagaggaggaggggccagactgagccgcgggtaaggggcagaacggacaaagcatgctggggaggtgagga

SEQ ID NO: 26235 - DNA, 2300 bp, Homo sapien
ccaggcatagtggcgcgcacctgtagtcccagctactcgggaggctgaggcagaagaatcgcttgaactggggaggcggaggttgcagtgagccaagattgtgtcattgcactctagccttggcaacaacgtgagactctatctcaaaaatgaaaataaaaataaaaataaaaggcatatcagtgcattcttactactataacacaagaaagatgctcttacactagttgcctactatactattatagtgctttggtttttcaatgtttataaaatccaatttggacttttggcatctaagggcaacccaggagcccttgttctgttcctcctatttgagtcccaagtttaatgtacctggagtcacattttctgtgtaaccacagctccttgtgtgcccatgattgcatggctgctcacacttaccatcaagtataaaggagaaaagcatggtttccaaacccagttgcatatcagaatcacccagggactgaaggctcagtgttgctacatccaatgaatttgcatgagaaggcagaaaactacatctttatgtgtaataacataatttaaagttttgactgttagttaaaattttgaaacactatgggagccaatgccaaataaaactcaatggcaggccagatttgcctaatagaccaccactttgagacttctggtctaggtcatgttatgtttttatttatttgtttttctttttgtagagatggggattcactatgttgcccagactatttttgaactcctggcctcaagcaatcctcctgcctcagcctcccaaagtattggggttacaaatgtgagccactacacccagcctaggccatgttagatgtggcacaaaagcaatgagaaacctctgactgctctctattgcctgcaggatagagcctgtagtcctaagttcagacctttgagtttcctagagatacagtttttgagaaaaatagatactgaagtttgtttgtttgtttgtttatttatttatttatttatttatttatttatttgagacggagtttcactctattgcccaggctggagtgcagtggcatgatcttggctcaccacaacctctgcttcccgggttcaagcgattctcctgcctcagcctcctgagtagctgggattataggcatgcgccaccacaccctgctaattttgtatttttagtagagacggggtttctccatgttggtcaggctggtctcgaactcccgacctcaggtgatctgctcacctctgcctcccaaggtgctgggattgtaggcatgagccactgtgcccagccgagtttatttatttatttttactttttttttttttttttttgagacagagtctcactctcacccaggctggagtgcagtggtgcaatcttggctcaccacaacttccacctcctgggttcaagcgattctcctgcttcagcctcccgagtagctgggattacaggcacccgccaccacacccagctaatttttttttgtatttttagtagagatggggcttcgccatgttggccaggctgggatactaaagtttttaaatcctaaaatctggtctgtctcatggtaaattcaggtatcttttattgtaaactctcatttttaatgaaatatagatatatgattgtgaatagcactttaaataatttagaaatgttagatactagagtaataattacattactcataatgattttttatttttataattttttatttttatgggttcagggggtgcagatttgttacatgtattgtataatggtgaggtttgggcttctagggtacccttcacccaaatagtgaacactgcacccaataggtaatttttcagccctcgccttttcccacccttcccacttttagagtctatagtgtctattattcctctttatatgtctatgtgtattcacccataatgatttttaatggaattttactataccatagcctttaccatgttattttgactatatgactctgtctttatacctatattcttaattttagtcccccggttttgcacacgtaagcggtcagaagtgtttgacaagcacggagataatgagaattcaaagggagacagactttctcaagtaagtatcacattctctttactctgccttaaatcctacaaagatacatcatggtcaaagagaatttaaagatacgacatttttgcccacctccaacttttttttttttttttttttgagacggagtctcactctgtcaccctggctggagtgcggtggtgcagttttggctcac

SEQ ID NO: 26236 - DNA, 2300 bp, Homo sapien
ggttagcttttccaggctgaggcactcgtaatggtatgatctgagggacacacactgaaccagcagtcattttctctctctctctctctctctatatatatatacatataaattccaatgtacacaaaagctgaagagcagcacttaatttaaatgcagcaaaactagttaaaacgagagaatactgttaacatggcactacaaatattattccctttttaattgaaataataattacatttcatctgtatttgctgttgaggtcttgtgtggggttttgattatctaaatacctcacttctgcgaaaggagcatgaatgaatgagatggggaaaagaaagaagttactttaaaaggacaaattaaatgagtaaggcaaaacagagactatcactaacgctctgacttgagttccctgtaaatcattatcgccttttcctgcctctggtgtgtgtcagctctcttggcttcagggcaagtcatcatacaaggggaacagaagtaattctgtgtgtaccacaaaatgttagttagagctaacttttttgggaaagctccgggttcacagccttgccattatcaccagagcagttctagtatttgaaagctgcaaagacactttagaaggactgcagagtactacttctcagtggaaaggaagtttgcaagaatataaacagtgaccaataaacacaagcctcccgtttcatctactgtatttataaatcctggtattaataattaactaccagtatgaaagccttactggtctttttggaggtgagggtggggaggaaggttgtcataattaatgcacagaaggtttcagggggaaaaaacgctcaccttaacacaacaaccatttacatctctgtattgccttttcaaatttcattaataatccatagattttgcccaattataatctacatattcattccatttttatagtctacttcttgcattctcactgtattatttagttttccctgtacttatttatccatttgtggctgggcatttaggctatttctagtttctttttagttttgcctgttgcagttctaataatgctgatctgaacatgtctgcagtttgagctttgtcacagactgtattctcaaaaatggggtacctaaatttaaggggtgaacttaatgccttgttggatagttccggatctagggccaagaatataaactacagatactgacagcacaacaatagctcctacgggagtgtggctggacttgagacttgcccatagtcgcatttccatttaagtgaaaggcagataaaataaaagtagttgaaaaattctaaataaaaaatatgtaggagaggaagtaattcgcgagcgtcaactagcagctgcccttaggaagctggggtggccagtgggccccacgcaaagggaatcaagaaaaaaggcggatccgccaggcccaaatggcaacgtgcagtcaacaggatccccagacccctcaactctcccaacgtggaccgccccctcgcagcccggatccggaatcccgtttggttgttcccgcccatcaggggctgccaaggacacctgcatcctttcggctggagtaagggaagctcttcccctcctctagccgccctcctcttcctctaaccgcggggcccgggatcgggacccctaatgcatctctgccgcgcccaacccagtcgccagcctctcaccgcctcttgcctcctccttcgccgccgcccgggttaccacagacgcggcgagccgcgccccgcccactgggtgctgggcagatgattggtggagactcagcttcttagcaactagaccggcccctgccgctccgcagggagcctggtacccgcctggagttcctttcccagtgctttcccataggcatctaagaatattccttcacagagttgccaagtgctaaaagttggtttcccaactcagaatgaaggaaccaggcttgtgcgtccgatgggcattgacattctggaaaacaagaataagaagctgtagcggcgcctgtaagtgggccggagcaggcgcagcttggccacctcccgccgaaaggcaaggaaggaccggctgcgacacgaggaagaaggcccctcggcctcagcagagcgctatcctccactggttccccgggttccccggcttgctaccgggctgctccgtgcatctttccccccaggcgtcaggaactgcgccctcatggcggaggtgaaggtgaaggtgcagccgcctgacgcggatccggtcgaaatagaaaacaggtaaaccagtgaggctccgg

SEQ ID NO: 26237 - DNA, 2300 bp, Homo sapien
aactacataataaaaaccagtgataatcagcatatcagtaattatgcaaaatagttagattcaccttaccatagacaacaacctattgatggctactgcccgctgctgggcttctatatgaggcatttcattctgaattacttggtctgtgattccatgagggaactggtgacataattctataatcctagaaacaaaggtattaatgttatccttcatggttacctgtttcaagagacagtgggggtaaaaatacaagtagaatagtttgaaactgtgcctttttcacatttggcagacaatctgggtttctgtgatggttttggatcaaagcatgttagaaattgaagaagatgatttctaaatacatgtttacagtattattgttatttaagaatatttcttttcctcactaataagaactttaaattagagcaaaagtctaatgaaatcacagaaaaaatattaaagctgagacttcagttttctcgggtgtaataagcatgacaaagttaagccataaatctgcaagcaggaggcaaatgcagatgtttctggtaggaagccaaaatttgttatgacaattcaccataatggggcctgtttttggaattatacctaccaaacaaaaaaagtcaaaatcttcacctagtcgacatcaacaaatgtattattcctaacagtctgagaaagttgagtcttttaaaactacgtgaaaatctaagagtggcagtgcctcggtaaaatataaaactgggccgggcgcggtggctcacgcctgtaatcccagcactttgggaggccgaggcgggcggatcacgaggtcaggagatcgagaccatcccagacaacatggtgaaaccccgtctctactaaaacataaaaaattagctgggcgtggtggcgcgagcctgtagtcccagctactcgggaggctaaggcaggggaatcgcttgaacccgggaggcggagattgcagtgaaccgagatcgcgccactgcactccagcctggcgacagagcgagactctgtctcacaaacaaacaaataaaaataaaagtggcagaggctttgggtgtcctaaaagtcttgagttcaatactgcactgaaaccacctggcttaatgttacttcgtaatcaccaactgcgccctaactccgcctaaacgttttgtcatagacgttcccttagtgacaagagcgatcctggatcagaacatgtattcacaagtgttctacagggaaagaaagccgagggctcctctcaaagcactgatcgcgtcaaagtaggaaggcagcacgtcatcacaacttccccaaaagtatcagggcaaagccagccagctacacaaagttgcaagctgtcaaacccattttgaacttcttgagttctgctctcccaggatgggaaggaacaagtgggtccagaaccccgcaatcgtttttcccgcgtgctcacctaacccgctccggccactcccaagggatcccggagaaggggtccagctgcccaaatgactgggcgcctgatggagtgccaagccggagcctcactggtttacctgttttctatttcgaccggatccgcgtcaggcggctgcaccttcaccttcacctccgccatgagggcgcagttcctgacgcctggggggaaagatgcacggagcagcccggtagcaagccggggaacccggggaaccagtggaggatagcgctctgctgaggccgaggggccttcttcctcgtgtcgcagccggtccttccttgcctttcggcgggaggtggccaagctgcgcctgctccggcccacttacaggcgccgctacagcttcttattcttgttttccagaatgtcaatgcccatcggacgcacaagcctggttccttcattctgagttgggaaaccaacttttagcacttggcaactctgtgaaggaatattcttagatgcctatgggaaagcactgggaaaggaactccaggcgggtaccaggctccctgcggagcggcaggggccggtctagttgctaagaagctgagtctccaccaatcatctgcccagcacccagtgggcggggcgcggctcgccgcgtctgtggtaacccgggcggcggcgaaggaggaggcaagaggcggtgagaggctggcgactgggttgggcgcggcagagatgcattaggggtcccgatcccgggccccgcggttagaggaagaggagggcggctagaggaggggaagagcttcccttactccagccgaaaggatgcaggtgtccttggcagcccctgatgggcgggaac

SEQ ID NO: 26238 - DNA, 2300 bp, Homo sapien
ctccccaaagcccaacattcttcattcaactggactcattcttgcttcctgaaatgctcagagtgacaatgtggagaatgaaaccctgatgactgggctctgtgacaactcataggaaaatcggggggtggaatattttatgggaaatggcccaacaccagcagtaggaagcaaacagaaggtgagaacagactagacctatgtatggcagtggcaattaataaatacaacagttataccataatacatttatttcatttgtcttataacgcataattatttcttcttttttcaattcaggtagtttgagctgtttcctggtttagagtcttatcagtcaaacctaacacactttctcgttttatgactgctgtattagggttctccagagaaaaagaaccaataggatacacctccctcttgaaagattcatcagaagctatttgctctgtgattatggaggctgaggagtcccatcatctgccctctgcaagctggagacccaggaaagctggtgttgcagatcaaagggctgagagcagagagctgatggtgtagataccagtccaagtctgaaggtctgagaaccaggagtgctgagggcacaagattcatagcccagctcaagattgaattcaaagagtgaattcaatcttcctctgccactttgttctatttaggccctgaatggattggatgatgctcacccaactggacccatatctactttactccgttcaccaattcaaaatgctaacctctttcagaaacacccacacagacactccaataaaatatttaactagatatgtaggaatcctgtatcttagtcaagttgacatgaaattaaccatcacaactacataataaaaaccagtgataatcagcatatcagtaattatgcaaaatagttagattcaccttaccatagacaacaacctattgatggctactgcccgctgctgggcttctatatgaggcatttcattctgaattacttggtctgtgattccatgagggaactggtgacataattctataatcctagaaacaaaggtattaatgttatccttcatggttacctgtttcaagagacagtgggggtaaaaatacaagtagaatagtttgaaactgtgcctttttcacatttggcagacaatctgggtttctgtgatggttttggatcaaagcatgttagaaattgaagaagatgatttctaaatacatgtttacagtattattgttatttaagaatatttcttttcctcactaataagaactttaaattagagcaaaagtctaatgaaatcacagaaaaaatattaaagctgagacttcagttttctcgggtgtaataagcatgacaaagttaagccataaatctgcaagcaggaggcaaatgcagatgtttctggtaggaagccaaaatttgttatgacaattcaccataatggggcctgtttttggaattatacctaccaaacaaaaaaagtcaaaatcttcacctagtcgacatcaacaaatgtattattcctaacagtctgagaaagttgagtcttttaaaactacgtgaaaatctaagagtggcagtgcctcggtaaaatataaaactgggccgggcgcggtggctcacgcctgtaatcccagcactttgggaggccgaggcgggcggatcacgaggtcaggagatcgagaccatcccagacaacatggtgaaaccccgtctctactaaaacataaaaaattagctgggcgtggtggcgcgagcctgtagtcccagctactcgggaggctaaggcaggggaatcgcttgaacccgggaggcggagattgcagtgaaccgagatcgcgccactgcactccagcctggcgacagagcgagactctgtctcacaaacaaacaaataaaaataaaagtggcagaggctttgggtgtcctaaaagtcttgagttcaatactgcactgaaaccacctggcttaatgttacttcgtaatcaccaactgcgccctaactccgcctaaacgttttgtcatagacgttcccttagtgacaagagcgatcctggatcagaacatgtattcacaagtgttctacagggaaagaaagccgagggctcctctcaaagcactgatcgcgtcaaagtaggaaggcagcacgtcatcacaacttccccaaaagtatcagggcaaagccagccagctacacaaagttgcaagctgtcaaacccattttgaacttcttgagttctgctctcccaggatgggaaggaacaagtgggtccagaaccccgcaatcgtt

SEQ ID NO: 26239 - DNA, 2300 bp, Homo sapien
attccccctttttggtcaggttctcacttaggtgagagtgtgaccaaaacttagggccttagcgccactctcagttaccatcattttgggtttcggtctcagcacatcatttataggttttggtgttctcatggttgcacatttctttcagcttttgtcattccagttgaagagagaacatctgacgttctagagatgaccgcgtgcaaacatttaaaacctttgagagaatacagcacaccagggagactattattataaatattgggaggataacaccaagagttcggggtatgctcctaaacccaaggccccgataaaccaaacctcctaaaatcaaatagatcaaagaatgagctagataaagggtttactcacttgactaagcaatttcttcgttaatcctctaccactgaatttatttttttcttttttcctttttttttttttttagacggagtcttgctctgtcgcccaggttggagtgcagtggcacagtcttggttcactgcaacctctgccttccgggttcaagcaattctcttgcctcagcttcctgagtagctgcgattacaggcacctgccaccacgcctagctaatttttgtatttttagtagagatggggttttgccatgttggccaggctgatcttgaactcctgacctcaggtgatctgcctgcctcggactcctaaagtgctgggattacaggtgtaagccaccgcgcccagccaatgagggatacatttctaatcattgcttcttttacttcaaaccatggtaaaaggacctaacaaatgatgcctttctagaagagtgaaggcctactggcaatgttttctttaacccatgatgtgggttagaggagtgaaccaatgttttgtttttgactgattatgaagcaatgcatgtaccattaaagtttcttacctacttcgggccttcatcttttatctatcaaagtctaagtttatccatgtataaggctggctgcaaactccttcacaaataaaagtataccccataagtgcacataacagaccccttttccacttctattgtttgtagaggcataaggaagacaaaaaatattgaaagataagagtttcatggtagtagaagtcttaatctgtgaacttgggaaaagctgttcacatcaaggatgccattttcttcttgggagaaatttcccagggtagctttacctcaaaagttccaatgggtgcactgttccaaaagtgtggagggaccgttctcatttgcgagaccatgaacccaaagcccaaggtcctgaagttttgttgtagtgtggatgacaaggacagtcttctccaatgtttccagaaaattcaaaccataaaaagctttctttaccgggggaaaatacactgtagcataataatctactgttataacatcagccctcttgcatgggaaagcttttatacaaccagaatgacaaattggaattcaaataacaattgaatgaaatccccttacaaaatgtttaaatggcccacccggtgaccaaatgtacatgaagctttgtttgtcttcccaggaatatgggactaagcattggttataaactattttaaacaatttcagtatcagctggtttaatatgaaaatctgacgaagtattttcttggtatttaattaaatttttgcttgttttacttgggttagtagctttatgcaaggaaatttcattcaaagcaatgaaaaacaacaaccagggctgatactgactactaaaaactgttttaaactcagaaggaaaaataatatggatttcaggcgttcccaggttataaatgggttttctgcatgtttgaaaccaaaaacaaactttcctatagaaatatcagtaaatctagcaaagaaataacacaccccaaccgtgtcatagcctgtcttaaataagggaaaaacatgagagcactagtaagaggcaagtaaagggtgctttgctttacaattgatggaagctcgcaggctttgttcttggctgccccacgcagccagcggaaggcaggccaaggaggaaagagcccggcctcccaggtccccgcaactacaactcccaggatgccgcggcgcaggctccctgcgggagcaggctgggctcagctccgctggacccgcgctggggaactctggcctcgctgcactcatggcttctcctagcaaggcagtgattgttcccgggaacggaggcggggatgtgaccacccacggctggtatggctgggtgaaaaaggagctggagaaggtaagcgcccaacgccgctgctccg

SEQ ID NO: 26240 - DNA, 2300 bp, Homo sapien
ccttcccctcttgttgtgggagtaaaaaaatcttactacctttgtaaagttttaataagttatattatttcatgtcttaaaggagctctgttataattcacttatggaaacaaacacatgtaaatcaattatttctaaaattccagaaaataagtaaattaaacttatgcatgcaaaatttcttaaaaatgctgaaaccatcctgacagggttaacaagattacaagccagcctttaggcaggttagttaggcactgaccagggtgcattggtgcccttcaattcacttccctgcagctgctaactaaccaaaagccttgcagcacactgatcacctactccctgattgctcctatccacagaatctctgacactagctctttgtacccaggaattgcttaaggtatttttcagatcctgaattcccacaaaacagctgatgccaaactgtctagggatccccaccaggaagggcacagtggctcacgcctgtaatcttagcactttgggaggccaaggtgagaggatcgcctgaagcccggagtttgagactagcctgggcaacaaagtgagaccctgctttacaaaaaaaaaatttttttaaataaataaataaagacctccaccaagaaacaacactggaatgaagtttcttcatctccctgtcccatgacttcacctctcacttcctgaccaatcagaaatccccacactttagcccattgcccctccagacttcttaaaaatgccatctctaatctcttggggaggtggatttgaggattgctcttgtctcctcatttggctgccacttgattatggaactctttatctgctgcaactcctattctttctgttaccgcacaatggacaatcgaacctgatggtcctataacaatctttcttacagaaattgctagtacagaaagaatccaggttcaaataatcaaggcaaatctttggcgaataatattaagttttggttaaaaaaaatcccagctatgtcttttctcagtgttaagtattatacatgtgtacattttgagtttgtttccttaccgagaataattaatctgaacttcctaaatttataaaagtttactattgataagctaatattaacattacattgtttaagatcctgaaaaatgtgaatttgttcaacaaaactgaatcattctcacatttaacagtaattgtttctttgtgccttaaactattaataatttctatgatctgtagataacttaaaacttagtattaaattgagctaattaatggatacttcttggatgcctagatatgttcttgcataattttatgtttacatcgttttgcttatttttatatgctacagagactacaactctgagtcacagtaatgatgtgttcatgtttgccacttgtcagcgtgtgtaaaaatggttgtggtggctttatacagttgtgttctatcgcgccttttgcagcaacatggatgcatctggaggccatgatcctaaaagaattaacgcagaagcagaaaaccaaatacatgttctcacttgaaagtgggagctaagcattgggcacacatggacacaaaggtgacattaatagacgctggggactactagagtggggagggaggcagggaggggctgaaaaacttgggtactatgctcagtatctgggtgaccagctcattcgaattcgaaacctcatagccaggtaacaaatacgcagtgtaccccctaaatctaaacgttggaattattttttaaaagaaagttatgttccatgtatttctaagcttactctcctaaaatggttgaatattacagttctcaattatttatctccatgtagaaggatgacagggactgtgcgctagtgccagcctccgctgagagcgccaagacattacagcaagcgacggtaggagagcttgtaacgtgaagcaccaccacacctctgtacttcaaacttaaccacagagaccgactcccaaaccagcaagtgcgtaagcgccgccgcgctcaccacccgccccgccccttccgcatgctaatgccttcttccggcagccttagtttcttccaaccagtgcagctccctgttccgcgagcatacgtcatcgttctcgctttccggtagctaaggcgatcagcgggacttcccactgagacgagcggatgtcatattgtatcagggcgaacctctgaggagcgctggctgcgcttaggcaacggtgcggcaggcgccggggttttctgaaacagaaacgtttaggggtggggaaacgtgttccgaggaactct

SEQ ID NO: 26241 - DNA, 2300 bp, Homo sapien
gaggatcgcctgaagcccggagtttgagactagcctgggcaacaaagtgagaccctgctttacaaaaaaaaaatttttttaaataaataaataaagacctccaccaagaaacaacactggaatgaagtttcttcatctccctgtcccatgacttcacctctcacttcctgaccaatcagaaatccccacactttagcccattgcccctccagacttcttaaaaatgccatctctaatctcttggggaggtggatttgaggattgctcttgtctcctcatttggctgccacttgattatggaactctttatctgctgcaactcctattctttctgttaccgcacaatggacaatcgaacctgatggtcctataacaatctttcttacagaaattgctagtacagaaagaatccaggttcaaataatcaaggcaaatctttggcgaataatattaagttttggttaaaaaaaatcccagctatgtcttttctcagtgttaagtattatacatgtgtacattttgagtttgtttccttaccgagaataattaatctgaacttcctaaatttataaaagtttactattgataagctaatattaacattacattgtttaagatcctgaaaaatgtgaatttgttcaacaaaactgaatcattctcacatttaacagtaattgtttctttgtgccttaaactattaataatttctatgatctgtagataacttaaaacttagtattaaattgagctaattaatggatacttcttggatgcctagatatgttcttgcataattttatgtttacatcgttttgcttatttttatatgctacagagactacaactctgagtcacagtaatgatgtgttcatgtttgccacttgtcagcgtgtgtaaaaatggttgtggtggctttatacagttgtgttctatcgcgccttttgcagcaacatggatgcatctggaggccatgatcctaaaagaattaacgcagaagcagaaaaccaaatacatgttctcacttgaaagtgggagctaagcattgggcacacatggacacaaaggtgacattaatagacgctggggactactagagtggggagggaggcagggaggggctgaaaaacttgggtactatgctcagtatctgggtgaccagctcattcgaattcgaaacctcatagccaggtaacaaatacgcagtgtaccccctaaatctaaacgttggaattattttttaaaagaaagttatgttccatgtatttctaagcttactctcctaaaatggttgaatattacagttctcaattatttatctccatgtagaaggatgacagggactgtgcgctagtgccagcctccgctgagagcgccaagacattacagcaagcgacggtaggagagcttgtaacgtgaagcaccaccacacctctgtacttcaaacttaaccacagagaccgactcccaaaccagcaagtgcgtaagcgccgccgcgctcaccacccgccccgccccttccgcatgctaatgccttcttccggcagccttagtttcttccaaccagtgcagctccctgttccgcgagcatacgtcatcgttctcgctttccggtagctaaggcgatcagcgggacttcccactgagacgagcggatgtcatattgtatcagggcgaacctctgaggagcgctggctgcgcttaggcaacggtgcggcaggcgccggggttttctgaaacagaaacgtttaggggtggggaaacgtgttccgaggaactctcgttttgaagtgcgacatacacctgtcttgccctgttccaagatggtggcagagcttctctgagtctctcgcttcctccagtccgtcggagaagcgctctttgattggccagtggacagcgccgtggcatgacgcgctggggcgctggccaatcggttgagagctgagctggacttggcggtgggagccggagcctgcttgttgcagctgtgggtgaggacggctctagctaggtgagcggctccggccaggtgagcggggcgcataggtgacggagggccgagggcacgggtatgagtttctgccgggggcgaggtgagcggcttctgggaggaggccttttcttgacagtttagggtagcgggggaatggatgatccgggagtcccctgcggatgtcgtcccgcaccaggccgggaccgatttctggctccagtttccccagaattgcggagtgcgcacacctggaaggacccaagtcccgttttatagttgagaaactcaagactcagacaagtgaaac

SEQ ID NO: 26242 - DNA, 2300 bp, Homo sapien
cataatccattttgagattcatcgtatggttgtatttatcagtagttctttttttttttttttttttttttttttgagaaggagtctcactctgtcacccaggctggagtgcagtggtgtaatctcggctcaccacaacctccgcctcctggattcaagtaattctcctgtctcagcctctggaatagctgggattacaggcgcccgccaccatgcccggctaatttttgtatttttagtggagacgaggtttcaccatgttggccaggctggtctcgatctcctgacttgaggtgacccacccatcttggcctcccaaagtgctgggattacaggtgtgagccacccgtacccagccagtagttcctttttatttgtaagtggtatcccacgttttgtttagccatttactcgatgggtattgggggtggtttctattttttcctattaagaataaaactatgaacattcatgtacatggctgtgtgcagacacaggttttcatttctcatggataactagaaacggaatgcctgggttatatggtaggcatatgttcaactttttaaaaactaagttttgcaaagagattgtaacattttatgttcccatcaataacagttccaattattccaaatccttacagctcttggcattctcaatctgattttagccattctagtaggtgtgtaatggtctcttattgtattcttttaatgtccatttctgtgatgactaatgatgctactgtgcttattggtcatttgtatatcttctttcgttctattcaaatttattgcctggtttttagttgggctgtatttttataactgagttgtaaagcgtcctcatatattctggatccaagtccttttgttagatatatgttattatgaatattttattctgtggcttggcttttcattttctcaactgtgaccttcaaagagcaaaaattttaatttttttttaaaagccctatttatccattttcgctttatgcatatatatataaaatgagatggggtctcactatgttggccttgctggtctggaactcttgggttcaagcaatcctccctgctctacctcccaaagtgctggggttacaggcatgagccaccccgcttgggatgccttttttattctaagaattctgtgcttattccaagatggcaaacatattctcctggtttttttctaggcttatattaaatagttttagcttttacatttaagtcagcgatccattcagagttaagttttttatctatttctgtagggcagaacatcagtttttaaagggtgggcaaggtgaaaagaaccctgaaggataccagggaaaatgatgtttctgaagccatgaaaggtgcaggtggggtcagtggtggcaaatgctttcgaaaccaagtttgagtgtggctgaaaagtacttaacgttaatttaccgggcctaccttgtgccaagcacatcacacttgctcttaagttgttcagtctattgagggcatcttgctttaaaaaatgtatgcataagacaaaagctggaggtggtcggagtcgaaggagattttttgtttttgagacatgggcacgtttgtatgaaggataaacgtcaataatgaagatgggggaggacttagggtgtcaatgaggggaaaggccactgaggctggaaaaaatagtacccagagcctagtggagggattagctttggcctggaagtatttaaagttcacccagagttccggaaagaaaaatggaggaaaagaagagttgcggggagagacaagcggtatccctgcaaatctgaaaactggaagaggaattggaagtaaccttttcggataccgtctggagcccacgaaggcattacaattttgcaagtgagaagcttctcctctaagttgtcatttagtcctcgtcacgtggtaaaaagtatcgcacgcccacagttctacacccgaaagtccggacacctgagcgactttccgggccagaggccccaaggtgcatcggggcagagccggaagcggacgctgaaaactggcggctccttaatggttccggcggcagggaccgcagcgacgccctcaccggaagtcccgcctctgccgtgggcctgcgagaatcgaggcactcgctggcgtacccatgtatcgaaatgagttcacggcctggtaccggcggatgtcggtggtctacgggatcggcacctggtctgtgttgggctcactgctttactatagccggacaatggcgaagtcgtcaggtagggctcttcggcggggcctgccccg

SEQ ID NO: 26243 - DNA, 2300 bp, Homo sapien
ctcctgacctcaagtgatccacctgcctcagcctcccaaagtgctggaattacaggcgtgaaccaccacgaccagcccaattttcccttttttagtcttattctttcaggagtgcacaatggagttttccaggggctccgtgacatatagtgacttcattgctctgatattcatatgtaggggatttattattgctatttttaaatgcattgataaatccatgttaactatttctcttagttaaaaacagtaaacatttttagatataatccacctaaacaaaagctatactttgtgcccaataatttttaagaatgtaaagggatcctgtgatcaaaatattgagacctgctgatttttcaaaaactcaaattttaccagttgttccaataataagcttttccttttcttgatttttctggccaggataccacccaggttaatttagttttcctgtcttttttttttttttttttttttttgagacagagtcttgctttgtcacccaggctggagtgcagtggcacgatatcggctcaccgtaacctccgcctcccgggttcaagcaattttcttgcctcagcctcccgagtagctgggattacaggcatgcgctgccatgcctggctaatttttgtatttttagtagagacggggtttcaccatgttggccaggcaggcctcgaactcctgacctccaatgatccgcccaccttgacctcccaaagtgctgggattacaggtagttttcctgtcttttaaaaagtccacggctgggcgcagtggctcatgcctgtaatcccagcactttgggaggccaaagcgggcagatcacctgaggtcgggagttcgagaccagcctgaccaacatggagaaatctcatctttaataaaaatacaaaattagccgggcgtggcggcgcatgcttgtaatcccagctactcaggaggttgaggcagaagaattgcttgaacccaggaggcagaagttgtggatagccaagatcacaccattgcacttcagcctgggccacaagagcaaaactgcatctcaaaaaaaaaaaaaaaaaaaatcctccttaattctcggaatcctacctggttattttgtagaatgttcctcaatttatttttgtcctatgtttcatcatgattggattcaggttatacattatttggcagaaataccacaagattgatgttgtgtccttcccagtgcaatatcaggaggcacatgatgtcttgttactggttatgttaactttgacaacgttattaaggcaatttagtattcagtatttaacaaacaagcacactagtttgtagtcttttctgggcaagtgagggtttcttctcaatttcagtgccttttctacgcccaccaatgctattagtcacctttaaggtgaagactgctgagatggaattatttttagcaatgataataatttgttggggtaatagttgtacagccctttgctgccatctaagcacttttacgtggtttggttcatttaaatctaacaacccagtgagggggccaattagtagcatttatattacatgagaaattagaattctagaatcacatacctatttattatcatgacatggctaagtcgaattaatagtgagataggtaaatggctattttaggcagcagatccttttgtatgtggtatctgaaaagccactgaggcaggaagacaaggaagaagaatttgggaggatctgcgtgcagaggagtggaagaggaaagaggaatacaattagaaataggattcaggctgaatttaaaggcttagtgatgacgggttcttaggttcgggtatgtgggagaaaaaaaccagcatagagactaccttcggggcagagtgggttctgggcactgggtaggggctgggcccgggatggggggatcaaagggctctggcgggacccagatgtggatggggcagggccgagcgtggggactgggcttttcaatgacgggcggggttacggttgggcagcaggtgggcgtggcaggcataggcggagtcaatctatgagtgggtgggcctatcgccaggccgagagtgggcgtggccgacgtggggtgggtagcagccgaccgagtcggaccggccagttgggcgcgcttccgggtgtcacctccagagggcgccggctgcggagccgccctcagagtcgcgaggccggacgcagcgcggcgccgccccactcgccccagccgccgccatgaaggccgtggtgcagcgcgtcacccgggccagcgtcacaggtcagtcgggcggggc

SEQ ID NO: 26244 - DNA, 2300 bp, Homo sapien
cgctaagtcagcctttgagcaggagcaccgcctgtcccctgtctgtttgctactgtggcctcagagcatgcctcttgttctcttaacgcaaaaaccaagcctcttttcttatgtttggtttctcttttttaaattgggcagttatctgggcactatgtatttttagaatgtctactagctcgctgtgcacatagggatctagaactcagagaggttaaattgcttgccccagatcatgcacacacacttagcaaaaagcctgaaccccagttagagtctgggctccctgaccttgaagccagtgatctttttactaaggtggtggcgggggttgaggagcaggggttgccattgctgctgcctgcctggctctctgagtttatagatgggcaaactcgactatagaaaggtttaggtgtcttagccaaggcagcacagatgaaatatggccctaaaatcctgcttaatgattgttcactttatagctcccattcattccagacataaaatcagaatgtgccctctgtgcacctcctcccctccattaccacggggcacatttactttagatgctggatccatttattctgccccttggtgctcagagcttgggtataaccctgcccaactgattcttttgtgttagattgaaaatcagacttgaaactgaattcctgctaaggtgttgatgatggataactatcattcaatactatttcagtgatggtggtattttagtagctgtcctctggatactcaaagaagtggtagagtggtgtaatggctaaaaactgaggctgtgggtttgaatgtctttatggctctgacatactacagagctaatacttagcctggtgcttaagagatgtgattcaacataagacaaatcttggctgtggagagggggtaatgagtagcacctgtccctgagggtgcccatattaagagtcagttaattagtatttatagagtctttgaaactgtcatctacttaacatcatccagaagggtggctctcaaatggtgagatttcagctttcatgctggtggttctctgctgtgcttctcaaatctgaccctatagatgtcacctggtcaactttcttgccatggtgactatccttcttcacatgtatagggaaagcccctctggggcttaaggagcttgtgacatagttttcaaggtgtctttctccagatctttttgcatatttgcaataaccatgatttttctctcagtgtatttgctgaattgttctttcttttttttttcttttgagacagagtctccctctgtcacccaggctggagtgcagtggtgcaatcttagcttactgcaatctctgcctccctggttcaagcgatttttgtgcctaagcctcctgagtagctgggattaaaggcgcccgccaccatgcctggctaacttttgtagttttagtagtagagatggggtttctctatgttggctaggctggtcttgaactcctgaactcaggtgatccacccactgtggcctcccaaagtactgggatttcaggcatgagccaccgttctcagccgaattgttcattttgagtagctccaagaaggggtttaaaaatggatgtcatttatcctaacatgatgaattcgttcatgaaaaattacaattggacccatgttttgacatatccccgacctaaaggagcagagaataggtggttgtcatcttagccccagttctcaccagtagctgctatgaactggagcgactggcaaaaaagaagcaatctcaaaacaaccgtgtgaggtagaactgttattattctgtatcgcagctgaggacactgaagcacagggtggataagtgacttgcctgaggtcatgcctcctgtcagggatggagtcatcattatgtccttatttgaccggaagctggtgacatttttggggtatggagtgtgttggggggcttgtgatctctcaggtagctctcactgctctttttccccttagggtccgaaagattctaaacctgcgtgtatttgaggatgagagtgggaagcactggtcgaagagtgtgatggacaaacagtacgagattctgtgtgtcagccagtttaccctccagtgtgtcctgaagggaaacaagcctgatttccacctagcaatgcccacggagcaggcagagggcttctacaacagcttcctggagcagctgcgtaaaacatacaggccggagcttatcaaaggtaagcaggagagccacatccaggaacgggtctttgggacactcctggatggagagaaaaaagaag

SEQ ID NO: 26245 - DNA, 2300 bp, Homo sapien
acaccctcaagttccaggaaccttagtccaagtcttcacttccccagacaccctccaatcgaatctcagtccactgaagccctgactgccacctccaccatgccactgacgccacgtcaaaagggtcactgtgggtgtggaaggtgtggaataaacaagtacatattgagtaccatgtacaccactcgggtgacgggtacactaagatctcagaattcaccactatgtaattcatccacataacaaaaaaaatcccacttgtatcccaaaagctattgaaattttaaaaatcaaaaattaaaaaaaaaaaaaggtcaccactatttgcacaggaaatttttcaggaggatatacaatgaggagaattttattttttaataatcttccgtctttgaattttctaaccaagtggatgttcttttgatttttaaaaacatcaacagaggctactgaagacagtcaaatgatgagccactaaaaagaacctgtgttttaagaagtccatttaagaaatgttctcttgagaaacaaacaaatagtaactttccagcagagaaacctgactgataccatcttgaccaagtgagtgatcaaggtcagcatcagtagtcatgagacacatcaataccatgtgccctgacatggcacaccaaggacatcaaattcccaaactaagggacattctaaaaaataactggcctgtgtcttcagaagtatcaagatcgtaagactggaggaggctgagacacacctaaatgaacatgggattctagattggattctggacccagtgggacaatggcaatattcaaataaggcctgcagattcattattagttaatgctatgttaccaacagtaacttgctggttttgatcactactacagatatgtgagatcattaacattaacacttcgggaagctgggtaaaaggaatatgagaactcttctggtctatttttgcaacttcattaagtctggaattatttcaaagtaagtttaagatacatatgtgtacacacacgtacacacacacaaacacacacatgatcactcttgactgtgtggccagcaagcccaatggtactttccaaatgctcacctcctcagcctcttacagtgagacagcatggagctgcccttctagaaagtctctcccactaggcttccaaactgaggtacttccctggctcctcttccactttatagccatccccacacaagctgggctccatcctccctgatgaccacctctaacagatgacttgcctcaacgcgggagatctgacagaaacttgaaggccggacctccccatgactgtcctgctggcatcacgcgaaaaccccaaagctgcccctgcccatgtccctgttagcctgttcaaggcttgctgtcacctcagggtccttctccacatctcccacttctctggccttctctgttcctactgctgacccatttccaggcctctatttgctccacccaagcctcctgcacagagactcaaggtgacagatggggaaaagaacaccgctgcctcaggtgggaaaacctgggttggaggcttcattctgccatggcctacctgtggttttggagaaagcttttagagactaaagctttttcacatgtaaaacaggctattaaataagagcccctaaggcaggctctcttgacctaatagccttcctctcctgctgcaactccactccagagtgtgaaaatgccacaaatccactttcccaaactccctggtgacctgctggacagtaacccagctctgcccagaggacataggaaacaccaaccctctggcctgccttggacacagacgtggagggtgtaagggcactgctgtggcagccattttgtaaccaagaggagatgaggtagaggacagagaggaaaacagaaccccagcacctgggagctgccaaagtaaccagccctggagtccctgggctcgggcctcggaactcatgaaagaaaatcaaatgttcctattgtttaaggaacttttaactgagaattctatttgactgtgactttcagccatggcagggctcagtcaccaactattcataagagggtaaggagacagatgcaggcagggagcgggaggagggaatgggaatgagctgagcagcagcatcacagctggagggctggacatggatgaccagctcctcacttccaggtgtttccacatcaagcatcctgcagacagctaacaagttcattctacaaagtacagttctcaccactttatccttcctctgctcggaaacagtcaatggtt

SEQ ID NO: 26246 - DNA, 2300 bp, Homo sapien
tgagaggccactaccaggctacatggcaaagggtaggtgtaaagagtcgggaccaataatgcaattaattgaccacacccacaggacagtgtcaagccttggaaacctttctttctttcaaaaaaaaaaaaaaaaatcaccgaactgtaccaaactcatgtgcgaatatattttttacatcccagtaactcatttgagacttttaaacacatagaacaaagatcatgccctcccttccttcccagatatcatcactgcaggaatctggcccatataaaagcattcctattttaggacaaaactaaacaaaggcccaaagacatatgaatatctaaaattgaaaaagtttatttatctttgaatatatcacaagtatactcaactggcaatattttttttaattaggtaaaatgtacaaggtgtatcttcccacaaattaatgaaactgattttgaacaaacaaaattgacacacagatacattttctaagtgatgcacttttccaatgatgtcagcattactcaaaacattttttagaatataaacatataattgattttataattgctgtcagaaacaaaggcacattcttttactgtcccagaacattcaagatgctttcaatttattacaagtaccaaaagcagccacaactcaaatggctcaagcagttaaaggaattattctttcccataaaagcggtcctgaggtagggctacagtggctgaacttctgctatgataagtattcaggggtttcccaggacacagcatcaatgctaaaactggcaaaatcccaatggactgatcccttcaatggatgacaggaccctctatggctgaaagactctaaagttcttagttcttagctgtgacaggacagagaaccgacatgtcccacctgcagccacacccatccccttattattactagatcttatcaaaagctgacttgaagaggaaaaaaggccaaaagacttcttttcttcacctaaccgccgatgccctccttttggttttatggttccaacctgacagctactctgggctacaaagagccccttcttgacagatgactgccagctgcaggctagatcagactggtctctggagattgcacagatcgtgaacttgtgccctatgtttcacctttttgcatttacagcctaattataatacatttaaatgttaaatcttcaccccagagtgaacacaggtcatccgcttttggatattcttcatatgtaagcccagtgcgtgtctctaacgagtttcctccatgaattttcataggcttctcctgtatgctacagaatacgtatatcctacctctccacctagcataaatacctaccttttctccttcaaagtatgctttatggcctcaggtagaggcctgcttcctgcctgcaagttgtaacctcttagaaatagttatattttgtttattttgattcttttcagtcgacacatgcaaacaggaacgagttggctacttgagggttggttccttgtgcatctcagtgagtcttgaaaaaccccagatccgtccttccttcctgccgcatgtcatcctaaggccagtgtctgtcagggaggcaaggcagcagcagtacttttgggaaacatccagaataacattaaaaagcccctttttccccacacgtgtcttttatccagagggtctgttttccacaagttcttcagtgatttctccccagtctcattggctgggattggctttcacgcctcttaacaggattgaccatggttcatcaagggtcaacttgaaagctgaaccctgccaactttccctgaatctcctgactatggtggaggagtgtggatcctggaactaaactgaggtgatagggaggaaaagagagaaatcaacagtaaacgctgcacatcctctgtctggtaaatgtgcatcactgattgtatccaatctagattcaaccagagagacggaagcattaagaatgacatagaatatggaatttgctatagggatttgagcttctacatttgcgggaaggagcgagttgaacacttaggaacagctgttgctgccgtgtctggtggggggcctgagagtggcaggacaagcagcctgccccagaagtggaagaaactgaaagtggagtcctgagagctgaatctgccgcaggcccgcgggccgcccgggaattaggaaagttagaggggatccacgcccacaaggtaagccagcagatggggacaattccccgggctgcgacagtccctaatgtcgggcacctacctttcaagcctacgaga

SEQ ID NO: 26247 - DNA, 2300 bp, Homo sapien
ggctttgtttaactgctcagctttgataacagcagctcatccatctttgcaaatgtactttgaagcctttttcattcttctgcaacattcccagaaagaacgaagtttccagcaactccatataacagagctttgcttacacataagagcagtttggtataggaaaggatacaggctccaacttgatgaagctccctatggccaaatctgggacaatttagcaaggaaataaacaatgataatagtagattatgacccacagaataaacaaatacccacaagtccatgctgagataaataaataattgaacaaataaagaaatgggagagaagagggcaattttccttagagcagaattccagttattaaatctcaagggagtaagaagcatagaagatgactgctgggcctacctcacactgattgctgcagggatgggccatggatggatgcaacaagagtaggccagaggatgatgcaaaacagggcatttgcaaggtctcaaggcacctcccctaaagatactaatcacagagggaaaaacagtaactctacagtgcagaagcctgaaggagccgctttaaccaagtgatcaaggacaacatcggcagaaatgggacataacatcatggacgcctgctatggcacagtgggaagagcacaggtcacctctgtggcatccttgtcccaaatgcataacctccacctaaccaggagaaagcatcaggcagtcctcaaaggagggacatttttgggaataactggccagtattcaagtgtcaaggtaacgatagacaaagattgaagagctgccccagactgcaaggcactagggagacctgcaaccaaatagatatggtctcacatggtctgtagattagttagtagtcatgaaccaatgtgaatttctcagattagatcactgtactgtgattatataagatgttagttttggggaaagctgggagaaggttaaacaggtactatttttgcaaactttttataagactgaaattatttcagaataaaaagtaaagaaataaacaggtggactttggagtcattctgcctctcctcaaatctggctacactacttactaactgtgtgacattgggcaagttacttcatttctcccctcagtttccttatatgtaaaatggggataaaaagaatacctatctgggaggccgaggtaggtggatcactttagcccaggagtttgagaccaacctgggcagcatggtgaaaccccatttctacaaaaagtacaaagattagccaggtgtggtggcacacgccgtattcccagctacttgggagactgaggtgggaggatcaaatgagcccaggaggcagaggctgctgtgagcagagatcgcgccactgtactccagcctgggtgacagagcaagaccttgtctcaaaaaaaaaaaaaaaaaagaaaaaatacctatcatagagggttgtaatgagagttaaatgtgttaatacatgtgtagtacttagaactctgcaccttggcccagagcaagggctatactattacgtgtaattatcagaggagactggcagcatcttctgatcttagggacatttaatctctctgtgtgtgtctcactgtgcttctggaaagtttctgatgcaggctcctggactgattccttctccaatcaattactctggcctaaaagcatttccctttctaccagcagccagataaagccaaattcagcactaggatctgtagtattaacttaagtattacccacttaatgggacttaagtgttacctagttttagaggaataagaataacttctgtctcacgttgggtttcactgaggagatgtctgcattggaaagacagagctcatgtcactaaagaagcttctggggccagtttcccttaaccccattgcagcctgcagaccttttgggcttgcaggaccaacatccctgattggtttgggaggggcgtgtgtgtgtggatctgcctcacaatggcctgtctgagcccttatctgaggtcacacgttatcatttgtttggccaataagactgtagcacacacaccagcttcagtccccacttggccttacctttgatgtcacaatctgacctgtgggtattaatctggtcacagctgctcacagactagatggcaaggtccaggggactagcacaggaagatgtggaagagaagtgaccatcaacccaagatcaaagcagaggatggacctctggtgggccagttcgaggttctgggttcagttccagaacctgccatgccacatcctct

SEQ ID NO: 26248 - DNA, 2300 bp, Homo sapien
gctgctttgatgctgagccattttatgcctagataatgaacatacccacagcactcctgggtctgaatgctgatatcagtctctctcctcttgctccagaaaagccaatgaattgtgttacttggtttagtttggagggaagtggggagtagagcaatgtaatcagtttacgtacagtctttccagaaagaggaagataaatcaagtgttcagacacaggttatgactcacgacaaggctgcatgcttctgggaggccgtgattctgggggatggcacagctgaccagcaggcagggatggggctgtgatttttgcattgattctagtttatacttttttctgtatcttagcagttctgaagttggaatgcatcttagtatatatcaaagcttccttacaaccacctcctctaagaagtagtcatgccatatagttgcctttgcctgttacatgcatgaatatcaaaagcaccagcatcaaacccagcagagtggtatctgccatgtgcatggaaatcctggagcctctcctaattggtctgggagtgagaagggaaaatatgccttcaggagccctcttcaaagcaggaatcagaagcaggctgcaaaaccagcttcagaacccagggccaatgcttttagttcgtgcatgaatgacaaaaggcaaactcatagaaggagagagtaggatggtgtttatcaaaggctcagcgatgggggtggatggagaaaagagagattttgattaaaaagtacaatattcagccaggcagagggtcaaaactttagtgatctgttgtacagcatgatgagtataattaatcatagcattgtatatttcaaaattgcttaaagattggattttaaatattcttatcataaaaattgataagtacatgaggtgatagatatgttaatttacttgattttatcattctacaatgtacacacataccaaaacatcacattataccccataaatatatgcaatcattctttgttagttaaagataaaattaaagaacagaattactgtattaccaaggctcttcatggcactcaggatgacattgccagaggagtggagagaccacaggcaacaacaatttgggagtcaaaagtgaatcagaaaaatcaggtcaatgttaagaaatttagaatatattaaccaattttattttgcttatatttttctttttatattcacccaagtactatattataaaaatttttacctaattaaatataaagcccattcaaataagttgaaaataaaattctaaagaaagcaggatgccatagttttccattgcaatgttagttcttcctcagtgagacataaaataaaggtgcatttgggattaggttgagttaaaggtcccaaatctaatctcctgcttcaatcgcagtgcccgataaaacgagccagcgacaggcagaaagcggagccccactgagtttgtagtcaaagtccccaccttgctttggggcacgttcgtcttcctcccctcttcaatgaaaaaccgcttccctcagacatcaagtgctgctgcattcctggcccagatcagttatcaatcaggaagtcttgttcttttcttttctttcgggacaagtgacatagaaggctcactttggagaacatgtcttctgggtggagtgagtgttgtatttcctttttttctttttttctttttgagacggagtctcgctctttcgcccaggccggactgcagtggcgctatctcggctcactgcaagctccgcctcccgggttcacgccattctcctgcctcagcctcccgagtagctgggactacaggcgcccgccaccacgcctggctaattttttgtgtttttagtagagacggggtttcaccttgttagccaggatggtctcgatctcctgacctcgtgatccgcccgcctcagcctcccaaagtgctgggattacaggcgtgagccacggtgcctggccgggttgttgtattttaacggtgggaaaggaagggccctcccgaagtgagatttcaggcactggccgttggaacagacaagggagagggttctcaccccccactccttgaagtctggccatttgggtgggagaggctggagcagccagtgaggacactcagcacagtgtgggcaaccggacaggatggatttgaatttataaagaacctgccttccttccttcatggtccaagcaaatgttccaggtatttaagccacatgctggagaggtaagttagataagtttcatgctggagagacaggtagatgggacacaaatctgg

SEQ ID NO: 26249 - DNA, 2300 bp, Homo sapien
aaaactaacaaacagaaaggaatagcatcaacgtcaacaaaagagacatccacaccaaaaccccatctgaaggtcaggttcatcaaagaccaaaggtagaaaaaaccacaaagatggggagaaaccagagcagaaaagctgaaaattctaaaaaccagagcacctattcttctccaaaggatcgcagctcctcgccagcaatggaacaaagctcaatggagaatgactttgacaagttgacagaagtaggcttcagaagaccggtaataacaaacttctccaagctaaaggggatgttcgaacccattgcaagggagctaaaaaccttgaaaaaagattagaaaaatggctaagtagaataaacagcatagagaagaccttaaacgacctgatggagatgaaaaccatggcaggagaactatgtgacacatgcacaagcttcagtagccaattcgatcaactggaagaagggttatcagtgattgaagatcaaatgagtgaaatgaagagagaagagaagttttgagaaaaaagagtaaaaagaaatgaacaaagcctccaagaaatatgggactaagtgaaatgaccaaatctatgtttgtttggtgtacctgaaagtgatggggagaatggaactaagttggaaaaacactcttcaggatattatccaggagaacttccccaatctagcaaggcaggccaacattcaaattcaggaaatacagagaatgccacagagatactccttgagaagagcaaccccaagacacataattgtcagattcaccaagtttgaaatgaaggaaaaaatattaagggcagccagagagaaaggttggcttacccacaaagggaagcccatcagactaacagcagatctctccgcagaaaatctacaagccagaagaaagtgggggccaatattcaacattcttaaagaaaagaattttcaacccagaatttcatatccagccaaactaagcttcataagtgaaggagaaataaatacctttacagacaagcaaatgctgagagattttgtcaccaccaggcctgccttacaagagttcctgaaggaagcactaaacatgaaaaggaacaactggtaccagccactgcaaaaacatgccaaattgtaaagaccattgatgctaggaagaaactgcatcaactaatgagcaacatatccagctaacatcataatgacaggatcaaattcacacataacaatattaaccttaaatgtaaatgggctaaatgccccaattaaaagacacagactggcaaattggataaagagtcaagatgcatcagtgtgctgtattcaggagacccatctcacgtgcagagacacacataggctcaaaataaagggatggaggaagatctactaagcaaatggaagacaaaaaaaagcaggggttgtgatcctggttactaataaaacagactttaaaccaacaaaggtcaaaagagacaaagaaggccattacataatggtaaagggatcaattcaacaagaagagcacactatcctaaatatatatccacccaatacaggagtgcccagattcataaagcaagtccttagagacctacaaaaagacttagactcccacacaataataatgggagagtttaacatcccactgtcaacattagacagatcaacgagacagagagttaacaaggatatccaggacttgaactcagctctgcaccaagcggacctaatagacatctacagaactctccaccccaaatcagcagaatatacattcttctcagcaccacattgcacttattccaaaagtgaccacatagttggaagtaaagcactcctcagcaaatgtaaaagaagagaaatcataacaaactgtctctcagaagacagtccaattaaattagaactcaagattaagaaactcactcaaaactgcacaactacatggaaactgaacaacctgctcctgaatgactactgggcaaataacgaaaggaaggcagaaataaagatattctttgaaaccaatgagaacaaagacacaacataccagaatctctgggacacatttaaagcagtgtgtagagggaaatttttagcactaaatgcccacaagagaaagcaggcaagatctaaaattgacaccctaacatcacaattaaaagaactagagaagcaagagcaaacacattcaaaagctagcagaaggcaagaaataactaagatcagagcagaactgaaggagatagagacaaaaaaaaaaaaaaaaaaaaacccttgaaaaaatcaatgaatc

SEQ ID NO: 26250 - DNA, 2300 bp, Homo sapien
ggtgctgagataatttccaagaaattaccagttcctggttattctccttcctcctggctcccttcctaactccccctccatcaccagattacacaattccttgagcctatggtattttcccctggagcttgtgttcatttcctaactcaattaattccagattccctctctcaccttctattttccctcgttttcactagaaaacactatttgagtgactttcctggttagttgaattcttctcagctcctaaactttcttttctgtgtctgcaaaagcttgatggagataacacaactagagaattctccccacacactccagcacggatgaactcgtatttttacaccctccttagtatctgcagccaaagcaaagggaaaaccactcaggcattgtgggggaggtactctgagtgtctggaagatgccaggctgagaacagcagtcataaatgatatacccacaaaggaaaagtctctggtctccctgggtgagatggcctttctctggaaaggaggccacctataaccacttcctttgccctttgctgtgaccttgctgtccccgggcgctgtcagggattgtctgggaggaggtcggggggggtaggtcagtcacaggtggggacacatttgaacagacctagacaggggagccttatacagaggttctctgcttccttcccacctccttagggtatgaagctagattccctgatctgaatggattccatggagacagtcacctagacagacacctggtttcaggtgatccctttctggacaaggtcttttgttttcagcgcccccccaccctccgccccaacaatggcatctcctcctcagcccagccagcagccccaggctagcatctgggaagagtccagggaagcccaatgagggagagtgggctgtgtctgggatggccagggatcccctccaaatgggcacctgcggcaggtcgtgagtccagccatctctagggcagcccacaccttcagcaaggaggggcaggagacctagaatgggggaaatgggaggactaagattctaacgttggaggtagggcaggctggtgttacctgcacaaggccagaagcctcttcaggccgcctctccagggaccgtgccagctgtccccacttcgatcagccacagtattggacttggtccagcacgaacagaaagcgaagtgtgagcccaagacagaggggggagccggacacccttatggaactaacagcctctggggaggcctgttccagatcccgagtcgggcgcacagggggatccccgcaagggggcagagggaaacccgggaggcccgcgagaagaggcgaggccagaggctgggcgcgggcagccaagcgcactcgcggcgccccgactccaggtagcacgtagagaggaggctgaagagcccctcggttttccgaaagtttccagcgaatccttcttggtgaagatcggcctctgggaggcagcgtgtgtgcttcccgagagggggccccctgcgccgtccctcttcccctggcacagaagggttgaaggactgcacacagggatccctccccagcccagtctcctcccagcgcgccccctccccgccatgccggccagcgccgggctgtgtcccaggcactgccccccgccaaccctggcccgaccagcctcgccgctgcaggctgccgggagctgcgctagctcatgctcccagctcgctcggtgctccctgttcgctccggcccggccccggcccccatcgcgccgaccatggaataggcgggcggccccgcgaggcgctcctgcagccggcgaggccagagccagtccggggtggctttgccaaccggcggagttggccagcggcgggccctcctaccgtcggtccttccccgctcctcctcctctgccccctccgcccccgcctcccggccgcccccgccgcccccgccgcgccgccgccccaggccgagcgcgggcgcggagcgtgggagccatggcgcgcgaggaggagcgggaccccgagcgccgggaggcggcggcgcgggcgagcggcgaggaggaggaggagggaggggaggagggactgggcgatagcgacgaggagggcgacgacgaggagacgggcagcggcgaggaggaggaagaggaggcggaggcggcggccgggtgggagcgcagcgaggacgcgcggctgctgcgcgcagggctgcctcctgccgctgtccccgccgcggccgcccgcgacaggagcggccgccgcccgccgaggccgccgcccggccgcccgaggatg

SEQ ID NO: 26251 - DNA, 2300 bp, Homo sapien
tactggacagtgctactcgagattgtgcagacctcagattttctcttcaattattaatgggtattgagcactgcacgggtgttgggtggccctatgttacttctgacaagccctctgaccttgggcggttgtttatcccctctggttcttgtttttttcatgtaaaagatgacaatgttggccctatcatgctttgtagactggtcatgtccagccctctgattttaaaccagcccactctgatgtcacagtttaaaccccaaacagtgggatcctgacactgttcatggccagtaccctgaacgcatgttttctgcttgctggtctgtgcctggactccagttcttgtttatggaccacaggcaccccttgaacctcccctcctgttgcttctctcatatagacttcccggtttccctcgtcaactgcagctcacatttaactgttaactgtgggcttcgggccagtcaatagctgacctgtaggcactcctggccatccccatagggcagtgccctgccagcctgactttggtcttgaaacacaggccaagcatcctcttcacttttcgaggccttaggcccagctaagccagacagagtgggatgatcctttatcaagggaaatccagtgatctcacagtgaagcccacaccaaaggccatcattttaaatattttccttcttccaaagtttatttggaaaaagcactctgaggaaaagctcatttccttaaaatatcaaggaaccaaaaaccaaaagatgatatatttttctggagacacactgcaaagtgtataaataaaattctgtaaagtgcacaaataaatattacaaagaattcatttctgctacagttgtctaccatcttcaatattacatttagctaacttaattttccatggatcaaattattcaaagttaaatttctcttaataggtcatctgagtaaacaatttcaagtgttacttgccaaaagaaaaaaaaaaaaatgtttccaggcttcagatgaagtcggcagtgtcaggctaagaaaacaaccttaaaaattcacagagagctggaacaattgcaaagaaaagttggagcccggaggtcagtcagtcttgttcatgcagttctgaaggtagaaaaaaaaaaaaaaatcacaaatttctaccaaaactaggtcttcaaggggcaaaggaaaaatgcctttttttttttttttttttttttttgagacagggtctcattctgtcacccaggctggagtgcagtggagtgatctcagctcactgcaacctccatctcccaggctcagttgatccttccacctcagccccccaagtagctgggaccacagactcacaccaccacgactggctaacttttgtacattttatagagatggggtttcaccatgttgcccaggctggtcccgaactcctggcctcaagtaatccacccgccttgggctcccaaagtgctgggattataggcgtgagtcaccgcgcccagtgccatttttttgaaagcagaaaatgtataaagtaatatatccttaaagtagcagctgtcatcagaagacagcaccctgggctttctctggcaccaaaactgggcactctgtgctcctggttttcagacagagagaaagggagaaggcagggcagagggaaggggaggaggggagagggagtagaggaaggcttgaggtatggcatggaattctgcaaacacagcagttattaagggaaatgggagagtgtcaaggggaagaagttttcttgaatttctattcttgaaatttcttggaataaatggatgtgtgcaagggaagggataaatgtagttgaagatctattttgtaggtgaggaaatggtaatctgagaggcaaaccagaatcatgccccaacagggaatataaccagaatagaggtaactctgtctccagtctctgaatctacaggcttcctctaatagcatctaaagccagggcttctgacagcacagtctgagaagccccatgacatcacaagtggcagctgggtgtactttatgacaaatgccaaattaactcctgcctgtgaccttgccaccataactcagacagccaggacacacactgcaccccaaacactcaagtccctgtgtaaatcttcactcctccaagcacagagggaagcctgctccgtaggctctgttaagtgtactgctgccgctgacatcatcataaataggaagggagagagtccaggaaccacagggctcacttcctagcctctctatttaagattttcgagggcagatggcactat

SEQ ID NO: 26252 - DNA, 2300 bp, Homo sapien
tatttaataccataatataaaccatgcaacaggctccctttactctgtgtgatttatgaagctcaccctgaatacagtggggcagtacattgaatccaagacctacctattagtaaagattagaagacattgtgaagtgatgtcaacgtagcttaatgtttattgggatgattttgagtagtcctatctgtgtgtgaagcaggggttcagaggaaaatctggattcaggaggaaaatctggattaagaaggaaagtgggatttaaatgattcctgaaaaatgatgatgatcactaacattgacggtggtggcagttcacattgtttgagcatttactaaataatctgcaatggaccaatgctttctatggattattctacttaatcttttttttttttttttttttgagatggagccttgctctgttgcccaggttggcggtgtctcagctcactgcaacctccgcctgccaggttcacaccattctcctgcctcagcctcctgagtagctgggactacaggcacctgccaccacgcccggctaattttttgtattttcagtagagatggggtttcactgtgttagccaggatggccttgatctcctgacctcgtgatctgcctgccttggcctcccgaagtgctgggattacaggtgtgagccaccacgcccggcctattctacttaatctttagagcaatgctttgaaatataataaatgctattacaattaccctatttttttatataagaacccaggttaagtaatttacctgagcaactcatctgggactgaagcccaagtatgttgcatcccagcccaagagctgaatcttctcaaggaagaggagagggacagggaggatattctacaccagaaagctaacatggacccaggcatgaaggaagggatgtgtgtgcatctgtgtgcgagatttccaggggaggagatggagggaaagtcagagtccagttatagagcctgacagaggagccaagactatgaagtattaggaaagcagtgggaaaaaaagaatgagataaccttcttataccgatgttgggagtttgataggacatcctgaggatagaacaagcaggagagtggagcacatgagaaacatatttagaaaagaaacacatatacgtgtgtgtgtgcacgtgtgtgcatgtgtgtttgtgtgtgtgcgtgtaataggatattggaatgcacagaagcaatctggaaagatataatttaaattataaaaatgcccacttctgccaagaatataggagttaatggtgatggtcaaagggaacttgagctttgatctaatatttgcgttttcaagcaaggtgactgcattcatgcatgtacttaggtaattttgaaaaggctaggatactgattcaaacagttaaaaatgaaatataggataatatagtaatttttttttttttgaaatggagtctcactctgtcacccaggctgaagtgcagcagcataatctctgctaactgcaacttcggcctcctaggctcaagcaatcctcccacctcagcctccccagtaggtgggaccataggcgtgtgtcgctatgcctggctaattttttgtatttttggtagagacgggatttcaccatgttgcccaggctggtctcaaactcctgagcccaagcgatccacccacctctgccttccaaagtgctgggattatagaggccagtcactgtgcctggagatataggaatttcttattctgattagtcccatctccagaatcctagactagaagatttcgggatcctttttgtaggaagcgatgtgatgcaagggataagggaaggaaatgaattgtcacttaactggtggggaagacaggatgcttgttaattagttccattcatgaaagaccatttagagtttttaaaatctgagcattggcacagggatttagagggcattctggtaaagaaatctccctcctcggtttcctggtccagaggtggaggaccaggaatgggaaggaaaggccatcactgtgttctcatttcgcaatgtctcctcccagagccagactaggaagcaagtcctctgtgtggttgttcattgtgtttttaatatacatacaaaaccctgaatggtcaatttttgtgttgtagatggagacgagagatctggacttctgaacatctaccggaaaagataaaatgtgcaagcccttcagaacgctggggaggttgggctgaactgcagtgggagaggagaagagatgctggcgtgaaggggtacgtagcagcgagaccataaaccc

SEQ ID NO: 26253 - DNA, 2300 bp, Homo sapien
ctcaaaaacaataattaaaattaaaattaaaacactgttgttgagtaagggggctgggaatacagttctttccatatgacttctttctttctcgtaaattagcttgtcttttcaatggaaagttttcatgaccttcaaacttaaaatttttttttaaaatgactgttgggtgagggaaaacctgtgtcaaacagtgatccaagacactttaaaaatttctttcaattcacatagttcgaattgtcaagtctgatcctggaataacatttgtctgtccaacgtgtaaaatattgagtaatacaaagataattatggaaatattcagagaacttccctggacccagacacagagccacctccatttcctcctacctctcttagaaaaaaacaaaaagcattaaaaggagagatgacctgtctccctgggagctggttaagcgaccaggcaaaaaaagtgagatgcatttcttagattcggacttgacctgacaggtcctctagggtgagtcactttttcctatttcagtcaatttggctgtaaaataattacaataacgaggtcttgtttactgagactgaagtccgtgctgcccggcctcatttaacggctagaaagaaaaactgaaggttgtgattagaaagcttctgtagccaacctcatgcagcacggagatgagaatccaggacttgagtacactaagtgtctattaagtcagaactgtgagtagtggaatccaatataattgcttttgctgcttcttttgtgggtttgcacttgtgacctaaagtaaataaaatagcataaaataggaagctggggtgggggcaagaggagaagagattgggccgatgttggtcaaaggatacaaactttcagttcagaaggaggaaaaagtccaagagccgtattgtgcaacacggtgactgtagttaataccaatgtattgcgtatttgaaaattgcggccgggagcggtggctcatgcctgtaatcccagcactttgggaggccgaggcaggtggatcacttgaggtcaggagttcaagaccagcctggccaacatggtaaaaccccacatctaccaaaaaatacaaaaattagccaggcatgatggtgcacgcctgtaatcctggctacttgcaggctgaggcaggagaatcacttgaaccctggaggcggaagctaaagtgagctgagatggtgccactgcactgcagcctgggtgacaaagtaagaccctgtctcgaaaaagaaatacaagcaaacaaacaaaaaaaaaaacgaaaagaaaagaaaattttcgaagacaggagattgtaagtgcacaagtgcactcagaacaaaaaaaagcatatgaggtaatgcatatgttaattagcttcacttagccattctgcaatatgtatacctatatatatcaagatgtcatgttgtataccataaatatatacaatttttactggtcaattaataaaataaaatccttcccccaaaataggaaggttacgttggactaaagaaattaagagaagaggagaggagcggaggggatgggaagggtggggaagggacagtagaggtgggcggggaataggcgacgggggagggcagaggagggaacaggcctgtccttaatccttctcaagctctgtatcttgccaagatctggcctgtggcccggcgcagcaaaagctgggaaaatgccagtgactcaacccagttccattgatcagtgaaatggaaatcggggactctgtgtttcaaccccagtcagccagcccacagccagggtccaggtggcagcctcagctcctggcctcagtggctgtcagtagaatgggttggggagccagcctccagcggtctcacatagcaggcaggcagtgcagcctggagcccagccaggggacgcaggaatcctttctgctttttaaggacagactttgctttaccacagcagtcgctcttggggccacacggaaagccaccactgagtttactataaagtgacagaggctggtgtctctaggagaatgaggaatagtcacttcctgcctttgtccattagcgccgaccaacgcgaccagctccgtttacattctttcagtggtgttgttgaaagggcttggcagctcccaaatgtttgcagtgtccttagtcctatgagggctgccttcttcttcttcttcttctttttttttttttttttttgctagcttttagctagtatctggaaacatctactggacatgttggactcattttctcaagaatccactttacccttcagggaagccagg

SEQ ID NO: 26254 - DNA, 2300 bp, Homo sapien
catttccctcttggagcagcttatgaaggagagatgccacctgcatcttttgaaatgtgatggatctgcctgccctgagcagaattcaaactggatggtgaattgaggactgctggaggttaaagggtacacatgaagttttcaggcagctaattaaaataaactagtacatttctggaacctaaactgctccaatgctgtaggcaaaattccctgtctgccctggctcatcagaaagagtttgtatatggaaaacttcagaacagaacaaaggaacttaagtctggatgaggaatgaagtcttggctctcgtttagcaattcctgaactgccaggtgacatcaaatcccctgccgaagaaatgtctgaaataaaaagaattccagacattaggcctggtttaaaacagggtatgcttttttatttgtgtgcttctgggtctaaacaggtcatggtttgctccccaaggtgacagtgtggctcccattccgtccctagttctgagcatggcactgtgatttctttctggagttgctccaacctgtggccttttgctaatgagtgatgaaccccagaacctgaacttctagagtcagcaaaattgcacactgccttctcaggaggtttctggaacattggccttcatcccagcaggatcacaagtggaaagaaacacagggaagaccccgtcaaatctttaaagtggccacagcacggagcactgacacaaagagacgatggttctggaaggaggggtgggatgctctgtgtcactattgttttctagatgggattccgtgcacagatcatcacaactcactgtgagtgcaagcaggggtgtaaatcgtggggccgaaaaaaacctttgtgcaaagatccttgctcactcactgatatgcacttctcagctatagattcatgcttttccacttgttgaaacgtccctaaatatcgccctcaatgtcctgtttgtgtcgctggctctctgccactcagctaataatgaaacagcctcagtgaacctgcagcagcagctgccttagcttcagtgcctacccacccctgcagctgaaccactttgaatattccttgatggtgcaagagacagtctcactattcccttcactggccttcctctgtgtccgtcacggttggcatgagctacctcctgtgcatgttatggcgagaagggatgaatgaggaaagacagggtggttttatacttgatcctgggacagtcactgggtaaggaagggtttggggttgctcccccaggcccccctcaatgcgtgaaggcctgagccaggtcagctggcagaggtgtgtgtatgtttaacttagaactgaatgttgaaggctttgtgacccaaagggaagaattattgggatctgatgccctagcaggggaaattccaagcccaaaaagctacagttagaattcagaactgtgttgttaccctgcctctgagttttcctctacgttcagctccccttttgtggatgatcgtgaagctgtttacatgttgtcctcttccgtgaactgatccctgtaaacagtgacaggattttatccaaatatttctgatttctaagggaaaaatagagcaatttcttcccagtgcccttctgttgaccttgcctgggggagaggccagcagagctaaggatgacctcacccccttccagcaggatttcctgggatgtacagaacctccttcttcagctgtccctctgtgatcagccacattcaatctataaacttccagtgcagatgatggggacatctaatattgggtctgttcacatttcagcaggaggtgaaacacacaaagtaatcattaggcttcctgaagtcccaaggaccttctacgtcagtggcagaggtgggaggtgggctggcgaggtggggcagtctaggaactgcgctggtggggacaggaaattgggctgaagggagatgtaaggccttggtgggaaataaatggcactgtgttgttgacggaaaaagatcttggcaggactgttgttgtgagtgttctgtggcttagaaaggaatttcctacaggctggactaaccattaaaaatgtctctaccttcaggagtccccggcgtgcagtggagcctcgctgggggaaatgacagcttggaccatgggcgcccgcggtctggacaagcgaggaagtttctttaaggtaaaaggaagccttgattgggatctcaactcgtcggcttgctgcctgagcctgggagctgcggtgctccatggagctgctgagggaagtctgctctctgagccagc

SEQ ID NO: 26255 - DNA, 2300 bp, Homo sapien
gttcctaaattcccccgttctttctagttccaccactaccacctcggtccaagctgcatcatctcttgcctagaccactgtagttgctcctaactggtcttcctgtttctcatcttgccctttccaaccacctcagtgccaaggtgatcggtttagaccataaaacagatgtaaaatggctttctcctacttaaggccttccaatggttcttatcatggaagactcaaggtggtgaataccatgatctacaaagttggcaagatctgatccctgcctgcctctcctcctgcacaccttcctggcctccagaactttctctccatgtggagggctcttcctttgatcttttcatggcattcttgtcattcaaggctctatcgcttaaaaaagacttgccctgaccaacccgccctgatctgtttggcccctttgttgctcccacagcattaccttcacctgtcttcattctggaactgctcagtgcttggttctggtgtctttctgccccaccagaatctcatctccatgagaactgagatcttctcagctccactccccatttgcagtacctggcatgaagcgggagcccataaaagtttgtcgaaatagtgagtgaatagatggggtcacattttagaacaagctttaagcgcaagtgaagtttccctcccagagtctgggtgggataaaagctacctgagacaagacaacatttctctttagtgagaacagtgctcaaatttcttagcctcaggaccccttgatgctctttaaaattattattgttgttgttatttttttgagatggagcctcactctgtcgcccaggctggagtgcagtggcatgatcttggctcactgcaacctccatctcctgggttcaagtgattctcctacctcagcctctggagtagctgggactacaggcacgcaccaccacgcctggctaatttttttgtatttatgtacagatggggttttaccatgttggccaggctggtcttgaactcctgacctcaagtgatctgcctgcctcggcctcccaaagtgctgggattacaggcaagagccgctatgcctggccaatgctcttaaaaattattgaggatcccaaagaacttatgtttgtatggatcatatctataaatagttgccatcttagaaattaaaatgaaggaatttaataacgcttattttaaaacaataatggacctgttacctgttaatgtaaataacgtttgtatggaaaattactatgttttcaaaaaatagtgagcagagtggcacccttgagaacagccactgtacacttacagtgcctagtacgcgccaggaaagactctgttgaatgagtgaataggagggtgaaagattttagaccagcctgaagggtcagatgcaggtgcatggataggtggggatctgagatggggccgccttttcccctagatggccctggggcccactcccctcctccccactcatccaccccagcctcactcagtcctttctcttccctttccccaacaatcttctctccacagcagtgcaaagaatagaacaagaaatcattttgatgtcgtcagaaatcaatatgtaagctggatatatcttttaaataaactcatttctataacaaaataatcattgtatgaatttcagtccttcaaagggggttcctttggagggtttcccttgccaaatgaatattgaggcccggttttgccaggatgtatttattcccgtctatattcatgttgagaaagctaactgggtgttatattatcttccttattacaatactgaaacctaacaaactgggtgtcatattcttttccttattacaataccgaaacctaagttcttcccctttctaaggagaagctgcctcctccccctttattttttcctctggctagaggaaattcacagagccaagattaaaaaaaaaaaaaaagaaatagaaaaagatggtcatctctgttcctattgaaaagcctgagttccccgggcgctgtgggcatgccacgcctctccacttcctgacgtcatactatttttgtctttgaatagctcattgacacaattgcctcggagatcggagaactgaaacaggagatggtgcggacagatgtcaacctggaaaatggcctggaacccgctgaaacccacaggtgaccagagacacggttaggtgatgggtgcgagaaagggatcgagtgaaccctggcactgccaagggctgacttgcagtcactcctcagaagtctgggagctgggagtgtggtagcagctctag

SEQ ID NO: 26256 - DNA, 2300 bp, Homo sapien
aaggatgacattatcttctgggtaacctgtgtgccactttttcactcagctatttaatcaatatttgctaggcacttactggccacccttcgagatgctaattcataggaggcaatcagcaatggaaactgataacagtttaaaaataagtagacaaacaggagagaagggagaaccagctggtgaatatccaggatattctctgtactgccctgcacgttcccctgaccccatgtgttggaatggccacgtagctataggatatttctgatctgtgcctcaaaatcggaataataattcgtatcggtgcttgcaaactgctggcctacagcatccagtttctgcagggttccaatgctacctttgtgttaaacccacagtgtttttttctaaaaatcaaaatcatgtttattccaccattacctagatacaaacataaagtagctataaacttctaatgtttataataccaatgaatcagagccaaaaatattataaaaaccttcactacttcataaggaacaaaattcaaatcaacattagttcatgtcacacacaaaaaattatgaaacactttgaaatggccagaaaaagattactgtttagtacacgtttccaggttttctctgctttttattgtctttgacaatacaaaattttacaaatttgtaagctgaggaaaattgatagtaatgaaaatttttcttgtccataaaatacaaatgcatagtgttatacagtgcccaggagagacagtgattacagctctgtggatattgaccagtttaacactcatgtgtaaatacatttcagcattcctgcttgctttatgtattttatctctctttatcttatctttttgagacagggtcttggtgtgtcacccaggctggagtgcagtggtgcaatcatgtctcagagcaacctctacctcccgggctcaaatgatcctcccacctcagcctcccaagtagctgggattacaggtgtgagccactgtgtctggtctgaataaaggaatttttaacttttaattttaactactttaaatttaaaaactgatgtttggttcagcgatttgaaaacagtatatttggaaccgcttggatatgagaatctgctttttaaccatacattgatgaaatctaaatagagaacaagcatttccgatgacagctgctctctcagattgaaatgcactgcaaatgtaaaatacacaccggatttcaaagtctttgcaaaaaagaatgtaacatatcacattcctttttttattgattgattacatgttgagtattgattggttacatgttgaaatgatatttcgggtataataaagtggggtcagggaaaaatatttttcccaaataggaaaaataaatgggtaaaataaagcgtactatcaaaatcaattttacatttcgttttgcttttatttatttattatttatttttgagaccaagtctagctctgtcgcccaggctggagtgcagtggcgagatctcggctcactgcaacctccgcctcctgggttcaagcgattctcctgcctcagcctccaagtagctgggattagaggcgcgtgccaccacgcccagctaatttttatttctttccttttttttttttttttagtagagagggggtttcgccatgttggccaggttggtctcgaactgctgaactcaagtgatctgcccgccttggcctcccagtgttgggattacaggcgtgagccaccgcgcccggccttctttttgtttttaaacgtggtattgacattttaagatgacatctgcaactcgcaacactgggacaagggattctgggtcataaattctcccattcctcatttactctgcagcaccgggtggctgcgaactccgctcttctgcttgggtttccgcatcaccagcagcttctttccttcccaggtgtcgccgcctgctttctgcagccgctgcctgggaggggttccgaggttctgggcagccacagccccggaggccttacaggagcgacctggcaattcccgccgccggccgccagaggaagctgctttgctgctgtcgttgcccagcaactcgtagcccggaagcagtaccccgtctcgctcggttccgcggcggccacgctccgggagacttccggcagggcgggcgcggggtcttggcgaacggtcttcggaagcggcggcggcgcgatgaccacgctacgggcctttacctgcgacgacctgttccgcttcaacaacatgtgagtgacacgcgcctagggccagccgctcttggccgggcct

SEQ ID NO: 26257 - DNA, 2300 bp, Homo sapien
tacacgtttccaggttttctctgctttttattgtctttgacaatacaaaattttacaaatttgtaagctgaggaaaattgatagtaatgaaaatttttcttgtccataaaatacaaatgcatagtgttatacagtgcccaggagagacagtgattacagctctgtggatattgaccagtttaacactcatgtgtaaatacatttcagcattcctgcttgctttatgtattttatctctctttatcttatctttttgagacagggtcttggtgtgtcacccaggctggagtgcagtggtgcaatcatgtctcagagcaacctctacctcccgggctcaaatgatcctcccacctcagcctcccaagtagctgggattacaggtgtgagccactgtgtctggtctgaataaaggaatttttaacttttaattttaactactttaaatttaaaaactgatgtttggttcagcgatttgaaaacagtatatttggaaccgcttggatatgagaatctgctttttaaccatacattgatgaaatctaaatagagaacaagcatttccgatgacagctgctctctcagattgaaatgcactgcaaatgtaaaatacacaccggatttcaaagtctttgcaaaaaagaatgtaacatatcacattcctttttttattgattgattacatgttgagtattgattggttacatgttgaaatgatatttcgggtataataaagtggggtcagggaaaaatatttttcccaaataggaaaaataaatgggtaaaataaagcgtactatcaaaatcaattttacatttcgttttgcttttatttatttattatttatttttgagaccaagtctagctctgtcgcccaggctggagtgcagtggcgagatctcggctcactgcaacctccgcctcctgggttcaagcgattctcctgcctcagcctccaagtagctgggattagaggcgcgtgccaccacgcccagctaatttttatttctttccttttttttttttttttagtagagagggggtttcgccatgttggccaggttggtctcgaactgctgaactcaagtgatctgcccgccttggcctcccagtgttgggattacaggcgtgagccaccgcgcccggccttctttttgtttttaaacgtggtattgacattttaagatgacatctgcaactcgcaacactgggacaagggattctgggtcataaattctcccattcctcatttactctgcagcaccgggtggctgcgaactccgctcttctgcttgggtttccgcatcaccagcagcttctttccttcccaggtgtcgccgcctgctttctgcagccgctgcctgggaggggttccgaggttctgggcagccacagccccggaggccttacaggagcgacctggcaattcccgccgccggccgccagaggaagctgctttgctgctgtcgttgcccagcaactcgtagcccggaagcagtaccccgtctcgctcggttccgcggcggccacgctccgggagacttccggcagggcgggcgcggggtcttggcgaacggtcttcggaagcggcggcggcgcgatgaccacgctacgggcctttacctgcgacgacctgttccgcttcaacaacatgtgagtgacacgcgcctagggccagccgctcttggccgggcctcgcttcccggccccgccagctccggccccagccgcgccttcccggccggaccccaagcccggacggggacccgcgagaaccaccccccgccggccaacgtgggcgcctccctggggccacagggtccagggagaggtgggcctggagtcgacgcacgccggccttggcgaccttggccgaggtgctcaaactttgtctctggaccctgcgagctggcaggttctggggcagcgctcgggcctccgctcgtggtcgctgtcaggaggcgctggggtgatggggcgagctggagacgcggcctggagcccacgacctgggcttctcgccctgccctactgcttgctggttcgtggccgggccgcgcctcttctgggcagagggcaccgccgacggccaggccgcagagggggcttgcgaggatcggaagctggtcagcagctgttgggatgtgtacatcgtgaagcccacctggtggccgtggttaaattgtatccaaatgaaatgacactgatcactgcgtcccctgcagcagatgctgtctcagtcatggttagtgtttgcaagtttagttactgtagctgcgcaccccggtgtacacacctttcc

SEQ ID NO: 26258 - DNA, 2300 bp, Homo sapien
cgttcatactttagatcataaatcagggtttgcaagtaacaacttgtgaaacatgctgttttgggggtgtacatttttaccaatatcagtaaaattagtaactagtaaaatgagtgttagcagcagacttcaatattttgtgaaaatttcttatcctaatacaggatcctgagaggacaagacaggtgtatcaagcctctttggaactaattcctcacaaaaaggtatgtttgctctaaagtgttccatttcaaacaggtcagaatcctcttctgttacttgtgaagtaattcagtgaaataatattgattgataaaatgcttccctgtcccaccatggacaacataaataagactgagatatgctccttgcctctgaaaacagctcacagactaggttggaggacaacctgcattgacaaacaaataatataaattcagagaaggctaggtaatgtgaatagtctgagtggaaggagaaagacatccatgcagagagcacacaacgtgtgcgggggacacacaggcgggtttgttggtaacagtgagtgtgtgcatgcacagatgaatgtgccccttgtgtagatggttgagatgttacctccgccttgtttcccagcacgagaaacaaaacgtgtttccttctgtagaagtgttgactgagttacttttcagaatagaggtaggacattctgcccatatacaagcatgcctacaaaacaaagtctgttctgagcagaggctaccgtgccatacagtacagtacagtatctggatcatggttctcaggagaggttaccatgccatgcagtacaatatagtatctggatcatggtatgtgggtttctaacttttgtgaaatgaatgtggtctttgcttgtaaataagcagagtacattcctcttactctgaagttttagagaaatcgaattaccaatggctttggttaatttaaattaattttaattcaatttaatttggatgaggcttttaagctagatatttttgtgcttttgttttctagttcacatttgccaaaatgtggatactgtatgcacagtttgaaatacgacagaagaatctgtcattagccagaagagcattggtaagtaaagaaaggatcaagatgtctcatcaagttctatgagaaagaaattaaaatcttggtgcttggaagttgtacagttcctactttaaagagtgacagaagtattatacctttatagcctgggacatgttagaaaacatgcgtcctctgtaaaaacactgactaataatgcgtaaattattcttattacctggggcaaattaacattctgtttcaatattggaaacttctatagctaccagttactaaatctttccacagactggaattagtaatctgatcctgtgcaaactttttggtgtgttaaatgcacttttaattgttccactttttttttcttttttttttttttgtttgtttggtttttttttgagacagggtctcgctctgttccccaagctggaatgcagtagcgcgatcttggctcactgcaacctctgcctcctgggcggaaatgatcctcccatgttggcctctcagaatgctgggattacaggcatgagccaccatgccttgtcctttttatttataggaggttttatgcatttgacatccctattccctaggagatcctgagaaactttcaaatcttattttatttagttgcccaaacaattctggaacactgcctcttgctgagtgaattagaggagtttccttcagccttttgtcaagaaccagtaaacattgtgataccacagagggaaagaatggtaggccatgttgactttgcaagattcttcctcagcagagaacagcctctagggcagtgcaataactgcacagattaaatccactacagtatcacagtggtctggttattttattttccagggaacttccataggcaaatgtccaaagaacaaattatttaaagtttacatagaattggagctacagcttcgagaatttgacagatgccggaagctttatgaaaagttcctggaatttggacctgaaaattgtacctcatggattaaattcgctgaattagagacaatccttggtgatattgacagagcacgggcaatctatgaattagccatcagtcagccacgtttagacatgccagaggtgagcatctcaagtcaaatataattttgtttgagatacgtgtttagtcttactttagatgaccatctaaatgtgggtgtattttagagtataacgatgatctaactaacttagtctct

SEQ ID NO: 26259 - DNA, 2300 bp, Homo sapien
gcctgtaatcccagctattcgggaggctgagacatgagaatcacagcaactcgggaggcagaggctgcagtgagccgagatcgtgccactgcactccagcctgggcgacagagcaagactttgtctcaaaaaaaaaaaaagaaagaaagaaagaaaggaaaaggaattgaggtctgcaaaaggaccatgagaagactttgggatctgatttgacctcttcactctagaatgtgggactgttttaaagcactaatgctgttatatatgaaattctgagaattaccagaggacttaaaggtaatagtcaaaaacattttttattagggacaagcatagaccattttaaagtatcagttagttgactgtaaccttctgtagtgggtttcttattcctcaaggattccaggatgtaatttctcttaaatatgaacaaaatgaataaccattttagtacaagacttaaaatagaccaagggtgctgtcatttttagtcatttgtcttttgacttgaccctttttgccttcttccagacttttgaagataatataagaaaaaacaggactgtgattagtaactggataaaatacgcacaatgggaagaaagcctaaaggagattcaaaggtaaaattactgagagtgtagttttgtatataatgattcatagattaacagataccaaaaagaaaagaagaaaaagttaaagcacaggtaaaagattgtgcctcgggtagaaattttcaactttggttccatggaaccctagggttcccttgagggcctcaggagtactggggtagaatagtcctggggagggtggcagaagaggctttagagatagatcttgtcagttgtagctaaagaagcacaatttcatttgctttgtatatattgagatttttacaaatttcagctaaacaatggccaaaaaaaataaaaccaatggccaaaaaaaataaaaattgcaatctggcccttcctgtggtctagctttctgcattctccccgcatacctccttcccccactgtgcctgtgtatgtgccactccctgaatatatcatgtctccttatcgtgaggcttgactgttctccttgcctggaatgagcaccccctcctcaccaaacttagtttcctggtaaatcggaacgttcctcaagttctcatttctacaattacctactacttagccttttccaccaaacattttcatttcttcctctctgtttcccgtgcagatcttgactataacataaatcacattgcattataattgcatgcatgtctttttataagactttgtaaggtacttgagagcattatatcttttcatttttttatgcccagaacttggctcatggtagacacctaataaaacatcagtgcattccagatagtttgaaataactgctacatgtgttgaatgctctatttttgatgccctgcaaatcttgcttcttaagggctcgatccatatacgagcgtgctttagatgtagactaccgaaatattacactctggctgaaatacgcagaaatggaaatgaagaatcgccaagtcaaccatgctcgaaatatctgggaccgggccataacaacgctgcctcgagttaatcagttctggtaagtttctgatctaacaaaacagccttttatagactagcaaagttccacatcttctgtatttattttatttacatgatgatagtttaatttgatatcctactttttcttcagacataaatgctgttatgtcccatagtctattaagtcataatcgtaatgttctatagctatgtaatcaaaactaaaattttgattgcaatcttttattcataagcttcttgttgaactaggcaacttttaagaaaaaaaaatctttttttccaatggttcatcctttttcagatttacatacaaatgacaaaacatgtttgatttaacctttaagaaaggtaaaatcttcaatcttcttcccattcaacaatggaagaactaaaccacagcagatattttcgggtgattttgttacaggtacaagtacacgtacatggaggaaatgttgggaaacgttgccggtgcccggcaggtgtttgagcgctggatggagtggcagcctgaggagcaagcctggcactcctacatcaactttgagctgagatacaaagaggtggatcgggcccgcaccatttatgagcgatatatcctttggacgagatctgtatggtgccatgattgtcctggatgctgctgctgctcctgtagagatgtctcatgatcaggacacacagtcattaatgtca

SEQ ID NO: 26260 - DNA, 2300 bp, Homo sapien
gaaagagaacttgagcttcttccacctccacctcaacagaagatcacagatgaagaagaattaaatgattataaactaaggaaaaggaaggtcagtcagtgtggtatctttcagtccactaattgttaagactgtatcggtcagtttgaaaagctcctcattggttggattctgtagggcaagatgaggttaagtgtttccagacgcatgaataatgtacttctggttaccagataacagcatttttctgaactatataaaatatgccatgagttgtctggttaaagtgtaaagaaattgaatctgcataatttttgatgctgaatcaaagtgagcggaagtttagcagatggaacaactgacaacaagaaggagggtatgcttagtaaggctgcactgtgtacttctgtctataccaccttctgtgttaagaattgagatctggctgggcacagtggctcgcgcctgtaatcccaacactttgggaggccgaggcgggcagatcacctgaggtcaggagtttgagaccagcctagccaacatggtgaaaccccatctctactaaaatacaaaaattagccaggcgtggtggcaggtgcctgtaatcccagctattcgggaggctgagacatgagaatcacagcaactcgggaggcagaggctgcagtgagccgagatcgtgccactgcactccagcctgggcgacagagcaagactttgtctcaaaaaaaaaaaaagaaagaaagaaagaaaggaaaaggaattgaggtctgcaaaaggaccatgagaagactttgggatctgatttgacctcttcactctagaatgtgggactgttttaaagcactaatgctgttatatatgaaattctgagaattaccagaggacttaaaggtaatagtcaaaaacattttttattagggacaagcatagaccattttaaagtatcagttagttgactgtaaccttctgtagtgggtttcttattcctcaaggattccaggatgtaatttctcttaaatatgaacaaaatgaataaccattttagtacaagacttaaaatagaccaagggtgctgtcatttttagtcatttgtcttttgacttgaccctttttgccttcttccagacttttgaagataatataagaaaaaacaggactgtgattagtaactggataaaatacgcacaatgggaagaaagcctaaaggagattcaaaggtaaaattactgagagtgtagttttgtatataatgattcatagattaacagataccaaaaagaaaagaagaaaaagttaaagcacaggtaaaagattgtgcctcgggtagaaattttcaactttggttccatggaaccctagggttcccttgagggcctcaggagtactggggtagaatagtcctggggagggtggcagaagaggctttagagatagatcttgtcagttgtagctaaagaagcacaatttcatttgctttgtatatattgagatttttacaaatttcagctaaacaatggccaaaaaaaataaaaccaatggccaaaaaaaataaaaattgcaatctggcccttcctgtggtctagctttctgcattctccccgcatacctccttcccccactgtgcctgtgtatgtgccactccctgaatatatcatgtctccttatcgtgaggcttgactgttctccttgcctggaatgagcaccccctcctcaccaaacttagtttcctggtaaatcggaacgttcctcaagttctcatttctacaattacctactacttagccttttccaccaaacattttcatttcttcctctctgtttcccgtgcagatcttgactataacataaatcacattgcattataattgcatgcatgtctttttataagactttgtaaggtacttgagagcattatatcttttcatttttttatgcccagaacttggctcatggtagacacctaataaaacatcagtgcattccagatagtttgaaataactgctacatgtgttgaatgctctatttttgatgccctgcaaatcttgcttcttaagggctcgatccatatacgagcgtgctttagatgtagactaccgaaatattacactctggctgaaatacgcagaaatggaaatgaagaatcgccaagtcaaccatgctcgaaatatctgggaccgggccataacaacgctgcctcgagttaatcagttctggtaagtttctgatctaacaaaacagccttttatagactagcaaagttccacatcttctgtatttattttatttacatgatgat

SEQ ID NO: 26261 - DNA, 2300 bp, Homo sapien
gttacccacctcatccgcagctccaggacgccgcactccacgcgctgccgcaaggaggacgcgcagcctggtcaccatggaaacggtgccgcctccgtcacggctcaagcgagaggtcaaaggtcagtcctgcaagttccgcttccggttccgagatcctgtttgttttctgaaagctttgtggtttcggtgagctctcagagccgatttctagcgtccgtgccggggacaggtgtccagaggtcgactgctgcagacatggcggcctccaccgcggccgggaagcagcggattcccaaagtggccaaggtaggcgatcgcgaggggccttgtaggaggtggcctaggaaaggggcatccctcagccctgagggtgcccgggttgggagagagtgttcccgccggggagaaggctcaccctgagagatggagaggaagggcagctggtggtggggcgcgggctcttgtcatcgcggagcacgacccgcgttggcgtggccttcgttctggggtggttttgctggggagtggagtggggtggttcggtgaagatttactgagccaggcactgcactgggcgctgggaagctacgctcgtacgctggccacaagcagtactcaaaacacgagtttctgtataaagacgaccttgctagatgttaccgagaggcaaagtagaatatgccatgggcgtgaataagggggtcgtatgaaggggtcctgaaagtaaattttgctgaggaaatgacctttaagctgagacttgaaggctgaataggagttagcccagctgacagcggagggcgagagtagacggtaggagtagtatagtatcataagttaattaaacagtagacttactatctggtatttcctttgatagctaatacttaccaagtgcttaatatgtggcagactttgaagcctttacagataccctccctccagtctttcttgagcccggatgactctcttgaactggacctttacataactatttgtctgactcgcaggagtaatgcatatagagcaagtaacactgtgtctggcacttagtgcttattaaatatgagctatcaccattatcatcattactccacatgtggcattaagtaacattttttataattcagctacataaacttttattgggcatcactggtccaatggaaatataatgcacaccacatatgaaattttaaattttctcatatctacattaaaaagtaaaaacaaagcaaaaaagtgaaattaattttgataatatatattttatttgagctaatgtatccaaaatattatcatttcaacatgtaatcggtataaaaaatgtaatgaggtagtttattcttttttatacttcatcttcaaaaccaatgtgtattttacacttacagtccacctcaatttgtactcaccacatgtgactcatagctactgtgttggacagcacagctctaagctacgttagactgtaagcttctaagacctcaagaagcttacagtctaatgatgagaacttactgaaattgcctttgacttgaagtgccatgtaaaaccaaacccagttatacaccggggcattaaataagttgaagaattctgtaaatgcaggttgtaatgctgttaataagatgtgctacacattttgataaaacaaaacctctggtcagaattttacctagacggcctcaaagtttattattatactcatctaaaagggaaaacttgctattatttttgccacctttttctcttgagacttttacctatggctttgcagtagatactatgaataagagagaaaacggtattttttttttcttttcagtctcatggaggaatgggaacatgtcatacaaaaagggcatcttgtgataatactaacaaagttcatatcctaaaaaatgtatgtttgtttcttaagccttgtgtgaagagcaactactaaaaatagaaatgtcttctttcttaaaaggtgaaaaacaaagccccggctgaggtacagataactgctgaacaactcttaagagaggctaaagaaagagaacttgagcttcttccacctccacctcaacagaagatcacagatgaagaagaattaaatgattataaactaaggaaaaggaaggtcagtcagtgtggtatctttcagtccactaattgttaagactgtatcggtcagtttgaaaagctcctcattggttggattctgtagggcaagatgaggttaagtgtttccagacgcatgaataatgtacttctggttaccagataacagcatttttctgaactatata

SEQ ID NO: 26262 - DNA, 2300 bp, Homo sapien
gataccacactgactgaccttccttttccttagtttataatcatttaattcttcttcatctgtgatcttctgttgaggtggaggtggaagaagctcaagttctctttctttagcctctcttaagagttgttcagcagttatctgtacctcagccggggctttgtttttcaccttttaagaaagaagacatttctatttttagtagttgctcttcacacaaggcttaagaaacaaacatacattttttaggatatgaactttgttagtattatcacaagatgccctttttgtatgacatgttcccattcctccatgagactgaaaagaaaaaaaaaataccgttttctctcttattcatagtatctactgcaaagccataggtaaaagtctcaagagaaaaaggtggcaaaaataatagcaagttttcccttttagatgagtataataataaactttgaggccgtctaggtaaaattctgaccagaggttttgttttatcaaaatgtgtagcacatcttattaacagcattacaacctgcatttacagaattcttcaacttatttaatgccccggtgtataactgggtttggttttacatggcacttcaagtcaaaggcaatttcagtaagttctcatcattagactgtaagcttcttgaggtcttagaagcttacagtctaacgtagcttagagctgtgctgtccaacacagtagctatgagtcacatgtggtgagtacaaattgaggtggactgtaagtgtaaaatacacattggttttgaagatgaagtataaaaaagaataaactacctcattacattttttataccgattacatgttgaaatgataatattttggatacattagctcaaataaaatatatattatcaaaattaatttcacttttttgctttgtttttactttttaatgtagatatgagaaaatttaaaatttcatatgtggtgtgcattatatttccattggaccagtgatgcccaataaaagtttatgtagctgaattataaaaaatgttacttaatgccacatgtggagtaatgatgataatggtgatagctcatatttaataagcactaagtgccagacacagtgttacttgctctatatgcattactcctgcgagtcagacaaatagttatgtaaaggtccagttcaagagagtcatccgggctcaagaaagactggagggagggtatctgtaaaggcttcaaagtctgccacatattaagcacttggtaagtattagctatcaaaggaaataccagatagtaagtctactgtttaattaacttatgatactatactactcctaccgtctactctcgccctccgctgtcagctgggctaactcctattcagccttcaagtctcagcttaaaggtcatttcctcagcaaaatttactttcaggaccccttcatacgacccccttattcacgcccatggcatattctactttgcctctcggtaacatctagcaaggtcgtctttatacagaaactcgtgttttgagtactgcttgtggccagcgtacgagcgtagcttcccagcgcccagtgcagtgcctggctcagtaaatcttcaccgaaccaccccactccactccccagcaaaaccaccccagaacgaaggccacgccaacgcgggtcgtgctccgcgatgacaagagcccgcgccccaccaccagctgcccttcctctccatctctcagggtgagccttctccccggcgggaacactctctcccaacccgggcaccctcagggctgagggatgcccctttcctaggccacctcctacaaggcccctcgcgatcgcctaccttggccactttgggaatccgctgcttcccggccgcggtggaggccgccatgtctgcagcagtcgacctctggacacctgtccccggcacggacgctagaaatcggctctgagagctcaccgaaaccacaaagctttcagaaaacaaacaggatctcggaaccggaagcggaacttgcaggactgacctttgacctctcgcttgagccgtgacggaggcggcaccgtttccatggtgaccaggctgcgcgtcctccttgcggcagcgcgtggagtgcggcgtcctggagctgcggatgaggtgggtaacgccgtgctgactagcagcgacgcaaggactgcggtgcagggcgtccagggcgcatccccaggtcagcctccggaactgggatgaccaggcgaggacgagtggctctgtcgagccgtggcgccctgcaagggagtaagaacggagctccaat

SEQ ID NO: 26263 - DNA, 2300 bp, Homo sapien
aaactttaatgtcttaggctggccttagcttaaacatttcaattgtatttgatatgaagctttatgaaatccaaaatactaggatatttaatattttcaataaaaataatgcggaacagggtcgagcacagtagcttatgcctgtaatccaaagactttgggaggccaaggcaggcagatcacttgaggccaggagttcgagaccagcctggccaacatgatgaaacctagtctctactaaaaaacaaacaaacaaacaaaaacagctaggcatggtggcatgcacctgtagtcccagctactctggaggctgaggcaggagaatctcttgaacccaggaggcggagattgcagtgagccgagatcgcaccactgcaccccagatctgggcaatagagcaaacctctgtctcaaaaataaataaattaattaaataatgaagaacagattcaaggatatttatattttggcacccacagaaggtctataaacaaacaaaacagagagaaaaaagatcttttaagaaacaaatctatgcatactttaaagttcagaagaacactttaacagcagcggctgtgaacaaatccaggtttccaacgtactgtttgaccctgcgccagcctcccattctcatctgtgagatggacatgatagtggccacctcagagaagtatcagaacaataacataatgttggcatagcacagagcctgacataaactaatttctcaaaatctggcagctaatattattaacttgttttaagtgactccactagtgagtgaggcagctgagatttgaaccaagtttgtttgaatccaaagcccatgagaaacctttttgatttgcatattattataggaaataggaatttgttgttcccagagatttcttgctacaattttttcactgtgcagtaagctacccatttgctcacaataagccccataaagacaaaaaggtaggatccttttctggcatgtcataaaattgaggaaccttctttttttttttttttttttttaattgagacaggggtccgctctgtcatccaggctggagtgcagtggcgtgtcttggctcactgcagcctctgcctcttgtgttcaagcgattctcatgcctcagcctcccgagcagctgggattacaggcatgcgccaccacgcccagctgattattgtatttttagtagagatgaggttttgccatgtcggccaggctggtcttgaactcctggcctcaggtgatctgcctgccttggcctctcaaagtgctgagattacaggtgtgagctactgcacccaaccaaaattgatgaacattcttgaacttagttatctacttacagaagatagatgatatttagcttcccaaacagcttgcaggtaaattttctaataaggcttttgatacaataaacatcctgtgattctgttcttcggcaatgaacaacttctacctttcctcttggagaagtgagtactgacattttttatcctgtccccaaaagagagaaaaaagtccactattaatctgatatgataagccagtttggttataatacacacaaaactgaacactaattcaatttccatgtggtcagagtgaacatggtgtgagaatactggtgtgacacgttttcccctgggtgtagtctgtgacaactgtcactgcaaaccagctgacgttcctccataggagaatgaagtttctgagaactggcctgtttagaagtttctgcaactatattctttgtttccaacaaagctgctttaaaaaattctaacaatagaattggaaaaacattgaaaggaattatttacggattcagggtcctcttatatttaatcggccacgatggcatgtggtgaagagttactggggaaatactgacagctgctgcctatgttcttaatagagttctccaaactggagccctgaaggtcagcagtcttgagacatattttgagaccaaaaaagttctgtggttaagtgtaggaaatgctcgcaataggcttcctgaagggccaccaggcccattaacatctttgagaggttccataataaagcaacttgttttctttgtataacccagcctttccgacactctttgggaagagaatctctaatgacggcaacagtggagaacctaacgttccagaaggacactttgggaaatgctgttgacaaaaacagtaggtcacaaaatgatttcaatttctctctcattgtctcaatttctgtaagtctctcttctctctttccctcccttctttccttcatagggaaagccatt

SEQ ID NO: 26264 - DNA, 2300 bp, Homo sapien
gctcctggtcagagctcctgaaacacttgtaccttcctaaatgataaaagcaacagaaacatcttttgttaccatattttgttttcattccccacccctgacaaaactctggtgcaataaaggtgagaggagcatcttttgttattgattacaagctccttacaacaacacctgagtctgtatattgacaaaatgatttttggaaagtctctaaggaagggggctggttgccaggagaaccaaccatgtcattagagggttggaactttcaggcctaccccccagcctccgcggagaggagaggagccagaagttgagttcaaccaccagtggccaatgatttcatcaaccatgcctacacgatgaagcctccataaaaccctaaccaaagcggttaggagaacttctgggtggtaaacactggaggtgctgggagggtggcatgtctggaaagcacatggaagctctgtgcttttccccctgccatgccctgtgcagctggctatttctgagccccacccttttataatggccagtaatacagttagcaaactgtttctccaagttctgtgagccatcctagcaaattatcgaacctaagcaggggtcatgggaacctccagttgatagccagccggtcagaagtacaggtggcaacatggacttgcgattggcatgtgaagtgggggtacagggagcagccttgtgggactaagcctaggtagacagtgtcagaatggaattgaatcataggacagacaccctgctggtgtcagagaattggtcagtgtgggaaaaaaactcacacatttggcatcacaagtgttctgagagaatgtaaaagaagtaagggtttgtttggttttccttttaatgtagtttaatacatggaagacaatttttgttctctaagaactatccatcatttcagaagggtactgtttaataggaagaatgccttccatcacttttgaatgtgtttcccgaacctttcagctcatgtcctcattttattccagtacaagtagttctttcatggggatatagagcttgagaatgattaggtagctggatgttaagtagtttgttaaagacatatatctgtaaggtagtactaattattacttgtagaacaatgcaagtcaggtaattggttctgtacatcatttttctgccatggatttactttattcctgcctttccttgtgtgttcacccccagagaagtcatttctccagtttgtggctgaccctgtattgagaatgatacctggagtgccagctagctgacacatgtcagataggattcgagtagaatgttgcagaaacccggaggccatttctgaacactttacactactcaaggtggcaaaggagagacatggagccatttgaggttatcttggttcatgtgctaatgtgccttatattaagaattaatgaatttcagtgtctcagagaagccaacagtggatctcccttgccgatgtttgtgtattgcataaaggcaatcatattttaatgatcatatgagctacttgtttgggggctattatttaattggaaacaagtgaattaaccacctaattcatcaaatctaagttgctatcaattataagatgtacctttattttatgtactattaagaaaaaaaatgcagccaattaaattgtaacacaacgtctaaatgagagtcctgaacagcatgtgaatcagtcatataagtcttagtgctttgaaatttctttcatctattcagagaggggaggcaatttacgtgcccttcaattgcattatttgctgggtgatgtggaaaaatttttttgcatgtgtctcagtaacaaaatgtaacacagcttcatctccttgtcatcttttatttgctcctgaaaggcactcaatcgttgcattgcaagaaaacatggaattacatccattcctccaatgactaatatttgcttcactaatatcaaatttgcaccttgctgctcagtttctgggcctttatgggaacacaacaataagcattcatttcaatgccaaatcatgctgtaatctttttgaagacattgtcagaagcacttaaactcaacacatattgtgcgtataatgcacatgactctcttgaagtgatgacaatgaacagccatggccaagcacccatgcacaggtaaggacaactatgccactgctactgcctggctgactgctactgttgaaatgctgttgactgtaaggctgatttcaggaataccagcttaaaaaaatgtgcacactagaattgatgaaatccggtaaaat

SEQ ID NO: 26265 - DNA, 2300 bp, Homo sapien
gaaatgctataataagaaaaaattcaccatagatagacagcatcatgatccattttagtatgaaccttgtatgtattatgtaggatcatttgtatttatttttattgctctctagtgtatcagcctatttattgttttagtaactcccgattttgaatctaacattgaaattgagtttcagtaatgcttttgtagtcattctaattcattctaagtgcagaagagaaaccaaaccacatgcggaaacacggaacttgggtctatgtatatccaatgaaattatattttgaccaatttttttctatacacacagaacagttaacaaatgtgcctaaaactcaaaactgtgtatttcagttctcttgacaaatgtatctgaatcatgacataaactcaactgagtgtgcacatcaacatcatctttactaaaaagatcaaatttaatcctaagtagttataattacatccagattattcatttggccatttaagcaaatggaaatgaaccaactaaaataatttgcaatacagaaattatgtcaacaccctttaaaaagggtccatgaaacacaaagttgatgtatctattcttttaccacttaccaagtgccccaaaatgcatggcagaaattgttcagctaaaatacagcaaatgctcaaaacgcaaagacatagttcctgacctctaggagttaatagtctagttgtagggtggcaggcaaccaaataaatggataaaagcaaccacaaactcctccagtagtgactcagctactcacatgtacagtcttatttcagaagctcatagggaattataggtaaagaggttaaaacattaacatttgctcatttctcttccctattttctcatctcagccggtctcccctcccatctgacctccgaatcttccacattcctccccgccccgcaacccccaagctcaactctagaatttcctaacaggagtatcaaatactatcattccttcctttcctacctaagcaatggaatctatggtttgtattttaaagtcattatgagagttgacatcaactttaaggaatttttttttagccttaaaaggttagcttatacaccatgctgtatggtttgttttatcttgctgggttactgttgatctctacacttaaaatcatccctttgtcaagaatcacttgaaaccgggaggcggaggttgcagtagctgagatcgcgccattgcactccagcctgggcaacaagagtaaaactccatctcgaaaaacaaataataataataatctctttgtctaaaatgctaacctaatgccattagaaaaatagaaatgtcttgaaaggatgtggaggtaagaattggatttcccatccatattattcttggtatggtaggtaggtaaatagcttacaattcgccctgtttaatctttgaaataattttccattatgaggatcatttaattctgtctataaaatgtgagtcaagaactagggcttttatttttactttctatgaaggaaataagacccaaaacagaatctccaatgcatgggacattttttggcagatgttcagagggagaaaaggaaaagctggcttgactcataggatcttgcatgtctgtttttctttcccatgaaaacttgtagtttgaaggaacataaaggaagaaaatattctgctttcattaaaaaataacctgtgcttcctgcttctgtgcaaaataaacccttcataaagcagcagaagccatcttcatttacagttgtcactgaaggatgtttccaggctgggaagaatttttttcaaggcatttaaaaaccgtctgtactaataaaagaaaaacacgattttttcaggtcagaagacttcatcatacctggcgatggatatgtttttaattaaaacctgggcacaaaattgggttgactgtgaatcattgtgatgcctgatcactctcctgagacacccaccatcattggtactggttgcctgctcttgacaccggaggccactttgtgtacttagcagttagaaaggtgatgtgtgaggcccggcagctgttggtgttacagctattgtgtgggaaacaaaagccattctgttctgttccccagcctgcctttgtatcacggatagaggagctgtttcataaatgaggtataattctttactggagaatttcattactgcccatgtttcaatgttagcttacacttccaacagcagaggggaatgtctgaacatatctccttttgaaaagaatcttggcttctgacctctgtcaagatgcttgcattt

SEQ ID NO: 26266 - DNA, 2300 bp, Homo sapien
gcaggcaaaactgaagctagaattataaattccaaagccaaataaatttgtctgcacagagtttaggagacatcaattaattagaaaacgatctatggaaaaagaagcttgctttgtgatcagttcatcatttactgtgttctttcattgaatggaagcttctagcagaaaaagaatttgtatggagacattgagaagaagccagtacaagaaatttccttcttccatgtgtgcttatggggacacagagctatccagcctgaaaagtaaaaagaagcttcctttctgaatggttcatcacatactgttttctttcattgaacagcagatttaaacactaagaggagtttgtaggcagacatttagaagaagctagcagaagtttcttacacccatacattcctgttggtcaagagaggtcactagccctgaaaaggtaaaagaggcaagggagagaacagtctttaatataagggcttggttatatttaatgaagtgccacaaggactggttatccaaactgagggttctctgccactaactaaagtgccactaacttctgagtggagagcagcagataacttttcaaccacactgatttgccatagcacagtgccaccatcactcagcaataactcacggtggctaggactgctggctgcctaacccaatattctgtcttccttcctttcttagtaacagactcttgggaaatatgctcggctgaaaaactgcatttcccaactcaagacctaagaggtggtcaggagatacaagcaggagtccttggatgaggtaatgagaaaagtcatcatgctctagtccttcctctttcttgcctcttgcaaatggaatgactggaacacagcagccatcttgagatgctgagaatggaaaccacacattaaaaatagaaagagggccaggcatggtgactcacacctgtagtcccagcactttgggaggctgaggcaggcggatcccttgagcctagaagtttgagaccagcctgggaaacatgggagatctcatctctactacaaatacaaatacaaaaaaaaaaaaaaaaattagctgggtttggcggcatgtacctgtatagtcccagctactcgggaggctgaagtaggagaatcacctgagccggggaggtcaaggttgcagtgagctgtgattgcaccactgcactccagcctgggtgacaggagtcagaacttgtcaaaaaaaaaaaaaaaaaaaaaaaaaaagatggaagggcctgggttcctgttgacatcagggagccaccttaccgggcctgggttgcttttctccagatatttttatttttaatgagagaaggaaataaactttttctttttgaactgcttatttgactgtagctgtaaatacaaagctctagaatctctgtggtaatgacttttaaaagccatcaagtataagccctgcaccatgtcaatgagagataaagggaagcaacaagaaagggaaaggagagggaaagagaacgaaacagagacagtgcttgatccagggccagaccacctgagtttggaccctagtctatcacctccctactaactgaccctgggcaaactacctaagcttcacagcaccctcggttctctaacctacaacatggggatgccaatggcagtgacctcagtgtatggtgagagttccatctgttaccatgtgtctgtctcgcggtaaacattcaacggcagtcaggtgctctcccgctttgaggctgcctggcagcaggctcctgtctcctagggttgaccgttttctttggagtagactttcactctatcggaaagctgttcctcgggatgaataaacactgcattcccatcacttttggggcctgtctagatctgtttcccagagccatcatgtgcaagactaatttcgctctccatatgaaaagtcttcaagtatttgaagactggctggccatcctgcacaccctgaatcttcactcctctggctgcgcatctggagtgacggagcccctccctcgctgtgcttcagcttgttccttcccttcttcagtgggactccaaggaacgaaggtcatattgcaagtacacttctgtttttgtggccatcctctgatacaaccatgttcggcaggtaaaaagttcatgacctctatattctcatcatggattttacccttgatcaagattaatgcttttctttctccaattcactttcttgggcactaatattattgctgtttctaatagctgtgtgaaatttgcctgacagtcttttgctggtgcactttgaac

SEQ ID NO: 26267 - DNA, 2300 bp, Homo sapien
cagatcagctgacatcagtccacccacaggtgtgtagaccacccacaacgtgcttcttgtttgacattgagttttgacgtggtttgctatgcagcattattatgatgataactgactcttaagataaccgaagtctcatatttttgttaaacataaaggtagccaaaactgtttagaagtcacattatctagaaataaacctgtaattttgaaatcagatattttacaaaatgtattacctttggaattgaaaagtatcgtcctctccagctgcctgcagtccgtggaccacccttgctggatcagacacctctccaaaccccagcagcaccacaggcccagttttccatgagcctgtgaagaataagcccagctcacagtagagctgctaacagccatcatgaaagagaccagaaaatacaaaatccttagctgtgtgagacctaaacacacttaaattcgttcaactgaaaatgaatattgttttggcttgcctatttcaaaaggacagaagacctaaaaccttttatagttttcggttcaagttttgcctttccttgcaggctgattctttgttgtgccagacagccaagattcatgtttcgtagcagctgggagcctcaataatttaagcaaaatgttgcctctttcagccaaggaaaatgcagctcaccaaggaatgttgcattgtagcatctgaacagagtgggggtcatagccataaaactctcctagcgtcctagcgagggcaggaatggagagaccccactccctcacttcagtgccttcttggctttccatagatgaagagcagggagtatgggagaattttctagatgctgttagcttccaagaagccatctgaaagttactgtagtttatttttcctaagcaaacaagacaagccatcacacttcctttcaactttggattgaaaacaatttgggcatgatttcctcaaccaaatcaaattaatacacttgccatttattttggcttgtaaaattccttttcatattatttcatgaacaggagaaaaacagagagacattcaatgaagtgtacattttgtggtaaaattggtatatcttacctggaaaatgagtctacagcagtttatttgtgaaaatgtgaaaatgccaattcaatgtcaaaaatagcatatactacatttcattaatttaatagtgtcattgaccttaaaactgctaaaatagtagaatagcatatgtaattgcttctgtagtctttttgagaaatgtaaatagtatagactatttatcatcaaaatgctcttacacaagggaaatctgtcaagattattttgtgattttatttttgctaacaaaaatactgtctttcagtccctctagctaggtcttgacacattatattctaaaaatcagggttgaatctttgtaaaattatctggtgaaaagcagaatgttctggcctttaattctcaaaaaagggaaaacttccttgaaatcaatccagttcaacatttaaatattaaaatatcagtaacatcatgagcatgaatattttttaccattgcctttttgtctgtaaggaagaactagtatacattgccaacattagtaatttggtttccttaataagtatagcaaattgggaacaaaagcaagataaaaggtttttttctagacagtttctttcagcctaatttcaacttcaaattagaggaacataaatgaatgtcctacttctgcattaaaagtacttgactactttgtgggatgttttgtgctgattctttactaaatgatcttggtcgccgttgctaggtaacaccgctggcttcctgcagctgaaaaatgagagggttatacggagcaattcggcattattagcatttgactaaggttttttggttttctgaactgtatatcttagcgttttcccttctttcctagggaatatcattgtctatgggaatacaattgatacttacaccaccgtggagacgctcttaaaccttggcgtgagcggcagccgcatccacctcgtgcagcccccgcccgcctccaccatcacctgcatcaacaactactcggtggagagcgccgtggcggacgcgctaggagccgccggagtcactatgtaccgggatgcgatcctggcccagtggaatgacggcctgcacccagaccccatctacagcgcctccttcaccacacccaccaagcctttcagactccagtgctctgtaagtgggtccctgcaaacctcactcaccagccagggacagaggacatctccaagggatttgggggtct

SEQ ID NO: 26268 - DNA, 2300 bp, Homo sapien
caaaagagcaaggaaataacatcagttacttttagatagaaatatgtttataaattttagataaactcattttaagatttctaacttttggggagactagcactcaccacagcatttttaaaactagggtgagacttttcaaaatatatttcactatatgcattcttcccttttcagtgtgtgagttaaaatattacaaacataaaattatcaaatatctttcccttgattaaccaacctgattaaccccttaattaattaagcctaacaactgtccccatcacaacttatgactcatgtggactctatttttacatgtttaatttctacgccagggtattttcagagggaaaatccaaaacaattaaataccttcagtggaattaagcgtaagtaaaactcagcaaaatctgtctggtatacaaagctttgcagaaaaatgtttccttctctttcaataaagtgacattttcctcacagcatatgacattttatgtggcttggctatttgttccccagtgttggacgatcagggccactacgcactcgtggggttctctgccctgtcccccgaagattctgccttttgtgtttcctcggggctgggctggacagaggatggaggcaggcggcccagtctgggtccaaacggaacggcagcggaggtgggggtgggggtgggggcggggggaatcttcgctgttgtctcttcctggtggcacaggggaggcggcttgtcctctcggaggcctcagcctgcctcagagtacagattgccccccctccccccgtccagcacgcgtctcttttgcgtccagattggccgcgaccggagctcaatagcaggaggttaatttccttcacaaaggtgaagggggcacggctccgtgggggctgcgcccagacaggcagcccctttatttcgcagcgccttgattggagcccttgatttagcatctgatgtcaaccggcaaacaaaatgcccgctcggaatgaaaatgcatgaggccgcgcggggaggagaaagccaacttcactggggcgcacgaggccgaccgcgcgtttcgggcttcggccaactcgacccggattaaccgagccttggaccacgcggaagctccgggcggcctgggtcgggccccgccaaagatgccattcccaagcctccaagaacccaaaagttcagaaattcacgttcctctgggaacccagcccagcccgcccgcgctccaatcccgcgctttcgggagactgagaaggccgtgccaattccttctcaaactcgaaagaaaccttctctagccccgtgggcgcgcggaggctgcgagcacaaacatcgccctcggccactgccagaaggccgggccccctgtccacacttggaaccccggggaacccttttgcttggcctcttgggtccagcggcccatccgtccaaggtccgggcggaggccgtccggaccctgctgctctctcggattcttgtttatttcccaaacaccacgcggagccactgcgcctccgcaacgatctcccccgcaccgccccggcgcgcccccgcccccacccaatcagcgcgcacaacttccccctcggctccggctcgcggattgaaccctcctgacatatttggggccattcttctcctttgttgctattttgctagcgacccgcgggtaatccccgcgcgggaggggggcgtgcattgtcgcgctgatggacgggcccatttggcggctccgcgccccccggaggagagacacaaagcccaggcacgtgcgcctccccatagagaagcagcagaccgtgaagggaggcggggccgggcgtgtgcctggaccgggcggggcggcggcgccgggcggggcgaccaggggcgcgcgcgggggccccgcgccctcaggtacatctgccgcacctaccgggcgacccccgagtcccggcccccttttggccgccccatcgccctcccaccctgccaggctgaggagctgcggacgcgctgattggctccaggggaagcgggaggcgagaacaatggccccctccccccgttaaaagggagcggctgccgggcccggggacagggacgcgcgtgcagggcgcagagctgggccgagccgtcgccggcgccacgcgagtcccgcagccgccgcgcccgggcaatgggccgggggcactgagggccgccggggccgagcgcggaggggggaccgagccagtgccgtgccctcgggccgcgccaacatgccccgcggcttcctggtgaagcgcagcaagaagtccacgcccgtttccta

SEQ ID NO: 26269 - DNA, 2300 bp, Homo sapien
ttccaggaacaccgccagggatctgcagagcggcctctgaagtttcacgggcttttccattgactccagccactgcttcttcagtggctcttcctccctttcactgtgaccagatgccttttctcttcattctttacttatgaattggacagtaagtctgaattaatttcacaagattcatagcttcttttatgctgcagaaaagcccagggcaaagaataagaagaaagacattcatgtgtttattcattcaacaaacatctttgccggcatagcgtgggaggaggtcaccagacccttctcctgggagtttccctcccttctgagtgccacagatcctccctgaaatgtgtggccgtagagccgccgttgcctccatgacttagcagttctctgcttcctttgcaggggccctggcctccagtctgagtgctgacctcgaagagcccctgagtgaggaggagacagaacaccctctcctgcctctgccccgagccactaaacccagaatctccaggaaatttcgttgctgtactagtgccctcagcaggtcttcccattagtggacttctgaagcccatggtgaatcccactaccgtgtctcagatgggactcaaactaggctgtatcatcttgtcctgaaacctcacaaaccttggacttccaaagaagaaaagaaaaagtcaccaaaaaccagagatgaacccactgacacgtgggcactggtgtggctgctctgggcagatgacagcaggaaaagattctgcgctttcagggagggggcagagggcagcttgcttctgcaccccaagttgtttcttctcatttatgaacccaagcatgattcacaaaggggctggcaaaacaattgtctaattgaggaatctgatctgcattgattttgctagttccttttatgttaggatttatggtttactcaaaaatttcatcatcatggaaattggctttccccggggtcttttgcccaggagaagttttacctcagttgtccagtgttttcccacatggtacctgacgcccgctaactaagcagaggctctcctcaccacgcagaggcgcttcaggtcatgacagtgatgcccctatcttagaacactcagaagattccagaaatacagggtcctgtccttgcataagttcctgcaggacaggaagtgtcccaaggctcaaaacaacacagaccacatccacacaaaaggcgcatgccggcttcaggcgctaggctgagacgggtaccccccgaatggccttgtgcctccaaaagcctcacgctgcaactttgctgctcctgtctgttgcccagagaggcctcacacaggcctcagaaatgtttcttgtcacacaaagcttttggtagccgattccaagcgagggatttaatccttacatttttgcccatttggctccaaggaaggcttattagacctgtttttttgttgttgttgtttttttttcttaaaaacaaaatgaatgaatgaatgaaaagagaagcaatggtgagccctctcctgctggggcgccctgggtgggccttgcccgtcctgcagcagagaaatcagtcagcagcgaagagctgctggcgcaggccccaggctgtgtcctggacccttgacctgcctcagagctagaggtttgctccaccccgcacttcacttgggaagtaaatccaagaagcttaccagagtccatcgccactgcgcaggctttgttctcacagcggccaggtacagagcaacgccctgcagtgggaagggacagcagcacgagagacgcagcccctaactcagggcttatgatgggtgggctggtcctgggaaaggcgggccctgtgcgggaggcctccccaccttcctgtgccctctgccctctgcccttgcacacacttgttaccttcaggctgcttggccacccaggcctgaagaagccttctgaggctctcaccccatcagaacggccattttcactgaggagccagttttttccatttgccatggagctggtttggctggaacctggcctttgtagggaaaacggggagactcaggagccagactcactcttgggacaaatgagaaagagctgagccagtcgttcctgtcggaagggcgggcctgctcatcctggcgagaatttgcttttctgctttataggggattgcaggccaggcccactgacaggagcaccttgagaaccacctgaacagaagagaatgagggtgccccaaagtggaaggaagcttctggcccctgggccgttttgggaagggcccaggatactca

SEQ ID NO: 26270 - DNA, 2300 bp, Homo sapien
aacccagatcagcaggcactgcagctacctggagatatgcctgggcatggggtggagaggaccccacttcaccatggtctctgcacaggaagggcaagttagctcagtctgctgattcagatgagtgggtgctctgaattcttggagatctgctggggcatggagtggaatgggctccactgtaccataatctctacaggaagggtggggcagctcaggccaccaatctgggtgaggaagtgtgccgaatacctggagatccatctggatgtggagtggagagggttcccctgcaccaggatctcggcagaggagggatggagagactcaggctgctgaactaggcaagcaggagctctcagtgcctggagacctgcctaagcatgaagcagagaggggctccctgctgcaggatctctacataaagggtgaagcagctcagactaccagtccgggtgagcaggtgctttgaattcctggagatctgcttgggtgcggagcggaaagggccctgttgcaccacaatctatgtccaggaagggtagcatggctcaggctgctcatccaggcaagcaggtgttctgaatgcctggagatctgcctaagcatggagtggagagggccctactataccatgatgtgtgcacaggaaggttggggcagctcaggctgccagtctaggaaaggatttccacttactgcctggagtcctgcctgggaatggaacagagagggccctgctgcaccatgatctcaggggagcagcctggtgcactcagcaatgacacatgcagactgattctgtgttgccaagctggccctggctgcaagtctcattgcccaggagaaactttagctgtagcagctctctcctcccaccccaagcctgcagttgagaagagtgcaattccagtgcctcctgctggtgcgctttccacagttctggctgtggaagtccctgccccactccagagcaagtgctcctgtctctcagtcccagatctaggaattgcctgcagctttttctggtgtcttttcctctcagcacctccaagtctctccccaagatagctctggggcttgagagaaacatcattctctgccttggcctgggttgcttggatccccagtggaagggtaaattacagagagagactgtttctgtctcgggtactggggcttcactcactcttaccagctggatgccatcacaagggctgtttgcctgcattgtcctccctgagatctggaacatccttcacgattccagtggattcccattttccttcctgaattaaagctcagagagttgatctttttgcactatcttgctatttccaagtggctgaggcacactaaaagcctgtaatctaccatattggaactgccccctgccccccacccaaaaaaaaggtgttgagttttaatcttcattcaccactgactctttatgtttctttaccgctgtttacagagaagaagagaagaagtttggagttgatccctttgactgctcgaatggtgatggcccacctggtgaaccacctggggcactaccccctcagtgggggccctgccatactgcacagccttgtcagcgagaaccatgacaatgcccatgtggaaggctccgagctgtcctttgaggtgttcagaagtccaaacctgcagctgtttgtatttaatgatagcaccctcatctcctaccttcagacacccacagaaggaccggtagggggatcaccagtgggctctctctctgatgtgagagtaattgtgagggatatctcagggaagtactcttgggatggtaaggttttatatggacctttggaaggctgcttagcacccaatggaagaaatccttcatttctgatttcgagctggcatcgtgacacatttggacctcagaaagactcttctcaagttgaggagggggatgatgttcttgacaaattacttgaaaacattggccatacaagtcctgaatgccttttaccgtcacagctaaatctaaatgaaccttccctaaccccatgtggcatgaactatgaccaagagaaggaaatcattgaggtcattttgcgccaaaatgctcaagaggatgagtatatccagagtcataacttcgattctgcaatgaaagtcaccagccaagggcagccctccccagtggagccccgaggacccttttatttctgcaggttattgcttgatgacttgggaatgaattcttgggacagaaggtaacaatccaagctagacctccagttattttatcattattttcatgtacttgt

SEQ ID NO: 26271 - DNA, 2300 bp, Homo sapien
tgtgatgaggaatggaaaaattatccaaccaaaatatcacagaagagtgtccctccagccacagcagggtgctgagccctgacctttgtaggcaagtttaatccgcagagctgccctgtgaggggaaatgtcagtgccacctccacttcacagatgaggtagatgaactgactaggaactgaaggagcttgccaaagccaaacccagaacactctggccacatgtgtggagttttacacaactgaggtgtgtgggatacctcctgactcccaaagccatggagaaatatttacatataatttattaaagtgaaaacaagttggctataaattatagatcaatgtagattccaattcatttttaaataccctttttcaattccaagatctgtttttgaatttttattttttcttaaatctagatgtatatagttaatgtaaggtggttcccccatctctactccttccatggaaaaactatgaataactcggtgtgttagattgaaggagatagacacacacagacacacagagtcacgcatcgcatagtgatggggatacattctaagaagagtgtcgctaggtgattgcattgttgtgtgaacatcataaagaatattacagaaacctagatggtttctggactgtgtgggatggcctgttgctctgaggttataaacctatacagcacactactgtactaaatactgtaggaactgaatattcaattggaacacaatggtaagtacttgagtaaacatgtctagacatagaagaggtacagtaaaaatatggcactataagcttatgggactagtgttgtatatgtggtgcttaccaaatgtttccaaaacatatttaggaggtacatgactgtatatatatttctatatagtataggaaagagatggaaattgataacagagtagagggatagatattctttctgcaacttttctataattatgggggaaaatataagacaccagaaaaacaatgcagttaccacatattgagctctcactctgtccgctatcccagcacagcatggagattgtcctgttgaatcctcccccctctggatagcagcaaaagagaagaggactgaggaaggtcaaagaactgactccagcttgaattgctaagaaagcagagggatcaggatgcagccaagttgttctgtctttaaccattattaataacaggaaactcattgacttaagtcctggtctctgaggacacctccctccccactgccctcctctcctgcctccctctagtttccgtgttgctgtggcaactgggttgttttacctaaggacatagcacataaatcgaagaaatgaggactgggagggaaagagttgctacaaggaacgaggagaacaaccaccactatgagaacaggggactctaggaggctttggggctctgccaggagggagagatggagaaagaggaggcagtgggggccttggccccacccccagcccagcctcagcctgcttcatgggtagcggagagtgcaagctctggcagggcttcctgctttacgggctccacataaagccagcaccacccctcttgtaagaacccttcagaaatgccctgcaagggtgacctaggtgcacccatgaatgtgcagagcattccactcagcaaggtgttggttggctggtttgtttatggtggggtagcagatggatggcaggcatggggtggttgggggaggtggttctaagccacagccatactcaccaactcttgtgaactgcccagccctgctccttctcccacctcgtcttctgagacatgactgactttcctccttctccttaccccactgtttctggctttgagtcctgccagctgtacttcctgaatgcccattgaatacccatcgtccgtcccacccactgcccaagtccatccctcacacactcaccctgccaatactcagcctcctgatcagagtcaccagtcctagactggcccccacagattactgttcataccaccgtcagagggatctgtccatgcacaggctgacctgtgcagcccacaggctggagcgctcagcatggcactctgttggtgttctatgactatatgctggagaagtgagagagcaaatgaatggcttatttcatctccaccattccccacctccttcattacatgtcagtaacaccaccctgcctgcagccccctgtatccgaccgacctttcctaccttggtgcctgggccttgccacccatacctggaaggagaccccacatcccccctgcattctccaggca

SEQ ID NO: 26272 - DNA, 2300 bp, Homo sapien
atacatatgttcttttccacatattatccaaaggctgcgagcttggagtggaagaataaggagaatcaagatactggttttaaatttctttttacattgtttcgaaagtattatcttcctcatttatttccatcatttactaagttaacaaacatctacaaacctgtacttggtaagtactgttggagccgtgtatagaggatatccaaaggaaagctatgcagtctctttcaaagtgacctttgattattttaaagtaaaatagtcattttatttttgtattgaatggtaactttattattaaatgtttaaagtttcttaataagtgattttaattatttgtaccaactaagatatacctcagcttacagcagtaaaagggaaccgtggctcctatactcagaaataatttgaaatgtatttatgatatttttggtataattacattgtcatcttttaatgtaaaaatctctgcatttcctgaagtctttccttgtgggtggtggggtatggcgacctcaggctttgctcagtgactggaggccagcccaaggcaaacagctgccattgtatgccttttattttatgctgggtcctgcatccagcagctactactgacaggtgcttatggagaaccaaattttaggtgattggacaagctatggacagtaagccccagaggactaggaaacagaaaggaatttccaatttggctcctaatgtttttttcttctgtaagcaatgaggactcacaggacagaagcatcccttagagtggtaaaggtgggggtcaaatcttcctctccctattatttaaaacaggtaaaactagttcaaatgaataattaaaaacagttttggaggggaagtggtgacacgagatgttacttttttggggaacatggtcacctgattcagttgtctgtactctgtgtgtttctatgtatgcgtacacacacacacacacacacacacatacacacacacacacacacggggagagaagccaaaacttggtgagttttgaaagatgtagaattactgacttttaggtgcactgggacatgtatttctttagctatatatatgtgaatattttttcaaaatttgtttctgattttatatgtagtctaaattcattttaaaaacatggtatattgttaatattcctagattaaaagttatttgttgatcatttttctgcctcatacaggtattccagatatacaaaaattattaagatagagagttgaacttatggcaagtagtatctcaaatccaataccatataattttcatattgattatggaatttaaagaatgagaaactgacttcttattaagtctttggaaaaggtagcatttgatgcctcaaaggtgaaatgtgactttcttaattcttttaaatataaagtagatgatattgattctgtttcattggattcatctaaagggaaaaggatataaacctctaaagttcagtggatttaatcactgcagtgttagatgttaaaatacctaaaatgatgttttaaaagttcatatatacttttacatttgttccagctataaaataaaattaaattaggtataatgtatgtgaaaagatgtttactattatagtctcatgtaatttatcaaaattgttaaaaatagttgttagcttagtttttccatagctgtatatcatagatacataaacaatcaccatcatcactcattctcagtcagatcacaaggcggaatcagaaaggagcctaccaaaaaaatgccattttaaataattgcggttcttcattcttagttgctatttagacaaccaaaaattggatttaattggaaaccaaaacatttgtagggattacttaatgttatgatttattaacctaatcaatcatgtgttctttcttctaccagacatcccccatttgagaccaaagcctgtgtacattactaccactcgagacaatgagaacatttacagtacaaagattccatatatggcagctcgtgttgtttttattaagtggattgtaaccttctttttggaaaaaaagtatctaactgcaacacaaaacactaaaaatggagttgatgtattgcctaaaatcatccaggtatgccatccatcatctttttatctgttaatgcttgtgtaataaaatacactggaacatagccaaagttattgattgttagagttattggttcttacaagttgttggttataggtaagtgattttattggcctaccctgtctgtaatgccaaggtttcagagggagttgtgagtttgaatca

SEQ ID NO: 26273 - DNA, 2300 bp, Homo sapien
acgttcaaagttccacagatctctagggcaggggcacaatgcctccaacctctttgctaaagcatagcaaaagtgacctttactccagttcccaataaattcctcatctccatctgagaccacctcagcctggatttcattgtccatatcactgtcagcattttgatcacaataatttaacaagtctctaggaagttctaaactttcccttatcttcctgtcttcttctgagccctctaaacagttacagcctctgcccattacccagttccaaagtcacttccacgttttaggtatctttatagcaatgccccacttctcaataccagttttctgtattagtccattctcacattgctgtgaagaactaccttagactaggtaatttataaagaaaagaggtttaattggctcatggttctgcaggctgtacaggatgcatggctgtggaggcctcgggaaacttacaatcatggcagaaggtgaagaggaaggaggaacatcatacatggctggagcaggaggaagaaggtgagagggggaggtgctacacgcctttaaacaaccaggtctcatgaaaactcactatcacaagaacagcaagggggaaatccgcccccatgatctaatcacctcccagcaggcccctcctccaacgctggggattacagttcgacatgaagtttgtgcggggacacaaatccaaaccatatcaggcactcttggctttgaatattgacctgcctttatatggatggcgttatgacctacaggtatgtccttttgttttctcttgggatgaaaggaagatgctcaaatcagaaagtcatctatagtctattattcctcttagcaaacaattatgaagacagtaagtgcctcctaagatggtacagaaagagcacaaggggtaaaatgtgactctttagattggagtcacctgaccttgaaagtgactcccctctaagaagagaagctagtgcacagagcatcacagggcaattgaggagtccaggagaagtcaaggaaagcattctgcgctggacatcaggaagttgcatggagcaatgggcactttggccagaacttaaagaaccttctggccatgaggcatctagaaatgttcaaccataagtgcttgcagtgacagcatggcattgaccctcttggaggagggacgactggcagagggaagggcttggcaatgggaagtaatgggattagtgtggagtacagggataagaaagataggtgtggccggaatgctgtgggtcttgagtgactgtgaagagattgagtcgacaatgaggagctgttgaaagttttgactgggggcctgactgaatcatagaggaattgtgctaagttaatctggtggttttgtgcagataggttgcgaggaggaaggactgaatttagaaagaggaagtggatgtgagtgagatctggaggaattttccacaggaccgacgaatgaaggaggcaagagacaagtcaaatgtaatttccagccttcttaccgggagatggtcatgtcacttactgaaatcagacagttagggtggcacgtgtgtttggaaggtgaaggtagtgagagtgttttgacatgttgagcttgatgttctaaaagaatattttcaacgttataaaccatttaatgtatgtataaatataaatatttatatgaaaatgtatacatacatatatttacacatataaaacagttatgtttagaaattattgctgttattttacaggagtacttagtagaaagaatagcaatatgccacttaagagtatgaaaactctccttcaaattgttcattttttgtctctctttctgtttttctcgtaattaatgtggttaaattgatgcaagagattagagcctcgtggtcatctgaagttttctcttggtgcagttagagctttctttggtgcccaaccacactcaatgattcatgtttgtttggaatattattgaagttggaagcaaggggtggtgcctctgggccatgcaggaggtgccactgaggctgtcatttttgccaaagaaaagaaggcaaagctccagcaggccctagtcccagtgattcacttagagaagctctaggaggagcaagatggtattttctagtctctgcactggtgacatttggagcaagtcagttggagaaaaccaggtacccttctttctactgtctctgattatgtcacagggaaatcttgtagggatccatttgaatgtgcttttaatggattgggtttgaaacccattcctccttttgcactccttcgca

SEQ ID NO: 26274 - DNA, 2300 bp, Homo sapien
tgcacattaccactgaatcaattggatataatctgaataaaaactaaataaaagtcacatcagtgctacccttggaccagggcaagaaggcctctgccctggcttctgtgtattagaggttctgttctagcccttctctgcccatgctgctccacgcaaggcaaggaggtcccagggccagatgacaggcccacctggggtgctcacacacatacacacacatgctcttctagaacacgttctaagtacccaacacccttaccttccctgctcaaaggggcccaagctgctttctaaggctttaaaaggcctcttggctgggtctttcctgcaagggtgaccatcactggcatgctcactgcccggccaagaggaggctgaggtggggatgtaggcagagttgggacttgctggctggagaagaggaggagaagaggcagggcacacacatccctgctagtgtatgagaccccctcacaaagcaagactgagcctggggtgggaaatggagttggggggagctggagaagcaggcaaactaaattccaccctggttgtccaggttcttaagaaggcatattggtcaaagtggagaggagaacacgtattttacctaagtttgttatcttgaattataattcaatatttaggcggatggtatgagggcctccattcacactcttgccctggaactggcaaatgtgaatggaaggctgagtaaaatcatagttttgtgttgttggcctttgagtgttccatctctcttacaattttagtttgtcacaccttgcaccttgtatgtgtaagtaaaattaatggcataggaaagaaaccaaaagaagtgaacaataagagactaaagaaactctacaggccgggcatggtggctcatgcaagtaatcctaacactttgggaggccaaggtgggtggatcacctgaggttgggagttcaagaccagcctggccaacatggtgaaaccccgtctctccttaaaatataaaaaataccaaaaaaaacaaaaattatctgggtgtggtagcgcacacctgtaatcccagttattcaggaggctgaggcacgagaatcttttgaacccgggaggcagagcttgcagtgagccgagatcacgccactgcactccagcctgggcaacagagtgagactctgtctcaaaaaaaaaaaaaaaaaaaaggaaaggaaggcagagaagcaggctaaggcttaatttttctgcccagtgggttttgaaatatggttggcttccttcaggaagctttttcccgacgttggtgatgataataaaacctgatgctttctatgtgctgggcccacttataaacactaacacatattaacaatcgaatcctaaactaatcctgtgttaacagcctcccactttacatatgaggaaacctggggtgacttgcacacggcttggcagctgggacgtggatagggaatgtacacccaggcagtctggctcccgggctcctgctagaggatcctacaggacattaggagcattgtcccttagagctgtctgcacaaacgtctgcttcccaagcaactagttatcaacttttccctctcgccaacgatactggcacctggaacaatccttagattcagcacggattttcgagtaaggggttggtccactgtcggggctgagcacggctgtttagcatttgagggtttgtctttttttacttggtgttttgtgtcgcttttgagtgctgatataatagaacaagcttagtacagtgcctggcactcaacaaatcctggcaagaaaggagatcgaggaaaagaagcaagcgagagacgaaagaaagggagggaatgcgccttgtaacattaacgtagcttgtgcgaatcctggaaggtgaggggaaaggagacaccgcgtcaagggagagaggagagggcaccgagcgcccgcccctccgacgtggtccgccccggcctcacgacgccccgcctctgccacgcctcttccccgccccatgcaggtcttcgtcccgccccccacaaagccggcttccgccccgtccctcagcggcgccccgcccccacggcgtcttgccccgcctcctgcaggcggcccggcgcggtgtttacccgcggtgcatggtggggcggtctccttcggcaaccccggccgaacggccacccagaggctgtgctgagctggcgcagcggcagcagcatgagccggaccctcgcatcggccgtgcccctgtcgagtcccgactactacgagaggctgggccaactccagcacgggctgcgggacag

SEQ ID NO: 26275 - DNA, 2300 bp, Homo sapien
ttcttctgtcaaatgggaacaatgacagctgtgagaactcactaagattcatacaaacccttaaagcagtgtctgacctagagccaattattatttattacaattttatcaacattctttttcctattttttgccgtcgagctttctgacatgctgttcccccacctggaatgttttcccctcatcttttcatttttggcttcatcaattttgattaactctcattcatctttcaggttttttttttttttttttttccccaagacagggtcttgctctgttgcctaggctggagtgcagtggtgtgatctcggctcactgcagcctctgcctcccgggttcaagcaattctcctgcctcagcctcctgagtagctgggattacggacacataccaccacacccggctaatttttgtatttttagtagaggcggtgtttcaccattctggccaggctggtctggaactccggacctcaggtgatccacccacctcggcctcccaaaatgctgggattacagccatgaacccccatgcccgacccatctttcaggtcttagctgaaagttatttccactgggaaggcctccctggccttttcagctaggtcaggttgcccggtgtgtagaagtcctttttagtttccctcatagcattcatcacgtatttacttatttcattgttttctttgttgaccttagctgaaagactttgatctttagagtgctgaatatatggataattgcatgggtagatgagttactcactcatgtggtcagctttgaaggttaatgtggtagctggaatggaactagaatttggatggagaaggcatagtacaattgtacccactccgggtagacaccaccagcagcagctttactgagtgcctgagtgtgaacgacagtatgttaggttctacctctgttacagttacttgcgtcaaaaatgcagagacatgggcagcaataagaccagccttcagtttttattcagaaagaaaaatgaagacagccaaccatggtcaaagcgcagaattattaacacgataaagactttcttgaaaattgttggcctaggattggaagtttaagatctgttgttaaacaactttggacatctccagcatctttgcaaatctttgttttgagggtgaatatttttgtcattttaaattttatttttgtttgatgaaagaatgttgaataatttattgagccaacaattgaaatgctgtataacagggaagaagagttaggattaacagcgttggtgccatgagaaaagtcgactacacaacttgaactatccagtatgtttttttatgtacagaaaaattggaatgcagaatatgtttttgctattatactttggataagagtctgaaagtttttttcacagttggagtaattatagtccatatattataaaatattttaatagtgaattatattgtagcaatttctaacaagtatgtttatattatctaaatgagagcttttggtattttacatttttaaatttctttttaatttcttaattttatgggttgtgatttgtagtttgatttaattccatatgagcagttatttttgaaattgtcatatgtaagaatgttagtgagccattcgtcgaacatgtccacatagacactactcttgaaatcacatttaattttgagaaataaatccatagaaatctttactgtgtgaatgttagaatgtggtcttatatatatttctcaggggagttatgcttagaggaaaccgatatgatacctcagtggtgctgcattaactttctctctccaaaaatgtgtatatacattttgttgtttgggtttcggtggtttgggtaaaataccttagaatacattgtctcattaacaattttgatgaagaaaattccctttcttagattcgtccaagtctagtccattgttttaaaactgcttttaattttctagagttaagctgaaatatgtaaaactaaagaattatctgaaggaaatatgtgaatctgaaaagaaggctcatactcgaaaccaagaatatttaaagcgatttgagcgtgtccaagctcatgttgtacacttcaccacaaatacagagaagcttcaaaaactgaaggtgacttcctgttttttactgtgttttattttatttgttgttgtgtgtttttttttttttcttcaagatgagacctcactgtgttacccaggctagacttgaacacctgggctcaagcagtcctcctgtcttagcctcctgagtagctgggattacaggtgcacaccccat

SEQ ID NO: 26276 - DNA, 2300 bp, Homo sapien
tacaagattttgtgtagtcatatgtttacactctccgtacttctgcctagatatggaattgctggttagatggtaactctgtttaactttttcaggagctgccaaactcttctaaagtgggtgcaccgttttatattcccatcagcagtgtatgattctaatttctccacatcctggactacactcgttattgcctgttgtagtgaattcttataattttatgttgcctcagcatccattttaaatctaagttgaaccttctcataccagaagcaggactcagtcacccctgacacagttggcagttccaccctccttcgcagttcctcagtgtggtcggtccagataacctgccttacacagctgctctctggtgaccacttccctatgggacagctggatgcagcctgcttgacaggcccttctgaccttcgcatcccccatggaccatatgccacagtgaccacctctcagtcactgggtaacctcccagaactcatgcctccttgctttaaactcaccagttaaaactccccaggctgcctgtgggaaacctgtttggataacacctgcgactcagtaaagacattggctcatgtgtccttcccctcaacccctgcttctaccatgtaaggacacgggtcccttttctctctctctctgcctgcgctccctgatgtttgtgtgtgtggcctccaggtgtgccatgtactccccagaacctgtaagtgataatgtctttatttccatctcatatttctcctaattattggaggggtactctccatcttaaaaatcctaaattaagacacctgtcattcttagtatagccattgatatgggctgaatatttgtgtcccccccaaagttcatatattgaaattctaatccccaaggtgatggtttttgagggtgaggactttgggaagtgattaaatcaagggggcagagccttcatgggtgggattagtttctttataaaagaggcccgtggaaatttgcctgccccttccaccctgcgagcacacagcagaaagatgctgtctgagagaaagcagttccttaccagacccagagtctgctggcgcctgccttgatcttggacttcccagcctccagaactatcagaaacaaatttctgttatttatgcactgtttatggtattgttatagcagcctgaacagaccaagacagccatcatagtgggtaaagtgatatcttattgtgcttttgaattatgtttctctaatgaataatgatattaagcatcattttatgtgtttattggccattcatatatcttctttggagaaatgtctatccaaatccttttcccacttttaagggctgtttgtctttttattatgtagttatatgacttctttatgtattttgggtactagacccttatcagatacataatttacaatattttctcccattatgtgggttatattttcactttcctgatgacgtcttttcaaagcatgtatttcttttttcaaaaacatattctatactttcttttttttgagatggagtctccaggctggagtgcagtggcatgatctcggctgactgcagcctctgctgcccgggttcaagtgattctcctgcctcagcttcctgaatagctaggatcacaggcacctgccaccgtgcccggctaatttttgtatttttagcagagacggggtttcaccatgtcagccaggctggtctcgaactcctgacctcagatgatctgcccaccttggcctcccaaagtgctgggattacaggcatgagccaccacacccggcttactttctttactatatttgttttgtgaactatcattgttattaaaattaaatcctatggactttactgctttttgctcattcattatgtaggaagccatgagtttaataatacatggtaggtgctgatttcaataatcatgctttgtttgacctcctttcatttctggaaaaaaaaaaaaaccccacctaattgtttatacacagtatgtttaactcacatctcttttggtgttgcaggttgcagtgcacgaggggattaactcaggaacagccatgtcaagaggattgtatcaaccagcaacaatctttatgggccgccaaatgtcagccatcttaagcatgagagatttcagtacagagcacaaatctccccagcccacaaagaacttttcaattcctgacccacattcacaccgacagacagcccagagcagtaatgtgacagacagctgtgtagtacaaactagtaatgacacacagtgcttaaataagtc

SEQ ID NO: 26277 - DNA, 2300 bp, Homo sapien
acacaccagctacatggccttgagcaggatacctttctaagtttctgtctgaccacttgtagggtgagtactaatgtttaccctataggactgttgtaaaggttagagatgagggaggcttagtgagggcagggataccatcttttgtggtttctggtatcccaggattcagcccacgtaaaaatattaattttattaactaatataattaaggattttatatataatcatctataatgatatatgatatataatatataactaatatatattgtatcaatacatctaattatatactacttattatatacagaaaaccatacatttatagatataaaaattcatctttgatttccacctggattctttagtgaacaacaactagactaataaaaggggtagattatattcacaacaacagatcatacaggctatggaatactgactctgtgtttgtgggtggggcatcagtgtgtgcccaggagggtttctatgtaaatctaaacacagaaaactcgcatgctccataataacgattagcaaagcagatgccttcaaagtgatagcagactctttaaggaggagccccagccaagaagacctccgttttgtggtgataagcaaatgagaaagggaaatgaagagatgagaatgctggcacactggattccattagcatagaggaagaagcacagtcccttggcattagaaggaatgtcaggggtcacagaagcaataattccttccacaatgctcttttaaagagccacagggccaggcaaggtggctcatgcctataatcccagaactctgggaggccaaagtgggcagactgcttgaggtcgggagttggagaccagcctgggcaacatggtgaaaccccatctctataacaaatacaaaaattagccaggcatggtggtgcatgcctgtagtcccagctacttgggaggctgaggaaggaagatcacttgagcccaggagatagaggctgcaaaaagctgtgatcacaacaatgcactccagcctgggtgacagagcaagaccctgaccctgtttcaaaagaaaaaaaaaaagtcatggttcctgccatggttcaagcactcacccctggaagatactgaacttggttttgctgaaatgaagagctagaaagttgttttgttactgagctacgctctataattaagctcgataaatattctacctggtatatggcagctcctcaaatatttaaagagctactgtgcccttctcaggttaaacatccccaggaccccctcattctgataaaggtatgacttcacagcttcccacccccaacctcttgtgacttcccagatttcacctcagccacgtcttctcttatacttcttctgaaatggctgaaaagcaaataaagacgcacagaaggatcccacactgaagaatagcacttctgggcgcctaaaattactattgtaaccttactgtcaattcaaggaacagctgtaacaagcagctgtcagtcataacatctgggtgtagttacactaaggtagcccaaaatctcattataaagcaatctcacgcacaagggagctccccacaaaatgaaatcacagaaaaatgctgaagataattttagcatattgaggaaactggtgcccacattggactcactgctttaaaagtgttccacatacatgtgtgtatgtttcacaaagtatgttccacagaacattaattctgttggctattaacagaaagaattccattttcaaataaatgataagttatctgaaactctaggctcacatttttaaacaattcctttgctgaaagtcttttccaagtcttcactatgcttctatgcattatgcatactgcagagagagagaaggatcacacagggctgggcaacaaaatatgtattaattgatgtattttctgggtggagcattgcaaataacacattttggaaaatgctgcattagctcatcaatacttgtggggcagcacacacatcaggggaggtctgctgcctggtaatcaggtaccctgcaacatcatccattgtgagcacatagggttactaagggcacataggcaccccgagacagagatgtctgggccttgaccaatgagatcttcaggagtacttcagcagctgtttcggatttttctctgtggatgtcctcatgggactaagtggaaattggaaaagtatcatcaaactcttcttgagattcctttttgataaggtaactatcctggatttgaatctcaattgtgttctcaagtggcaatttcttgcagaa

SEQ ID NO: 26278 - DNA, 2300 bp, Homo sapien
cgtttcttatcacaagcctacatacgttgttttttctgcacaaagcaaataagaacaatcgcttgattatttgaagagaaaaagttaagttgacctcaggcagctgaaagtggcatcttctgtaggaaccccgattaaccatcagggggcgctcagactttgttaaattactggtaggcctttaaaacctaaaattagtgtttacagagatttgttggcatagtcattgggatttttttctttctggattattttttgccttctgtttttcagaaacatatgtctgttttgaggaacgttcaagctgaaattgctcctttagaaattgtaatactgatttccactagcagtcaaaaattattacaaattttagaatttggagtctaaagactatgtcttataataaattagctattttcagccttctaataagactccagaactggaaggatacttcctgctgccgggagccattcctccttatcctggacatcatagacagtgctcctggcaggaccctctgagtctcattgccacactcaattggtgaggcctcagagtcacaataacttgggtatatttgttaatgggccatggctattttttctttttttaaaaaaatgatatgacaggccaggcgcagtggctcatgcctgtaatcccagcactttgggaggccgaggcaggcagatcacttgaggtcaggagttcaagaccagcctggccaacatggtgaatatccctatctttactaaaaatacaaaaaaaattagccaggtgtggtggtgtgcacctgtaatcccagctacttgggaggatgaggcaggagaatcgcataaacctgggaggcagaacttgcagtgagctgaaattgcaccaatgcactcatctgggcaatggagcaagactctgtttaaaaaaaaaaaaaaaaaaatgatggctgggtgcggtggctcacacctgtaatcccagtactttgggaggccaaggtgggtggaccgcctgcagtcaggagttcgagaccagcatggccaacatggcaaaaccctatctctattaaaagtacaaaaattagctagacatggtggcaggcgcctataatcccagccactcgggaggctgaggcaggagaatcgtttgaacccaggaggcagaggttgcagtgcatcgagatcgtgccactacactccagcctgggtgacagaacaaaactccgtctcaaaaaaaaaaaaaaaaaaaaatagatattgaccatgaaatcgagtcaatgtgttactaacattaggttttccctctgttctttcctccaaattccaccccctgctcccgccctgggccaggaatgagtatctgacacccacctctgctgccacacacctctcaggagacccttgttgcctgcacctctgtcaagcacgggtagtctgcacactgcacacccttcccagccagctccccttgtccccctgctgaagaacagttaacaaccagaccgcatgtcatgcccgcgtatgacccactatttcatgtccctggattttattggaatgctcttgccccactcttttacctggttaaggccttctagatttttcaaggcttaaccttctgaacgtttcctaagcggagacctggctgcacagcatgcccttcctgtggtccccctagctatttctgttatcatctgtagtcagggctagaagccatttcccagtaccctccctcccgcagtggggcaggcttcgtttcatttatttatttatttagagacagggtctcgctctgtcacccaggctggagtacagtgacacgatctccgctcactgcaacctttgcctcccaggctcaagcaaccctcccacctcagcctcccaagtagctgagaccacaggcacatgccaccatgcctggctaattttttgtggttttggtagagatgatgtttcgccatgttgcccaggctggtcttgaactcctgagctcaggtgatccactctcctcggcctcccaaagtgctgggattataggcgagccaccatgcccagcggcaggtttcttaatcaccagtgctggatagtcattgtgcttcctgagtgagtaagcatggatatatagctccaccattcactctagtttgttttttttttttttaaataaaagtcagtttgtacaagttccctcacttctgtatggcatcatgtacttgagctgcagggaatcatgcatttcgtacagttatctgcataagggtgtgagagagagagagagagagtgtgtgtgtgtgtgagagggtgtgagtg

SEQ ID NO: 26279 - DNA, 2300 bp, Homo sapien
aggcgggcggatcacaaggtcaagagattgagaccatcctggccaacatggtaaaaccccatctctactaaaaatacaaaaattagccgggcgtggtggcgcacattggtagtcccggctacttgggaggctgaggcaggagaatcgcttgaacctgggaggtggaggttgcagtgaaccgagatggtgccactgcactccagcctggcaacagagtgagactctgtcttaaaaaaaaaaaaaaaaaaaaatttggctcacagaatcaaaggacagacttaatcaaactgcaggaagagagggatttaactggaaccagggaattaaccctgcttctctcattgcctactggcaacaagtcccaattcttatcttttagcgttcacgcactggaaagatgcagtcttaaatttcttatggttcaaagctcaaaaatgctggtaaggctgggtgcagtggctcacacctgtaatcccagcactctggaaggccgaggtgggcagatcacctgaggttaggagttcgagaccagcctggccaacatggtgaaaccctgtctcaactaaaaacacaaaaatcagcggggtgtcatggcaggcgcctctaatcccagctactcgggaggctgaggcaggagaatcgcttgaacccgggaggtggaggttgcagtgagcctggatcttgccactgcactccagcctggatgactgagactccgtctgaaaaaacaaaaacaaaacaataaaccctcccaacccgccaaaatgctggttaaggattctaaatggctcaacttggccagctgtctatccctgaactgcctatggtgtacatgttcctataacagcacctcccagggaaaccagaggggctgcttccaggtaaaaggaggaatttcaccatagacataatactttggaatagttttggctatccttaagtaaaacacgggatgactatttctctaatttccacactagtagtttaaacaaagtagtcatcagaccacagaggagggggcaataaatactgcctgtgaggtaactcggcgaaatactttcacagaggcctcatgaggtgagcatttagcatcgtgtgtgatgtgtgtcaaaccaagaggggattcagggagacttccaggcttgagcaaacggacaaatatacctcctcttccagacctctcctttcatatggaaaaaattcgtttgggaccaccagaaaacaaaagataaaagtatcgtgttagaacaaggatggattaaaaatgacctttgcttgaactgaaacagaagctatgtgcataagtgacttaactcctctgtaacttggctttcttatcatttacacgagggtgctaacagtaccctcacaaggttcaagtgaagattacataggacaatcccttagtcaatgtcttggtacactgtaaaggctcagtaaatgctggaaaatcatattagcaactattttatacccgtaattgtagctggaagattgtattggatgctaaataccggctagattccattcggtaactatcataattatttatttgcataacaatcaaattattggtgcaaagcagccattattactgtaaaatgctttaaaatgctccttttgatagtccaggtacgtactgcagcacaaaactaggagaaaccaggaaatggaagtaacgagtaagtttggatgcttcgattctaccctagattgagacgggtgagcatagaggcaaaaaaagacattttcttccaaacaagaggtgaccaaacgggcaagggagacctcctcccgggcatgcagagcgcagcgattctgtgcccagggagccggagggctggggctgggagatcccggcggagccccggcagagcagtcgcccgtgagcccccgcaactcagacgcgctcggcctcgcgctccggggctgggaccaccgagggcgagctgcagccttcgccacccggtccgccgccggactccgcctcccacaaacagcccggcaaggcccttttccgccgctccctcatccagcgaagcctccttcccagcttccccggcggcggcgccgtgacgtcacttccgttctccagcgcgcacgtgggaggaagtgctggtgccctctgccgctgctcccgtctctttggttacgctcgtcagccggtcggccgccgcctccagccgtgtgccgctatgggagtcccggcgttcttccgctggctcagccgcaagtacccgtccatcatagtcaactgcgtggaagagaaggtgaggaggcgccaggcggccgccacactc

SEQ ID NO: 26280 - DNA, 2300 bp, Homo sapien
tgcttcttttggattaaaccatagcaagttgatgggttggtgtgcagtaatggattattcatggttacctggaagttccaaaatgccttggttattttatgttcgacagggaactagtattgagttgctgtttaatctgtggtcaatgatctttaatttcttttcttctttcttacatttttcaaccttttaactccccatacctttaaaatggagaatttcccaagtgtttaatccttagtggcagtctatgttgtaggtccacgtatctagaggacttcctgttaactgggaaatgccaggaagtgtcaagctttggggctttgctgctcatttgggtgctcatttgggcttttctttgtgttggcatctcatagtagtttatggtaagacttctctcagaatactcactgttcgatgtttttctcattgttgattgatagctgatctcattatgcttggccttgccacacatgaaccgaactttaccattattagagaagaattcaaaccaaacaagcccaaaccatgtggtctttgtaatcagtttggacatgaggtcaaagattgtgaaggtttgccaagagaaaagaagggaaaggtaagaactttgagatggtagttgcctcattaaaaaaaaaaatctattgtggtaaaatgtatatgacataaaatatcatttcaaccattttaaagtatacaattaaatagcattaaatatttgagttaccttgtttttaaaatggatgaagagaagattgtggttgattagttctttatgtgcttgttctgttaccgttacccttcacagagatgtatcttttttcttttttttttcttttgagacagtctcgacagagacgaatcttttaaagtactttaaaataaacctgcattcaaaaacatgcacacactcatcctttctacttagcactttttctgatattgcctatatctacacgaggcttagttcccatagataataatgcccatagcttgtaatttgtttgtggaagttatttgtttgaaatactcttcttaaaaggaactacaacttcttaagacttttaagttactcccactttttatgtattttaggttcacttggttatgtccagtcccctttaaaggggcttctgtttcaataatatggtgcctcttgagtcatatgctttttgaggggggaaaaagaatatggtgcctctttcaaagacatcgttaagtgaaaaaagagataaatatagtgtattatttcagatatgtaatacaataaagacagtatacatgtatctatgcacatctgttcacaaggaaggggtaatcattggttgggtataggtcatcagttggcaaacttcaatcctccaggtttggcctgtgagctatgttttttacatttttaaagtgttgttaaaaacaaaataaaacatgaaagactattaaacagagatcatatatgtcccccagtagccaaaataatttactgtctggccctttgcagaaaatgtttgctgacccctgatctagacgtggttgattttatgggtaatttttattttaaaatgcattggtgagcttttaaaaattaaatacttgtgatattaaaatggattgtgcgttagaaaaagccttaaaatttgcttggttggaaaaaattactggacgtagagtagacttgtttcatcttcattcctgttcttgcagcatgatgaacttgccgatagtcttccttgtgcagaaggagagtttatcttccttcggcttaatgttcttcgtgaggtatgtagcaataatcattgaaatcagcactctaaagcagggtgcctttgatagctgtaatggcagcattcctttttggttgtagtatttggaaagagaactcacaatggccagcctaccattcacatttgatgttgagaggagcattgatgactgggttttcatgtgcttctttgtgggaaatgacttcctccctcatttgccatcgttagagattaggtatgtgcatttgtgtagcttttcaaacgactgttttaggcttcttgactttactgtgcctactggtcctaatgcataatgtttgtctcttgctgacagggaaaatgcaattgaccgtttggttaacatatacaaaaatgtggtacacaaaactggggtaagttcattcttgaatgatttcaaaacagaagtatttgcttttataagaagatcattttacatatattttatcacttacagggttaccttacagaaagtggttatgtcaatctgcaaagagtacagatgatcatgttagcagt

SEQ ID NO: 26281 - DNA, 2300 bp, Homo sapien
aaacctttatcactgcctgtcctaccttgccctgccccatgccatcttgccagtacagaaaatctgagctaaagacagttgtcagtgaagagtgagttgtaagaagaactagttgagtaataagtattgttcagctgttgagcttatggtatatttattgtaagtgaatccatttttgtgtacttaaaatgaaaatttctgtaaagcagatagactctagttaaagtggcagtattcagaaagaaaactgctgtctaaaaatgtcaaccaggtcaataaaactttttttaaaaacctttttaactgactgtaagtgtaatcattggaggaattttgaaaaatatgttaaaggaaacaagttactaacttatagagaaaaatcactgataatcgattgatgaatatgtctagtctgttgtatatatgtttcccatgtcattaaggtcattaagtattctgttactaaatttttttttttgagacggagtctcactctgtcgcccaggctggagtgcagtggtgtggtcttggctcactgcgacctctgcctctcaggttcacaccattctcctgcctcagcctcccgagtagctgggactacaggcgcccgccaccacgcccagctaattttttgtatttttagtagagatggggtttcactgtgttagccaggatggtctcgatctcctgaccttgtgagccactgcacccaaccttctattactaaatttttaaaaatattatctgagttcttcctttttaggaaggactagtttttttaaccagtccactgttattcatacacttgggttttacagtctttgaaacattatgaataatagtgttataagtatccttaagtataaatctggtgtataaccagagtcctggaagaagcattgctatgtcagaagacagacttaggtacttaccaacctttgggataggtaaacacacatacataccactaccacggctatcactaccagaaaagaagttcgacccagcttatactcaaagcctgagtgtatagcttttaaaaatagttatactgtccaggcgcggtggctcatgtctgtaatcccatcactttgggaagctgaggtgggtgggtcttatgagtccaggagttcaaggccatcctgggccatgtggggaaaccccatctctacaaaaaatacaaaaattagccgggcatggtgttgtgtacctgtagtctcagctatgagagaggctgaggtgagaggatctctgagcctgggaggttgagactgcaatgagctgtgagtgtgccactgcactccagcctgggcaacagggcgagacctgtctcaaaaaaaaaaaaaaaagcatatttgtgtagttttcaaatggtgaaaattattttattacttaaaaataacacattaggagagaagggtacaagggtccaactgtgaagtttaattttttttgttaagtccatcccccccgcaccatagatttcttagctatttgtgtgcattttttgattttgcaaatatttctattggtatatccatcttttctttattaaaataagagctaatctgcctcaagatgctttggggtttttgcagtggactgaacaaaattaaaggttattttatttttattttttgttgttgtaaacctcttcgacctgtctacaatatcattttgaaatttgagttggggcaatgtctgttacttctctgtcatcaccaatagtcagctagaacataacttttccctcagagaaagttacatgaaggttatatgtaccaggaattagagacagtttggtgaggaagacatttagccatttgtcaaacccatttattaactaaaataatttttggagaggacttaaacatgaaaaatacctcagtctacatgataagacaggctgatataatcagatcattgaattgtttcttgttcttttccagtattaattttaaagacccacagtttgctgaagattacatttttaaagctgtaatgcttccaggagcaaggtaacaacagtaaattacctagatttattttgtacaaatggttttcatccctattactaagtgttgtctttttaaatggtcagaaagccagcagcagtactgaaacctagtgactgggaaaaatccagcaatggacggcagtggaagcctcagcttggctttaaccgtgaccggaggcctgtgcacctggatcaggcagccttcaggactttggggtgagttgtcagtttttagcccttgtatattttgctttttctgaatcatcccataaaacaagtcagt

SEQ ID NO: 26282 - DNA, 2300 bp, Homo sapien
ctcccaaagtgttgggattacaggcgtgagccaccacgtccggcctgtgtttttttttttcttttagtttactgtcattaagacttctgacatatttattttgtgatcttgttacttctagattcaatatttgtgtagaaccagtcttcacctatgtatcaatctttcatccattcatccacatcttgctataagaggaagaaaaacacaaaaggaagagagatagagggcaaggaaaagcatccttaagatgatttggacttggatggacgggattgtagagtgaatctaagcgccacatctctctgttgcttcctctggctatgagggcagagaggtacttttttgtccctagggagataggcttgaccaggaaggggacctggttcatttcacccaggctgtcacggcttcgagagcacctctccgctctttccgtccctcgacagaccggctgatctctttgaagtgatgttgggttttggtttgtgcttcaggaaccgctgatactgatttttatctgatcccttctctttacattttaagtgccagattttgaggggtagtattatccttttaaaaagagcagagattccagtgttttagccaagatgttttcttattttcttcctataaatcctgtatttgcctagatgcttacaactaaaatgtgtgttatttttctttcctatcctaattggatatgagtaataatgtcggttgtaaacctttaagatgttgagagtagttgttaaaccccccatccagtcttgttgaaactgtaagtttctgagcctcctgattaagcagcacaaaatcatgggtggttctcctctgcgtcttctgaaataaattaacatgaagtgccatctcaaccgacagcataaatgaatgtgaaactttgagattgcacagtgtagtagagagtggttacggggacatagcccctggcctcactctgtgacctctgacaggtttggtcattgccccagtttcctcatctcgaaaatagtacagaggataagaatatttacctgacaaaataaccagactaaatgaatttaagtagctaagcacttaaaatagtacgttgtacataataagtactgtgaaagtattaagtgataaaagatcatctttccttttatagaattttgaactttaaaatttagtcaaatagcttgttttagtaagattgagttctaagccatttattcagtctaaaatatttttagtatcataatcattttcttcgtgtagtatgaaattgcactcaagaagggccatttggtcaaactgacaactgtcaagtgtctgctgtaggtatttcttattgttggtgtttgatttgtctttgatgtgtcagttttggctgatgagtaattgtctgagtactgataacttgttggaatcgagtgtagccctgagtactcagtctgaataaagcatttggtttctgtagcccagagaaccttaaatgtgacttctcttcattttagtctgtaaacttgtcaattagccacgttgaaaagtgatttttgactagtgctatcagtaaacatggaatcttttctgtgattgccacgctgattaggtaaattgtcacttgagaagctattggcgaagcttggtttacatggccttagagctctagaaaagggataagtttttaaagaccaaaggaaaaaattttccactctcgcctgtaccttctgaagtgcaattcactgtctcagaattttttttcttcctctcaaatgggtcttctgttagagccatacaaatgaatgataataagtttgttttaccatctacttcattacagatcagccaggaaatacttctgctttatgaatacttccaggttatatatgttactaagagccatatgaagaaatttggttaaaaatagccttgaaatatttctttgagccttttttctttttggattgaaaacaaggagtgttttaacagttgcatcagagtttattgaaagttttggaaaatttgcttaggttttaacaaaaaactgtaatttttgtatgtgctgagtttatatggaaaaagaaaattgtcctggaggtgagagatagaaaatggaaaatagagaggcacctggcacactagaagtgatatattagaaatgtttgctgttttttaagacatttctagttgtataggttagacaactagttgtataggttagacaattatttcctcctccaaaaaaagcatttacacttagtaaactttacattccagttctacttagaaatactgctgtgcttaatctaagaata

SEQ ID NO: 26283 - DNA, 2300 bp, Homo sapien
aagagagcgtcaatcatgtattatttcgccactgaaataaatgcaaaaaccgagccgggacaaaggcttccaacgggagcgggacatttgtctacatttcgctcattgtccgcagcttagcaatcggtttgtatttgtgtttgcccgggtccgaccacccaggacgcgccgacgaggggcttgctctaacctgggccattgtcacccacgtcacatactgggggcgaggcagctagggctgcagaaagccgccgagcggctcggggagaggtgccctcacccagcgctggcaacccgggggcagctggggcgcggcggcgtccgctgcagctgcgcgcgaggaggacccggtgcccgcgcgctcagcttggcccgcgcggaggagcccaggttgtgggaagactagacctggaccccgcaggggtggccttctgtgcccctccccgcccccagacaaagctccttcctgacactcctctggggcgaacgagcatcaggtagccaatctacacccctgcaccccccccccaaaaaagttttaactagaagaaggggtggcaaatgcggcgtggtcttttccaaccccagcgccgaggaggaagtgcaagtcccgggaaagttcagttcccagagccgagagtggctggaaacttcacactaacctgacttaacctggaaacgtggagcgcgtactccgaacgcacccaaggcgtccaaaaagagaccacactaaagaactcgcgtgggagaagaaaactggggagaaaacgaggcatcgtcgggccacccagcgacccccctcccccgcagctttctgggtcttcacccaggctggagacacaacccccacccccacccccgcaatcccgccccgccgccttcccgctgctccacctctagccagaggctggagagggagggggccggagagggagggataatagagggcaggaaagagcagggccgtctgccctttcctccacccggggaaagaggcccgcagagcccagaggcagcagggccagggtccgaccccagacgaagttggagctcctcactcttaccccgccctccccgggaccgcccgcaaagcagaaagtgaactgcgcgtcctccttggccgcagagaggtggaggcggggggttgggggtgggaggtggggggaggcggagtgaaggaaataaatgagtctttagcaaataaagggcggctggaagggggcgggtcgcttggtggtggctctggccggcccggagcggagctctctcctgggttttgggctctctcgcggttaactggaatcaattacttgccttgtcatttctagcactcatccttaagcctcaaccaaaatattgacctaggaggcttacagaagttgggctcttgccatttgaaccggatcttgtttaggcaaccaccaacgatggaaaggagagatttccgcagctcggccttcgccccctcccccttttccaaaggcgccacaaatcgccaattttccggcttgccgggggtgggcgcgcgggggcggggaggtaggaaccggtgaatgttaaagaggattttttccctcctcctggtttctgttttgttttctcccctcctcctccccacccccaccttttttaagatgcaatttgttaaaacggccctttcaagtgtgtggactcgcgagcgacgcggtggccctttgtatgtaaatactgggtttaaaaaaaaaaaggctcgccccgtctttgcaattaattgacacgttacacctctcatcttgctctagagggccgttggctgggagcgcggagctccccaaaacccacaatttcacatctgcaaatactgtcttcatccacttgactcccaagacccgcccacacgtggccaacctttgcgtttttaatgtctcttcccccttttttccacccttctcccgctccctctctcgctccccctccctccctctttctttccctccctccctctctttctccccctctccccgcctccccaggttcgtgagtggagcccagccttatatggactgatcgctcgggcaatggcccattttttcctcgccaccagccgccaccgcgcgccgagcggccgccggagcccgagctgacgccgccttggcacccctcctggagttagaaactaaggccggggcccgcggcgctcggcgcgcaggccgcccggcttcctgcgtccatttccgcgtgctttcaaagaagacagagagaggcactgggttgggcttcatttttttcctccccatccccagtttctttctctttttaaa

SEQ ID NO: 26284 - DNA, 2300 bp, Homo sapien
tcctccaggggagcgctgggagtctcagaaacctcggctgttcctactctctcccctatgccctcttcctggtctagcacattcagcccaatgcctttggtgcttactgggctcaacctcagagctctcagatcctgaccccctcaaatcagttcatgttcaaaaccacgagtttcctcctcttggccctcaccgcatggctcccggacacagttagctgcacaggttggggagttcagaactgctttggtgcagggtagaaacagagaaattgttgatgttcaatctcaggggtgaataattcagggctgcgcaaaacctcatttaaatgaaggagaaatgaccattctgtggtttaacagagacttcctgaagctgcaggtgctgggagaaagacgaggccaggccacctgggatagagtggtgcgagattccaccgccagggagaaaggaacttgtccttcagacctagagctggagctatgcatttggcctcccgccggtcgcgcttggggacaggagggcgccggatctatgcgccccttagcagcagatcgggatccttttgcctcctgccccttctgtcactgcttggagagggatgagttctggtggctgggcctggctgtaggagacaggatttggaccgtgcccctctcgcatcaccgaaatcacccccactattccaagagtggttggctattaaacgtgaagatttcctgagagaaggattgaggacctggccaggaatgggacacaagttccgccttgtgtcttcctgacaggagccctgcaccgcgctggacgctcaccttgacactcccagccagctggggtactgatcccacccttccccggccgctgccccgggagtggggaggtagagagagccacacccgaaacacctttccacgataaacttttattctctatcttattattaatggtggcggaaataaaactaaaaccaaaacgaaaacgagtactagtactaacacactaatcaatttgagatgacttccccctcattcccaaagctagaggaggaagggggctgaaaggggctcagagcagtggaaggtcccaggcccagctggggttgggacgtgtgtgtgtgtgtgtgtgtgtgtgtgtgtgtgtgtgtgtgtgtagaggggtgggttccgggggggtggtggaagagggccgaggggggaggatagaaggagggggtagagtttcagggcggggaggggggcgctggggcgcagtgacgggaaccaatgagctgccaactcgcgcgtctccggcgtgactgccgagattgacgtggaggacacgtcaaattgattcccgcacgctgcagcctcccggtcagacgaatttctcccaatcggatgaagttcaccctgggcctggggtcgcgggcgtggagagtgtcctgggagggggcagcagcggcggcggcaggccctggagcgggcggcagcgcgctccgctgccgcgcacagcgcgtctccagcccgcggctgggccgccgcggctctcggctctcgggcgccctccctctatgcctctcacgcggcggcggcggcgcccaagctctcccggactgcgccgggcccagccccggccaccccggccaccccggcgccaggcagctggccggcccgctcgctatgggtaaggggcgggcgacaggcagggctcgggagggctgatgaggtgggtcgggtccgcctgcctcccttccctctcgtccgctttccctgggcgacccagtcctgggtcctggagaagctgcattctcctctgatccccagccttcagggggcagttgagcaagtctgggaagggagtgttccaagtagacgcgctaaaagtcgcgaaagggcacggagggctacaatgcgccgcgctccactccgcggctcctctgcgcccttgcccactccaagccagacccaggcggtttgcccttggactccgagctgtctggggacccacaggtcacctttggaagtgcgcctgggtgcagtccctcgctccgcgtggggacccttggctaacccgccgggtgttttctccccctccggctcactcttgtctggcgcatccgcagagcagacgtatggcgaggtgaaccagctgggcggtgtgttcgtcaacggccgccccctgcccaacgccatccgcttgcgcattgtggagctggcgcagctgggcatccgaccctgtgacatcagtcggcagctccgcgtatcccacggctgcgtgagcaagatcctggcgcgctacaacgagaccggctccattctgcc

SEQ ID NO: 26285 - DNA, 2300 bp, Homo sapien
gctaaaagctcatctacaaacccaagttcagctatattttctcctatgttatcttctaaaagttttatcgtttagatttcatatttaggtctatggtccattttgaatcaattttgtgaaagttgtaaactttgtgtctagattttgttgtatgtgaaattacagttgttgcagctccatttgttgaaaaactatcatttctccattgaattgcactgcaaaagctttgaaaagtgaattgacagaaccacagctctcaggtggtgaattggaacagttgcctaattttatcaggtcaatttgccactaaaacaaaaatattaacattctgtatggaattaaagcaagatcctgagttttgtaacacaagaaataaaatgtctaagattcacttcaaaattactcatcatatgaagaatgaggaaaatctgtgcttgcaagggtagacagtcaacagatgacaacacacagatgctggaactgactgacaaaggttttaaagcagctactataaaaatgccccaagaagcaattgtgaacactattgaaataaggggaaaaatagaaagtctcagcaaacaaatagaagctataagaagacctaaactcaataaaagggcttaatagcagtaaggagaagaaagacaaaagtcagtaaaattgaagatagacaaaaaaaaaattatctaatctgaacaacacagaaaattttagagaagaaaaaaaagagagcctcatgggctgtgggacaataatgaaaagtctaatattcatgtcatcagagtaaaaaaagacaggagaaagagtctggtgtagaaaagtatttgaagaaacaatgagtgaaaacttttcgcattggtaaagagaaaaatgtaaagattgaagaagctaagcaaacccaacgcataataaacccaaataaatcaatgcctagatacattgtaattaaagttctaaatataaaagacaaagaaaaacctggaaaacatccaggggaaaatgattaagtactgggttatttgagaaaccatgaagaccagaaggaagtgacacaagttttcaaatgctgaaagaaaagtcttatcaaaccaggattttatattcaacaaaaaattccttcaggaatgaaggattaacaaagatatagtcaaatgagggaaaactaagagagtttattgccatcagacctgtgctaaaagaattgcttaaaaaaattcttcagacagaagggaaatgataagaaatggaacttggaacttcaaaaataaaagaagatcaacagaaatagccacataaatagagtagactatttttctccttttgagttcttttttccttttttctatttgtgtaaatttagggagtacaagcacagttttgttacatggatactttgcatagtggtaaaacctgagcttttaatgtaaccaccacccaaacaatgtcatttgtacaccttaagtaatttctcatccctcaccctcttcctactcttcctcccttccaagtattcagcctttattattccacactctatgtccatgtgtacacctttttaaggccctatttataagtgagaacatgtggtagtatataactatattccatggaatgctactcagccataaaaaaagagtgaaatcatgtcttttgcagcaacatgggtggaactagagaccattatcttaaatcaaataactcagaaacagaaagccaaatactaccacgtgttctcacttataaggagagcagaggaagacagattaccccaagaatctaggatatgggtgcaaaagaaaggatggaatcttcaactccaaaatgcagcatcaccctgttttatctaagttatctagtttaccagcctggagttatctgtagtatgtgatagtatagtatagcatacattttcccccttttagtatctacatggtttgtaatgatttcccctctttcattcttggggtaatctgtcttcctctactctcctgacacatactttgggcagatcccacctctaggtacagaatgtgattggcaattcctgtggaccaatctgagcattgctttcacttggctgtcctgattgctttgaatggagagagtaaggcgcatcaggcagatacaaagcattttgctgagattactggcactatataaaccctgcactcccagggagcagtagaaatcttgagaatggatccattagagtgtaaggcagacgttaaagatggagaaaccaacttctaatgacagcttggagcatctggatctagtcccagactttttagttatgtgag

SEQ ID NO: 26286 - DNA, 2300 bp, Homo sapien
gctgggactggaggctcacagggggcaggaaccatgctttaagcctcctctactctctatcctactcaaagggcccagcgatggatgcacacagcaggcacctaattgatgttttctgttgtgaagttccttaggggatctcatgggctgcatggctctgttcatgtcatgtgacatctctggggctcggttttctcagctgtaaaatgactttccagagatgaagtcttccctttactctctatgaaacacacattaaatccaaatctgtcctgtgaaggcagccaccattgaaggcagactgggagggagcacagttggactggccgtgagcagctctcccacttttgcagtcggcctaagagtgctccttctgtgctgtcctcattttatttggatgtgagtcattcagcatgatccccatccagccaaaattactacaaggcaaggatccacttgaaaactggcatcactgaccacaggagaggacatggcactatgatctcaacaaagcccctgaaccttcatgttttgggtaatgtttggagcaagtatttgccttcaagagatacataggccagaggaaagttcagaggatgctcaggtatttgaaataacaagtaaaataatcattagaattggaaaaccaaaaaaggattctgtaaccgaagaaaattctttaccgtgcaacatttgtcaaggcaaagctatctgaggctggaaaattctggtatgttgtggcataaagcccttgtggcaaaatcagagtatatcacatctatggttttgtctgtccagaacagcccttcttgtttttcaggtaaaatgtttactcctcctgtttacttgtttgttgaggttggaactatcaatcatcattctctgataccctggaccctggtgggcacctgacccaggctgacccagtcagagttctctatgaggactgtagctggaatcaatgtggagggtcctgtttcctcactggtccctgtaatgtgaagaggcaagccccacggttccagaaggagccattaccccggcttcactctgacagtcggccagggaaaacgaggcaagcaccagagagaagcggatgcaggaagcagaggaccggtccccagccatccttagggctggctccacgtccccacccagctccacgtccccacccacactgcttagggttttggcttctgttttcatctctcctatttttaaagtctttttcttttaattgcaaatgaaaaaggctccagatcacatgtagagtattcataaatgaaagaagtcctactctgtatgtatgtacacaccttcctcagaggtgctggagcagatgcttgctatttattgtgttcctaagtgtctagtttgttctgcctctggcacaacttgtgactctgacctaggaaggctggaggagaaaagttaagtgggtttgctcagggaaaaaagaatgttgaacatgtttctgtgaatgaaaatttttttgaaaaggagtttggagaaaagagattttattctggtgtacagtctgcaaactggggacatgcagccttcagtgtaaaaactaagttgtgtaccagaaagcgaagggagagctctggttttctactgaaagttcctgcccaagttcccaatcaggttcacctatgcaaataaaccctgattggtcaaggcagctgagtcctgattggttgaggcagctgaacaatgattggttgagaaagggctcagcttcaaccgagtcccaaagctgaacacaagtgtcggttttcagggaactcaaagtgtgtgtgtgagacatctagtcagcaaatagctacttggctttattttaaatttgggcccagtttactaatataactctatttacatttgggatccatctttatgaattggctctttcaggttcatatttagtcacatcttataatgaaacaaaccgtctctagaacgtatgcatttgagcactccagtactcgagtatccaaggaaggtgaaccagcccaggagtcctgtaaacagccatccttccaagtcagcacataaagttggaggtgcagcttcagaagaaggctagatctgcctttacccagaacagtgagtgacgtttgataaaaatgaagaaataatgacaagagaaaatattgtctcaattgtatcagattaaccgaaaccattaacgtcagagcttgatggaacaatcacccatcattttaaacaaaatgtgagtctactttggtggcttccccataggcccagagggtgctggatgcggatcttgtcattcatgt

SEQ ID NO: 26287 - DNA, 2300 bp, Homo sapien
attcaatgtatgggagaaattggaatcccattgcggggtggagatacttgttcaaggacaaaaaacaattttattaaccacaagaatctcattcattaatcccaaaagacttttgatccagatgggaccttttctttcatggagtatgttgaattgtaacaaactcagctatgactgattattgcttttgacagattctacattgcttctcatggcaaactggtggaaataattccataataaagctcaagcagatttttatttcagtagttatctcaacacatttctagagatagaatcttcttgtacagtatttatatttttattttttagtatttgaaacatgttagaatctttaaacctaatgatctagaatttgagtgacaaaattaatgaccttgtactacatgaatttggataagtgaaaaaaattgtgtttggcttctgtttcagtctctcagggcgctggcaggcacactcaactctgtacagggtctgggaagtgctgggagtgatggtgcagtcccccagggccagttgcagtggggagctgttcgggaacctgagcctgatgggccagggaaggaaggagccaccagagcccagagcaagtagcatccactgataggtgctgcgggcttcagtagacaccgtggtggctcagcggggagacagcaggaaagagcacctccccaacttcagtctctctcacctcacatcttctgctggtgatttccattggctgagcctaactggaagccagaaaggaagccgatgatgcagtttaaaaggcctgagtaggtggagaaaggtgagtgctgcattcagaggtaagtgatccagattcacttagcacaaggtcattaattttgtcaataaaattctaaatcattaaagattctaacatatctcaaattactaagaagaaaaatataaataacatacaaacagattttcctgtacaaggaaggtagccagcatagattcttttttttttcaagagggctaactacatgcacttgagtgtaaatataatgtgaaaatatgagcctggtggattttttacctgttctttgataaattatgttcacatttggccatataccatcacagctctgctgaccaggaactgagctgtttgagtcctccaggaagcagatgccaagaagaaggtaaaagagcaagagatttattgtgagcaactgcaaatggcaaagtggaaaaaagcaggagttgacagggagagccttcagaccatgctgcggggctaagactagcaggacaagatggggagaagggaggattaaaaagatggactcttagagcacagcattgctccgagaaagcccccagagaccaaccaggagctctgccacaaagaccgcccatagagtggtcccatgttgggaggagatggccctgccttgttccaatattttgctcattgtttgagggccaccgaagaagagtatcatggctcaaaagcagtgccagacctaggggagtttcctcctcgaagctgggtaacagatcttttcttggagatctgaggttgcatctccatgtctgccacagataccatgactttcaccccagaaggagcacaccatgagacagaggaaatcctgagcaggcatgaaagggaaactgtctcatgtctctggagaaaggcccctgtggagggaaaagagtaaggcaagtggaagcaggggttcagggacctatgacttgacctccttcatcaggatggaaatcttgagcaaggggaggtgttgagaaaaccagaaactggaaatgctgatttgagagcactcagagggtggccctgagtttacaagggatgctacagttgattgacaatggcgtgatggcctgattaggctgaaataaggcctccatcagcctccagaactactttggctgttggatggagtggaaggcctgcaggagggcctgcctgctcacagcaaacacgacgggcagctatgggtgccagctgctgggcctggtgggccacatcaactgtggtcagggtaaacaccctgtagccaaggttaatatctgagccacagaccaaattggcagttaaagctggtactcaggacattccgttgggctagagagggagaaccactcagctggcttaatgaaagacacgggtgtgggactttgtcagcagatgcaagcctggagccaccacacagcagagaggagtaggaaaccagagtatggaagccccttcctctcctgcaccaaatcactcacagcaccatgatgggcagcagtagaaggattagaaa

SEQ ID NO: 26288 - DNA, 2300 bp, Homo sapien
agttttgggggtgcggtgtgtgtgtgtgtgcgtgtgtgtctgcccaggcctgcggagaaagctttgaaaaattgctcattctttgagctccaatgcttactcctctttccctgccctcggtggagtgatgaagttgctcccatccacgcgctaggtgggaccccgtgggaaatgctggggatctagcccctctgactccgctgcgcacacctccacgttcactacgtagccgtacacaccatcaagctccttccctggcgcaccgggctggcctgcccctcgtgggagccttcagcactcgggggaccgataggcacggcttccgcggagatacagaccttgaatttgtgggagaatcccgccctggcgctcactcggcgggcttattaatgccctctttatgaagtgtccaaaccatctgcatttcagcagcaaaagatgctgccggcggcttccttctgtgtcccaaaccgtgcagacctgagagtcctggggttagggaagtggttcccctgtgcctactgctacctcctcgcttgccttccagcctcacccttactcaagcttcaatgcgaagctccgtgtctgccatctcgcctgtcttctgccaccatcgcccccaattttggacaggtgggctggatgcccactagttcctatgcattctctgtgtctgagggggtgggtacagggctggatccccaaggtccagccaggttttcagaaccaagaaagagcctccacatccaaacacctgcaatatccccccactccaaatctgggctcacaggctaacccagaacagaagacaatttttgaacccaagagctgctggggaaataaaagtatacgattgctggagtttctaatttctattaagcagtccctctggaagacagagaggacagagacgctcttgaagtcaactccatatgccccatcattgattcctggattcttctctcctcacccctccctccccacctcctgccctgtttgttttagttacgaaatgctgtgggcacctcggttgtgactgaaaagtaaccttgaaacacgccggcctgaatatcagagacaaatctcagcctcccaaccgtcggccgctgctagaggggctgcttgcgccaggcgccggccgccccactgcgggtccctggcggccggtgtctgaggagtcggagagccgaggcggccagaccgtgcgccccgcgcttctcccgaggccgttccgggtctgaactgtaacagggaggggcctcgcaggagcagcagcgggcgagttaaaggtgtgtacgtagtttttctaaataggacagcgctttgcaaattggctgtcatggacttgctgttttgacagagaatgagcactgagagcgaagaaacccggcataaataaatccggctttcatagggatctgccgggcactgaggctggacgcgccctccgacaggcgcaccgggcgcccggcgcgatgagacggggcgggggctggaggccggagccgccccagagggtggtttcctcccaggtccctccttcctcaggggactcgctgtggacccgggaggaaagggggctcgaccagggatcccgcgtgcccgatcgcccgcccagcccgctcccctggcccgcccaggagtgcggggcgccgcggcggtggggcggacggcaggcgctgaggggcaggtgcggagcgccggctgcggctacctctcacctaggtgtgagctgattattcaaatgggctgccccgggtctggggattggaggcccgcgccagcgcgccgcgctatatcaccagcctcccacgtcactgcggcacttgtccgctccgcggtccacacctcctcctcctcctcctcctcctcctcctcctcctcctcctccaccaccaccaccgcctcctcctcctccttcctcctcctcctccccacccccccactagcccccgcgccgcgcgcttcccgccgcctcggggcagctcggcactgccaacctcagccgccacccggcagcccgtgagcgcggcggcggcgggtgctccctaccgcggggcgctggcctgggcctcctccgctcctcgcccccccccacctcccgcccacttccaactaccgcctccggcctgcccagggagagagagggagtggagcccagggagagggagcgcgagagagggagggaggaggggacggtgctttggctgacttttttttaaaagagggtgggggtggggggtgattgctggtcgtttgttgtggctgttaaattttaaactgccatgcactcggcttcc

SEQ ID NO: 26289 - DNA, 2300 bp, Homo sapien
cattgaggcaacatccaaaataaaaatagcatgctaaccccaagcacagtcctcagttataaagcagctttattatagaagccggcggtgacctaacaaaatggaaagggaagggctctgtaggtctcggccctacatgagggtagactaaagagggattgggagaaacatctgcagcccgaggtccccgcgaactttttcctggagagaaactccgggagcaatcttcagcattcaagcctgagccagaactctggatagccctttagaaatcagaactccgggaaggaggagctccaaagaccgctgagctggaagggaacgcgaaccccaggctgtctgaacgtccctgcttccttcgcagcccgttggtgtcccgctcccagctacctaaagctaaccgtagaccccgctcgcattcccatgggcaggcgtgccgggagggtgcgggagcggctgctccgagactctaggaggcgtcatccagccctaccctaccggagctcccagaacctcgccagggtgcaggaggccgttttgggttcgcgcagaacctaggggttggggctccaaaaaggccgagtccccccgaaggcgttttcggagagactgggagagcgggggagaaggtgctccggtgccggagctgcggggttgggatcgcgggggtaaatgaggactcgggtcggtcccgcgggcctggcggccgacagggggcgccctgtcactgtggaagcccccgccgagcgctctctggtgtccctgaccccggccaccaatagtgctgtggtggaggtgggggcttccaaagtccgctccttggaagtgtagcgcccccttctcctgcggccctccagctcgctccttctgttcctggaataatttctgggaccaaatttccacccaggagcaaaatagaaagggaagtgggcacccacataagctcacaaatactctcatacagcacacgcacagactaggtcaaccataacattcttttgagttttgggggtgcggtgtgtgtgtgtgtgcgtgtgtgtctgcccaggcctgcggagaaagctttgaaaaattgctcattctttgagctccaatgcttactcctctttccctgccctcggtggagtgatgaagttgctcccatccacgcgctaggtgggaccccgtgggaaatgctggggatctagcccctctgactccgctgcgcacacctccacgttcactacgtagccgtacacaccatcaagctccttccctggcgcaccgggctggcctgcccctcgtgggagccttcagcactcgggggaccgataggcacggcttccgcggagatacagaccttgaatttgtgggagaatcccgccctggcgctcactcggcgggcttattaatgccctctttatgaagtgtccaaaccatctgcatttcagcagcaaaagatgctgccggcggcttccttctgtgtcccaaaccgtgcagacctgagagtcctggggttagggaagtggttcccctgtgcctactgctacctcctcgcttgccttccagcctcacccttactcaagcttcaatgcgaagctccgtgtctgccatctcgcctgtcttctgccaccatcgcccccaattttggacaggtgggctggatgcccactagttcctatgcattctctgtgtctgagggggtgggtacagggctggatccccaaggtccagccaggttttcagaaccaagaaagagcctccacatccaaacacctgcaatatccccccactccaaatctgggctcacaggctaacccagaacagaagacaatttttgaacccaagagctgctggggaaataaaagtatacgattgctggagtttctaatttctattaagcagtccctctggaagacagagaggacagagacgctcttgaagtcaactccatatgccccatcattgattcctggattcttctctcctcacccctccctccccacctcctgccctgtttgttttagttacgaaatgctgtgggcacctcggttgtgactgaaaagtaaccttgaaacacgccggcctgaatatcagagacaaatctcagcctcccaaccgtcggccgctgctagaggggctgcttgcgccaggcgccggccgccccactgcgggtccctggcggccggtgtctgaggagtcggagagccgaggcggccagaccgtgcgccccgcgcttctcccgaggccgttccgggtctgaactgtaacagggaggggcctcgcaggagcagcagcgggcgagttaaaggtgtgtacgt

SEQ ID NO: 26290 - DNA, 2300 bp, Homo sapien
gcactttgggaggccaaggcgggtgtatcacgaggtcaggagatcgagaccacagtgaaaccccatctctactaaaaatacaaaaaattagccaggcacagtggtgggcgcctgtagtcccagctactcaagaggctgaggcaggagaatgacgtgaacctgggaggtggagcttgcagtgaaccgagatggcaccactgcactccagcctgggcgacagagtgagactctgtctcaaaaaaaaaaaaaaaagaacatcaagaaggatgccagggagtgggacgcctcatgcaggagggaaagggatatgaaatatgtttgaaggagtaggcaagatgtccaaaatcccggaaactacactaggtatttcaagcagagagaacttaatatgggggtttgtggcacaggtgaatgaagagttgaggagtcaaacaagaagtagagacaaaatccagatatgagcaacaccaggaaactgatctcacccctaggccaggggggcaaaaggagaatgcatgtggggctctctgagcccaaggtctctgtgccctcccagccaggcacaatgggagcacagagagagactgccttgtgctggagctaaaatcatggatgaagccatgagaaacaggaagaagaggctggcacatccaggcttctctcctcctcccagcagccaatctccggccagtgcctcccattggctgaatctaccaggaagcgagagcgcaaggcctcccgggaaatgtagttcccttcgctgcagcgcatgggcacagctggggagtggtaccctatgtgccatttagatgtcatttctgctgtattccccgcagttagccctctgtgcaatggtcagattaggtgcttaagaaacctttgctgaattatcaactactcatgaaacgagaaaaatccaaacaagtgatgctaaggactttagtcctattaccccaaatccatataaagttcttcatcctcagcaagactacctgattgtatgcagttcacctgattaatcaaagtgtgcttatatcgctgatgatggagagctgtaagcttctccacagcattttctcagccacttacgtatagatggtattcacatttagtcttgcatgtctaaaagctggacgaagtcccccacagcaataggacaaggtatgccacaggtgccctccaatccagctggtgaagtcaaaactaacttcctgcaaaagagaatcagtccacactgcgatgataaactggtccaggaccggctggttatcacacggagtttggaatccattaatactgaatgttcttatattccctcttcccgtccttcttccagacattgccctccatctctctgatggttcatatgtggtagccagcgtgtacaggatatggcttcatttcctgctgtgatctcctctgcgatttcaaaaaggttaattcgttacttggtagaaaatgtgaaattcaacaaaaatattgcctttcttactaagcaaactaagcctggtctagctggggatgtgatgtaacaattctcttggtggtctgccctcaaaccgtcaggtttccatagccctaacaatgtggccgtggatcatgggggagctagcattgcctccagggtgatgtcacaattcccaaatccttgcactaggtggggccagcctcctgttgtgtagactcatcaactataccagtcctctgttcctggtctctggagcttcaatttgggaaagtgacccattagcttctgaggaccagggtgagagagggcaaacttgaatgcccttcacaatggagagatgtgtgcagaccggacagacatcagttcctttatcagtgcacaggtagctgcaatgtaagtggctagtgtgcaggaacagccagggagctgaaggataaacactttggcttcattctcctggaggggacagttctgagtcctcatgcccccgcccccctccttcagagaccacacctcggctgctcacagcaatggctgcccatcaactcacccttcaatgcttccacccccacacttccggtccctcttcctcactctcttacagatgcttcctggaatcctctctcaaataaactgcttgcctccaaatccttgtctcaggcctgcatgtggagagataaaacccagacaaagaggcagacatgagcagatgagctcccccgaacaggagacaagtgggctgagaggtgaaggaagaggatgaggtaagagagtggggatggggagagcggtctaggcaggaatgcacatgcaagggttctgagcacgcaca

SEQ ID NO: 26291 - DNA, 2300 bp, Homo sapien
tagggttttcgagataaacactcatatcatcagcaaacagtgacagtttgacttcctctttactgatttggatgtcctttatttcttactcttgtctgattgctctgtctaggacttctagtactatgttgaagaggagtggtgagagggggcatccttgtcttgttccagttctgagagggaatgttttcaacttttccccattcagtattatattggctatgggtttgtcacagatgactttcattacattgaggtatgtcccttttatgccgattttgctgagagttttaattataaagggatgagggattttgtcgaatgctttttctgcgtctattgagatgatcatacaaatttgtttttaattctctttatgtggtgtatcacatttatttacttgcatatgttaaaccatccctgcatccctggtatgaaacccgattgatcatggtagattaactttttgatacgttgttggatttggttagctagtatattgttaaggattttagcatctatgttcatcaaggatatcaggatatcagtcttgttttcttttttggttatgtcctttcctggttttgatattagggtgatgccagctacacagaatgaagtggatgaattgggggggtcctctttctctatattgtggaatagtgttaataggattggtatcatttcttctttgaatgtctggtagaattctactgtgaatccatctcatcctggactgttttttatttggtaatttttcgattaccattttaatcttgctgcttgttattgttcaggttatctaattcttcctgatttaagctaggagtgttgtatctttcctactagagaggaatttatccatctctcctaggttttccagtttatgcacatacaggtgcccatagtagccttgaattatcttttttatttctgtggtgtcagttgtaatagctcccgttttgtgtcttattgaggttatttggagtttttctcctcttttcttggttaatcttgctgatggtctatcaattttctttatcttttcaaagaagcagctttttgtttcatttatcttttgtattgttttgcttgtttgtttcattttcatttagttctgctctgatcttggttatttcctttcttcttctgagtttgggtttggtttatctaatcccttgagaagtgactttagattgtcagtttgcactctttcagtatttttgatgtaggcatttagggtgatgaactttcccctcagcaccccctttgctgtatcccagaggttttgataggttgcctcactattgttgctcagttcgaagaatttttaaatttccatcttgatttcgtttttgacccagtgatcattcaggagcaggttatttaatttctatgtatttgcatggtttcaaaggttccttttagagttgatttccagttttatttcactgtggtctgggagagtgcttgatataatttcaattttttaaaatttattggcctatttattggctattaaaactattggtctgtttattggctcattttatggcctatcatatagtctgtcctggagaaagttccatgcgctgttgaatagaatgtgtattctgcgattgttgaatggaatattgtgtatacatttgttaagttcatttgttctaagatatagtttaaatccattgtttctttgttgactttctgtcttgttccagttctcagagggcatgctttcaacttttccccacttggctctatttttggtctggttggcctcctgctgagaggtggcactttcccgagagtatcagctgcagtagtatagagaggaacttgtggtgggcagggccctagaacttcgaagagtatataccctttgtgttcagttacgagggtgggtaggcaaggaccatcatgtgggggtggggctaggtgtgtctgtactcagactctcctcgctctggtcttgctgcagctgctgctggggataggggtgaggttcccaggtcagtggagttatgttcctaggaggattgtggatgcctctgctgagtcgtgcaggttgtcagggaagttggggaaagtcagtagtcacaggtctcacccagctcccacgcaatcgaaagggctggtctcacttccaccatgctccccctaacagcaccaagcctgtttccaggcagtgggcaagcaggcctgagaacttgccccaggctacccacctcccagctgcaacagaaagtaggactttagttctttccctgcctgtggagtctgcatgctggaggattcgtgcc

SEQ ID NO: 26292 - DNA, 2300 bp, Homo sapien
tggctgttctctctcaggatactaaagaagcaatggaacaggaaaccagccgctacctttctcccccaggagaggagacctagagaaactttcacgctgagttaaaacacaggaaaacaaagtctgtttatgagacgcttttcagcacacccgtcccgttcttttgcccagtacacactggggcctcttccttgtctgttgattaaactccagcatcaggtccaagtggcttccctgtacattgtcaagagtggcatggagccaaaggctgagtctaagggatcttctcctccaagtgctgaaagcatggcccacaggcctaactgatccctgtggagcttccagcccagtgatgagatagtgaatcaggggcctctcagcccctcctgaagccagaagcagcagctcctttgttagagatgtgaataactcacctcccatctccacacttcaaaactgctgctcaagcttggaggtacttgcaacctcaagcaatcttcagaacctctggcctgcaagtcagagagacacagctttccctgcaaatcacagtgcaccaagaggagtcttggatctcagcagcaatgacagcagtccctgaatgccacttctatcgcctgctggtgtggaaaataatctgaagtgctctcagcagctcagagtggctttgaccagttctgccattgagcatattaaaagcatgatttacccgtggctaagtgtaggacattgtctgaagtcgcctgcgtggatcaggaaagtgtcttcagattcccacctgaacttcagggacaccctagacattgcaatgatagagacctcagctgtaccccaaaaactcaactgttaaaccaaatataaaggtgagggcttccttaagatttcattaaatggtttcctttaaataaattgatcccacaatcagatgagataaaagaaaagtcagccagagaaaggcacgggactaggataggtcacattggtccaatgtttacaaagtatcaaaattaggtccactctgctgtcactgtctggaggacaggggctgcagcacactggggtaaccatgagcagcacctctgttctttggtagttgttttcagactgtcttagcaacctggcttcatggttgtgcatataaagagaatgagatgtaagatggaaagcaaggatttcaattctgagccatctacttactggggtatgagcgtgggtgggacccttggaggaatgcttctcaaaatgtggacccagactggcagcatcagcctctcctgttacgaatccgcatcctggtacccacccagacctgctggatggcaaatgcagagggtgggggccagccatctgtgagttaacctgccctcgagtgagggactcgatgactctggagtctgagagccactggctgggcccttctgggccttgcttccttatctggccacttcccaggatagtgaatgaggatcaggaaagagaattttccatgaatgctttctgaaatctctaaaccatggccacatgggctatggggcactcgaaatgtggtgagttcaaagtcaggtgctgtgtcagacacacatgggatctcaaacacttatgatgaacaaaggaatgtaaaatatctcatgaatacttcttatatttcttacatgttgagatgataatattttggaaatagagataaagcatattatgaaatgaattttacttgtttctctttttttttcaccgtggctacttaaattttaaatttcattcgcaccacacattccatttctacagcattatagacctacaggatatggctattcctatagcaatgctgcccagggttataaatgatgccactaacaaggtggccctgtgctgtcaatacaggagccactagacccctgtggctctttgaatttaagtaagttgaaaataaaaatttaaatgggctttcttagcatattaactacatttcaagtgctcagtggtcatgtgaggctgtggctgccaagctgggcagtgcagtcctgagatgctttcatcacaatggaaagtggaacttttgaggttcagaacctggagttccaccgtggctcttacagtctcagccatggttgcataccttccaagctccaccgcctcttcttcctcgtgggcagatccctgattttgtgtaggacagcacttgaaatgtatttgtgtgctcaacattggtttcctctctggaacctgggatcacttcaggggtggacacgtggcccaaccatgactgatgagacatgcggggaaatctgcagaggcaactt

SEQ ID NO: 26293 - DNA, 2300 bp, Homo sapien
cttcttacatgctagcttactatgcttggaggcatacacatgtgtatggggagaggagggcagaatcggggagcattaggagaaaaacctaaagtaggcacaggaaagattccaggggctcacacatgaggcaggacaagaagaaatactttctcaggaaagggaaggggccgagtgttcaatgggcagagaggacagcagaagagaggagaccaggaagacaagatagcccccagcacttccacactaagccctggaaaggctatctgcagaggagccacctaagggtcttcccaagaccagggttaaagggaaaagcccctaaactcctcttccctcccaaatctgaggttgctcttgttcccttccaccaaaggatggcaccaagtagaatgacaaaggtgccatctccttcctctttctcagggaagggtctctctcttaaggacaaagatgtgaaaggtctctctcttagggacaaaaaggaaaggacagaccaacctacagagtggaggagtgctagaccaaatcctcccaatacatctatttgagtagcagagactggagacagtggttgaggtcaactatggggctgcactggtgctgatcatgcccgtgctcccatcccacacctggataaacagcagtgggcagcttcccccaccccccagtcttagaaaggcctcctccagttgcaacaggactccctcctccccatcgctgtcccagccacccagcggaaagctgagaccccaccccccaggtggccaattttagacccactaaaggcctttctgggctgtactgggggctaaagggggccaccatcccacagagaaggggccaaagacagccaggatcctaaaagtcagagctactttaagaataactttcccaggccaatccccagttcaggaacgttcctgtgccctgtgccagctagagggactagggctggagccggcggctgctcctgggtgtccagtccaggagccagtgaactcactatctctggagtttagcagaagaagggtaattccaggccggaacccctttctttcccgacctctcgaccacagtcctccccaggcacattttagtggccagggatggagacccgcggataatgactgaaccaggtcacagggtgaaggttctgagatgtccggctcccgtagcttctgccagttcccgagggagctagcacaggcttggccttctttggtggcatctctgcctccacctgtccgtctccattccttgtgcccatagcacctcagctgctcggacacagaagttaaaaggtccggcatctgcacttgtccagagtgggttggggagcagagaaaggagtggtgagctgtggggaaaactggacatcctgacagacctgaaattcaccaagccgccagtggaagcctcaggttccgcctctataaaagggactcagccatgtgcaaggatgggtcgtcgcgaggattaaagggcagggtgaggggatgtcaagtgcaaggcaagtggtccaagcttccaggtggtccctgaccagttccgggcacatctttacccaaagggaggactccgggacccccagccccgccgccgcagaccccctgtagcaaagcagggaactggacctcaaagggctgctggggaagacgggatctgaatagaggtctgaaggaaagaagccaggcgggggaccccgggagggccggacggggctgggggtgctgttgacactggagccggactggagacctgggaacctggggcagagtcggcagcggggagggggcgaccgaggtgggaaaacggggcggggccggagacgactccagggctgggtgaggcgctgacccccaggagctggggtgccgaggggcgcgggccacagcggtgcgagccagtcgggcgcccgcgcggtggggcgcgcggcgcggggattggcgggcgctccccggtgcccgcagctcttcagcgtagccgggaagagccgcgcgtctgcgcgccagcccccgccctgggcccgccgcccgagctctctggcgcagcgctagctccgccgcgctcagctgccctgcgccggcacccctggtcatgagcgccccctcgacgctgccccccgggggcgaggaagggctggggacggcctggccctctgcagccaatgccagtagcgctccggcggaggcggaggaggcggtggcggggcccggggacgcgcgggcggcgggcatggtcgctatccagtgcatctacgcgctggtgtgcctggtggggctggtgggcaacgccct

SEQ ID NO: 26294 - DNA, 2300 bp, Homo sapien
tcagtgccctttgccgagcaagtggcgtttctatgcacgtgggtatcaattcggactctggacgaaatggaaacctccttagccgacccgggtgggatcagctgggatcctgcgcgctcccctggggggttgccagccactctgttggggtgcaagaagcaccatccttcggaagctgggccgaaactggccaggctgactcgctcccacgcgcccgcccctacccggcgccgcagcaattcacctgccaccgcctctgagccgggtccggacttcggcgccctgacagtgtccccgcgacttccccacccgatgagatggggtctggcgttggccagtgcgtgtccagggactcgcgggtccctggccagccatggggcagagggcgctggtgttaggccagtcttccccaccctgccccgtcaccccagccacacccactgtcctgtgaggccaagcgcgctccgctggtttcctgagccaggcaccttggccgcggacaggatccagctgtctctccttgcgatcctgtcttcggggaagtccacgtcctaggcaggtcctcccaaagtgcccttggtgccgatcacccctcccagcgtcttgcaggtcctgtgcaccacctcccccactccccattcaaagccctcttctctgaagtctccggttcccagagctcttgcaatccaggctttccttggaagtggctgtaacatgtatgaaaagaaagaaaggaggaccaagagatgaaagagggctgcacgcgtgggggcccgagtggtgggcggggacagtcgtcttgttacaggggtgctggccttccctggcgcctgcccctgtcggccccgcccgagaacctccctgcgccagggcagggtttactcatcccggcgaggtgatcccatgcgcgagggcgggcgcaagggcggccagagaacccagcaatccgagtatgcggcatcagcccttcccaccaggcacttccttccttttcccgaacgtccagggagggagggccgggcacttataaactcgagccctggccgatccgcatgtcagaggctgcctcgcaggggctgcgcgcagcggcaagaagtgtctgggctgggacggacaggagaggctgtcgccatcggcgtcctgtgcccctctgctccggcacggccctgtcgcagtgcccgcgctttccccggcgcctgcacgcggcgcgcctgggtaacatgcttggggtcctggtccttggcgcgctggccctggccggcctggggttccccgcacccgcagagccgcagccgggtggcagccagtgcgtcgagcacgactgcttcgcgctctacccgggccccgcgaccttcctcaatgccagtcagatctgcgacggactgcggggccacctaatgacagtgcgctcctcggtggctgccgatgtcatttccttgctactgaacggcgacggcggcgttggccgccggcgcctctggatcggcctgcagctgccacccggctgcggcgaccccaagcgcctcgggcccctgcgcggcttccagtgggttacgggagacaacaacaccagctatagcaggtgggcacggctcgacctcaatggggctcccctctgcggcccgttgtgcgtcgctgtctccgctgctgaggccactgtgcccagcgagccgatctgggaggagcagcagtgcgaagtgaaggccgatggcttcctctgcgagttccacttcccagccacctgcaggccactggctgtggagcccggcgccgcggctgccgccgtctcgatcacctacggcaccccgttcgcggcccgcggagcggacttccaggcgctgccggtgggcagctccgccgcggtggctcccctcggcttacagctaatgtgcaccgcgccgcccggagcggtccaggggcactgggccagggaggcgccgggcgcttgggactgcagcgtggagaacggcggctgcgagcacgcgtgcaatgcgatccctggggctccccgctgccagtgcccagccggcgccgccctgcaggcagacgggcgctcctgcaccgcatccgcgacgcagtcctgcaacgacctctgcgagcacttctgcgttcccaaccccgaccagccgggctcctactcgtgcatgtgcgagaccggctaccggctggcggccgaccaacaccggtgcgaggacgtggatgactgcatactggagcccagtccgtgtccgcagcgctgtgtcaacacacagggtggcttcgagtgccactgctaccctaactacgacctggtggacggc

SEQ ID NO: 26295 - DNA, 2300 bp, Homo sapien
attccttgtttaacactttgctatcacagtcttgaatccttgtaattgaacaatggaccccacattttcactttgcactggtttctgattctgtaaccgatcctgtccccctctcttgtctcattcactctgggaattgtccccacattctgagacctttcagcagtgccccaacgaggttcctgcccttatctgaagctccaccctcacccccatggcggcaccgcaggcagccctgcttttgcgtcccgcgtaggcaggctgtgcaccggagtcacgaccccctgattcagcctaggcagccacagcttgactgctcccgccggacaagccctactgtgctatctgccgctcttcccttcctcttcccagggggtccgcgtcaggggaggcgcagctgtgtgcattccgggagcttcagacccccgtgtccagcagctccttcgtttcctgggtgctggggcggccttcccagcgaagagctcaactcagcgggacgtttggaggctctctgccccaaggcgctggggagtgtgcggcgggacagtcgtgcttgcctttttcactttcagagtgtccacgccccacccgtttggtcactgcaggtcagtccagtccagcccggcccaccccaccggtgcgtgtctgtcgcacgtggcagacgccatactctctgttcttgtttaaagcccaggatctactgggccctggaggcaagaggtgaacgcagcggaatccacgctgagctgcccgggaacggagcttccaaccccagaaggaggactctgtgctcctacaccttaaccctttttagcccgaaacttctccaacttccttggctttgtttagagctcgacagcgccgccccctggcgctcgttgtgaggacagtagaggagagaggcaagggtgtttttaaacagtttgcctctcaccattatgggggcgacccgagggggagacccactcttccgcattcccggtaagtgaaccaccggaagaggtcgaaagtgacggattcccatgtcctcctccagccccccccccaccctgcccatccacaggacggtggctcttcagtgccctttgccgagcaagtggcgtttctatgcacgtgggtatcaattcggactctggacgaaatggaaacctccttagccgacccgggtgggatcagctgggatcctgcgcgctcccctggggggttgccagccactctgttggggtgcaagaagcaccatccttcggaagctgggccgaaactggccaggctgactcgctcccacgcgcccgcccctacccggcgccgcagcaattcacctgccaccgcctctgagccgggtccggacttcggcgccctgacagtgtccccgcgacttccccacccgatgagatggggtctggcgttggccagtgcgtgtccagggactcgcgggtccctggccagccatggggcagagggcgctggtgttaggccagtcttccccaccctgccccgtcaccccagccacacccactgtcctgtgaggccaagcgcgctccgctggtttcctgagccaggcaccttggccgcggacaggatccagctgtctctccttgcgatcctgtcttcggggaagtccacgtcctaggcaggtcctcccaaagtgcccttggtgccgatcacccctcccagcgtcttgcaggtcctgtgcaccacctcccccactccccattcaaagccctcttctctgaagtctccggttcccagagctcttgcaatccaggctttccttggaagtggctgtaacatgtatgaaaagaaagaaaggaggaccaagagatgaaagagggctgcacgcgtgggggcccgagtggtgggcggggacagtcgtcttgttacaggggtgctggccttccctggcgcctgcccctgtcggccccgcccgagaacctccctgcgccagggcagggtttactcatcccggcgaggtgatcccatgcgcgagggcgggcgcaagggcggccagagaacccagcaatccgagtatgcggcatcagcccttcccaccaggcacttccttccttttcccgaacgtccagggagggagggccgggcacttataaactcgagccctggccgatccgcatgtcagaggctgcctcgcaggggctgcgcgcagcggcaagaagtgtctgggctgggacggacaggagaggctgtcgccatcggcgtcctgtgcccctctgctccggcacggccctgtcgcagtgcccgcgctttccccggcgcctgcacgcggcgcgcctgggtaacatgct

SEQ ID NO: 26296 - DNA, 2300 bp, Homo sapien
acattcttaggaggtatccagctggagtcagagatgcctccttgtcccttggggagccagcgagctcctagcccccgggacaactcaacatctccatggaggccactgtggtggtcgctggtgccgggtccacaggcgttcactgtgttctccaccgtggcgcttcttcccctggggccctcacggtcagtgcagagcaccaaagagttgccgctgtgtagagaattcttataattgtgcattgcatccattttgaatctaatttggaccctctcctaccagaagcagggtttattgctcttgacacggtgtctagggctccaccccctcccagttcctcaatgcggccaacccagatatctgccttgtacacccacctcctggtgaccatttccctgtgggacaggcagatacagcccatttgatggtctcagtgactccacaccccacagggacttcccagacatgccgccatgcccacctctcagccacagggaccccacggagcccgtgtctgtttgctctaaacccaccagtgagaagtccccttgggaaacctgcttgggaaacgtcctggaccccaataaaggcttaggacccaggtctctctctctcccttcacccccctccaggtgagtgtttgtgacccagacagctccccactttttgctggccccgtggggtgcactgccctctccctgggatctgtaagtgacacggtgcttgtgttgcttcctgtgtcttcttgtgctgcctcctgcatctcccctgacccacaccccaacccaactctcctcccatcagggatctcttaggaagtggctgtcttgataggaataaactggacatgggtcagacgagagccacaagggtgtctgtccatagaaacaagttttatgtgagagagacccctggtcactgggcagggctagaatttatagtcagtctctcaaagtgagagatacagcctgctaccaatgacaggggacttggagagcagtggagcctctccctcagctgagatggtgctgaggtgtggtcccctcaggcccccagagtttcctggcactggctccagcagcccagggtcaccttctcagcaagtcatcatgggttggcttcctccttgtctgtttcacttcccctcccacataaactagtctccccaaatcctgtctcagggtcccctcctgggggatcccaaccaatgagcaaaggtctgtggctgcaggaaaagcacactgtgagtccctggcttttgccgagtcgcggtgtcgcgggagggcctgcccgggcttcgattcccgctccctgcccagatttccggcccttgctaggaatcctgagccgggggaagtgagcctgcaagccctgcgccacgaggccggacacattttcattttctttctgatgctttttgtgaccctgacacctcacaatgcaatatttccactatgaaacccccagaactgccaaatttcacccaatttggattaacattatcgaggagcttggcattatgttgaaaacccagacattcccacgacccgtatcctatttaaaaaatgcctgtctatttaaggttcacgatgggaggataaaagaaaaaaggctcccaaagtcaacagagaacatgagctaggcaaaaggaaagtccagtttgcttctaaaaaaggctgaaaattataaccatccatggccttgtgtcttaagtctcagaattttttttttctcttttggtggtttgcaaaccaaagtggaattttattatgggttactaagggagcttcctcgagttcctagcccccaaagcccctgctcactccatggcatgcctccgaggctcctcatgccatgagaaagagaatggagccaaaatcaagccggcagtatctcggggctgtaacgtcttccccccgtcgctgtttccacagtgctgagccagggacccggcagagctgcctgactccttttatgaacaacagcaccgtgatgaaggcagcaggagtcagagaactattcattgcaggaagccccaacatccggtgagaaataagaagtacaacagtacaggatgcgccttgggtcagggggacgtggaaagccctcagcctttgtgtccttctctgcgccggagtggctgcagctcacccctcagctccccttggggcccagctgggagccgagatagaagctcctgtcgccgctgggcttctcgcctcccgcagagggccacacagagaccgggatggccacctccatgggcctgctgctgctgctgctgctgctcctgacccagc

SEQ ID NO: 26297 - DNA, 2300 bp, Homo sapien
cctatttcattccattggtctatatatctgtctttattccagtaccacaatgttttgcctactgtagctttgtaatatgatttgaaatcaggaggtttgagtcctccaactttgttctttttttctcaagattgtttggctctccagggccccttaaaattccatatgaattttaggatgaatcctgctatttctgcagcaaatccctttgggattttgatagagattgcattgcatctgtagatcactcttgttagttttgacacattatcaatattaagtcttccaattcatgaacaaaggaaatcttttaatttctttatttcttctttaatttatttcattggtcttttttttttttgagacagagtctcactctgtcgcccaggctggagtgcagtgatgtgatctcggctcactgcaagctccgcctcccgggttcacgccattctctggcctcagcctcccgagtagctgggactacaggcgcccgccaccgcgcccagctaatttttttggatttttagtagagacggggcttcaccgtggtctcgatctcctgaccttgtgatctgcccacctcggcctcccaaagtgctgggattacaggcgtgagccaccgcgcccggccggtatttttttaatgttttggtgtccaagtctttctccttgctggtgaattttatttccaaatgtttattctttttgatgctgttgtaaatagaattgttttcttaatcccctcttggacttgttcactgttagtgtgttctgtttgccctgattgacatgggaagcatgacctagctatgtctgtaagatcttaggaccctccctctgagcagctggaagagcccgggacagccttggttaggccgcagttttccagaacagactcatagccagggagatcagttgctcacagcacccatctgataaccggttgataaccggcaccacaggagctggctgctggctctgccttcctccctccctaaccagtgtctgtgccttctagtgaagggcgctaaccttactatctccacctgctgatgcctgttggcatttaaagtgagtttgcatcgtatcaatgacgcctacataatacagtcacaataaactgatacggatgctccctaaatcccagctaatctttttctggccttagcccaaataagttgaattgatagataaacaaaattaacaaagaaaaaaatgtgccgagatcctaatgcagctccttagaaaagagccctaaataccccgaccctgcatccactgggatgatgaagttcagggagaagcctgtgggcctccccttctgctctggagggtgaagcttttactgccaacgaatgtgtctgggcccctctagggcaaaggcagctattggggtgggaagtgtagaggagacccaccctccattgtcagtgccatcatctggtctctcctgtaaactttgcagccccagagggaagccatctgggcgttagaggctggagagccccagaccaaggcgccttatctgtcggcacacttctggagctaggcccatgacctcactccacccatgaccttccccactgacttcacagttccaggaattgttagaaaaaccctttttaaaattccaggaagccccagtcccctcagtgctgctgctcatgcattgagaaagagagaggcggagccaagctggggtctttgtgatcctggagcccccacctctggggcctggggctggggttagtctctatctttctctgctggcccttggttccacaatgtggaagcaagaccaggccctgcagatagagaaggttctcgtgttcttggcccccagccctccaaaggaaaacctttagcttaagggactctctacctcctttgaaactcatccctcttcacacttcgatatgaaacccagaaattcagaaaacagaaaggaagaataagaggaatgttaaaagccaacgcttttccagctctcatggtgtgcctgacactgtgcaaagggcgttacctacaattacctcatttgactctgacagtagtaacccatgagacatacgttgctattacctcattttacagatgacacactaaggcgcaaggcagctgcacatccacggccagcctcgttgtcttcagggatttgttcaaagttcattctgaattgtaaggtaaccactgcagaacacgagcctttcctgggtatgtgtggtaagtgcttcataaatgctgttctgaggctaggtgctaatggagacggggcagatgagtggtagagtgagccccgg

SEQ ID NO: 26298 - DNA, 2300 bp, Homo sapien
gtttcccaggtgaggcaacacccggcctgcttcagcttgccccccgtgggctgcacccactgtccaaccagtcccaatgagatgaaccaggtacctcagttggaaatgtggaaattacccatcttctctgtcaatcatgctgggagcggcagactggagctgttcctactcagccttcttggaacagagcccccctcacaaaggactttctctggctaactctgatgcttttctgagttcttacctaaatttccccttctccttctgtggccctgccagttttgttttgttttgttttgttttgtccttatcactacccttgctgcctcctcaaattatccagagccactgttgttttctagaacattggcaagcacgttgatagagtgcccacattgtactgaactctgaggggaatagtctcgtccccatcactcaggtggggaaactgaggtgaggttagtttaaagtgggtaagcagtgggtttggaattggagctctggctggctggctcatgtccgtgctcttcccaccacagcaggaggccactggaggctccaagggctctgaaatgttgagaacttccctgcaggtaccagcgaagagggcaagaacacagcactacttccttggatactgtttccctcctcagaggggttttctgagctgccctgggtcctgtgaggaaggtaggaattacatttcactagggaacagccagggtcacctccttgcctgaggccccaccatcccatcagcctggatgggcctgctcagcagccacactcgcccctaggccgagaaggggtggggctcggttccacagagtctcccagggcctcaggcaggtactctaggctgattccatctccaggttcgcaagtaaaaaaaaagtcaactgcccaaaagacttctcttagaactcacagcaggttaggctggcaggtggagtctatgctcgggtggtcccatctgccaggcctgatgttccaggtgaagagattggtgagcaccaggtgaccccacccaggtgcacgtggctctgtcgggtacaggcaagtctctgcccaccaaagggacaccacaagggcccaggcaaagcagagcctttctcactgggtgtctgctggtgctgatgtcaccaaggaacacaccccgggcagcttaaaccacagacgtttattcttgcatagggctggaggtcacaagtctgagatcaaggtgctggacagcctggctcttcctgagggtggctggcaggtccagtgcaggcctcccaccttggctggtggacagccatctgctccctggctctccatatcaccttccccttgtgcctgtctctctccagatctccccttcctgtaaagacaccagtcctactggatcagggcccacccgtgtgacttcacttttacttgagtacctctcacagaccctaactccaaatcaggtcacttgctgaggtactgcatgtgaagactttgacatttgaattttgagggggccaccgtttaacctgaaccaccaaggacagagccaaagaccctgggtgacaggcccagaacaggacctggtggaggctcttctttaggggagagagggaaatgggagccaccactggcagagcctgaaggcagggcagccagaaagaagctgtgggagtccccaccatggaagaccctgccgagcatcctgtgtctcctgaagcagaccctgacatgaggactgggggcacgtgtttattaagggcgatccccggaaggaggagataaccaggtagggaaggagggaaccccagggcagggctctagagagagaggatgaccctcaggagcaggagggtgcacctgaaaccagacccagcaagagatggaagccctgggagcagccccactccaggtcctctgcaggagtgacccagctgccaccaggctgccctgcccagctcagcaggccctacgggtgcagggaagcagatgggcagtgagatctgggaccggtatagaaccacagctgccacaactgcccatggctccctcccttctttgacgtcagagtgagcagggcggtttctgctgccttcgcattccagccccacacacctccctgcagcctggcactggaaactgctgagccatgcagggcagcctggtggcggctaggacacttctgcagaggacctggagttgggctgctcccggggctcccatctcttgctgggtctgttttcaggtgcaccctcctcctccaggaggcaggggcaagaccagcttcagcccttcttgctctccatggt

SEQ ID NO: 26299 - DNA, 2300 bp, Homo sapien
cttgccagccagtgcctatgaccagcgaggggtgggggcatcgagaagatcctgcccctccccacgaccctaccccttctcccgtgacatcagagtgtcatcccaggtggaatattcccagtatcccttcctgctcccagctgtgggcccctggagggcactccgggtgatgaggattctcatccctgctgagttggaaaggggcaccctgacaggagagctggccatgccccaagcctccccagccttgccctctgcattccttgagggccctgtcttcatggggatgggggatggcagctgtcagcaacaggccaagtggttctctcttctgtccccagcctcgagtggaagcagaggctgcattaatttaatttaaaaatttaagccaaagttccaactcgtggtacagagatccaagagcatagaaggtttgtaaggagagcaggtacctcttgtcctgccccttgctttccctcgcattcaggctcgtggggtaaacacttgcaactgttcctatgtttttgttcttttggcagttacctctgtaattctaaataatgagcttgtaattcaattgcttgacttatcaattttggacaatcttcaatgactattacaatggaatcttacaaaatagtctcttagctaatttcattagatttagttctagtgatgacctttatagctttaaatatgtaattcctctctgcttcttattccatcaatgatagagactgttgtctaactctctgccctctcggacggggataacagttctctcaaccatctcttcctaagtcccatctctgtgactaacccttgagctgctgtcacctccatgctctcctccacctgtggaaatagaaccctgacttgcgtgtggccactcagcctgaagaccatgcttcctactttctctcccactagctgtggcatatacctcatctggttgatgagatgtagtttgaagtgttgtgtgggacttcctaaaactagggaggctaggccatctcccatgtcttcattcaactgcttgaaatgcagatgtgatggctggcactttggctgctattttggaccatgcagatgtgggccagatcctagggatggtagagaggagggtggaaggacttggctccctttatttcatagagctatgataagttctcttttaggcaagtgagaactacaagtctattttgtttacatcattttgagctcatcagttagatgccatcaaaactaattctagataatatggtaaaaactgtcttcacatttacagcatcaaggatgactacatttaccttctgttctacagcgatgattaggtttattctttgtctagattgagtctaagcattgaaaagaaataagaagcattttcactattaggcctaactgttgattactatagaaacacacacatgtaggacttgctctgttctctcccacgatgtctgtaccccctaaagggtgactttcccagattcaaagtccagtgtacagccttctcttttccaaccctccttacaccatgcttattttagtttactttctattcggctatatctttatggaacaggatcttgtttttcttggaattcctaattgtttttgtctttgttgcttttgctgttgacaaaataatgtgccttaatcccttcatctcatgggccagcctttccagagcacccctcattgcttgaaaagccctttacccctggagtcactccctaatgatccttggacctttccagtctgtatgggtttccttcatcctctggaaaagttattctattttttttatggctttcccccatttactttctctcctctttctcttgtttttgcaattttggcctctctcttgcttgcttgctttctttttttttttttttttttttttttgcctgtgccctgggaattaaaaacaaacaaataactttattgtgtatcctttctattgacttattatttgccttatctggccaattatatctttattttctaagcttactttcatgatctcatgttcctgactggtccttttttctagtattctgttcttctattgtactttttgccttgttcctttttatatataaggaatgcaattacctctcaaaatttatgagaacaaactcaagtccatagaaacctctggagctgagaatcctcagttcaaatgctggctctgccacttaccagctgcatgatcttgggcaagttaatctgcctcaaggctttggcaagatcaaagggttgctatgacctgatgcacacatggtacctga

SEQ ID NO: 26300 - DNA, 2300 bp, Homo sapien
cctggtaaagattgactcctgacctaattggttgtttgcataaaaaaggcactgtgaagatccctgtcctgtcctgttccgttctaattacctgtgcatgcagccccagtcacatacccactgcttgctcaattgatcatgaccctctcacgtggacccccttagagttgtgagcccttaaaagggacaggaattgctcacttggggagttcggttgttggagacgtgagtcttgctgaagttccctggccgaataaagcccttccttctttaacttggtttctgaggggttttgtctgcggcttgtcctgctacaaatagggggaataaaagccagggttgcttccaaagagagcagggagtgagtgttgaggacagatcatcacaactgtgcagttgaggagcatgatttgaacccaggtttgtctgttcattcaaacagtatttattgagcccttgctttgggtcaggcacaattttatatgctggagacacaaacctaaaaggaccctaacctaaaaggcagaccccacaaacctaaaaggcagaacagctgcctttcaaagctaaagtctcgcatttttaaaaggccttggagctgcattaatgttcttctaatttttctaggtatgaatcttcatacttttctaggtatgaatcgaccctgtgacaccaggatggttctttgtcagcctccttgtctataaaatcagaaataatggtacctcccccaataagttatgtgaaacaaattaaaggggcttattatacaggaaacaaaagcagcacagcatccaaactactgagcgtgcagtaaatcaacgcattcccacttccattccatccacgctgatttagatcaatccaagtatcactgccttggggttcaaaaggccatgttagttcacaaagccccgaaaatgctctttcacactctctgctcagcctccaacgtgtctttttaataatccaaactttccacctacttaactgaagtgtgtggggggagagggtgcgggggggaaggggtggcctatactaaatagcccaactgttttccacttgtcctgaaatctgagaccaagattctcttaggaatgcaagcaaagggagccgacgggacgccaagaaagcacaggttaaactacctcacttcatctagccccatttctctcctggcttttcaattaattattcagcctcagaccagcagatggagctgaaaatgttgtctaaagaaatgaggtttttcttttaatttacaagctatagtttctcatgcctccacactgaatggttacatcctgttgagcctgttcgtaaagttcagtaaaaatccagttctcattccagaacagctgaatcgtagctatgaacgcggaagaacagagtcccaaccccagccgggcccgggtttcccggggcccctcaagcctcagggcagtggagagccgccgtcacgcccccgcctcccccacgtcccaccctcgccccagtctcctcccacttttagctacttttcccatctgactaaaactggcttcctccgtgtccaccaagatgtcgcctctaagtggcctaactcctaaagagcgcgatcggctcaagcactccgccacgcggtttccacggggcgcggccggcgttgccctcgccgtggcctcaagcattgcggcgccccacatgttgccagacggaaggcctcggcggggtcaggcagctgctgctggccgtgactacatcactggtgacgtttcacgagacttttaactgaaatcactccaatacaggcgcatgcgggacgaggggaaagcatctcacccgaccccacacaccttcccctccctctccagcctagcggcctccgctcagcggaaaaaaaagcagacgctactccccgctctaggtgcgggacctaagaggtttggcccaatcaggcatcccacctaaccagacgggccggagtctgtggcccggttggaccaacgaaaactctagggcggatttgccgggatttctgggaaagtgacactcccggaagctaccgcctcttataagccacacatgggcggagttagccttccggcccgcagtcccactggctgacttcgctgcccgtcacgggaatgcgggagagggcggcgccggggcgctcgcgtctgcgtggagaccggctggccgcgcgcgggaagccgcggaactgcgccggaaagtcccccggctctggggccccggtgacccagagtaagcctccaagaaggaggaggaggagagaaaggcggctcttcccgtgcccctac

SEQ ID NO: 26301 - DNA, 2300 bp, Homo sapien
ctggtcttgaactcctgacctcaggtgatccgcccacttcagcctcccaaagtgctagaattacaggtgtgagccaccgcacctggcctaatttttgtattttagcagagacggggtttcaccatgttggccaggctggtcttcaactcctgacctcaagtgatcggcccgcctcggcctcccaaagtgctgggattacaggcgtgagccaccgtgcctgaccacctttttgtaatgcaaaacaaaatcataaaacacgattctgggcctgctggagccatgggtgaaaactgcgttcattccaatttcttcaaatcatggaatgcaaatatagagagtcggcctaagaaagatttctgtcactcattcattcttcaaatatttattgagcacctactatgtgtgggaagctggctcctgttcaggaaatataattaaaagtacaatctcccaaccctcttcagaaaggtagtggagaaagaaaacactttgtaattgaataagcattaaactagaatgtgatacccatcacaggcaatccattaagagactgcaaagacagaacgaaatctcactcttttgtgcagccaagcaatctattacacacattttcaagataaacaataactagctctcaagggaacttggcagcatttttcatcacacacagttcatctaacctgatatttgggatgatcctctgtgttagccaattggctttatctagaggaaaaagaaacttgtatctttatgatatgagataattttgtaagttggagcaaagggcccactgaagttaggctcctactcccccattaaaactgggagacaggggcattaactcccttgatacttaaagagatggctcctaggtcctagaaaaagacatatctaggttataaagcgcacaaaaaggcctaactagtcttcaaaaggatttatatatttcaaagagaggaaaaagtacttacactaattaccaattttctaaaagtaaatgttcgaagaaaaagggagggaaatctcatattttcaacaggaagtagtaaaccttattttaaatttgtatttgtcctgacagtccccaaacattacaaactcaacgtgtcggtaagacaaggctgagttaactgctggccacagtaagggacagcatgacctggcaaagctttaccaatggctgggagcaaaaggcaaggtcagtttattgagaactggaagtctgactcaaggaaggtgtttcaaagcgggctttagttagtattgagcaagaattggtggaaacagcaagatttcgaggagtcagcgaatcttagggaatcaattgtgctttccccgaagagtggatgggtctctggggaagttctgtagtgaacaaagctttcgcccgaatgggaactcctggaaataaagccctgcagtaaagacggcagggtgcggtcccggctcctggcgcgccgagccccccagcagggcgggggcaccgcggaagaagcgccccagaggagagcgccgcgccgagccccgcctggcgccagttctccagcgcccgtggaggcatctgcgcccctagtagccaaggtgagtaccagctccaagcccggctttccgcgaggtccctcgcgtggccaccgtgccctaagggtgcgctcggcctcggggacgtgagcagctcttagtgggaagccagctgcaggccctgaccgcaggctgctggggcccggaagcgctggcgccttgcggccagaagcccggaatggacgcgaaagtgaccacgcgaatctgacgctcacgtgacttttcgcgactggccccgcccccctgtggcgtgccgcagcgcagacgtcgctgtctcctgcgcaggcgcaggccttggctcgcggcgggtgacgcaatgcggcgggtgacgcaatccggcgtcgccagtcagtcgcgcggccagatcaggtaactgcccgaaccgctccgccgcccgacgtgtggctcagccccttcctcagccccgccaggggcggggccggccgcgggaggggaggggcctgcagcgaccaatcggcggtgcccgcgcagggtgctacgccacgcccagccgggccggccgttcctaccggcctggtccagcggacagcggctgcagcgggggcgccggctgggaggtgagtgcgcggcccgtaggcctggctccggcccctcgccgcccgccgccgcctctttgtccgcgcgccccggctgctctgtggacctgcgcgtctcggggatgcgggagcgggggcagggggcggcccgagggcctgatccac

SEQ ID NO: 26302 - DNA, 2300 bp, Homo sapien
cgccgcctctttgtccgcgcgccccggctgctctgtggacctgcgcgtctcggggatgcgggagcgggggcagggggcggcccgagggcctgatccacgcggccccggatgcccgcgtcgggaggcggcgcgtcgggccgaggaggggcttctctgtggctgcagtagtttgttctctgggtcgtctttggagtggccgagcggcgtccgggcgctggggcggccaagtggcgcgggaagggtgggaggtgccgtgagggcggcgaggacagcggcggatttaagccccactggaaaccccggcccttgtggccgtggactgggctgcgggtagcagcgtctcctggaagggctctggccccgtgagcctcggggattcaggggccgccgacgttggtgcagatgccgggcgcactgggaggcggccggaatgccaatgagattcggcggatacgcagctgtcaccggccgcagactgccctgtcgccacctccagtgcctgcactccagtagccaagcaacataggaaatcgcgctcagaacccactttgttgattgagaaatcaggtctcctcgagggccctgttggcagaggtctggggaagtcagggcatcaggctgagagagccctctgcagtcttgtttccccaggctggggctgggaccactgaaaccccagtggctctataagagccccactcttatagatcccttccttaggctttgtcagtgttctcacagttttactggggcgtctccttcaggcgacattgatcaagcctcataggtacctgtttacagcggaactcccagagggcagtcttttccatgtttgagggactgctagttgtggggagcggtctcattgatgagactggagaaggggagaggggtgggactagtttatcagggaagatgatgacaactttttttctagacacgttgaatccgaggtgacatctgtggtctggccgaaggaggctagaaggaaggcatgtgctttggatggatggaaacaggaatcaaagaggaaggtagattcaggagctgaagggcagggagaaaacacattcagggagtttgtggcaaagcagcagaaatgacgatggggtgacggtatctggaggccttaggtggggttggtgaaatttgcatgcccgctgcagtggaaagatttaggggctaaagatagccctttgcctttggcaaggctgaggggaagagtgtgttgagtagtctgagttgaatccgggcaccaggccctggctcatgtcccaaccagccattgactgttaccttgataggtcctcatctatgaaatggggatcactgtagcaccttggcctatgtgtgggaaaccaataaactagccaacaagtttcaggctcatggaaccctggtaacagccggtcagccttcttcagaggaggaaatgggttcagagaagttgcttgctcaaagtagcacagcttgtaaaagctgtggaacttaacattatttcagtagagtaacaataattcaaattctgaggagtttaggatgttgggaatgggcgatgaattgtgaactacttttccaagaagttttcctcatggaaagtagttatttagttggttcttttcaaaggcagaaatgattccctgaggttttggatttgctcccagatggtggtggctatgtgttttaattatctggtttcctgatcagagaactagacattattgttgccatgaattcttttacagttttggggactatgtaagcaaattagacagtgaccttggtgagcaaattactgtgttaatgtatttcactaatcacaacttccatcatttgtttatcactggaggaaaccttagaatacactatttttcatgccaatttattaccttaggaaaatgcatgaggaacctcactttagaaaactgctaagaagtaaaatgtcattcgaatctttacctgagtaaagctaggttgttaatgagtctatatcctctcaagtactgaaggaatcctcataaattttagtccttttgcatcagtggttgctcatgcataattcttgtttctttttcaaagctgtttttggaaggaagaaagatggaaagcggtgcagttctgctggaatccaaatcctccccatttaacctactgcatgagatgcatgagcttcgcctcctgggtcacctgtgtgacgtgacagtcagcgtggagtatcagggtgtccgcaaagacttcatggcccacaaggcagtgctggctgccaccagcaagttttttaaggaagtgttccttaatga

SEQ ID NO: 26303 - DNA, 2300 bp, Homo sapien
acatctgtggtctggccgaaggaggctagaaggaaggcatgtgctttggatggatggaaacaggaatcaaagaggaaggtagattcaggagctgaagggcagggagaaaacacattcagggagtttgtggcaaagcagcagaaatgacgatggggtgacggtatctggaggccttaggtggggttggtgaaatttgcatgcccgctgcagtggaaagatttaggggctaaagatagccctttgcctttggcaaggctgaggggaagagtgtgttgagtagtctgagttgaatccgggcaccaggccctggctcatgtcccaaccagccattgactgttaccttgataggtcctcatctatgaaatggggatcactgtagcaccttggcctatgtgtgggaaaccaataaactagccaacaagtttcaggctcatggaaccctggtaacagccggtcagccttcttcagaggaggaaatgggttcagagaagttgcttgctcaaagtagcacagcttgtaaaagctgtggaacttaacattatttcagtagagtaacaataattcaaattctgaggagtttaggatgttgggaatgggcgatgaattgtgaactacttttccaagaagttttcctcatggaaagtagttatttagttggttcttttcaaaggcagaaatgattccctgaggttttggatttgctcccagatggtggtggctatgtgttttaattatctggtttcctgatcagagaactagacattattgttgccatgaattcttttacagttttggggactatgtaagcaaattagacagtgaccttggtgagcaaattactgtgttaatgtatttcactaatcacaacttccatcatttgtttatcactggaggaaaccttagaatacactatttttcatgccaatttattaccttaggaaaatgcatgaggaacctcactttagaaaactgctaagaagtaaaatgtcattcgaatctttacctgagtaaagctaggttgttaatgagtctatatcctctcaagtactgaaggaatcctcataaattttagtccttttgcatcagtggttgctcatgcataattcttgtttctttttcaaagctgtttttggaaggaagaaagatggaaagcggtgcagttctgctggaatccaaatcctccccatttaacctactgcatgagatgcatgagcttcgcctcctgggtcacctgtgtgacgtgacagtcagcgtggagtatcagggtgtccgcaaagacttcatggcccacaaggcagtgctggctgccaccagcaagttttttaaggaagtgttccttaatgagaagagtgtggatggtactaggactaatgtctacttaaatgaagtgcaggttgctgactttgcttcatttcttgagtttgtctacactgcaaaggtacaggtggaagaagatcgggtgcagcgaatgctggaagtggctgaaaagctgaaatgtttggatttatcagaaacttgttttcaattaaagaaacagatgttagagtcagtacttttggagttgcaaaatttctcagagtctcaggaggtggaggtgagcagtggctcccaagttagtgctgctcctgcccccagggcaagtgtggccaccgatggccctcaccccagtggtctcacggattccttggactacccaggagagagagccagcaatggcatgtcttcagatttgccaccgaagaagtccaaggacaaactagacaagaagaaagaggtagttaaacctccctaccctaaaatcaggagagctagtggaaggctggctgggaggaaggtctttgtggagatccctaaaaagaaatatacgagaagactccgagagcagcagaaaactgctgagggtgatgtgggggactacaggtgtccccaggaccaaagcccggacagggtgggcacggagatggagcaggtttccaaaaatgagggttgccaggcaggtgctgagttggaggaattgtcaaagaaagcagggccggaggaggaagaggaggaggaggaggaggacgaagaaggggagaagaagaagagcaactttaagtgcagcatttgcgagaaggcgtttctgtatgagaagagcttcctgaagcacagcaagcaccgccacggcgtggccaccgaggtggtgtaccgctgcgacacctgcggccagaccttcgccaaccgctgcaacctgaagagccaccagcgccacgtgcacagcagcgagcgccatttcccatgcgagctgtgcgggaagaagt

SEQ ID NO: 26304 - DNA, 2300 bp, Homo sapien
tagagacaggatttcaccatgttggccaggctggtttcatactcctgacctcggtgatacacccgccttggcctcccaaagtgctgggattgcaggcatgatccaccacagccagcctggatcctgttttttaatccactgtgccaatctttgtttttcaattggtgtatttaggtcattcacatttaatgcagttatttatatgttagggcttaattctgctttctgccattttagtttttgctttctattctttgctttttgtttctctgttttctttttccaacctttttatgggttgcttttcttttttttctttctttctttttttttgagactgggtctcactctgtcacccaggctggagggaaatggtgcgaccctggctcactgcagcctccacctcccaacctcaagcagtcctcccacctcagccttagcctccagaatagctgagactacagacatgcaccaccacacctggctattttttgtagcgatggggttttgccatgttgtccaggctggtcttgaactcctgagctcaagtctttttgtagcgatggggttttgccatgttgcccaggctggtcttgagctcctgagctcaagtcatctgcccacctcggtcccccaaagtgccaggattataggtgtgagccaccacacccagcctacttgattttccagtgtttctaagtacagttattcctcagtgtctacaggggattagttccaggacctctctcatatatcaaaatctgtgcatagtcaagtcccacagtcggccctgtggaactcacatataaaaaagtctgcctttcatttatatgggtgttgaattcctaagaatactgtattttcaatccacatttggttgaaaaaaatccgtatataagtggattcacacagtttaaaccagtgttgttggagaatcaatggtatatatctttgtgtagcttttgtggttaaatgctgtaggttggtgtcatcattttataagttctggtgaaatatagaaatcttacctccctttctgttcttttactccccctattcaatatatagttgtcttaatgtttcctctgcatacatttagaaccacatgagtcaatgttagaatttttgtttcagccatcaaacataatttagaaaactcaagaaagaaagcctgttatatttacccatatttttgcttaccatgttctttcttctggatgttccaagattattgtttcctttctatttagagaacctccttttgtcatttttttagggtaggtctgctgacaacaaattttcttagttttcccctatctggaaacgttttgattttgccttcatttctgaaacatagttttcctgggagtataattctaagttgattgttcttttcctttagtttcaaaaatgtgcactttatggcttccatggttttacaaacttctgacatcaagtgatccacccacctcagcctcccaaagtgctgggattacaggcatgagccacaacgcctagtcggcctccattgtttttgataagaagtctgctgtcattcaacttgttttcccctataaaaaaggtgttattctctagacactttcataatttttttcttttagtttcaaaagtttaattataatgtggcttggatagatatatttggttttaagctatttgagtttccctaaacttacagaatctgtaggtttatgtttcttgtcaaatttgagaatcatttagcagttatttcttcaagtactttttcagcttcctttttttttttttttttttttttgagaccgagtcttgctctgtcgcccaggcgtgccagtttaatggcgcaatcttgtctcactgcaacctttgcctcccaggttcaagcaattctcctgtctcagcctcccaagtagctgggactacaggtgcttgccaccacacctggctaatttttgtatttttagtacagacaaggtttcgccatgttgaccaggctggtcttgaactcttgacctcaagtggttcgcctgccttggcctcccacagtgctgggattacaggcgtgagccaccatgcccagccagcccttttctctttctcctccccttctagaacacagatgccacaaaagtgagactgttttattatcccatgggtccttgatgctctgttcctttttgtcagtttgtcttctctctgttgttcctgttgttgtcttccatttagtgcttctttcctctgtccctttcatcctgctgttgagcccacccactttttatgtatggtactgtttttttttt

SEQ ID NO: 26305 - DNA, 2300 bp, Homo sapien
gcagatccccaaggtaagacagccaggcatgtagcatgctatctctgtgtgtaactaaccagtcagtacttccctcaacgttaaggtcagtgttggtgtgctttcaagtcctggtaaaaaggaatttttgtattttggaataatagagaattttgataaccttagggatttttcttttttaatcatttgggggcttttatgaggagaaattatgttaaatttatactggctgtttactttatagcatcatttaattaaactcttatttatattgcattttagagaattttttggaaattacctttaattttatctaagacttcttatatcttaattttgtgaaaatgtatattgttcataaaaggaaactcttatgttcccttactcctaaatacctaaggagttttcagatccagttaatgggagattgtaatattcaatcgttaaaaagtctgattcatacagtattcatttggttttttaaaaagtttttcaaagtatttgttttgaggaaagaatgcaattggatatttaatgtggtaaaattttgcaaagattatttctttttagttagaagagtgtaattaaaagtattaatttcttaccttccacacgcgtgcacagcggaaattttgtgtttttcctttttcttttagcagtccattttgtttaacacacagatcccaaattttgagaataaatatgtcataaagaaatagggtatcttcaatacctttggtataagggttaatcacagtttatttcccaaagtgacaaactggacacaggttaaataagctgttagagtggtaacattgtaatgcatcagtactttagaatatggtgcaggcattaaaatccctggtttcagagaatcttcagtgacctggtaaatgtttacatgtcaattaaagaagcacatgagactgaatgttgtataatctcattttcagaaaaaagtttgtgcatatagaaatgtgtctaataaacgcaaaaggaaagtacatctgagtactaacaacggatttgagcgggattattgatagattatttttctctttatattctgtattttaaaaggtgtaacagggatccacattttttatgtagtttagagggaaattgttttaatttttgttcatctgcttacctttctaattttgtagtcaggcctttctactttgctgcctctttaaaccaaacgtaataaacttggagctgtcactgtatgccagcatcataaacaccatcattttatgatagggaaaattttttggctcacttgtttagaaaattagtaaaatttattagcattattatttattagatttgtttcttcattttgttagtatgctacaatttagcatctttgaacattatacagaatgttgactttgcttaagggttgtttgaataggcatttcaaagtgcttttgcttttggctgcatggagagtagaatctattgaggtgattgttcttgtgatgtggtgccatgttccaaaattaatatatatgcatggtattaatgaggaatatgtttgcattcatattttagcagatacaatttatcagtgttggtgacaacctctatggttttattttctttataatacagtcttttgcctggatggagtcctcactttaaggttaagagtaactaagccaatgttactccagctacagttccctaaattatactatagctgctgggaacaaagccatgctgatgaatctggacttgtgcatgatttttgtttgcttctcattaacctgcccaccctccactccaaaattatacctcattaacgttctgataacagccaggaagacagcctcacctgaaccctctttgactgaatggatttttcattgtttttcttaaatgcctacgcttcagaggctatcaactgcttaaatgcagccatcgacatttacacagacatggtaagacattgcattgcttgagtggctgtggggtggagtcttgagatggcttagagttctatctttcttttttatgttcccaaactggcattcagataggtaaaatcggtgtgtgactgtttcttgttttttcccctagggaaggtttacaattgcagccaagcaccacattactattgcagagatctatgagactgaacttgtagacattgagaaggtaagcagtgggcacacttcctcagatgtgaagcaggcagataagctgactcaaagaactctcctctcctcagtctgagagtgatcgtaggtgtagagtggtcatagatggccttgcctggagactttctggcaaag

SEQ ID NO: 26306 - DNA, 2300 bp, Homo sapien
cagcctgggcaacatagcacctgtctctacaaaaaaaaaaaaaaaaaaaaaaaattttttttttgagacaagagtcttgctctgtcacccaggctggagtgcagtgacacagtctcggctcactgcaacctccgcctcccggattcaagcaattgtcctacctcagcctcccaagtagctgggattataggcacctgccacaatgcccagctaattttttgtatttttagtagagacagggtttcgctatgttcaggccaggctggtctcgaactcctgacctcaggtaatccacctgccttggcctcccaaagtgctgggattataggcttgagccaccaaacccagccaaaaaaattttttaaagaattaaaaataaaaaatagccaggtgtggtggcacatgcagctactcaggaggctgaggcaggaggatctcttgatcctgggaggtggaggttgcagtgagctgtgatcacgccactgcactgcagcctgggtgacagattgagaccctgtcttgaaaaaaagaaaagaattggattttttttcctcacaaaaaaaatttatagcaaatgtttaatatcagcagtgagtactgctttatgataatttttttagaaacctaaaggctttgtgatattcttaaccatgcttttcctggtagatcagattctttcctctccatttctgctgtactgacttccccaatgtgactcatttttcagaggcactctgctgtgttgctttctctgaactcaggaagtttcgcatgttgatgtttaaaccctctgggaagtggcctgatgcagcctcagccttgatttccactggcctcctccagtcagggcaggcttgtcactggcctccacttccagccctttcttaccttcaagcatttcttctgtgttcctgtgactcctctgctagcgattccttccctctttcttttccagcactccagaatccatggtccctgatccaaaaccttttctgaaaaagattagttcatgtaccttatatgttgtactgtgtcccagttggagacctgggtggtaccccacaaccagatccatcagtgattctgcagggaaatttgtaaattctcacactaaatggggtaaaatagattaaacctcatataaatttcagtcagattttgctataaagtaaagaaaaaaatttggatttttagacttttctggatttcaaaattgtgggcctgattttcactttttaggaaacttactttatccatgaagccttcattagcagtttcttccacaccgacagctaagtgtaggagacactaagatagaaaagtgagcaaatatctttgcgctcagtgttttacctttctttaatcatttgtggcttgaagcccttagctgatgtttattatatgttagtggaattgaattgagtagcccaagacttggctactggtattgaatggacagatcagggaatagtggcttagtgcccagggacacttggaaagtctgctggagctgaggtggagaagctttcatcgctgtttgacttgattctggttatttttatatttgcccgaggtgcactggaccacatggatttttgcttctgactagaatgcttcttttcagtggaatataatttttctagggaggtccagtgcttacagcatgggctgctctgggggggacttgttcctctgtgtttaattgtagtgtcttcttcagctgcaggaaacgcattttgtcaggcagccaagctccacatgcagcttcagagcaaacatgactctgctaccagctttgtggatgctggaaatgcttacaaaaaggcagatccccaaggtaagacagccaggcatgtagcatgctatctctgtgtgtaactaaccagtcagtacttccctcaacgttaaggtcagtgttggtgtgctttcaagtcctggtaaaaaggaatttttgtattttggaataatagagaattttgataaccttagggatttttcttttttaatcatttgggggcttttatgaggagaaattatgttaaatttatactggctgtttactttatagcatcatttaattaaactcttatttatattgcattttagagaattttttggaaattacctttaattttatctaagacttcttatatcttaattttgtgaaaatgtatattgttcataaaaggaaactcttatgttcccttactcctaaatacctaaggagttttcagatccagttaatgggagattgtaatattcaatcgttaaaaagtctgattcatacagtattcatttgg

SEQ ID NO: 26307 - DNA, 2300 bp, Homo sapien
cgccctcaagtatctaacttagtcaatccaccaggtgtctaacttagtcaatccaccaggatgctatatttataactctttcagtagccactggctatgtgtggctattgagcacttgaaatacggctagtacagccaagaaatggaactttacattttatttaatattatttaacttgaatgtaaatagccaccagtggtgagtggctccatcctgggcagcgcaggtgtgggcagtgggtcctttggctcttctccaagatgacttctattcttctcctgatccacaccaggggtgcttctcctttccttttccttcttgtttcaaggattcctcagctgtctctctagtcaggccttattctgtgaggttcatctctctgccctgcctcctttcctcccccagcctttgggagaataaaacactagctctacccagtaattaaggtttgaaggttttctcccactttggtgtggactggcagaacggtgggagtgcccacaaatttcctgtgacaaagaagagaatgaaggaaattactagaaaccaccaaaaatgtctctcttaattgcaagtgctagcttcggggaggcagtctgttccagctccttttcaactgactacagatatgagaatctagaactgtgtgctttaggatagggatggagagttcttttcaaaatgtgcattttctagaccccagctgcaagagaccttgataccaaaacccagtggcctaggaatcagtatttcttaaatatccattagagcttctgcatcgaaccacgttagggaacaactgatttaatcaacacactgatttacttaggagcttttgacttagcctcactccattaagcccccatagactgctctgctttccaaatgcttatgttcactttttacagtttttctctggtctcccctgcatttacggtcacctccaatttcccgcctccttctctctccaaaaacacacagctcagcttttcaaagttagaataatgcatgtagtaatcgtaaataaactgcacgaagagctgagatttctttctatctctacggagtcctgaaatgtatgaactctgtgacatgtgctttagtcaactttctttctaggagtttggcccctcttgccttgccctctacagacagtcttcattttctaaaattttgcatgccagtgcccagagtgtatttattaacagtttgaaactgtcataaatctcacttggcagtgattttcttattagtttcagcatctctgccttagcactgccaagcttgaatggtctagacattgtcttcaaaaataactccctctgggacaggcctgaaagtctctggcacaggatcccatctatctatggatacttctcctaggagattagaagtcttcctggcaggcaaacattttgtccctggagatccatccactatggccagtattatgtaaaggataagagttcaatggttcacatccattgaatataattcagtcaacaaaagagtggattatgcatatattgcatatatgcaactcatttataaccaaggaagagaggaccaacagaaagttacagtttggggagatttaaaaataactgaacttatattggggacgtcttgctcttggagataaaaatggctcttattgccagctgttgctcgttttttggtgggcggtatcaagcatgtgatgctttggtggctacaccagattctcttttgcagaacttgcatgaagggtgtgggttccatccaatctgttatcccctgttccttcatccatcccattgccatgcgagtcttactgaggaggtgatctttactagaggccacggatcatttttccatttctgcatacatacaaaattaaagttcaccttggcccaggacccctttgggggggtcacgccccctgcgccgacgtcctgggagctagcggtgcgcaagctcggctcacacacaccccgccccggggcctcctgggaactgtagtaggcggctcgcgaatccccgccgccatgacaggacccggactacagctcccgaaaggcctcgcgcgtcgcgcctgcgcctgcgtccctgcggccgccagagggagggttaaggcgcctgggcgcacagcgagccggctgagggggctgtggcggccgcggcgggcgacatggacaacgcggggaaggagcgtgaggcagtacagctgatggcggaggccgagaagcgagtcaaggcctcccactccttcctccgagggctgtttgggtgagcgccagaccgtgcgtgccctgggggg

SEQ ID NO: 26308 - DNA, 2300 bp, Homo sapien
ctgttgcccaggccagagtgcagtggctcactgcaagttccgcctcccaggttcacgccattctcctgcctcagcctcccaagtagctgggactacaggcacccaccaccacacccggctaattttttggatttttagtagagacggggtttcactgtgttagccagcatggtctcgatctcctgacctcgtgatccaccagcctcggcctcccaaagtgctgggattacaggcgtgagccaccgcgcctggccccaacctcttgtttatttaaaggcaagagatgaaattcccatatgaaagatgtccctcttatactagaactaaagcaacattcttatcatcaaagacaggaagttgaggctaagagaattctgtacaaaccctattaaactaacccttatcttcttagtcacttttctatccaattaactaccctagcccaagcccctctgcctcatcacattttcagtttactattctttgtccaattcagtaaataagtaacacactctaactgcctctttgggttttcatttccttatgaggcctcccatgccatgtaaaacttgtatcaaatacacctgtgtgctttcctgctattaacttgtcttatgtaagtttaattttcagactccaccaggagcctgagatgcccccctacactactatatggactgcacagacagagaacaattttatcattccacaagtcctagtggatggcactagcctctatgtgctttgcttttcagaagttctggacacttgtaagaaaagaagaaaaaggcttcagggagtttctgagaaggcagagcaggaaaggagcgtagcctgaacaaggcagagccaacagtactgctggcttttccctgtgagaagatggaggtggacacctggacactcagactgaatcagcacataccccgaaagatgatccatcaagacagggctgaagctacttgagaaccccaatactaagaaagccagagtcagaaaagaacagaatcgatatggggaaagggtgtagccatctgtgtgtgttcacagaaggggagaaagcaccaggcaaagatccagtatggaaaattatgggacatcactgctgcttcactgaagcaaagcaagaaggctcacccacattaaaggggagggaaatgagacgacatctcctgatgggagggcctctgaggatttgcagatgttttcacaccacgacagctaggttagagggagtccgtgctcaccctggtccactctggttgcattgacaaagttgggaagctggagcccctacgctggcgttgggggacagccttcagctcacatggccctgcatggcatggcccaacggtccctgcccaggtctgcagtggccttctctgatgacatctcagccttcgttctgcctgaaatgctaagcgtggctcagagtcatcggacaaggtcaaaccatctaaagcagagtgttctgcttcagaaggcagggaaggaagaagtccatttcaggaggctcttcacccaaaatcgttaaaggaatgcattaatgaaaataaatcttccatctgtgtggatgaggttgtgcaattctaaggacagaatttaattgttctatttacagtgattcttttcatttttctcatagactaacaaaacccaagaacatttgaatggcacatttcagagaaataattaaacagcttttgttaatctctaaaaaactttttgaaacaacatcagtttaagtgtttgtgtgttatgtgtgtggggtgacatttcacaccctgtgaaaactgttacaagtttccccaaatgtaactttattaatcttatttaacctttccttaaaaaattactctataaaattcagaccaaaaagttagaaaaggtaaaattaaatatacgcaaatatctgttacagaaaacaaaaaatggtaaattaagttaaaataaatgcttatgagaaaatatatattattgtcattagtaagtgctcttcttcttcttcttcttttttttttttttttttttttttttgagacagggtgtcgctctgttgcccaggctaaaatgcacaatcaggggaggagccaagatggccgaataggaacagctccggtctacagctcccagcgtgagcgacgcagaagacgggtgatttctgcatttccatctgaggtaccgggttcatctcactagggagtgccagacagtgggcgcaggccagtgtgtgtgcgcaccgtgcgcgagccgaagcagggcgaggcattgcctcacctgggaagcacaaggggtcaggg

SEQ ID NO: 26309 - DNA, 2300 bp, Homo sapien
gttattccatggtctaaccagagctcatatttttcccttcttttattggcaagaacagggctcctatttgttatagccagcactcctaatttactcttgttccacggaaatactcaggcccctatttttccattgtttcatggcagtaaccagacaacaactaagccctctatttccctttgttctgtcgcccaggctggagtgcttggtgtgatctcagctcactgcagcctcgacctctcttgggctcaggtgatcctcccacctcagcctccagagtagctgggactacagatgtgggccaccatgtctggctaatttttgtattttctgtggaaacggggtttcaccatgttgcccaggctggtctggaactcctgggctgaagcaatcctcctagcctcagcctcccaggtgtcagccactatgctctgcccctattccatgctgtaaccaagctccctgtctccctttatacatgtaccttaccagaatcatatttttttcctgattccatgtccacagagtcagaaatcagcattttgctgacacaagctaaggaacgccagtgtgacctgttaggcgcctcacatctctttctgtggcatagtcagggtctatgttttccttttcttcaattaaaattgccagtgactcattttcctctttatggacacaaccaactcccatatttcttaagcagatttattgtttatgctttgagccccacatccatggggtttctaatatggcccacccaatgttatttttcctctctatgggcctcagcctgatgggggtatcccaggtgtctggggcatgctgagacggcacaggtctgtgtggcttcccggattactcggaatccttcattatctattctacagcaagtggccctcggcagctcaggctcagggaatttcaaatgtatcacctccaccggctggacaagtcctctcaagacaggctctggggccaagggaggatgttgtgactggtgctagcaacattgtcatgatggaaggtggcctggcttccgggacatgacaggccatgggtgaagtgtgggttcagagtcacagaagaatcacgaagaagacattcttatgcacctgacacctgacttgggagcaggttctttgcctacatccagttagtctctaccacaattcaagtggagtctttctccccattctcatattacaggtgaagaaacccagcttagggagatgaggtaactctcccagagtccccagcgaaggacttgagccaggacagttggatcctaagtctcctgcttcccctccctcagcacgctactcctcacagaacaacgctttatttagttttggacattttaacctttattttggaataatttcagacttacacaaaggctgcaaaaatagcataaagcattctcgtatacccttcattccacttccccaaatgttaacatattatacaatcacagtacaacggtgaaaactagaatatcaacattcacacaatactattaactaatctgcagattttattcacatttcatcaactattccactaatgtttttttctggtaggattccatttaaggtgtttttttttgtttgttttttgttttttttctgagacacagtctcgctctgtcacctaggctggagtgcagcggcaccctcccggctcacttcagcctccacctcctgggttcaagtgattctcctgcctcagcctcccaagtaactgggactacaggtacacaccaccacacccagctaattttgtatttttagtagagatggggtttcaccatgttggccaggctggtctcgaactcctgatctctggtgattcacccacctcagcctcccaaagtgctgggattacaggcgtgagccaccgcgcccagccagcaaatgtttttaaaatagggcattcatgggcttttgggggtaagtgacacctaatcttcaggggtctgcggataatttctaaatggggctcacagtttattcctccctcatagggaggctgcaattacctcacaaagctccactagggtcacaacaagatagcaaaagccagtgcagggcctgcaggtatagggggatcctgcaagcagaaatctgtggtgggcgggcggcaggtgagcaaggagaacgtgtctgtaaaggaagcacagggaacaggtggtggctttgtaagacagttggaacccaaggaaggtaagaataatgtaccactccttgctccatatgactgcttccttatatctcagttcagatattaccttctccgtaagg

SEQ ID NO: 26310 - DNA, 2300 bp, Homo sapien
ttagatcttggtcatgagactacccccactgcaaggaaggctgggaaatgcagtctttattgcaggcagtcccatactcaaacaaaaatgcagctctgttactgaggaaaataaaatgagcagtctctgcccataggctcttaattataatgtaagagtaacccaatgaaaagagcattgatatcccacttacagccgctcagggagctcagggcagaggccaagcagacctcacactaggcccaactgatgcccagcttctcacctttttctgctttgcctttgtgccaccagacaaattgaggccgtcctggaagcacagacaggaggtggagacagagcccttccacagtgttcgctctgtggtgatgccaaaccctccatcaagagggcatggaggatgtgcgctccactgtactccaaggagtgaaccctgaggtccatgagttttgggagtgtgtgtgtgtgcaggtatgtatgtctgtgtgtgtactgtgtctgtgtgttttagcgtgagtgtgggtatgtatgcgtgggggggtgtgtctatgtgtgttgtgtgtgtgtttcagtgtgagtgtgggtgtgtacatgtaggtgtgtgtgtatgttgtgtgtctgtgtgtttcagtgtgagtgtgggtgtgtaatgtaggtgtgtgtatctgtgtgttgtgtgtctgtgtgtttcaatgtgagtgtgggcatgtacgtgtaggtgtgtgttgtgtgtctatatgtttcagtgtgagtgtcattgtgtatgtgtagatgtgtgtgtagtatgtgtgtttcagtgtgagtgtggttgtgtacatgtaggtgcgtgtgtctctgtgtgttgtgtgtgtgtttcagtgtgtatgtgtgcatgtgtggcggtatgtgtgtgtgttgtgcatctgtgtttttcactgtgaatgtggatgtatacatgtaggtgtgtgtgtctgtatatttcagtgtgagtgtggataggtatgtgtctctgtgtgttgtgtgtctgtgtttcagtgtgagtgtgactgtgtgtgtaggtatgtgtatgtgttgtgtgtccgtgtgttcgggtgtgaatgtggctatgcagcaagtgtgtctgtgagggaaggctgagcaggggtgtcaggaaagaggccctggcttcctggttcctggcatcccctggaggcacatgaggaagcctcgaaacaggcgttgggtgtgcccagggctcctccccgggttcccacacaggagccatcactgcacatttttatatcgcatcttcccaaaagacaccataacaggccttctaggaatcgaacataaccgcactaagcctgcattctgtgtgccgtgggacacaagctccagcctccacccaccagtggcttcttccttctctaactggcagccaagtctggggactcccatcaggtccccaggatgggacctttaggagaccagaatgtccaaccagaaagctccctgtgtctcacacctgaagcttcctcgccactgcctcctcctccaaaacatgcaagtccagcggaggccactctaggacttgtcggtactggggaatcgtcggtgtcagagttgactctccctcccttcacacctttctgtagggtgcctctgctcctttgtcctctaagggaggggattttccagaactcgtctccaggaaccaggctgggggagagtggcttccggtgcaggcggcccctccccacagtgcccaccccccactgctcacctatgaatgcgccagtcctggcatccaatctccccgtgtctccagcagctaccatcctccaggactcccaggggccctcgcctggctcccaccaagacaatgctgggtccacagaagcctgtgtgttgctgagggagcagcccctcaaaagagaaaatgtgtgtgttatcctgtgtgtgtgtggcatgaacttatgcaaaaaccattgcacagtctcttgctgctctcccctcgagttcagctgctgatgaagggggaggaggaggagaggagagctgtgggtgtccaccaccagctgctcttaaatcctgccagggcaggtagggtcagtgtgattcgacttgtccctgaggagtacagagaacactcttcctgttcctctgcagctgaaggatgatggctgagccctggcaggccctacagctcctgttggccattctattgactctgatggccctcccctaccaagcaaggaagaaaacctttctaagcgtccatgaagtgatggcagtagaaaactatgcgaaggacagcttgcagtggatcaccgaccagtata

SEQ ID NO: 26311 - DNA, 2300 bp, Homo sapien
ctgagtatcagcagaatttggatcacatggggagctagttagaaatgcagaatctaggccttgcctcagacccacaaactcagcacctacattttaacgagagtcccaggtggttcatgtgcacattaatatcaggaagtgcagatccactacactgattttcaaacttggctgcagattggaacccctggggaactttaaaaacagctggcttcctggaccctgttccagagattctgattttatcagttaggtatgccctggtgttttaaatctccgtcagtacttttaacatgcagcaggatttgaaaatcatgaatatataattagtaagtgacgaacattttggcaataaataataaatttaaatttgcgtaaagctttgcatcaattttacatctagtcttttattttacaaaaacacttgtgtaacatcatgaagatattggaaagggattgttcactgcaatactgtttgtaacagctgaaaatgagaaactgaagaatctagtcatagggagaaagtttaaatacagcataatgcatttgtagtctgcaatgctttgccacctgcctgacagattcctgccccatatgtgttttctgtacgttgcccttgctcatagaacccattgatctttgcagcctaggaagaatgctcacctctctgcctcaccaggaactttctggacactgatttgggattttcacagaaaagcagaagctttgagagcttaacaggtgcgtgcccccctcctcccactaagggccaggcctgggcatcagagtgggccacgtgacccttaccctggcaggacagggcagggggttactgttggcccaagccaagggagttcagaggccaggcattcaggaagccagagtcattggcacaggtgggcagaagatgccagaggggccctgtattagtcagggttcttttaaagggacagaactaataggatatatatggttgtgtatatatataaagttaatacttaataaactcccctttatatatatataaaatatatatataaattatatatatattaattatatatataatatatatataaattatatatatattaattatatatataatatatatataaattatatatatattaattatatataatatatatataaattatatatatattaattatatataatatatatataaattatatatatattaattatatatataatatatatataaattatatatatattaattatatatatataaaatatatataatttatatatataaaatatatataatttatatatataaattatatataaaatatatataatttatatatataaattatatataaaatatatataatttatatataaaaattatatataaattatatatataaaatatatatataaattgtatatatataaaatatacatataaattatatatatataaaatatacataaattatatatataaataatatgtatataaaagggagtttattaagtattaacttacatgatcacaagggcccacaacaggctgtctgccaaactgaggagcaaggggagccagtctgagagtcccaaaactgaagaacttggagtctgatgttcgagggcaggaggcatctagcatgggagacagatgtagactaggaggctaggaccatctctccttttcacgtttttctgcctgctttatattcgctggcagctgattagattgtgcccaccagattaaaggtggatctgccttccccagcccactgactcaaatgttaatctcttttggaaacaccctcacagacacacccaggatcaatacttggtgtccttcgatcaaatcaagttgacactcagtattaaccattgcaggcccctgactctgagggcacagcaggaggcatttgcttgctctctgtgcccctgtgagagctgtttagaccaaaggccggaggctggcaagtgggagatgtcctcactgggacaagacacaggtgctgaattacatcacaaagcgtaacctccctgcagggcgtggactcagaggggcaagagagaccgcagaccaggacccacagagacccttgactgggccacaggcatgaactaagagtgctgaagacctaggagaaccactggtcaggtcagctcccagctccacagggagtaagaaggagctgcaggcacagcaggctgaaagtccaccaagggctgaggccacaaggcctctggggcagccacagttttcatgatcacatcatacaggactgagaagcagataacaagag

SEQ ID NO: 26312 - DNA, 2300 bp, Homo sapien
acaggaggaaccttgggaacatgctaagtgagaggaaccagacacaggagatcacacacagcgattccgtttacgtgcaatgcccagaagagggacatctgtggagaaagcacgttagtggctcctccctagggctgaaaggggatggagaaattggcatataaaggctaaaaagtttgaggtttctttttagggtaacaaaaatgttgtaaaattgattgtggtttggatataaaattctatgaatatactaaagtcattgacttgtatgcttaaatgggtgaatcctacagtgtgtgaattacctctgaataaatccattataaaaccccctcctcattatcagggagcccagtcatggtgtagatgatggtggtcccagccactcccggcctgcacctcctgggaccttcctagctgggtctttcctaaaatcctgattatcttgagtcatgagcaaaataaaatgctatgaggcagtagttcccagagcaaccagtgcctgtggtcctgatgaccccaccttagacagaatgtgtttggtgatgtgaacattgacggggggaggaactatgccaagaggagaggagggctgcctcctgtccctatgccatgggggcccgtgcacaggccctgggacctctaagaggccccaccccagccctgaaggagcccatgagagttctggttcccctgcgggcttgtgggttcacacccaccacagcgctcaacaaacactgcctccatccttttccttttaccaggccccttcccctgtggaatgctcagtggaggacacaggcatctcttggctctgtgttgtgcaacctcccatggacacttgtgttctgctttggacacaagatgtgtggatcagtgtggcagttggagtgaggcatcgccacaggccaactgttttcagacaactgatgtgtggccaagagaggaaatggattccttttgagtagattgtctgcttgaattcttggctcattttgagccaggacgattgaggaaattgtctttttctgttggcttttaaagagctgtttccataaaagggaatttagccctttaccaaatatgttctaaatgacttattgtgtgttccctttcctctttggtctttgtggtgtgtgtgtccggtgtgtgtgtttgtgcacatgtgcacactatacaaaatgtatagccagatttattattctttactgttggcctctgtgtgttgtaccagcttagaaagggctccctagtcgagcgtgcaattcagtttcaaacacttgggcctttaacccagggattatcagggccgactttctgtttggaattggacctcaggtctgatgtactttgggctgatctgtattttatcttgcaaagagaaatattaatttccaaacttgtgagttcttgggagctcccctactgtctccgaggcaggccctaaatgcagagcaggatgaagttctgctcctccatggaacctggcttgagcagacaggtgtcaggtcctgagatcacaaacagggtagagaactgtgtcccaagtgagcagaatcaggaatgcttacctgggacatgcatcaagatgggggaagacagggctgataggtgggagggatctgtgctggctcttctgggctacattgttcactccacagaggtagcttaggctggcatggccattgccagctgacatcttctacctggcgtgtctggtggcaactcttgtcagctggtggccccttagctcctggccaggtgcattcctgaatgcctgttggtcccaaagtcctttagcctggttctttgatggttccttctgcttctagggccatggcattgcataacggggctctgaaagacatggctgccaaggtgctgtcatgtgtacctagcacagtccagaggacagcagtttagaaagtcagcaggtgtggaacaaaggtgagggacttctgcgaactggcagcccttggtgagcccatggccttctgagggccagtgtcagaagcgcccttcacttgagcagcatcagagggcctgggctgacctcacaaaggggccatgagtgtgactacctggctggggagtgaagccagagggcagaagtgccctggagtgcagaccccagcagacactgaccaggcacaggaggatgaagtgagtttgttggggacagagaacagccaaggggcagccggcagtcagctcaagtcctcacaaagaagggcaataccacccgtgggccgggacagtcggctcgagggccagcagccaggaacgtggcgaagaacttg

SEQ ID NO: 26313 - DNA, 2300 bp, Homo sapien
ggccactcacacctctgtcctagccaaggttccttgcttgtgctgagattggaagtcaggcagagatgcaagctcagggtcacctcaggtctttcttgacctatctcttgtctttgaaaagacctaagacacatctatgagatataactatgtcaatttgcaccattatttttgttgttattatgtcattttccaatctcagtttttagggaacccatgagaagttttcattcttgtgtaactcatgcagtggtaaggaatcctgcagtgctggcttctgcttcacaattataagcaagactttgccaagtgaaaaggaaagtgtgaatcttgtgtcatggatcccttgacttgtgagttgtgtttgattgaaaatctttctcatgtgaaaatctttcacaacccagtagatctcacaaataattttgcaaatagttgtgtggttgagctgtttgtttgccaaggttaaataaatatgagaagaatgggtcagctgggtgtgatccagaagaccagtgacatttcgacagtgcaatgggggctggacacagtagctcatgcctgtaatcccagcacattaggaggctgaggtgggaggaccacttgaggccaggaaagttcgagaccagcttggcctacatggcaaaaccccatctctactaaaaacacaaagaattagccgggcatggtgcaacacgcctgtaatctcagctactcaggaggctgaggcaggagaatctcttgaacctgggaggcggaggttgcagcagtgagccaagatcacaccaccgcactcaagcctgggcaacagagattccgtcaaaaaaaaaaaaaaaaacaacccatgaaacaacgcaatgggccagatttcacctgttatcattgctaatcaggacacaggtttcagctactctgtgtcacccacttcctggagtcaaggcagaagatcaagatgcacatggctcctgggcagcagctccccacacactagctactttcttctgtctgtgatgggtgaagtctcctgtgaggagacactcgggaccaccccagtgttgggtcaggcagcatgactctcttcacctgcagctgtcttgacctggccagtgctgtgctagtgtggacagatgcagtgatgctcttcccaggcctggccctgctgtgatctgggaacatggtatgggacacagtcagaacagttcttgtagaatcagtctccctgacttgggactgaactttctattctgttatctggcaacaatgctaggttcttgcctatattgcagcaccatagtcttctcagccaaactcaaagctctcacttttgcatacttcacctgtcctgcactatttaatgttcattcttacagcaacaaaatattattatttcctctttcaggttagttattgccaggaaattgatttaaaagtaaccacctagtatcacctaagtgctggcaaaatagctcactctagaacaccaagaaggatggtcagatggagacaaaaatgatcaaggggctgaagaatggtccaacctctatctcactgaggcagaaacatgtgatctcccagagaagtgtttaaaaatttggtctagaatgatattccagtctaataaaacatgagtgtgtgtggtggggctgcagatgtagggcggtgggccctgtagaaaccttggctctggctcagctggaaccagggctgacaaggtttagaaatgcaagcagggctgggctgggcatgaccaggctggggcctcaggacttgggtctctgtctttcctgcccttttctcacaatactcattgtccatcccaggtcaaaatggttgataaaaattgccatttatttttttcattttttcccttggttcacagagtacaactgttgaggtattatacaacaaaagaacaaactgatatcttagttatttttctgaacaacggagatcctctcttcgacggggtgaaggaggggagagtgagagtcgagatgtccccaggtcttatctcagttcgctgtgggaggcgaaggcacagaatcatccaaggacaccaagcacctgaggacaaccagaacctgtgggttctgaaggagcagccttcaaagctagtggcagagggtagctcccctcctgcctgtggcttgtgctggcctagagagtatagggcagaaggatggcagatgagtgactccacatccagagctgcctccctttaatccaggatcctgtccttcctgtcctgtaggagtgcctgttgccagtgtggggtgagacaagtttgtcccacagggctg

SEQ ID NO: 26314 - DNA, 2300 bp, Homo sapien
agcctggagcccacatgtatttctctttacctggctatgtcttgatattcccgtctctctccacctgggaagtgaggccatcccaggccactggggattcaacaagaaaatagacacacttgtaagggtccatggtgtctgtacacccgtggtctcacatctgggtgtggggatccctgtcccctccttggctgcacagtgaggacagagctggtgcccaggaccctaaaccactgctcatgtaagagtgagtgtgggcactcccttggagcacatgtgggtatcggccctcagaatggtgggggagccactggcaattggcaggatgccccaagtttgtcagccgctgaacttacaaggtgagagtgacctccatgggcattgcaggcctctctcaggacactcgcaacctattccaggcatcaggattctagttctcacagcaccttatggcctgctcatcccaaaacccacaaaggcatttccgccctcactgacacccccttcctacccctacgtgcaccatcactctccagctaagaaaccacattagttacgcttcagctgcagttccagtgaactcaacgccatcagagaaaggatacagactccttgggtgatgtttttggcacatctggctgctttcctggaattgtcacattgagttgctttttctttgcaaacagggtctagaaacaaactcttattctttatcaccaggcatgctgtctaagcctgtcccccatcctgtgtgccccacaaaagccattctcatcccctgacctccatgcccctcaagctgagttacttctcatatgtggtttggtctgtatgcacttcccaggaagtattctgaacctgcaccactcaaagtatggttctgagaccgggaacacaaccatcctctggaagctggtgagaaatgtagtttccctggccctgctcacagctactgggtcagaatctttgggtggggaaactaggaacttgctttttaacgtgacatcaggggatgctggttgcttctgaagtttacaaggagctacggataaacatcaaaggcatatttcacagggacaaagcttaagtctggtctgtgaagagtgcattattcagtcttttgagagccccatttgcggttggagttggaggctatgtgggtcttggtcgagaactcagaatctccacccacaaactgtgccgcagagtgctgtgccggctgtggccacaggagggaacccgtgacaacctaatgggtgcacttcagccatccctgagggcatcttcgtctttctggttctccactgctccaattgcaagcggccacccgtcctggaaacacctttgaggaataggggcagccataactagccaggcccctagtaccagcacttggcagcgcgtccctgggctgggaagctgcatttagggaggtgcagagaacagggttgggggctcctgctcttgatttcctcaacctctgcccacgacccccaggctggtgcccccctcccgagaccctcgggggagcagacacctgcaggacatcccgccaatcctcccgggctccccgcctctctctcaagaggcccagtgctttctcggggcgctgtacctgctcacccatgatactagcatccactgtcatccctttccatccttttgtctctgcctttccacctaacctccccctcccagcccacccccactgctgagtccagggctcaccttccactcatacctctcacacttgtgttcctgtgccgggctctgactctggggcgcccagtagaggtctcctttagcctgcggaggtgctggggcagctggggctgggcctcatgttcagggcactatctctcccattgctagtcttttccaacccacctgcctgggtgctgttcctctcccctaaacaggagatgatttaaacgcctttggaagaagggaggccatgtgtgggagagacagggtgtaactgcagaggtgaggcctggagggaggagtttctgccccagcaggtgaatttaaaggccagacctgagccctggaaggctccagtggacgccagggatctgaagggcaaaggcaagggctgctggagcctgcatcatgtcgagtccgcagaggaggaaggctatgccctgggcactgtcactgcttctcatgggcttccagctcctggtgacttatgcctggtgttctgaagaggaaatgggtggtaataataaaatagtccaggatcctatgttcctcgccacagtggagtttgccttgaacactttcaacgtgcagagcaa

SEQ ID NO: 26315 - DNA, 2300 bp, Homo sapien
cacgggtatatgcgttaatgaaatcccccagattagacattttgttgtctataaattctacctcactcacagtgatgttctaaactcaggtgagttttccaagcagtgcagaggaccagcgccagcagcatgacgcccagaggggaggagcaagagacacccgtgggctcccacattcatcctgtggctgctgctccctctcctgacacccccactgcctgccaatgggtctcactgcaccttccacccggccccacccacagttaccatgagactccagatcgttcccttccctgctcacactccctccaggagcttcctcttcctggagcaggcatgcccagccccgcctcagggcctttgcactggcccttcccgctgcctggggctgtttcctgtctaggcagggcttctcacctttccagtctcatagagtcctccctgaccaggtccagtggcatcatctctctctatcccatactctcacttccaacagagagactaatttcctgatattaattattgatcactattcgccatcctcccacacaccctaatgctgggctgtgcagtgccacagccaccagccacatgtggccacagggtgcttgaaatggggccagtacaattgacacccacatacacagggaatttcaaagactcagtacacacacccaaaataaaataacctatgttattaatgattcttcttatgtgttgaaataatattttggatatattaggttaagtaagaaatattataaacattaccttcacctgtttcttttttactttttgaaatgtgtctcccagaaagttttaaattgctcctgggttcgtgtcacatttctgtctggcagcagccctgcaatgtagtgtccatggctcggtcacccaggctccgtctctagctcctagactacctggtgcagggggaagctggtgaaaagtctgtttactgaataatgagttgtgaaaggagaacccagagttttttactcaaataaaggttaattcttctgtttgaaaagttccctagcacagggcatggcctgagtctcctgtggcctctggaatcacacctctgccttagtgatttctagaccttgaccaaatgctcacggatactcaggacctctgaagactccggaaggccgagacctctatctttcccttttctgaggaaatgaagctagggggtcgtatgcttttagggcccagggggccttgacacctctctggagggcagggtgacctaagcttgggaggagggacaggtctttgggaagagatggagctgagggggtggagtgggtagaaggggggcataggtgtggaaggggtgggggaagaggggccaggagtggggtgagaagaggggaaagaagaggataggagggacagggacagggagaggccaggaatgggtaggaagggaagacagaggaggggcgggacgagggaggggcgatgaagaggggccgagctggggtgggggcgaagtgggagcaaggacaggagtggaggagggagatgaggggcatgggaggcggtgtctgggggttgaaaggggaaagggacagaggagaaggagcctgaagagtggcggcatggaggggcccgaagtggggaggtgggaatggtcggatggatggggaggaatggggaggataggagaggcaggggaggctggaagacagtaggagaggagggggaggggaggggaggggatggatgggaatggatagggaaggccagggagactggggggccaggggaggaggggagggagaggggaggcgggaagggagaggagaggccgggaggggctgggaggggagggaaggggatggatggggaaggacagggaagcctggaggggcaggggaggctgggatgggaggagactgatagggagggacctggaggcggggagaggcaggggaggcggggagaggcaggggaggcggggagggagaagggaggtgggagggacgaggcgttccggaaaagggagtgcaggccgcggtggggtggggcggcgaaggccggaagggataaaaccgcagtcgccggcctcgcggggctcacggcctcgcctcggtatcgcagcgggtcctctctatctagctccagcctctcgcctgcgccccactccccgcgtcccgcgtcctagccgaccatggccgggcccctgcgcgccccgctgctcctgctggccatcctggccgtggccctggccgtgagccccgcggccggctccagtcccggcaagccgccgcgcctagtgggaggcccca

SEQ ID NO: 26316 - DNA, 2300 bp, Homo sapien
ggtctgggctgacactggccaaccctcacctccaccactcccaagacagtcctctgggtgtcctgctaaggcccagggtttcctggagtttctggccaagcctgccacctccccataagggcatttgccacagggtcaccttcaggcatggagggtggggttgagagaacaacgagagcagctgtctgttcagagcctccttccaccctccccactcctggagacacattccagcccaggcccacagcatcccaagctgggggctttgtcagcccacaggacacccaactgaccacatcctctcagtctgtggagaaggagaactcacagtcttggcaatgaagcaactcaggtgccgctggaaagccacactgagcaaaggatgaagacacatcagggctcgctctgcaggactccattcctgggaagctcaaggacaggcgacaaaggtgtctacagggccggatgggggctgccagggtggggcgggcacgagggtggctggagaggcaggaggataccgtctggggcaaggcagatgtcacaggtctggacaaagtggtaacacaagtgtatgcatttatgaaatcccccagattgggcacatactattaggcattttattgtatgtaaattctacctcatttaaggcaatttttaaaatgccacgtgagtcttccaaggagtgcacagaggaaaggagcctgaagcatggctgcctaggagagaagcaagagaggcctgtgggttcccacattcatcccgtggctgctgctccctctcctgacacccccactgcctcacaggggtctccgtgcaccttccaccggtcctcacccacagttaccgtgagactccaggtggtttcctcccttgctcacatcccctccaggagcttcctcttcctggagcaggcatgtcccaaccccacctcagggcctttgcactggctgttccccgctgcctggggctgctcaacctctccagtctcatagagaccaccctgaccagggtccagtggtctctctctagcccctgttctatttcacttccaacagagtgagtataactccctgatcctaattgttgatcgtaacctaccatcctctacacacactgtgtaggaatttactgtgcagttccacagccaccagccacatgtgccacaggacacttgaaatggggccagtccaaaatgattcctgggctaagtgtaaaaaatacacagggaatttcaaagatttacaaaaccaaaaaaaaaaaacacacataaacgatctcattaataattgttcccgttagctgaaataatattgtggctatattaggttaaataaatattttaaacattactttcacccatttattctcatcttttaaaatgcatctactagaaattttcaaatgcttgtgggttcatgtcacatctctgtgggcagcagctctgcaatgtcacctctatggctcatcatccaggttccgtcttcaagccctagacctcctggcatgggcagtaactggtgataggtttgtttattgaataatgagttatgaaaacagaagccagtgaccttttccaaaaaggttaattcccttaaatttggcaaagaaattctccatattagggtgtggacagggtcttctggaaccttctgaaataacctctctgttccagagattcagagaccgtgaccaagtgctcctggaagcctctgatatctgaagaccccgggaggccaagccctgtatttttcccctttctgagcaaacaggaagtcacattgctttcacagtcaaaggaccagtgtcacctctgtggagacctgggtgactcaagcttgggagcactggggaagagaggcatggctcagggaggctgcagtgaggactggagtggggaggagggggagatggaggaggaggcctgggaggggcagggggaacttaggcagggagggagcttgtagtggtgggggagtgaaaagagagatggagaaagaggggatgggcagaaagaggaggaggagtcaggggcagggcatggaggtgggtggggctgggctgccaaagcaggataaatgcacacctgcctgctggtctgggctccctgcctcgggctctcaccctcctctcctgcagctccagctttgtgctctgcctctgaggagaccatggcccggcctctgtgtaccctgctactcctgatggctaccctggctggggctctggcctcgagctccaaggaggagaataggataatcccaggtggcatctatgatgcagacctcaatgatgagtgg

SEQ ID NO: 26317 - DNA, 2300 bp, Homo sapien
actggccaacgctcacctccaccactcctgggagagtcctctgggtgtcctgctaaggtccagggtttcctgtagcttctggccaagcctgccacctccccataagggcatttgccacagggtcaccttcaggcatggagggtggggttgagagaacaaagggagcagctgtctgttcagagcctccttccaccctctcctctcctggagtcacattccagcccaggcccacagcatcccgagctgggggctttgtcagcccataggacacccaactgaccaaatcctctcagtctgcggagaaggagaactcacaatcctggcaatgaagcaactcgggggccgccggaaagccacactgggcaaaggacaaagacacacatgggctcgctctgcaggactccattcctgggaagctcaaggacaggcgaccaaggagtctatggggccggatggggactgccaaggtggggtgggcacgagggtggctggaaaggcaggaagatactgtctggggcaaggcagatgtcacaggtctggataaagtggtaacacaagtgtatgcatttatgaaacaccccagattgagcacatactattaggcattttattgtatgcaaattctacctcatttaaggcaatttttaaaatatcaggtgagtcttccaagcagtgaacagaggaaaggagcctgaagcatggctgcctaggacagaagcaagagagacctgtgggttcccacattcatcccgtggctgctgctccctttcctgacacccccactgcctcacaggggtctccgtgcaccttccaccgggccccacccacatttactgtgagactccaggtcgttcccttccctcctcataccccctccaggagcttccactttctggagcaggcatgtcccaaccccacctcagggcctttgcactggctgttccccactgcctggggcttctcaacctctccagtctcatagagaccaccctgaccagggtccagtggtctctctctagcccctgttctatttcacttccaaaagagtgagcataactccctgaccctaatttttgatcgtaacctaccatcccctacacacattgtgtaggaatggactatggagttccatagaaccagccacatgtgccacaggatacttgaaatggggccagtccaaaattacttctggtctaagtgttaaaaatacacagggaatttcaaagatttacaaaaccaaaaaaaaaaaaaacaaaaaaaaaaaaaacataaacgatctcattaataattgttcccattagctgaaatcacattgtggctatataaggttaaataaatattttaaacattactttcacccatttattctcatcttttaaaatgcatctactagaaattttcaattgctcgtgagttcgtgtcacatgtctgttgggcagcagctctgcaatgtcacctctatggctcatcatccaggttccgtcttcaagccctagacctcctggcacggggagtagctggtgataggtttgcttattgaataatgaattatgaaaagagaatccagtgaccttttccaaaaaggttaattcccttaaatttggcaaagaaattctccacattagggtatggacagggtcttctggaactttctgaaataatctccctgttccagagattcagagactgtgaccaagtgctcctggatgcccctgatatctgaagaccctgggaggccaagccctgtatttttcccctttctgagcaaacaggaagtcacatagctttcacagtcaaaggaccagtgtcacctctgtggagacctgggtgactcaagcttgggagcactggggaagagaggcatggctcggggaggctgcagtgaggactggagtggggaggagggggagatggaggaggaggcctgggaggggcagggggaacttaggcagggagggagcttgtagtagcgggggagtgaaaagagagatggagaaagaggggatgggaagaaagaggaggaggagtcaggggtggggcatggaggtgggtggggctgggctgccaaagcaggataaatgcacacctgcctgctggtctgggctccctgcctcgggctctcaccctcctctcctgcagctccagctttgtgctctgcctctgaggagaccatggcccagtatctgagtaccctgctgctcctgctggccaccctagctgtggccctggcctggagccccaaggaggaggataggataatcccgggtggcatctataacgcagacctcaatgatgagtgg

SEQ ID NO: 26318 - DNA, 2300 bp, Homo sapien
aggatcccagcagctctgggttgactctgtctgaccctcacctccactactcccaggagagtcctctggatgccatgcaaaggcccagggtttcctggtgtttctcaccaagccttccacctcaccacaagggcatttgccacagggtcaccttcaggcatggagggttgggttgagagaacaaagggagcagctgtctgttcagggcctccttccatcctccccaatcctggagccacattccagcacaggcccacagcatcccaagctggagactttgtcaccccacagagcactgtggtgattaggtcctctcagtctgtggagaaggagaactcccaatcctggcaatgaagcaacttgggggccactggaaagccacgctgagcaaaggacgaagacacatctgggattgctctgcaggattccattcctgggaatctcaagggcaggtgacaaaggagtctacaggactggacaggggctgccagggtggggtgggcacgaggatgagctgcagaggcaggaggacaccgtctggggcaaggcagatgtcagaggtctggacaaagtggtaatacaggtgtatgtatttacaaaatcttccaggtgggcacatactattaggcatcttactgtatgtaaattctacctccttcaaggcaatttttaaaatatcaggtgggtcttccaagcagtgcatagaggaaagaagctggaagcatggctgcctaggagagaagcaagtgaggcctgtgggctcccacattcatcccttggcttctgctccctcttctgacacccccactgcctgccaggtgtctccctgcaccttgtgggccccacccacagttaccatgagacaccaggtcattcccttccctgctcacatcccctccaggagcttcctcttcctggagcaggcatgtcccaatcccacctcagggcctttgcactggctgttccccaatgcctggggcttctcaacctctccagtctcatagagaccaccctgaccagggtccagtggtctctctctagcccctgttctatttcacttccaacagagtgagtataactccctgatcctaattgttgaccataacctatcatcccctacacacactgtgtaggaacggactgtacagtttcatagccacctgccacatgtgccacgggacacttgaaatggggccagtccaaaatgactcccaggctaagtgtaaaaaatacacagcgaatttcaaagatttacaaaacccctccaacaaaaaaaaaatctcattaataatagttcctattagctgaaataatattgtggctgtattaggttagataaatattttaaacattactttcacccattttttctcatcttttaaaatgcatctactacacattttcatatgctcgtgggttcatgtcacatctctgtgggcagcagctctgcaatgtcacctctatggctcatcatccaggttcagtattcaagccctagacctcctggcacggggagtagctggtgataagtttttttattgaataatgagttatgaaaagagaacccagtgaccttttcaaaaaaggttaattcccttgaatttggcaaagaaattctccataatagggtgtggacagggtcttctggaaccttctgaaataacctccctgttccagagattcagagaccgtgaccaagtgctcctggatgcctctgatatctgaagaccccggaggccaagccctgtatttttcacttttctgagcaaacaggaggtcacattgttttcatagccaaaggagaagtgtcatctctgtggagacctggtgactcaagcttgggagcactggggaagagaggcatggctcggggaggctgcagtgaggacaggagtggggaggaggggtagatagaggaggaggcctgggaggggcagggagaacttaggcagggagggatcttgtggtttctgaggagtgaaaagagagatggagaaagagggaatgagcagaaagaggaggaggagtcaggggcaggtcatggaggggggtggggctgagctgccaaagcaggataaatgcacagctgcctgctggtctgggatccccgcctcaggctctcaacctcctctcctgcagctccagctctgtgctctgcctccgaggagaccatggcctggcccctgtgcaccctgctgctcctgctggccacccaggctgtggccctggcctggagcccccaggaggaggacaggataatcgagggtggcatctatgatgcagacctcaatgatgagcgg

SEQ ID NO: 26319 - DNA, 2300 bp, Homo sapien
ccatgagtaatattgttcccgctgtcgggttcctgctgatgcagccccagccatggcggagccccaggattatagcaggtctgggctgatcctggccgaccctcacctccaccactcccaggagagtcctctgggtgtcctgctaaggcccagggtttcctggtgtttctggccaagcctgccacctcgccataagggcatttgccgcaggatcaccttcaggcatggagggggggttgagagaacaaagggagcagctgtctgttcagagcctccttccaccctccctactcctgaagtcacattccagtccaggcccacagcatcccgagctgggggctttgtcagcccacagggcacccaactgaccacatcctctcagtctgtggagaaggagaactctcaatcctggcaatgaagccacgctgagcaaaggacgaagacacacctgggctctctctgcaggattccattcctgggaagctcaaggacaggcaacaaaggagtccacaggaccagatgtgggctgccagggtcgggtgggcatgagggtgggcttcagaggcaggaggaaaccatctggggtgaggcagatatcacaggtgtggacaaagtggtaacacaagtgtatgcatttatgaaatcccccagattgggcacatacaattaggcattttattgtgtgtaaattctacctcattcaatgtaatttttaaaatattacatgagttttccaagcagtgtacagaggaccagtgctggcagcacgtctcccagaggggaggagcaagagaggctcttgggctcccacattcatcctgtggctgctgctccttctcctgacacccccaccacctgccaggggtctccctgcgccttccacctggacacacccacagttaccgtgagactccaggtcgttcccttccctgctcacaccccctccaggagcttcctcttcctggagcaggcatgcccagccttgcctcagggcctttgcactgactattccctgctgcctggggcttctcaacctttccggtctcttagagacttccctgaccagggtccagtagcacccaccctctctctaactgagcgactataattccctgatctaaattgttgatcaccactctgcatcctcccacacaccctaatggctgggctatgcagtaccacagccaccagcagccactcgtggccacagggcacttgaaatggggctagtccacagtgacgcttggtctaactgtaaaaaatacacagggaacttcaagacattacactcacacaaaagaatgtaaactagctccttaagaatagtcctgaagtgttgaagtattttggatatattaggttaaagtagaaataccaaaattactttcagctgtatcttttaactttttcaaatgtgttttaaattgctcctgggtttctgtcacatctctgttggatggcagctctgcaagttcatgtctacggctctattgcccagactgcttggtgcagggggaagctggtgacaggtttgtttattgaataatgaggagttatgaaacgagaacccagtgaactttacccaaaggttaattactttatgtttggcaaagaagttccccagaagagggcatggacaaggtcatcccggagcttctgaaacagctccctgccccaggaattcccagaccatgaccacgtgctcctggatgcccctgacatctgaagactttagaaggccaagccctgtatttctccctttcctgtggacataggtggtcaccaggtttcacagcccagggagcggtgtcacctctctggaatccagagtgagccaagctttagagcactgaggaagaggggcagggctgtggggaggttgcggtcaggacaggagtggggaggaggatgaggaggaggcatgggaggagcgaagggaacttagggagggagggaggtggttgggggtggaaagggagatagagacagaagaggaggggtagaaagaggaggaggagccaggggcggggccagggagcaggtggggttgggggacacccaagtaggataaatgcacagctagcttctggcctgggcttcctgcctcagccttctgctgctttgctctctgggagatccagctccttgctctgtgtcccagtagaacatgatgtggcccatgcacaccccactgctgctgctgactgccttgatggtggccgtggccgggagtgcctcggcccaatctaggaccttggcaggtggcatccatgccacagacctcaatgacaagagtgtgc

SEQ ID NO: 26320 - DNA, 2300 bp, Homo sapien
gcctgccactcagtccacaggcaggagcaacggggagatcccacaagcaaagtgaactgggggatgggctgaaccggctccaggcaactgagccctactggcaggtcctaggcctgggcccgaacaggaaggaggggcacagagtgcccaggtaaccgctcctgggagccctggggaaccgtcggttgcttgaactctcgagagctgggctctgcgtcctcgtccagccgccaactcggccaaaggcgaagccagcagtttcttctgctgccgggcaacgcgccttttaaacctgagggagtgggcgcgtgagcacttaatggcgccggtgacagagtgagcttaacggattaataagcgcagccaggtacccgcgcaaggcacttgctggcaatggcgggaggcggacgtggggggtcatgcaataggtactggaaggagagacacgggcacaaaggtcgcgggaggaacaggtgcccacaatggcggcagatctgcccgtggatcactgaagattcctgctctcctgctgaggtggagattgcagtgagctgagatcgcgccattgcactccagcctgggcaacaagtgcaaaactcagtctccaaataaagaaaaagaaaaaaaagaggccgggcgtggtggcttatgcctataatcctagcactttgggaggtcggagcggacggatcacgagctcaggagttggagaccagcctggccaacatagcgaaaccccgtctctagtaaaaatacaaatttagtcagacatggtggcatgcgcctgtagtcccagctactccggcggttgagacacaagaatcacttgaacccgggggtggggaagggattgtgatgtgccgagatcacgccactgcactccagcctgggcaacagagccagactctttttttttttttttttttttttgagatggagtctccctctgtcgcccagcctggattccagtggcctgatctcggctcaccgcaagctccgcctaccgggttcacgccattctcctgcctcagcctctggagttgggactacaggcgcccgccaccacacccggctaattttttgtatttttagtagagacggggtttcactgtgttagccaggatggtctcgatctcctgacgtcgtgatccgccctcccaaagtgctgggattacaggcctcggcctcccaaagtgctgggattacagccgtgagccaccgcgcccggtgttgaaactcccttgaggcattttcttcggccttcgggtccatcctctctgtctcctccttgacctcctcatctcctcctcgccactgccttggggaccttggccaggctcatggcatccagcagccactcaatgtcaatacctccatgttcatctctcagcccgcccttgcccgtgaacccatgcttatttatttattttttttatacgtgcacccatgctcttcaggtctgatgaagtatccaaaatcaagctcctgaccatccccaaacctgccccttctgcagagtttacctcgctagtcggcgccatccttgattcttctctttctcccacccaggccatcatctcttgcctggttgatacccacagcctcccctttggactttatccttatccccgtcatagctgccagagggaccctgtgaaaacactccccagcctgctcattcctctgccctaagcctgcatggcacagagcaaaagccagttgttatgggacctaggatgtcctgtgggatgggccccagcctgcatcttcagccttttctccccaccccactccattcactctctgcctatcgctcaccagcctataccacctgcctcagggcctttgcactgaccatttaggccacattccaggctcttttcacacattgcctcctctgagaagctctccctaaccactctgcccatacctcatgcctcttgattccccttacctggcttgtggtttcagcactttcgctgtgtgtgtttgtttttcttggcatgagggcaggacctaagtgtctgtttcctattgattccccagtgccaggcatgcagtgcaaactctagaaatattttttgcatgaaggaatgagtgattgaatgcagcaagggtctggaggctgaggaccaggcagacaaacattcagagttgctggaatgcgacagagacagggagtcagactggtcatgcaaggtcctgggcctgcccttgggtcctggggagccacggaaggttgtgggtgccagagggttgtggtcagagccacagtcaggggccttctgagacctgtgccc

SEQ ID NO: 26321 - DNA, 2300 bp, Homo sapien
gaaggccatgagggtctgcagtcctagatggccttgtcctcaacctgcagtgcactcttgatgcgctggaatgccacctccttctcccggtccaggtcttcagcagtgacccggtaccccagctctaagggaggaggcagcatcaaaggctcccctcgcctgcgtggcagcaggggaaacttgtgtctacagggcctagaggcctgggatctggggaagccacccctgggggcgagtgtctgccctggtgctgtatctgccgtcttttcacaatgggtgtgacccgaagagacagcctgaggtccgtcctcactcactgtgtttgaggaactgagggtcagctggcagtgggatgaggctggccccctcctccgctttcgttccgggaggcctcccgtagagctgtaggagctggagatggcctttcgtttggggcacgagctggtccgggaggtctgggatctctggttctgacctctgggcacctgctgcagctgtggctgaggcccagaaatgtgaagggcctctatccactctagtagtgaccccaacgtggggttcaatgtggaggggggaggggctgctgcggctgcaggagcagaagtgccagggcttgttcttctcatgcccgcatccatgcttgcagctgggaagggggcaggaatcagcgaggtgacctgggctgagtcctgggagtgggaagaggtggcaggaaggggatctgaggaggagaacagggggcctggtggtctgtgcttcttcccagacatgggagctgtagaggggacctctgcagcaggtgctaggggggccagtaggcccaggcagtcttgggacttgtgtctctcctgctgtgcatccatactgggtgctttagaaacggcaggcagaccagaagtccctgttgcaagtgaggacaaagtgtgggaaggccgtgagagtctgcagtccgagatggccttgtcctcaacctgcagtgcactattgatgcgctggaatgctgcctccttctcccggtccaggtcttcaacagtgacccggtaccccagctctaagggaggtggcagcatcaaaggctcccctcgcctgcatggcagcaggggaaacttgtgtatactgggcctagaggcctcggatatggaggagtcattcctgagggtgagtgtctgccctggtgctatatctgctgccttttcacactgggtgtgacccgaagagacagcctgaagcctgtcctcacccactgtctttgaggaactgagggtcagctggctgtgggatgaggctggtcccctcctccgctttagccccggcaagcctcccgtggagctgcaggagctggagatggcatttcgtttggtgcaggagctcgtccaggaggtctgggatgtctggttatatctgatttctcacctctgggtatggaggtctgtctgcagaggcccgggcccgggcacaaagggagagagaggcctccattgtcccgcaggggccgaaatgcagaccgtgcatccccggtgacctcggggacccttctctgatcatcaggattctcttggactctagggtccttgtcctgctcaggcatccctgccccgctctccttgagggccctcaacactgtcttccctggacacaagtctggggacagccgggtgttttggacaccaaaggggtgactcccggctcctgggccccacagagagtccttgtgctcagtggagtggctgagctggaggacgccctggaactcagagcacacagcactggcttgctgtggtacctgtgcaatcaaattgaaagcaggatcccaggaaggaacgcagggcttgcaggatcacggaaaaccttcttagagttgtcttgacaccactgatgtcaagtgtccgggtgcttgtaggatggcctgccactcagtccacaggcaggagcaacggggagatcccacaagcaaagtgaactgggggatgggctgaaccggctccaggcaactgagccctactggcaggtcctaggcctgggcccgaacaggaaggaggggcacagagtgcccaggtaaccgctcctgggagccctggggaaccgtcggttgcttgaactctcgagagctgggctctgcgtcctcgtccagccgccaactcggccaaaggcgaagccagcagtttcttctgctgccgggcaacgcgccttttaaacctgagggagtgggcgcgtgagcacttaatggcgccggtgacagagtgagcttaacggattaataagcgcagccaggtacccgcgcaaggcacttgctggcaatg

SEQ ID NO: 26322 - DNA, 2300 bp, Homo sapien
ccagcctcaattccctgctaactgtaatttaaatacaatttatgattcaagtcaaaatcctgattgcatttagtttgctagtgacagaatcaatccattttggtcagaaaaaaatgatgcatctgctgtcagacttccagtctctgagacattgaggcttcctagagccatctctctgcattttagagtggtctgcctttctttctccactgatatttcacaatgagcagcattaaacatcatctcacctactcagaggtcaggggcagtatattctgatatatcatccagagatagccaagcagaatgacttcatcaacaacagaacagcttctttacgaggaggataggacaagcatagagacgtgttgtttagtttgcggtaaagtaggcttttcacacattggtactattgtacaatgtgctgctaaccaggataaaagtacttacatggccaggcgcagtggctcacacctgtaatcccagcattttgggaggctgaggcaggtggatcatgaggtcaagagatcaaggccatcctggccaatatgttgaaaccccgtctctactaaaaatacaaaaattagctgggcgtggtggcatgcacttgtagtcccagctactcaagaagctgaggcaggagaatcgcttgaacctgggaggcagaggttgcagtgagctgagatcgcgccactgcactccagcctagggacagagtgagactccatctaaaaaaataataataaaaataaactcacacagagaataataacagcaggcaggtgtgtggtactgtagctattaggtgcatgtagatggccctatcaaatatttttagaagattcgttccttataaacgaccactcattcaatttttacataatttgctaatctcacacatcgctaattcaaaaaccaactttcttttagaacttttaaatatcataatgagtttaaaccaacacaatttggcacaatgcatagacctgaaatggtgaagtacacactaccttccctttaaataaggtaaagctgccatatcactcaggtaaactattagtgttcatggcaaacacttggggaaaaacactgtcactcagatgacagaccttcactttcctctgtccacactcgtctagcaatctgcaatcagctgtggatctcactgtcagtgaaaaactccagactctcccatcatctgcctgcctgtcagttagtcttgtctggtggggccatcacaggtattgagaggactggctgagactcacagacaactacaaagagagtcagacacagagaccagtatgtgcaatgcacaatcccaagtgaagatacacaaggatctgtttctcaaatgcagcccaagccagtgagtgtctttgtatgctggcccttgtgccaggcactgcttacctgctcaatgtctcacaacagccagcaaggtgagatgcatccttctttctcagaaaaccatgatcttacaaataagttcctgggagaagggaatggaaggaactggtttggagaggtcttctggcaccaaagcctgtctgtccttctattagcaaccacctgccgtgctgcaacactggagcctgagcacagcagtctaactctagaacccggggctttagccaccagatggactgcagctctcccgcaggacatagaagcctggcttccccaaataggaggcgggaactgaatcagtcaggattggttcagttacaaaggacaggcagatttatcagaggctcaaacaaggcataagtgtgttccactctcacatgaacgtccagaagtctgagacagccatgaccctccactgtgccagctacccaccttccctatcctgtttctctgctgagcatgacctcaaatttatggcctatggcagcccttttattttccaggcagtaggattaaggggagaaggaacatggtagaaaaatcacaaaggcgctcatcagctgtgtcttcggggaggccttgaatgctgttgcattcctgtgcttttatatccctggacacgcctgagtgcaagggaggctgggaagtgtagtcttccttccagatggccaggggctgctacaagctgtaatacgacaggaaaaatggagaatggatagtgaggcgtgatcagcaggctcttccatgacaaccagcaggtagggtggatctctacttgcaactgtaagagactctgcagaagacacaccttcccgtcctctgccttatggactgtgaaactgtctttatgtatacggccatctgtttaactgttacctggtctgtgcaat

SEQ ID NO: 26323 - DNA, 2300 bp, Homo sapien
gtgtgtctgtagtcccaactactcaggaggctgaggtgaaaggatcacttgagtccaggaagttgaggctgcagtgaaccatgattgtgccagtgcactgcagcctgggccacaggacaacactctgtctcaaaaaacacatttacctatgtaacaaaactgcacatcctgcacacgtacccctgaacttaaaacaaaagttgaaagttaaaaaaaaatgttggctggaaggtgtggcagcttgctcggtgcctgagtgacagttcttcccagcacaggaggtggcccacagacctctcttagctctgaaagttctgtaacatcctctgagagataagcattgttgagaaggttaccccagtttccaagagacttggcaatttctactgtgccccattgcctaatatgtgacagctcctcactgactttcttgaaagtctttatttcaatgctatatcacagcataccagataatatttcaagccacaacaagggaatcacaggtaagagaaactgcccatcgtgtgctgggcaactgagcttcccaccaggagcccttaatgagctgctgcatctgccaggagtgggtgacatctgtttctttacatacacgtcctggccctgtgagtttcttttgaaatgaagtgtaaggcccctttgaattacagaaagatgtgtgtgtgtgtgtgtgtgtgtgtgtgtgtgtgtcatgggggaagagtccaccttctgtttctttcttttttttttttttttttgagacggagtctcactctgtcgcccaggctggaatgcagtggcgcgattaaattcaaacagcacccaggagacaaaggcgagtcctggctgcagcccaggcaggtgttctctcgtcaaaacaaaatctgcctcaaaagtcaatccagaggctgggcaagtgaaagagcagtgacttagaggcagggaacccgagcttcaggctactcctgcacattgggtggctacacaatctcaattaccctttttaaacttcaatttcttcatttgataaatgggatcaatgactctccacctcaaatgggtctaatagtatctgctcaacctaatggcttagatgggaaactgctttattcaggaaaggactccggaaaggtaagctgctttattaaagtgtggtggcatgttcttccaagttgagaagttctgctagatgggagaaatgaacagtgcccgtttctgagtgttccagaccacagccttgcagctctggggacctaaaggaagaaacatcaggtgtgtctcgcggggctgcagacatgaagacggggatggaattcaggtgatagtactggttccactcatccgcgcctccttcaaatgcctccttctggcactctgcatttcagcattctctttgggctgcggaggctccctagaagccacgtcccctgaaaggaatataggaaggacctcttgttcctggcaccacctttaactcctgcccctgcccaccaggacacctgggcaagacgcagcgcaatggtgggttaccaggcaggagggagggctctaggaaggttgggagccatggaactctggagcttaaccttctctgaccaccagtgtaccagcctgcgggtggcaggactggggcctctgcctagtgttgaaacgggggcgcacagatgcttttctaaataacttttgaccccctttctggtaaatctttttttcagagttgattctctatgaaatctacactgcaaacaccacctcctccgctcctagaacgcagactgtcttaccaccgccctagtttccttccaattccaactggggcgggcccgccatgggccaacaacaggctggctcagggctgagggggtctctggagtctgaactccgcgcccgcttgctcctccagggcttagctggtcaggacttgaacattcgccggatccataaattgggtcatttttaacctcaaaaccgaaccgcagcctggggaggcctttaggaccgaggggagccatcccttcctctagtcgggcagcaaattcctgtcctcctagtcccccgcagctatcccccgcccccagcctctgtggccctcacattgtcagacactggccgcgggccaccatctggacgcgatcccccgctagggcctccctggtctgggccaaagttggtggccaccttcgcgcgggctgcgccctccttctcttccctgccctcctcccccggggcccgcgcccgctgcctccagcacgcgcgtcggcaggctcggcaagcgaagaggagcggctcgccccagggcg

SEQ ID NO: 26324 - DNA, 2300 bp, Homo sapien
aggtaagagaaactgcccatcgtgtgctgggcaactgagcttcccaccaggagcccttaatgagctgctgcatctgccaggagtgggtgacatctgtttctttacatacacgtcctggccctgtgagtttcttttgaaatgaagtgtaaggcccctttgaattacagaaagatgtgtgtgtgtgtgtgtgtgtgtgtgtgtgtgtgtcatgggggaagagtccaccttctgtttctttcttttttttttttttttttgagacggagtctcactctgtcgcccaggctggaatgcagtggcgcgattaaattcaaacagcacccaggagacaaaggcgagtcctggctgcagcccaggcaggtgttctctcgtcaaaacaaaatctgcctcaaaagtcaatccagaggctgggcaagtgaaagagcagtgacttagaggcagggaacccgagcttcaggctactcctgcacattgggtggctacacaatctcaattaccctttttaaacttcaatttcttcatttgataaatgggatcaatgactctccacctcaaatgggtctaatagtatctgctcaacctaatggcttagatgggaaactgctttattcaggaaaggactccggaaaggtaagctgctttattaaagtgtggtggcatgttcttccaagttgagaagttctgctagatgggagaaatgaacagtgcccgtttctgagtgttccagaccacagccttgcagctctggggacctaaaggaagaaacatcaggtgtgtctcgcggggctgcagacatgaagacggggatggaattcaggtgatagtactggttccactcatccgcgcctccttcaaatgcctccttctggcactctgcatttcagcattctctttgggctgcggaggctccctagaagccacgtcccctgaaaggaatataggaaggacctcttgttcctggcaccacctttaactcctgcccctgcccaccaggacacctgggcaagacgcagcgcaatggtgggttaccaggcaggagggagggctctaggaaggttgggagccatggaactctggagcttaaccttctctgaccaccagtgtaccagcctgcgggtggcaggactggggcctctgcctagtgttgaaacgggggcgcacagatgcttttctaaataacttttgaccccctttctggtaaatctttttttcagagttgattctctatgaaatctacactgcaaacaccacctcctccgctcctagaacgcagactgtcttaccaccgccctagtttccttccaattccaactggggcgggcccgccatgggccaacaacaggctggctcagggctgagggggtctctggagtctgaactccgcgcccgcttgctcctccagggcttagctggtcaggacttgaacattcgccggatccataaattgggtcatttttaacctcaaaaccgaaccgcagcctggggaggcctttaggaccgaggggagccatcccttcctctagtcgggcagcaaattcctgtcctcctagtcccccgcagctatcccccgcccccagcctctgtggccctcacattgtcagacactggccgcgggccaccatctggacgcgatcccccgctagggcctccctggtctgggccaaagttggtggccaccttcgcgcgggctgcgccctccttctcttccctgccctcctcccccggggcccgcgcccgctgcctccagcacgcgcgtcggcaggctcggcaagcgaagaggagcggctcgccccagggcgcccctcgcccagcctgccggccaggcgagcgcgacgagagtctccccgcaccccttcctctcccgggggccgagagggttgggctccgccccggcgccgcagctcccgactccccgccgctcgggctgccgccgctgccccgcgcccggcgctcggggcagccgggggcgcaggcggagagcgcagggcggggagaggcgtggggagcagagcggcgctgaggggagggcagaggaggagagagcctggcagcggaggagcagaggcgggcgccgcaccgccccgcacgctcgctcgctcgggagagtcgcgggcggccgcttgggcgcacttgccgggtcaccttgtcccggaggtaagtccagacctcccggccgcgggggcgggcggaggggcccgcagtgggcggggtcgcggcaggggccgcgagctggcggcgggagctggaggctgccctgcgctggcgggtgtcctagtcctggctccgcctcggagcgcgca

SEQ ID NO: 26325 - DNA, 2300 bp, Homo sapien
aagagtgtgggcagaagacaaccctccagggttggcagtcaaccaagcccccgtacttatagaagttaagcctggggcccagccagttaggcaaaaacagtacccggtccccagagaagctcttgaaggtatccaggtccatcaagcgcctaagaacctttggaattatggctccttgtcaatctccatggaacactcccctcctgcctgttcccaagcctgggaccaaggactaaaggccggtacaggatttgcacttggttaatcaagctacagtgactttacatctaacagtacctaacccgtacacattgttggggttgctgccagctgaggacagctggctcacctgcttggacctttctttagcatcagattagcccctgagagccagaaactgtttgcctttcagtgggaagatccagagtcaggtgttactactcagtacacttggacccagcttccccgagggttcaagaactcccccaccatcttgggggaggagacctccagaagtttcccaccagagacctaggctgcatgttgctccagtacattgatgactttctgctgggacaccccacggcagtcgggtgggccaagggaacagatgccctactctggcacctggaggactgtgggtataaagtgtccaagaaaaaagctcagatctgccgacagcaggtacgttacttgggatttactatctgacagggggagcgcagcctgggatcagaaagaaagcaggtcatttgcaatctaccagagcctaagaccagaaggcaggtgagagaattcttaggagctgtggggttttgcagactgtggatcccaaactttgcagtattagccaagcctttgtatgaggtcacaaagtggggggaacaggaactttttgaatgggaatcccgacaacaacaagcctttcataagttaaaggaaaaacttatgtcagccccagccctggggctacccgatctgacaaagccttttacattgtatgtgtcagagagagaaaagatggcagttggagttttaacccaaactgtggggccctggccgaggccggtggcctacctctctaaacaactacatggggtttctaaagaatggcccccatgtttgagggccttggcagcaactgccctgctagtacaagaagcagataagctgactcttgggcaaaacctgaacataaaggctccccatgctgtggtgacattaatgaatactaaaggacatcattggctaacgaatgttagactcaccaagtaccaaagtttgctctgtgaaaatccctgtataaccattaaagtttgtaacaccctgaaccctgctaccttgatcccagtatcagagagccctgtcaagcatgactgtgtagaagtgttggactcagtctactctagcagatctgacctctgagaccggccttgggcatcagtagactgggaactatacgtggatgggagcagcttcatcaacccacaaggagagagatgtgcagggtatgctatggtaaccctggacactgttattgaagacagatcattgccccagggcacttcagcctagagagctgaactcattgctttaatttgggccctagaactcagtgaaggtaagactgtaaacatttacactgactctcggtatgcctttttaacccttcaagtgcatggagcgttatataaagaaaagggcctattgaactctgggggaaaggacataaaatatcaacaagaaattttgcaattattagaagcagcatggaaaccccacaaggtggcagttatgcattgcagaggacaccagcgagcttccatcttggtgggtttggggaattcctgcgctgactcagaggctcgaaaagcagcatctgcccccttccaggcatcagtcacagaccccctgctccctcaagcacttgatcttgtagctacttattcgggagaatagctctgccacagctgctaggagccgcaattgtactggttttgcatgaaaccacccatctaggtcaggagtcacttgaaaagttgttaggccggtatttctacatctcatatttgtcaacccttgccaaaacagtgacgcagcagtgtgttacctgccgacagcataatgtgaggcaaggtctagctgttcccccccggcatacaagcttatagagcagcctcctttgaagatctccaggtggacttcacagagatgccaaagtgtggaggtaacaagtatttactagttcttttgtgtacctactgtgggtgggtggaggcttatccaacactaactgagaa

SEQ ID NO: 26326 - DNA, 2300 bp, Homo sapien
agacaaacagagagtgaaattataagtgaactcccattcacaattgctacaaagagaataaaatacctaggaatacaacttacaagggatgtgaaggacctcttcaaggagaactacaaaccactgttcaaggaaataagagaggatacaaataaatggaaaaacattccatgctcatggataggaagaatcaatgttgtgaaaatggccatactgcccaaagtaatttatagattcagtgatatcccccatcaagctatcattgactttcttcacagaattggaaaaaactactttaaagttcatagggaaccaaaaaagagcctgcatagccaagacaatcctaagcaaaaagaacaaagctggaggcatcatgctatctgacttcaaaccatactacaagcctacagtaaccaaaacagcatggtactggtaccaaaacagatatatagaccaatggaacagaacagaagcccagaaataacaccacacatcaacaaccacctgatctttgacaaacctgactaaaacaaccaatggggaaaggattccctatttaataaatggtgttgggaaaactggctagccatttgcagaaaactgaaactggaccccttccttacaccttatacaaaaattaactcaacatggattaaggacttaagacctaaaaccataaaaaccctagaagaaaacctaggcagtaccattcaggacataggcatgggcaaagacttcatgactaaaacaccaaaaggaatagcaacaaaagccaaaattgataaatgggacctaattaaactaatgaacttccacacagcaaaagaaactgtcatcagagtgaacaggcaacctacagaatgggagaaaatttttgcaatatatccatttgacaaagagctaatgtcgagaatctacaaggaacttaaacaattgacaagaaaaaaacaaccccatcaaaaattgggtgaaggatatgaacagacactaaaaagaagacatttatgcagccaagaaacatatgaaaaaacgctcatcatcactggtcattagagaaatgcaaatcaaaaccacaatgaggtaccatctcatgccagttagaatggtgatcgttaaaaagtcaggaagcaacagatgctggagaggatgtggagaaataggaacgcttttacactgttggtgggagtgtaaattagttcaaccattgtggaagacagtgtggtgattcctcaaggatctagaaccagaaataccatttgacccagcaatttcattactgggtatatactcaaaaatcattctactataaagacacatgcacacgtatgtttactgcagcactagtcacaatagcaaagacttggaaccaacccaaatgcccatcaatggtagactggataaagaaaatgtggcacatatacaccatggaatactatgcagccataaaaaagatgagttcatgtcctttgcagggacatggatgaagctggaaaccatcattctcagcaaactaacacaagaacagaaaaccaaacaccgcatgttctcattcataggtgggagttgaacaatgagaacacatggacacagggaggggaacatcacacaccaaggactatctggggatccggggccaggggagggatagcatttggagaaatacctaatgtagatgatgggttgatgggtgcagcaaaccaccatggcacgtgtatacctatgtaacaaacctgcatgttctgcacatgtaccccagaacttaagtaattaaaagaaaaaggaaaatcaagtgattttgcttttgaaaattcctgctaatgtttttcatgcaacatctctttcgtgtgtggctcaggggtagaacattgcatcaggatttgctcatgggtctcatgtctcttcctcctcccccagcaaatgacggctgctcggaaacttttataaaggaagcggttgctttgtggctgatagatctgaaggtgaagagcttctggccaaaatgattcagcagcaaaacactcccctccccagcaccacgcaggcagccccctagccccgcccctgccccatcccacagtggtttgcagggtggggttccatgctgtggccctggcacctgcccctgggctgggacagcccactgttccatgctgcccaagaaggctcagcacaggcacaaaccattgcccggcactggcccgtgctgcctgagaaggattggcacgggcacagaccactgcccccacctgccctgcgccatctacccaagaaggctcggcacgggcaccaaccactgcctc

SEQ ID NO: 26327 - DNA, 2300 bp, Homo sapien
aacaactttcagaactacaggccactctgcaagtgtagtaagctgatgataaaaatctcaaactgatatctctgtcctatgaaacgtaatagctgaatcttgatggagtttctgtaagggataacagaggcacataatgagtcacctgattaagagcatgttagtaattcaggttagaacgaatcccttttatgtttacagcaaaagctatcacatatttaaacctaataagaagactctatttcacacctcaccatgtcaaattaccagataaaacacaggaaatgacacttggagacagaaaatcaacagctaagtcaacatcaagactccattgctaaaaactgtgaaaaccagtttgccagcttctctatatttgtgaaaattaagcactgaaagcaaagctctctgttctcaatttaaaaagggaatctacctataagcccagcacatttaaattgtttgtatgacagaatgattaggtattattttctttgtatacttgacatacaaggcacatcatttattactaaaagtatttctaatgaccactaattttctttcctatagagtcacacaaaaaactttgagttgtttatctgacacaatgtgggtcacaccaattagacagaagccaatctttgcctctgtcctactggtgctgcctccaggagccagccttgagaagcggggacactcccgactctctacccccaacacggggcctgaccagccctgggggaattaaccatcagactcccaactctcttcccccaatatggggcctgaccagcactggcggaattaaccatcagactcccaactctcttcccccaatatggggcctggccagcgctggaggaattgaccatcagaatcccaactctcttcccacaacacggggcctgaccagcgctgggagaaattaaccatcagacccccgactctcttcccaacacggggcttggccagagctgggggaattaactattggactcccaactctcttcccctaacatgaggcctggccagcgctgggagaattaaacatcagactcccgattctcttcccctaacatggggcctgaccagcactgggggaattaaccaacagactcccgactctcttcccctaacatgaggcctggccagagctgggggaattaactgtcagacccccgactctcttctcccgacacagggcatgaccagcgccggggggaattaaccatcagactcccgactctcttcccaacatggggcttggccagagctgggggaatttactatcggactcccgactctcttcccctaacatgaggcctggccagcgctgggagaattaaacatcagactcccaactctcttcccccaacatggggcctgactagcactgggggaattaaccatcagactcccgactctcttcccccaacaaggggcctgaccagagctgggggaatcaactaccagacttccgactctcttcccccaacatggggcctgaccagcactgggggaattaaccatcagactcccaactctcttcccccaacagggcctggccaccactcaggggaaaggaggacacaggagtccaaggccagccagtgcacacagatggtcccaatgttaccacagctatcagttctctgaatttttgtatcattacatatttatctgatttttttctgactttgatatctatttaaaatactgtctgtgaagttattccaaacatctttggagacacaatctcttgttactctcacaaatacccaggaaagaaaggaacagatgtcagccccatttcgtaggctggaaaacaggagggaagtgtaatatcaacttacgccagagggagtcggcatcaagagcagatggtctaaggtcgcctgctccttgcctgaagacggctgcctgagagaagtcccacagcttccctcctgagctagtcggatggactgtttggccttaaaacatcatcctcaccaagacaatccttacattgacacctgatggaattaaatttcagtactgttaattaaagtagagaagaaactcccaggccacaccatcaaaaaaggttaatcagcagaagtcgatttatcgttatttattatcaaaatcatgaccagtgtgtagacatacttgtgaaaatatacagcaacttggggcttataacacatgagcaaagatgacattaacacgtgcactgttcacatcttggggtctagaggtcaagaacaaagatcacagacaagacgttactaaacggacccctgcagtaggtcccgaat

SEQ ID NO: 26328 - DNA, 2300 bp, Homo sapien
ttggttcgggcccttgcagtaagttggtgataatccctcgatgtgtctcttccagtctttcagaaagatgttggatcgttgtgtggaactgcttttccctagaatgcctgtgggagaaaaagaacctctgaccatctagtagatggaacatgacgtcactacgagctcttcatttgccgggtggtccttgggcctcacggtgcctgatggtcacctacagtccccattttgcagctgggtagtggctgtggcccctgcttggtactgcatgggcctcgcccctcaccattttattggggtccccgtttacctttgcggtacttcagaggctaataggtgttatcacagtgctgctgtggaaaagtaggtggccttgtcattacttggatgtgtaagtgttattctgccttggtctcaggaatttcagccctgtaagtgagaatacccttaagtcattcaaattttggaaaactagagtagaagactcactgtttaaaactgatagtctatagacttaatagttatcattttttaatagctggaatgtttttattaaagtgatgtattttcataaacacaaacaacacaaaggtacaaaggagaaaataaaaatcacctgagtcttttcagatgtaattgttatgaacattttagtggttcacttttcagacatctttttgttcatggacatgcacacccacacgtatgatggaattataccctacatcagttctttaacctgcctttttccgtgccattttggcagtaagcaccctgcagtgagcatcccacagtgaacaccctgcaataagcatttgcagtgagcacccatggtcagcacctacaatagcacctggagtgatcacccatggtgagcaccctacagtaagcacctgcagtgagcaccccacagtgaacaccctgcagtaagcacctacagtgagcacctatagtgaacacctgcagtggtacttgcaatgagcaccctacagttaatgacccacaaaagcacctgtagtgagcaccctgcaataagcacctgtagtgagcaccccacagtgaacaccctgcaataagcacctgtagtgagcaccttcagtgaggaccccacagtgaacaccttgcaataagcatctgcagtgaacaccccacagtgaactccctgcagtaagcccctgcggtgagcaccccacagtgaccaccctgcaataacaccctgcaataagcgcctgcagtgagcactccacttgaacaccctgcagtaagcacctgcagtgagtacctcacagtgaacaccctgcaataagcacctgcagtgagcaccccacagtgaacatcttgcaataagcccctgtggtgagcaccccacagtgaacaccctgcaataacaccctgcaataagcacctgcagtgagcactccacttgaacaccctgcagtaagcacctgcagtgagtacctcacagtgaacaccctgcaataagcacctgcagtgagcaccccacagtgaacaccttgcaataagcacctgcaatgagcaccccacagtgaacaccctgcaataaccacctgcagtgagcaccccacagtgaacaccctacaataagcacctgcagtgagcactctacacaaacaccctgcagtaagcacctgtagtgagcaccccacagtgaacaccctgcagtaagcacctgcagtgagcaccctgcaataagcacctgcagtgagtaccccacagtgaacaccctgcaataagcacctgcagtgagcacctcacagtgaacaccctgcaataagcaactgtagtgagcaccctgcaataagcacctgcagtgaacaccccacagtgaacaccctgcagtaagcacctacagtaagcaccctgcagtgagcaccccacaatgaacaccttgcaataagcacctgcagtgagcacctgcagggcagttgtagctctaatgccatggtcttgtcttgttctgtacagcatgatgtatgggaagggatggatgagatgcttggatactgagaacagcacatgtagaatccgggaccagctaccaatccccatctgtttgtttttctagaaacccgagatgatgagcctgtgtgtgggagacccctgggtatccgtgcagggcccaatgggactctctttgtggccgatgcatacaagggactatttgaagtaaatccctggaaacgtatgtgacaatatctcgtttccttctatgaagattttagatcttttaaacaatatatgtatgtgtagacttaataggatttgttagcaacagtcta

SEQ ID NO: 26329 - DNA, 2300 bp, Homo sapien
gttgagtagtttcagtcctctgactttattcttttccttcaatattgtattggatattttgagtcttcgccctctccatatgaactttaggattcatttgtctgtatctacaaaataacttgctgggattttgattgggattgcattgaatctatagattaaggttgggaaaaactgacatcttgacaatattgagtattcctgtccatgaacatggaatatctctccatttatttagttctttgatttctttcatcagaatattctagttttcctcatatagacctcgtgtatattatattatatttatacctaagtatgccaatcttttggatgctaatgtacatagtattgtgttttcaattccaaattccatttgttcattgttagtataaaggaaggtgagtcaatatcttgcaatatcctgcaaccatgctataattgcttggttccaggagggttttttgttgttgttgattctttcagattttctatctagacaattatgtcacttgcaaacaaagaaagttttatttctttcttctcaatctgtataccttttgtttccttttcatgtcttactgcattagctaggtcttcaagtatgatactgaaaaggagtggtgataggggcatctttgccttgttcttgatcttagcaggaaagcttctagtttgtcatccataagtatgatgttatatgtagatttttttatagatattcttgatcaagttaagaaagtttcccctctactcccagcttgctgagagtttttaatcatgaatgggtgttggatgttactagatgtttttttctgtatctgttgatatgatcatgtgattattcttgtttagattgttgaagtctctaactgtgatagtggattctgtttctccttgcagtttcatcagtttttgcctcacatattggtgctctattgtgaagcatatacacattaaaggttcttatgtttttttgaggcattgacccctttgtcattgtgtgatgctcctctttatccctgataactttccttggtctgaagtgttctctgtctgaatttaatacagctattctgggttgcttttggttagtgttaacatgatgtactttcttcatcccttcacttttaatctatatatgtctttatatttaaagtgggtttcttgtacacaacatagagttgggtcttgttttttgaataattctggcaatgtctctctttcagttggtatatttagaccatttatgtttaaagtgattattgatatattggattaatatctaccgtatttgttactgttttctattctttgcccttattctttgtttctatttttgcattctactctctttttgtcttttgtagttttaaactgagtattttatatgattccattttctctcctttcttagcatatcagttatacttcttttttttactttttgtagtggttacccttgagtttgcaatatacatttgaaaactatggaatgttttatgaatttgtgtatcatcattgctcaaggggcatgctagtagtcttctctgtatcattctaattttagtatatgtgctgctgaagtaagcacttaatgtgctgtaattttcttctaaaggatttctggcagttcttctcctttagttggatataatcaatatcagcagcagacactgatgtgaggtgaatatgaactcatgcccctaagtgctgagtgtcagcttgagtgcttcaggactggagaaaatcctcacagttctcatcactgactggtatctgctgcacccttgcttttgagtcaggttcatgcccacaggctgcttccctaggcccccgcagttttatcactgtaagttttaaggatttttcatattcccagaaattgcttctcttccatcttgagaattggcatttcctctatagggcagggggaacatgtaaacaagccctcttgtaggagaaggcggcttagtcacatttcttaggctaacattgctcttcctcctttttgtgtttttaaacagatgtgatgtttactgggacagcagatggccgggtcgtaaaacttgaaaatggtgaaatagagaccattgcccggtttggttcgggcccttgcagtaagttggtgataatccctcgatgtgtctcttccagtctttcagaaagatgttggatcgttgtgtggaactgcttttccctagaatgcctgtgggagaaaaagaacctctgaccatctagtagatggaacatgacgtcactacgagctcttcatttgccgggtggtccttgggcctcac

SEQ ID NO: 26330 - DNA, 2300 bp, Homo sapien
atcacatgatcatatcaacagatacagaaaaaaacatctagtaacatccaacacccattcatgattaaaaactctcagcaagctgggagtagaggggaaactttcttaacttgatcaagaatatctataaaaaaatctacatataacatcatacttatggatgacaaactagaagctttcctgctaagatcaagaacaaggcaaagatgcccctatcaccactccttttcagtatcatacttgaagacctagctaatgcagtaagacatgaaaaggaaacaaaaggtatacagattgagaagaaagaaataaaactttctttgtttgcaagtgacataattgtctagatagaaaatctgaaagaatcaacaacaacaaaaaaccctcctggaaccaagcaattatagcatggttgcaggatattgcaagatattgactcaccttcctttatactaacaatgaacaaatggaatttggaattgaaaacacaatactatgtacattagcatccaaaagattggcatacttaggtataaatataatataatatacacgaggtctatatgaggaaaactagaatattctgatgaaagaaatcaaagaactaaataaatggagagatattccatgttcatggacaggaatactcaatattgtcaagatgtcagtttttcccaaccttaatctatagattcaatgcaatcccaatcaaaatcccagcaagttattttgtagatacagacaaatgaatcctaaagttcatatggagagggcgaagactcaaaatatccaatacaatattgaaggaaaagaataaagtcagaggactgaaactactcaacttcaagattctctataaagctacagtaatcaagacaatgtggtattagcaaaagaatagaaaaataaatcaatagaacagataaaatttttagcccagagacagacccacataaatacaatcaactgatcttttgacaaaggagtaaaggcaatgcataatggagaaaagacagtgttttccacaaatggtgctggaacaaatttgtttgcatccacatgcaaacaaataaatctagacacaaaccttatacccttcacaaaaatggaattcaaaatggatcatagacctaaatataaaatacaaaacaaattcctagaacataggagaaaatctaggtatgatgatgaatttttagatataacacctagggtatgatgatgaatttttagatataaaaccaaggtgagatacatgaagaaataattaataagtgaaacttcattaaaattaaaaactcttgctctacagaagatactgtcaaaagaatgagaagccacagactggagaaaatattggcaaacaacatgtctgataaagaactattatccaaaatacacaaacaactcttaaaactcaacaataagaaaatgaacaacccaattacaaaaatgggcaaaaggcctgaacagacacatcaccaagaagatatacagatggcaggtaggcatatgaagatattccacatcaaatatcatcagagaaatgcaaattaaaacaacgagacaccactatacacctattaaaagggccaaaatccaaaacactgacaccaccaaatgctggcgaggacatggagcatcaggaactctcactaattgttaatgggaaggcaaatggtacagccactttggaaacgcttggtggtttcttacaaaacttaactcttaccatacaatccagcaattatgcttttcggtatttacccaaatgagctgaaaacttaggtccacacaaaaacctgcccacagatgtttataccagccttattcataactgccaaaacttagcagcaaccaagatgtacttcagtaggtaactaaactgtggcacatccatacaatggaatattactcagtgctaaaaagaaatgagctatcaacccatggaaagacatggaggaattttaaataaatgcatactactaagtgaaagatgccaatctgaaaaggctacatactgtatgagtccagctacataacattctggaaaaggcaaaactatggagatggcaaaaagatcagtggttgccatgggttaaaagaaaagggtggaatgaacaggcagagcaaagaggattttcagggcagtgaaaacaccctgtaagataccataacagtggatacatggcatttgtccaaacccatagaatgtataaaaccaagagtgaaccctaccgtaaactacagactccgagtactattgacgtattgatgtgagtacatcacttgtaacaaac

SEQ ID NO: 26331 - DNA, 2300 bp, Homo sapien
atcatagtggtcccattcctctgccaacaactggcatcagcacgatgagaaacaaagtcggtctggttggaaggtggggtgggagaactgataactgaaacaaatacaacaagcaaagcgtgcttcaccgtgacttgaaaacagaaaaactgtactgaacccgtgctatgcagcacaaatgatctagctcagaccactgtaacaccaactacctacgtgcttcatgataagcccacgagctgacctcctgataactccgaatggacttacatgtcccagagctaaggccacggttcctccagtgactcccgttgttaacggattctgaccaaccctgggcaagactatcgatggactaactccagcccccaaaccccacaaggagtctcccatgactcccccattttgaggaacctcaccggtcctctggtgcatttctttgctgcagcaagttcagtaaacccaacttactgccattatttttcttctgaatgtgtccctgggtgtttgcagtgcgtgggctttaacactgggcatggaacacaaatagctccaatgcagtgagttcaatgttatggctgggacatgtttaaagtgccttgaagacaaagaggaagatgttctgcttgggaaactgggagaagaattttcagcaaggatacttgaagtgggtcctgaatgataaaaataattggccaagtggaggtgaaggagagtgtatcacaggaagaaggaacctcaaggacaaaggcagccaggcatgagattagacatgttaagccatcctgaatgtctgaaatggggggtggggagcaagagggatagtccagacaggcaggaaggcgtgagatcatacagtactttgttaacactatccctgatttaatagctgtattggctattctcaatgacacagaatgaagtaaaatgttgtcgaggcctgaattattacctgggatctctggagaactggatttgcacagctctccacttccctcaagctggttcttccgctctttgaatgaataaataaaaagcattcacatggaattctagtgccatctagcatttaaaaaggtaaaagcctccaagaggaaattatttcttaacactgcattttgaacatggcttttccagagataattcctcgtgccactggtaacgggctttgatttcttctgcctgtcacttcctccagattcgattcctctttgaatctcaaatgctctcacaagattcagctcttcccttttgaagcaattattacgtttgataattttacgtctattttatgatgatgatctgattaaagtcatctttcccactagtttaatttctataaggaggggccttgtctgtgatttgcccaccatcgtctcccagcacctgggaacatttctggtttcctgcaatactgttgaaagaacaatgcctctctatgctttcttaaactttgttagtgataatttctacttctacctggactttacttaagggtaatccttaataaactttatcaaaacttaataaactttatcaaaacttaataaactttatcaaatgtctgttgtaatcgtcacaaaaagatttaatactcaacatctggccttaaccagagggaaacattttctagcccaagttttccccttaaccggctgagtcggggaaggatgtaattttcaggcagaggtgacttcgttccaagggtgtgaatgcattatttttgacgctgcctgtaagagcagggtcgctgacactgaataaacagcgctatcctctccaacgataaaagtggccaacatctcgtgctagcaattcccaagtgcgtcatgagcatccccgtcctcagaaacgtgagacgaaggcggcatgcgcaggcactgggctagacgagcccgaggttgaaccactcgcgttctgggccccggagtccgagacaggcggggaccccggcagctcccggtgctatctctgagcgggttccgagccccacttccgggcggtcagaattagcctcagagcgccgagcaacgacgcgccggggacctcccgcccatgaggccggaaggggcggggagaacgctgcggaatggtccctgggcgcaacgtcatttccgcgtacgggggagggcgggcctggagtctgagccggcgccgctcagtgtgaggtggtttctgcgggtgaggctggcgcccgtaccatgagcgaggcggacgggctgcgacagcgccggcccctgcggccgcaggtcgtcacagacgatgatggccaggccccggaggctaaggacggcaggtag

SEQ ID NO: 26332 - DNA, 2300 bp, Homo sapien
cgacatgctgggggaatgcagaatgagggactagaatggcctttaccaaggccacgctttgtttcgagtctgccagcttcttggtggctgggtctgggaaggggcgggagcacctaggtgttgcaatgccaggtccatccaggcacactgcctggcctggcgtgacctggacacacactgaccccatgccagggcactgctgggcagactggcttctcctgccctgcccagtggcttggggtcaggcttgccctcccgctgggaggccaccctgtgtcacagtgtgtcccagatgtcaccttcctccctgcacttctatgtgccgttattccattatttacttaaatgctctctttaaattgacgcattgcaagattgagaatttgtttcagtgctttacaaacagcattttcagttgccatggaaaggctatgctggtaaggctgggatgtgggagagagctggtagggacccctgcccggtgacatgtccagatgtgatcaggagggtcagagaggacggagacgaggacagtttctcaggtgtgactagggtaacttagtgcccccctgaggttacctcgctctggcaggagcctgggcccctcctctgaggactcctgcatttcacatctctgggctgggggtccacagggcactgacgtgtcctgggatttgaaagccccatctatgtctgagtccagtggctgagccagtactccctggggccactgagaggggtccgggcatggtccactgtgtctggggattcagcagcccctggattgaactccataaagcaagtgcaagatcaaggaaaggacaatggaagtgacctttagacaaacgtttgggcatcacaatcactgtctttcatagggtggcctagccttaggtctgttggggtggtgttggggcatggtctgctgtggacgctgctgcccagggcacgttctgcgtgtgtggagctattgcaagtctggtgttgccaggcttcttaatgtctgccagatgtgtggggataatttgtctatcatgtgtatgatgatgtgcattttcctgatttctaatgaatttgagtatccattctataattatgaagagctgatgaacagctcttggttggctctaaagctgcctgtgaatatcgtatatttgtccccactctctctgttttgcagcagctctgaaaaagggcagcccctggaccttgtctaggacctagacccagcaagcctctggtgctgctggccaggctcttgtctctcttgtctccagtgtcctgagccttgcctgcctcgtcctggctcttaactggctcctccacccatgtggaaggtttcctccctccagctccatcctcagaactcaacagtccaggcccacttctgatcccatatcaacgaccaagatgagaaaaacggtgttctttccctcaaagatctaacagcctagtggggtggcagcagggggactgacagctgttcccacatagcatgtgccataaactagattcatgggtggagtcaggaaaggcttcacagagcaggaggtggctgaactgagtcttgagggatgaataggagttcgccacatggatataggaaggcctttcaggcaaaggctgtaggtctttacagatcatagcttgttcagaaaaccaatcatccattcatgcacttaacaaccatgtgttgagcacctcctgtgttccaggcatggttctagatgctggggacacagcagtgagtgagaaggtctctgaccccatagaggggtcaagagtagaggagagagacagacaaagagcaagaaagatgatcaccaaggaaacgacacagtcagttaggtgctacatgccagggaagaatgggtgaaggtggcatggggctggggcagatgagcagtaggagagccacacatatatagaagcttcgagggagagacagagcacctcacaggccagtggggacgggcaggctatcagggatggcaccgggatgagcaactccttatatggacaacaatcaaattagatccctcttcacagtgtgaactcttcctggaacatgccagggtactgaaaaacgaaagctagtatttatgctataatgtgggctggcccgtgctgcccagcagaactctcagctgcctctcagctgtctgtgttgtccagggtggcagcctctggctgctcatggtgctgaatggcacttgaagtgtggctcatgcagccagggagctgctgatttaattgaactgaaatagctaccctggcccatggcaccatgttgcacacac

SEQ ID NO: 26333 - DNA, 2300 bp, Homo sapien
tgttgggttcatgtcaaatgggcgctggcccagaagcagttctttttctccgtcttcatgtgcaagtgggtgggctctgccctttcccacttcaagcaagggcctgacatggcgagggggcctgcacctggctgtgggatgccagagctcctggggctgaggccactgtggggccgcctctcatatccacagtggagggcaccagacccacatctggtttgcctcaaagatcgttgtgcccctgaggcgtttccttgcccacaacagggacagtcccacctaccacccactctggatacacgtatccctgggtccggggccgattatgcatttctttcttgtcatacctgcagaaacaggtggcatctgcatcgcaccacggccctcggaagaaggggcggaaatcctccctgccatggcgatgaggcccttctttggcatcgtccccgtcctcatggatgagaaggtgtgtatgggcctcccccacatgggggtcatgtgcttgccctcccttgtccctgcctgcccagcccagctctctcctgtgtgcccaggtctgtacctggcaggaggctgctgaccttgcagcgttcactgcagctggtatcatgcactgggtagtggccacacaggtggcttggggccctcctcaggggcagaggggagagctatggacagctcccttgagggcagggcttgtcattttttggcacacttctcacccagagcctgccctgtctcacttgcatgtccggggtctacagggcagcgtcgtggagggcagcaacgtctccggggccctgtgcatctcccaggcctggccgggcatggccaggaccatctatggcgaccaccagcgatttgtggacgcctacttcaaggcctacccaggtgagcaggctgtcagggaccctctcattccttttcagctgactgctggaatcttattctcagaaaacatttttaatgggatttgagtgcagcgtaacactgtggccaggaataggtgctcgcgaggccagagtttgactccgcacccctctccctttgctgtacctccctggctttccttatcttgacagtgggagtgattccccactcggggactttcttggggctacttaggtgtgggtgtgaagtcctgcactgcagccaggcccatggtaggatcctgttagctacggctgggagttttcttccagtttacttttattttttcccagtttccctttttgtcgtaaacaagactcagtgttttggagaagcatcttggatgtgctgcttgtataccttctgctccccaaagtctcgatatctcggagccacctgcccatgctctagaacatagggaagcatcggagttgcaaggagggccgatgggcgagacttcagccgcgtgctgggctgcagagcttcacgcttactgaggttgggacatgggtcctggctcagggttcctggtgctgaatttccctgctgtggtgcaggctattacttcactggagacggggcttaccgaactgagggcggctattaccagatcacagggcggatggatgatgtcatcaacatcagtggccaccggctggggaccgcagagattgaggacgccatcgtgagcacaggctgggcctcctccttcactcctacacctccatgatgcccctgtggacctgcaagttggggtgggagtccctggcccgagtcacttctagcacccggggccgccacattttgcccttttgttctctgttgtacacaggccgaccaccctgcagtaccagaaagtgctgtcattggctacccccacgacatcaaaggagaaggtgagtgtcctggagatgagctcctccctgattcctgaccccacacccattatgggcacctctgtacgaggagcagactctggagagtggagtgataggggatactgtgggccaagctctcagtgttcttctctctcaagtggaaactgtaggggaggaggctgaatagcactcgtgttcggtcgggtttctgaaatgccctggttctgctgtcctttcaggacacacatccacagtggccatgacccagttgggcttggctaagcttggggggtttccccttctgtccatggtgtatctggtggggacaccgtccagccccattacagagagtttatgagaaaatgtccagcctcatgtatcctcacgggcttggtcatagcactcaagccagctctgcagccgccacgcgtgtgtgccagagtgtgctctggagtgtgcaggctgtgtgctgcgctgggactctttggacga

SEQ ID NO: 26334 - DNA, 2300 bp, Homo sapien
tggcctctccaagtgctggaattacaggtgtgagccaccgtgtccggcctaaaatattgttgatatgtgttttaagtctttttaagcctatgctcccccatttccttacacttggccatagtcacatccagccatttttctctggtgtcctttggtctgggttgtgcctgttgtccctctgcctctgtgtttcctgcacgtgggcagttagatcctgagatgggatcaggctccactcagttgctgtggaagaataaaggggattcggatgtctgtcctctcatgctcctcgaagctgatgatgcttgatgccattcttggccttttttgcttttattttttgtagttcttaaggggtttaaaaaatcgtggcataaggtaatgcaaaaaggtgtccatgtgttaaacgtacaactagacggactctgcagtgtgcccacctgtcctgctgctggaggccatttgaggagccagctgcctctcacagctatggactgcagcctatgcatgcctatttcctagtgacctggtgtgaacatggtggagtggggggacaagctcctgatgctcctttcctgtctctgcagcttgtgtttgaccaccagccaggtgacatctttggctgtgtggccgacatcggttggattacaggacacagctacgtggtgtatgggcctctctgcaatggtgccaccagcgtcctttttgagagcaccccagtttatcccaatgctggtaaggatggtgaaccctgtttgggaccccatgctggtgtcaggggagagagcctgaggctcgaggcttgtggagaggttcatggaagggggacgcctgggttctggtgagggtgtggctctccaggtcctgctgtcgaaatgcccggtggggccaggccccaggtcttcagaaagatctgacaggcagcagcagggagtctgacttggtgctggaggacatctcaaggcccctgctcctgcactcctgccctctgacttaaactgccggcctcaggccatcgctttggcatccttctcacctctaggctgcttgcccagatccagccctttctcaaagccagggccagctgcccgccacttctgtgtccccagccctgcccctgagccttcagggctgtccctcaaaccatgttaggcatggcctagaaccatctccattaaattgagatcactttgaagacaaggtgatgactggctcccttgggcatcgtcctcccacacagcacagtgtcttcaaatattttctttaatgtaagcagatcatggtggctctgcccaaaggctgctgctccagtgttccatggcactgacaactgtgcatggactgtgttatcacctcccagtgctccatccctgcctttgggggctgggtgtgctcaaggaagaagttgtaggggcaagaccagggattaagggccatggcccaggtgctgtctcaggccaccacttcagcccttagaagctcagtgttccatgtggaggggatggtgtgggtagtgggtttacaggaaccaggggtgtgcatgccgggcacatggccctgctccctgggacacacgcagtggcagctgtactgtcaccaggggaagcaccagtcaccactttagagcccatgtgagtgtgatcgagtgaaagctctgtgttaatgctccatgggttattaaatccacgtagtatcaccttgaactaggccatcaccctaagcctggtgaagactgttcctgaatgtgccgcccatggatctggggagtgcttggaggagagcggccattggggacctgtcccatggggcttctttccatctttcactggcgggggtggggggttggggggatccctttcatatggacatatgcgcgtctgcacatgcccagcactcaggaagtcttggctgatctctgagtttaaagtaaaccatgtcagctctcctgctgacagtgaatttcggcctttctgtaggtcggtactgggagacagtagagaggttgaagatcaatcagttctatggcgccccaacggctgtccggctgttgctgaaatacggtgatgcctgggtgaagaagtatgatcgctcctccctgcggaccctggggtcaggtgagcggcctgccctgcagcaggagaggttgtgcttgccctagaccctcagagccaatacgggcttcagcaggacttcagtcatgaagctgcccggctttgtatgtgtgaattcacgcaatgccagaccggatctggtagaaagcaccagcacctcttcccacctgtaagctcctccccagagct

SEQ ID NO: 26335 - DNA, 2300 bp, Homo sapien
ccacatgggggatctggacgtcccgctggagcaggtgggttacctcgctttgcacagtttgaggcgaggtcatatcaagttagctggctctgaggcttctcgggttgtggttctcaatttgggttccctagaggtgcccagggttcctctgtggtatttggtgagcttgagtcctgactgggaagataaaactcctatacgacaagcatgttggaacacttactgtaacacaaatgcttgcacccacgcttttgttttgtgtcctttccacatttggaattgaacttggacaggtcagagcaggtgaattctgaatcctgtgtgtggagtcctgctgcggagggggagtgctgctctcagagaggctgagtgccctcggtgggctgtttgtttcttctccctgccaggaaatggccaaggaggaccctgtttgcgccccagagagcatgggcagtgaggacatgctcttcatgctgtacacctcagggagcaccggaatgcccaagggcatcgtccatacccaggcaggctacctgctctatgccgccctgactcacaaggtacaggcctgtgcgggcggtgctgggcccttggcagggatccaggcaggggcagggctggaagtcctcctgctgcagagcgaggcctgtaggtgtgagaggtcagtgtttcttcctggcctattcggggcagggccccctcgagtcctcccaccctacagctcctcagggccctggctgcctcaagcccccactgcactgtctggaaactcccagataatctgatcatgtaacgcggcagcaggacactaagggccattcgcccaaagatttttaaaaactctttttagaacagatagagaaaaccacccaaattaaatgcatggcttaatgaattattataaggcaaatgccactttgatcaagaagtggaaggccaccggtttctcagaagccccttccaggcccatatggccacagccccgtccagcatgtcttgatgtgtcttgtgcgcctgccctgtttttattttgatagttttgtgacccatatgagcatccgtgggcactgtagcttactgttgccaattaaaatattgttttttcttttgttttgttttgttttgttttgttttgttttttcatggagtctcactctgttgtccaggttagagtgcagtggtgtgatctcagatcactgcaacctttgcctcctgggttcaagtgactctcctgtctcagctttctgagtagctgggattacaggcacctgccaccacaccctgctaatttttttttgtatttttagtagagacagggttttgccatgttggtcaggctggtcttgaacttctgacctcaagtgatctgcccgccttggcctctccaagtgctggaattacaggtgtgagccaccgtgtccggcctaaaatattgttgatatgtgttttaagtctttttaagcctatgctcccccatttccttacacttggccatagtcacatccagccatttttctctggtgtcctttggtctgggttgtgcctgttgtccctctgcctctgtgtttcctgcacgtgggcagttagatcctgagatgggatcaggctccactcagttgctgtggaagaataaaggggattcggatgtctgtcctctcatgctcctcgaagctgatgatgcttgatgccattcttggccttttttgcttttattttttgtagttcttaaggggtttaaaaaatcgtggcataaggtaatgcaaaaaggtgtccatgtgttaaacgtacaactagacggactctgcagtgtgcccacctgtcctgctgctggaggccatttgaggagccagctgcctctcacagctatggactgcagcctatgcatgcctatttcctagtgacctggtgtgaacatggtggagtggggggacaagctcctgatgctcctttcctgtctctgcagcttgtgtttgaccaccagccaggtgacatctttggctgtgtggccgacatcggttggattacaggacacagctacgtggtgtatgggcctctctgcaatggtgccaccagcgtcctttttgagagcaccccagtttatcccaatgctggtaaggatggtgaaccctgtttgggaccccatgctggtgtcaggggagagagcctgaggctcgaggcttgtggagaggttcatggaagggggacgcctgggttctggtgagggtgtggctctccaggtcctgctgtcgaaatgcccggtggggccaggccccaggtcttcagaaagatctgacaggcag

SEQ ID NO: 26336 - DNA, 2300 bp, Homo sapien
ggggcgccactgaaaggcgcctttgtcctccttctgaaagcctgaagggaaaacgatgaaatcccacagaagaggccgctggagccaggctgggcaggcgtgctggctgcggggagaactgcgggctggccttgcgatctggttctcatgtggtcccctctgcagatggccttgggaagaaacaaaggcctccttgaggcccctgcctgtgatgcggacagctcattttcattctgctgtggtttcccgggtggcctcgttgagcttcactgttctcgggagccctttccttgactaccctttgaacagaggagagctatgcaaacacgctgcgagcggccttgagagcccgaggagggtctgctttctgggcccctgcagagggcaggggtcgcgggctggtggtctgccccgcccagagagaaagggccttggcttcccctcattcttcgttctgtgttagctctttttattgcaaataattaattaaagtcagtacagcaagagtgggaaagtggttaatgcaattgccaggtccagattcagagggatgaggcgccgaaaggaaagacaaccttgggatcgcttccacttcctccacttcgcaccgcatggccggcaagttggcggctctcgcctgctcccagttttcccggagttgagtatggttgactctgactggaccaggttgggtcacgtgtcggccctgagccaatcagcttgcccagagagatgatgcgccctgagtggtgggtgaacctggtgataggccccagagtggccagagaggaagggcatgcgcacaccatagacataggcaacgtggtggacgacatgggggctgggcgggggtgctgctcacccaccttgtgcccagtgctttcccttccccttgtccatggtcccctagcttggggagaaagcagggtgcttgctctacccgccagtgctgtctcggggctgcagggagttgtggctgccctgcttgcggtcttcactcccaactcactgtggctttgcagagctggagtccgccctatctgggcttgggggtctgctccctgagagcattatttggtgcccctcgactgtgttgattcagaaatctgggacctgttgtttctcgactaaatgtcttatgagatcagtctttcttttggaggcaaacattttcggaagttttggaaccatgatgatctatgcctcagacacttgtggtccctgagaagctgctgctggaaaaaggggtccccatccggatcccaggagagggttcttggatcatgccgggaaggaatccaaggcgagtggcagagcgcagtgaaaagagatagtttattgaaagcttctcagttacatagtagggcatcctcagcaagaggaggaatgcctctgttttgtttctttcttatataggggtcttatctatgtaaaagctaagctatgtctccctgcgggtaggctgacgaagtgacatttattactttgttgattgaaagaaagctatccttggcattttagtgcataagtacatcaaagcatgcctataatcatcttaaaagcatatattatgcaatattggggcatctggacattctgttgttgcaagagtttgtctttgcaggtattaagctacttcgtcagctgtaaacatcttatgactgtgggtcatgactggcaaggaatgtgccttgctagttttaagatggaattgattctaaaatggtgtcaccatggctcccctacgctcctgttcccctaaaaaaaccctgccgtaagcggacttaaggatagccttgtcaccctagcaatgtggcagtgaatctctgccaatagcaatctacaaatgttaaaaacttttctttttctggaaaagtactttccatgcattaagtattcaagtgcctgttttcctggcactgggctggatgtatatgacataaaatttgcagtattgctccacccccaaactgctctgcattttggccctcctccatctctgatggctttctcttccctgtgctgcagggaactactggagaccacgtgccgcctggccaacacgctgaagaggcatggagtccaccgtggggaccgtgttgccatctacatgcccgtgtccccattggctgtggcagcaatgctggcctgtgccaggatcggagctgtccacacagtcatctttgctggcttcagtgcagagtccttggctgggaggatcaatgatggtgaggaggtgggcatggggagggaggaaccctggagttccctgatccttgttcctgggggcctggccatca

SEQ ID NO: 26337 - DNA, 2300 bp, Homo sapien
aacatggagaaaccccgtctctactaaaaatacaaaattagctgggcatggtggtgcatgcctgtaatcccaactactcgggaggctgaggtgggagaattgtttgaacctgggaggtggaggttgcagtgagctgagatcgtgccattgcactccagcctgggcaacaagagcgaaactccacctcaaaaaaaaaaaggttaaatatagaattgaggtcaagggtctgggtacccacattcagctctgggcaggcaccatgagaatgtgggggtccatttggaagtctgggggtgtctactgagatcgagtgccgtcatggagggctcgaccagagaacctggggaggaaaagcttccaagaggatgaggggcaaggagtattcaggaatttgaagggctgtcattgagaaattagatttattctgggaagctttaaaggtctgaggtaggactaaggggtggagtttgaagagctgcaaatcttggtccaatttttggtagactgtttccctattaaagtgacagagatgtggccccatgaggtgagctctggcagtgtgatgattaagtagaggctggactgctgtaggccagaatgtggctgccagatttcagaacctcaaggaggctgcaccgcctgacgtccaaggatcctttccacttcaaggtttatgaccttggcagagaaaataggaagggagagagctctgagatttaccggatcaaatccttcatcaggagcccctcctctggactcagcagcaagagtgtgagactcaccagaccctgcttcagctcttgggcccatgttgaggcccctcagtcttccagggaaacctggtctctagaccctccctggaggctgtcgtttagctgtccagcttcaatgactgggtgacttctgcccctatagggaaaatccactcttctttctgccccagtcctcctcccaacagccaatctatccagaaagctctccctgctgcccttccctgccacccccagtggctgtaccaccaagttgagctgctcagtgccctgcacaccttcacatgtgccgtcatttcctcatcggagctgtgctcctggaggacactctccctgtcaattcctttctcaaatgcaaacaccccactcactcccaaggtgcctagaatgggatttttaacatctcaggaattcactgaagtgagttagctggtttttgtcattttagaaaacgatttcaaacaaagatttctgagaatttccatctgatgggaaagacgatagctactgaatgtttggcagagttccaagtcagtcttgctttttattaatacttgtgacagctgtacaaggtggagggtgcttgctgtttctcagatggtcacatggcagctcagaaagataagctcccatgtctaggcagctactacagaaagctaccccaggcctttctgtagggacagtccagtgtcctttcttggcttcagattgctgccctccgtctgcagaacagggactaaatttcatcgccatttaactggtgagcataattcaagccttcatctctggtagcagcgaggcttaagctctcagagctatgaaaacggaatctggctgaagatgttgagtgactctggaccacggctccctcttcagccggtcacaggccaccccagcctcctccccggagtagcaggagtgtttctgagccctagattctgtagagcttggtgctgggggttttccgggggagtgttccgtcttttatcataaaccttggcaaggggtgcgtgggtggggcgccactgaaaggcgcctttgtcctccttctgaaagcctgaagggaaaacgatgaaatcccacagaagaggccgctggagccaggctgggcaggcgtgctggctgcggggagaactgcgggctggccttgcgatctggttctcatgtggtcccctctgcagatggccttgggaagaaacaaaggcctccttgaggcccctgcctgtgatgcggacagctcattttcattctgctgtggtttcccgggtggcctcgttgagcttcactgttctcgggagccctttccttgactaccctttgaacagaggagagctatgcaaacacgctgcgagcggccttgagagcccgaggagggtctgctttctgggcccctgcagagggcaggggtcgcgggctggtggtctgccccgcccagagagaaagggccttggcttcccctcattcttcgttctgtgttagctctttttattgcaaataattaattaaagtcagtacagcaagagtgggaaa

SEQ ID NO: 26338 - DNA, 2300 bp, Homo sapien
tgtctgggagttggtcctggctgtggatgggacagcttcatcctcgccctgggtcccttcctctggaaggccagccccgcttcctcacagctcgcagctgggttccatgggaggataagctggggctacggggtctctcaggacctccacatggaactgtcacagcatccctcccaccaggctgtactggccaaagcaatccagccagccagggtcctcctctggacagagcagcacaccatcatgtgcaggcggtgcaggcgtgggaaggaagagttggtggccgtctttgggaccccctgccacagttaggagctttctcagtttacaattttactactcactgacctctgcctctcagtgccctgtactgggtgtctttaatattctattcaaatgaacttaggccaacgagctccccactgggggcactgggtgttagtcttgctcttcccttagccagctgcatgctctttagtaagtccttttatttatttgggctcagtttcctcattttttccacctggagtttgacagttggtgggaatggacagcactagataagtttcaaattaagtagactagtcgggtgccgtggcacacgcttgtagttccagatactcaggaggccgagtcaggaggatcgcttgagctcaggagttccaggctgtagtgagctgtgatgggaaccattgcactccagcctgggctacaggccctatctctaaaaaagtatcataaataaataaaggagaaaatgcaggtcaagcgctagcactgtgcagggcatgtgttatgctagtagatgtcactgattctccagctctaggtacactcctgtcttctctggcagacagcagcattccccagcaggggctggtggctagcccacgcagaggctcctccaatggcaggctcctcccctctgcaagccctacagctcaagggaaagaaactttcccatcacagagaactcaataaaccagttttccaaaatctctcttccctgtgtttacccgtttgttatgaatttacttcttgggtgtcagaatatttaagaactcggtggagaccagttttatacgtttccttctgtccttcctggctccacagctgcaaaaacatcatccccactactgagcttactatggggccacgcaagggtagacgcttgacagacattgtccaatgtattccttactgcagctgcccacccccgccgtccccgccccccagggagacattacttccgtcttccccaaaaggaaaacgaggcaccgagaagttaaggaacttgctcaaggtcacagagtttgaactcaggctacagatgctgcagcaactggagaaagtcctcatcgccccatatcacccaccaccgacccccagcaggacgtgacccccgccaggacggaggccggcagctggggggctggagcatgggacccagaacacggactcaggcttgcgcagcctcctggcttctaggcgggagcctagaaaggcgccagcccctttcgcgtgctgctgagactccaggggtggggttcactctcaggggcgcacaaaggcatgaaaaccttggcttcagcctctgagatgcggaactgaccgacctattgtcttgggacccaccagtgcgcttgggtgcaccagcccccttaacgttggtgccggctccctcccggctcctccccatcccagagggtcccctcgccccaggccctgagcctgcgtcctggggtcctgggccgcacgtgcctctggcagctcgaagaagctgtcggggcttgcaggagagcgtgcaaactgaaaccaaaacaggccgactcgaggaacatccgggtgggaccgcagactcaccggagcgcagcgcctgggccagggcctgggaccctgctccgccccgcgctcccctgcaccccttccccacgctgctcccctcttcctaagcggccccccctctcccgggcagcagaagaaggggtgggacccgggcgggctccgggagggggccctggaggaatggatggtggcggaagggcggagcaggggcggggcccgcggagactccacggggcgccccgggcgtgaggcacccactctgggagcacagagagctcaggtagcctgcctagatggcggcgcgcaccctgggccgcggcgtcgggaggctgctgggcagcctgcgagggctctcggggcagcccgcgcggccgccgtgcggggtgagcgcgccgcgcagggcggcctcgggaccctcgggcagcgctcccgcagttgcagcagcagcagcacag

SEQ ID NO: 26339 - DNA, 2300 bp, Homo sapien
tgtgggccagggaatgatgtggtctttgttttgaggagactggggagcctttggattgttccaagctccagagcaagttcctctgactcttgttttaaaggaattgcactggctgctggttaggctgtcaggggcaagggtgaaagcaatttgaagcctactgaataatcctaaaagagataggtatggttaggatggtagcaggaggggatggtgatgggggaagaggttagtgctgcaggtgttctgaaggtgagtcacaggatttgctgacaggctgcatgtggagtgtgagggggaggaatctaggatgacaagggtatgagcccaaacaacaggaaaatgccatttccattcactgacatggaagatccgtgttgtggggaagaatcccaggacttggtatgtttcagatgtgaatgagacatttgaatacaggactgagatgtggaggaaaggtccaggcgggaggtgtcaatatgaaagtgagaggctagagagctggctgctgtttcctagggggcaggggagaaagggggatttgagggctgagctcctgggcacttcaacacttggaaggcagagagaagaaaggcacccagtacagggcactgagaggcaatagtcagtgagtgaaagaaccatgcatttttcagcctcagttgttgtatcagttaccactgctgagttacaaaccatcccaaaatttagtggcttaaatttattccttctacaattctgtaagtggactgggaggttcctttgcatcccaggtgttatctggggtgactcatgaggctgccttggctgggacaggagcctccacattggcgtcattcttgtctgggagttggtcctggctgtggatgggacagcttcatcctcgccctgggtcccttcctctggaaggccagccccgcttcctcacagctcgcagctgggttccatgggaggataagctggggctacggggtctctcaggacctccacatggaactgtcacagcatccctcccaccaggctgtactggccaaagcaatccagccagccagggtcctcctctggacagagcagcacaccatcatgtgcaggcggtgcaggcgtgggaaggaagagttggtggccgtctttgggaccccctgccacagttaggagctttctcagtttacaattttactactcactgacctctgcctctcagtgccctgtactgggtgtctttaatattctattcaaatgaacttaggccaacgagctccccactgggggcactgggtgttagtcttgctcttcccttagccagctgcatgctctttagtaagtccttttatttatttgggctcagtttcctcattttttccacctggagtttgacagttggtgggaatggacagcactagataagtttcaaattaagtagactagtcgggtgccgtggcacacgcttgtagttccagatactcaggaggccgagtcaggaggatcgcttgagctcaggagttccaggctgtagtgagctgtgatgggaaccattgcactccagcctgggctacaggccctatctctaaaaaagtatcataaataaataaaggagaaaatgcaggtcaagcgctagcactgtgcagggcatgtgttatgctagtagatgtcactgattctccagctctaggtacactcctgtcttctctggcagacagcagcattccccagcaggggctggtggctagcccacgcagaggctcctccaatggcaggctcctcccctctgcaagccctacagctcaagggaaagaaactttcccatcacagagaactcaataaaccagttttccaaaatctctcttccctgtgtttacccgtttgttatgaatttacttcttgggtgtcagaatatttaagaactcggtggagaccagttttatacgtttccttctgtccttcctggctccacagctgcaaaaacatcatccccactactgagcttactatggggccacgcaagggtagacgcttgacagacattgtccaatgtattccttactgcagctgcccacccccgccgtccccgccccccagggagacattacttccgtcttccccaaaaggaaaacgaggcaccgagaagttaaggaacttgctcaaggtcacagagtttgaactcaggctacagatgctgcagcaactggagaaagtcctcatcgccccatatcacccaccaccgacccccagcaggacgtgacccccgccaggacggaggccggcagctggggggctggagcatgggacccagaacacggact

SEQ ID NO: 26340 - DNA, 2300 bp, Homo sapien
gcgcagcgtcgggtggggggcgtttctcactgtaggaggctatgaaaatgtcctcccgcgctgggctcctgccaccgccacgctgcgaaacacaaggtgacccaggacacaactcgcccaccgctggggtcctgcaggcccctccctggcattggggtcccgggatgcattaggaacgccccagtccaggaattgcaagaccccttagaagttcgttccttctgcatctctgagtccccttagagctccaatacgggctccttgattgagtctcctgctctgtgtcgccctcgccacgtctctgtgtccgatgtgactgggttaataagtcccagttgctctcacctgcaaaatgagtttaagacgatccttcccgaggcgccgcggtcactatagagagtgtctgaggctgggctcctaccgcctggccttttggtgtctttggatcactggctatctactcggggtctgtcactcccgtgatcgcctaccttccagggagacctaggggagggagaccccaagacctgtcccaggtgaggccacttggtcggcacccggggctgcaggcacggcgcccgcgtccgccctcgccccttaggctttccattcgcgggcgaccccggtcgggccaccttagaatcgactaccctgcctgcctgactggtctcgggctacaaactgtgtggaagcgtaggtatctcacttaactgctaccccaaattcggatttacaaacgactacgcagtcccgaatgcccaacgccttccctaaacccagagataaatctgggggaaaattcctcgcggagcggaaaacaacgccagcgtctaaagcgttctgccccgagctggagtggttcaaaagacaatgatctcaaaagaaagtgattgttttggtaatcccgggaacagcttgcaagggggagatttgggtcttcctttagtaacggaaagtcaatgcgcagcctcctgtaattatccttatcggaagccccttgtttaatctgcatgtttagcggaggccccactcgaacgcgcagcgagtgggagacccactttgcagggcccaggctcgggctccggtccctgcgtgcgcgcaggcagccgcgccgggttcccgcggagctcaggcgtttgctcctccctcgctgcgggacctcggactgtaggaccctcagggagtgggactgaggagatctgcttccggggttctgggattgggaagcgggggacgcagggctccgagcgatgagggctggttgggttcaaagcgcgaaccagtagttacttacccacgtgcttggggccaactttagcgaatatcagagtttcactgattattcaaagaatcaggctttctttgaataatcgtgaaattggacaataaattgtaagccccgatgaaaaggtgtgctttccagtagacagactctattttatttcaatttacctccctccactcctccccaatttagggttgctggataaaatactgatacatactcctacaaaaaaaaaaagccctccttttttatctgaaatcacatttcactgagccgacagtgttttgttggttaaacctggtaccctgcccgtctcagccccgggcagtccactcctctctctgcttctctccctttccccagctcttgtgagtctgccaccccctacagttcagcccgtggagtgttggggatggacctgggggtggatttggatggaggtagaatgaccatggattaaagggatggaggtaggatgaccatggattaaatacacggttttcattcctttccccttggggattttcagagaaggccttcttacaggaaggccttcgtggcaccggcggcggaggtggagggctggctggggacatatatggggtagccatcggggtgtggttgggaatggggtcctaggtcttaataggcagttgggtcgcatcaaagaagcttcagggcagctgggagtggggcctccacccagagagtctggaaggaaggagaaggccacgccaggatgtagaacttgcgacttttcgagggacaggcagacagcggagtcactgtcccttaccttctttcctcccctccctcctagaatgggggtggggtggggtggggtgggctggacagaagagaggaggagaaggaggtgactgaggggactgcagctgggtgggcggtaaccgaggggaggggaactggtggcgtccccatctcgcggggtccggaacggcgacgcgcccgcgcccagctgattggagcccttcaggcctcccgcgcccgaccggca

SEQ ID NO: 26341 - DNA, 2300 bp, Homo sapien
cccagctaagacacaagtttaaagttgtataaaggactttaacattttaaaattctgacagtgtaactcagaattgcactgttttataccagcagagacttttatacaaactttggagatctctccgaagtctgaattttttgaggcctcagataacatggcccttgtgtcccatgagctctgatgttggcagttgattgtaagtgggctcccaccacgttgcacagagcagaagcaatgccaagatgcagtttgtacatatgggacccctgacttgttgcctggctcactcaaaggcccgtcggcactctcctgtgcctgcaaatgacaaagctttagcattcaccaagcaggaggtgacaggtccttcccatctctttctattcatggcttcaaattaataattagtagcctgaaaaatgagccaatctgtctcgtggagggtaagaaccataagccaaggcaattagcgtcttggttctggctgccttgggaacttaatttagtcacacagcccatttaaggtttccaaaccttgttgtctcctgaagagggaaatcatgattgttaaatgaggggacccccccagggacccatatgttgaggatgtgctgcgtcctgggctggcctggggcacagggccaggcagcttttgtcgcgtccacatgcctgctctattcttctccaggactcagcagctggctccaagcagcacagcccttaaccacccgcggagggagtggcccctgcccccaaatagttgcacacttgagcaggccttttgtctgcttagaagacattccaactgcccataagcagttggccttcgcacaaaggagggtgtccatggaggagggcagtctgtctgtgcagcatattgttgagtgattgtgaatctgcaagcctgcagtttgtaagtcatccccagcatggaaggtgggcatggaatggatgcaaggctggggaggacagaggccgaggagagggctcaaggagaggattaaaccagacaatttaattagggagatgtgaagagtcacagaatcaagatattggggctccagggggaacttaaggaatgatctaggtcttttctctctcaggaaccactcaagcctgatgatactgaatcctcttttatttatttgtacttactattttctttagagacggggtctcactctgttgccgagctgcagtgcggtggtgcaatcatagcgcactgcagccttgacctcctaggcttaagcaatcctctcgccttagcctcctgagtagctggggctacaggtgtgctctcccttactcagctaatttatttttattttttgtagatacgggtctcactatgttgcccaggcaggtcttgaattcctggcctcaagtaatcctcccacctcggcttcccaaagtgctgggattacaggtgtgaggcacagcacccagcagaattctctttcagagaaaattccaaggccttgatttaacaactgttgctgggagaaagttctttgaatcattctgattaagaaatctgcttctcctttcacaagtggccatcaagaacagctggttttctaagaggcttccgagatttgaaaaacggtggctaatgatgacaacagcaacagcactgagcacagaaaactccacaggcctgggctcggctcatcgcacagcctccatctctggatgccctgtgagggttctgtcattatccacattttagagatgaggaaactgaggcttaaaagggctaagtgaccaacccactgacacagcgattcgagcttaggctggcccatcccagacctggactgcccacctctctcccctttcgcagccgacctggctgccagctctcgtccttcctctgcggggtttggcttttccctcctctcttccccaggtggtcccgtcccgggcactgcctcgagtctcacggtgtgcagggccaggcagacgagctgctgactgcagcttcgctgtaatctaccgactctaacggcagctcagctcgcacggggctagcacagcgaacacgtgcgcacggggatgggcggagaaccgagtgacgacagcaaagagccagggggagccaggaaaagctcgaaaatcagcgtaacgctgttggagatgagagggcacagcacaattttgagagccaaacaaaggcggggcacagagctgttgcctcgagatgtgtggcctcagaaggtcttgtcgaggcgagtgatgaaagggaggaggttcccgaggatactggagccggaagacgcggcgagggtccgggttagcaa

SEQ ID NO: 26342 - DNA, 2300 bp, Homo sapien
gagaggctgatttgaggagtaataagcctctgctctcctggttagccagctctatgtgtatcgaactctttattgcaattcccatcttgaaaaattggctctatctgggcgacaggcaagaagaagctgttgggtggttacagtgtgatgagtgctatgaaggaaataacataaaaggtgacagagaataactagaggaggccattctagataaaatggtctgaggaggtgacatttgagctgagtattaaacattgagaaacaatctacgaagggaagatgtggtgcaagacctttccaagcagtgtataatacacacaaaagcccatgccagcaaaaagattttactttcacaaattctagaaactctaagagtaaaaagtggtgaaaagaaaggaagtgataacacatgttgccaagtgcagcaggcagaaacagggccatcaccacttcacgacaggatctcaaaatactaggaagtgtaaattaaaaccatgagatatagttttgtcattattggattgggaaagatccaaaagtttggaaagaccccactggtgaagatgtgtggaaacccacagtcttacacattatttgccagagtgtaaattagtacagtgtctaaggggggcaatttagccacgtttggctaatatattattttaaaggacatatcccaccatagccaattccacctctaagaatatttctgacagatatacccacatgcatgcacaaagacaatccacgggatccagtcacattattcctaacccaaagcaactgggaaacacttcaaggtccatcagtgaaggcccgcataggctaacctctgtaataaccaaatctcagtggcagtgtccaaccaggtgcttgtgggcgaccttccaacaggcaccgcattgcccggctgccaggccgggcctgtgtactgtccccgcatcccatacagctagcacttattcaccctcaaaagcgtcccatcctgaaaataaactcttgcccacttggtgcttcaggaacctgggcttcttccactaatagctctcccagatgccccagtgcgcaggtggggccgtcctctaggaccaggcctggctggggcgcacccacacctccttggccagacgccatgggccgggaaggggctctggcccttgcgggaatgagggcgcctagcataggtgtgcaagtgggcagcccccaccgtggggtccttaagtaagctggagcctgtgagccaggacagtcaggagttgcaaccttggtgatttctaggaagacagaaaatggggtcaagggccgggtgtggtggcttatgcctatagacccagcactttgggaggccgaggcaggcggatcaccttaggtcaggagttcgagaccagcctgaccaacagggcgaaacctcgtcactactaaaggtacaaaaattagccaggcgtggtggcgcacacctgtaatcccagctactcaggaagctgaggcaacagaatcgcttgaacccgggaggcagaggttgcagtgagctgagaccacatcactgcactccagcctgggtgagaacctgttaaaaaaaaaaataagaaaatggggtcaagaaacggtgggaggagggcagatttcatgaacctgcctgctatgatgtggctgcatttccatcatgcattgtcctaaaaaaagaaaaagaaaaaaataaaatgtagacgtggagggatgggggaaattgcacaggccggtccaggctgtgaggctgccccctaccagggacgacgagggccagctccgccgcgccgtaaggaaactggccaagggaaccccttgaatctggcgagggcccgccatgagacgctcggggaaccagactgccgagcccccctctctgggccgacgccagcccggctgtggactggagaaaaccgcaaggccacctgcagaaagaaaagaaggccatcgcgcctacgcagctgagcacccatactccgcccgcgcctgcgcaactgggtcccccgacccccacctcctctcccgcctgcgcatgcgcggctgggtgcgcccccccgcccagcctgtgacgccacgtgcatggggcggagcccaggccctagggaatcgtggggtcgtatcccgcgggtggaggccggggtggcgccggccggggcgggggagcccaaaagaccggctgccgcctgctccccggaaaagggcactcgtctccgtgggtgtggcggagcgcgcggtgcatggtaagcggcgggccggggcgctggcgggggcggccggggatcaccgactgtagg

SEQ ID NO: 26343 - DNA, 2300 bp, Homo sapien
tgaactgaaacaggtcatctgggaaggggccatttggcaggaggcagcagtgatcaggtttttgacatgctgagtttgatatgccagcgggacatcagtgggaaacaggacaggccctatgagaggtgacaggtttggggctggtccagaaataggacggaccctatgagaggtgacaggcttggggctgggaatgatgcacattaaggcaacgtcagctgagactgggagaagagacgtggcactaggaatgtccgttccaaagtagcacctcccataccacaacagccctcccttccttagcagactataacccaaagtttcaggtttctaagtaatcatcaaatgtttaattaaattacaatatttctagagaaagttctgaaacactccagggatgaataatgaggacaaaaagcaatagtaacaccctacaactgtgaatacgtttaataaaatcctctttatgtaatcaagacttttttttttttgagacagagtctcactctctcacctatcacctaggctggagtgaagtagcacaatctcagcttactgcaacctctgcctcccaggttaagcaattctcctgcctcagcctcccaagtacctgagattacaggcatgcaccaccacgcccagctaatttttgtatttttagtacagacggtatttcaccatgttggccaggctggtctcgaactcctgacctcaaatgatctgcccacctcggcctcccaaagtgctgaaattacaggtgtgagacaccgcacctggcccataatcaaatcttatcatgtcctatgttagtctaagaaccatattctacatgatcagattcacaggtggtatattaaatctagaggcaaagttgctccttatttactgtctacccatttaaaaaaaccctttatgtgccatgccctgtgtccagcaccccacaaagcctgcctcacagccctgggtttccctaagacagcaccaaggccctgggaatgtgtgtaaacggaactgtctgagattgcagtcagtgtgtggtggagcacacaagagtccctggcttcagtccccaaattgaacgtgctttatcacgactttagagatccaaaaaacactcacatacatagacataccttacatagacataattactgaagttacacaccaagttcaggaagacaaaagcaagagtccaactagaacacagtactgagagagcacagaaccaggaacagccttgctcttgcacaagggtgggaagaagagttcttataatcatgttcaccatcccctctccccaaggaacaggtcatctccatgtacctgtgtcccagatctaaacagcaatttcattccactaggttaaggtgtttgcccatggctgagacacctgccggagaggaaatggggtttctgtgggaaccactaacaccacagcgtgaatgtgttgatcaggttctccctgacagactctttgaggaaaacaatgccatctcagtctgttctttaaaggagagacagggtgggatgaggctgtaaggaaggtagcgggtggggactgagggaaggcaggggtaggaagtagggtgcacacaggcaaacagagaggtgtggctcctgctgaggccaccctccagcaggtggaggcaggagtcagagaagagaatctgagggtagagcagtgttgttggtggtaggagctaccctgtcccctggttggctttctagatggggatggcaggtcacctcttggaaatacaggggccatctgatgtggattgatggctgcctaatctgttggccagtttcttcaggttttcagttcaagtacacggaagggtcatgaatgcaaatgcctgccatgcacgctgtatcaaaaaatgaagcacattagaaacttccactcatcctcctggtgggtttcagtaggtttttctctccttggcaaaaaccggtgcgtgaaccgcccgtcaacaccacctgctgtttcctttacacaggaggcggtgggaggggaggcgcttccagatctcctgacacaaagggctgcccacctccctggtcctttacccgaaccttcaggaggcagacgacacacacactagccagccactctctccaaggcaaggggagggggacaaaaagcaattttgagatttgtacagtgcttgccaggtccttcaaaaatgactaccggccgcccatggctcttgcacagcgggtgggaggaagagtccttgtaatccacctctcccaaggaactcctgcgcgaggtttcagattccccgcctgcaggctat

SEQ ID NO: 26344 - DNA, 2300 bp, Homo sapien
tggctccattaaacttttacaaagctttatatatatatatatatatcttactttctcaaagtctcccccagtccctccttgggcctcagatgttctactgtatttctcacctgtcattcttgccccaggtatgcgtggggctatagtcatcctacagctttgcctagcagtgcccataaccatttccctgacttcctatctgggctctgagctcagagtcaggtgaaacagagatctgttcctcaggcagcccaagacagattaggatgttgcagaaaggtccgctctgctccctccagttcaagggaaggaattgggaaccgggctgccgcattcatcaggtggtgccatgctggggaggcctggggcaggggtgagtgaaacacctcagagttcctgacatcctgaatgtggctgcttctgggctgggcattctcttggttgctgtagatcgttgcctgttttgcagagctcctatgcaatattttaaccagtctctagttgtttttagtgtttctctgtgggggaacaagggcctttgagcttcctcttttgccgtcttgctgtgtcctctccctgtttatggattttctacaggactctgttgtgtgtctggtgacgttatagaaggtgcgggggtagaggagcagcctcttccattctagagaagggcttggatgccatgctgggcagcagcagcacaagacaagctgagtccctgccctgggggctcatggcctagtggggagacacagacctacaggaatcaggtctatgaatactggtttcatcactgctggtggtgggtaaagggagctcagagagtgcgtgatggggcatgtgcaggttgggggcatccgggaagggggtggcagtgacatttcagtggaggtttcagaatgaagacacggtgccagtgtggtgggacaagtattctgggaatgcgtatcagtctgtgccaggggcctgaggcagggagaggctgagttctaggggcagaagaaggcactgttctcagagcactgtgggcaaggacgaaagaggagtgcgatgaagccacaggggccagcagggacaggggccggcagggacaggcccaggcagaggctgcaacatgatcctgagagctgtgggaagcccccgagtgtggtgggacccaggcccagaatagggctggggaggggctgcacgttggcacctgccaggagaggctttttgcagccctgcccgtggcagatgctcagggaagggtggtttttcctgtctcctgctccagtgtgggtggccaggccactggtgaggcctctcccctcggcacggggcactgtggcagtgcttgtcttacctctctgggcctgaggatatccagctgtggccacaggcgggacctcaggaaggaggggccaggaatggcctgctccccgtgctttgccccgcgggccctgtccttccgttctgctgtgcccaaacagcctcaggtagcgcaggtcgctgcgggcttgctcctttgactgctactgccccctcctcagcagtgcagccatgctgtccttggttccacagagatgtcacctcctgctgcccttctgtaaagcccgcatgtggcacgtgctttccctgcagcctgttctgagcacattgaatccccacagtcacgaggggctctccaatgagcagccccaccttgcagatgaaactggcccccttgaggggcatgttgcccactgtcacacgtagctgcgggcagagccggtgccacttccagcccggcatcctcctgatccctgctcccctaggagtggccactcaccaggaccgactgagagagtgagggagggacaggctgatggacgttccccaaggttgggggccctagagtcggcccacacttcttgtcctttgaagcctcaggttcccacatgctgcctcgcactggagcagccaatgaaacttgaacaaatgctttcattttgggtatatcgaaccaaaaacaatggcacccagtgaatttattttgctactctagtagaatttttgtaggctttggaagtacacagacattattttctccttggcaggaatgggctatgtgaatgaaaaaaggtatccgttatgaaacttccagaaaaacgagctacatttttcaggtttgtctggggctctcagtagttgcccaagggacggagtttaaacctttcgaaaagtaaattgcctgaatagaagtataactgaggattgaaagactgaatcagatacgcgcttctgttcccatgaacagtttgggaacaccatttacatgt

SEQ ID NO: 26345 - DNA, 2300 bp, Homo sapien
cagacctctctctcctcctcctcctcccgcctcctctgtcctcctccttcatcctttaatgtgtctacagtatacacacattaacccagacctctctctcctcctcctcctcccacctcctctgtcctcctccttcatcctttaatgtgtctacagtatacgcacattcacccagacctctctctcctcctcctcctcccgcctcctctgtccttctccttcatcctttaatgtgtctacagtatacgcacattcctccttgtgcacattcctccatgtgtgcttattctgctctactttggagaaggtttgagaagtgggagggaccatgggccacacaggagtgttccgggccacctattgccacgtgcagtcttcagtcgattcttgttataaagcaggagcatcccagactggtgtcgagtcggtcccactcaccacagtgtctgcagctcctggatgagctcctgccatatgataggccctcgtgtgttgaattaattagctaagtttcctcaactctacagaaacaggcttttagaaggagcagagaagctcactaactgccttgctgcaagctcccccttccccactcgggctgggtctcagaggtgagcctgccatgacctgtacctgccatggcagctgccctcactgaggtgtcattcccacagctacctcgggctcgggctgatgtcggcacgcctggcgatcctgggcggcgtggaggggcagcctggtgagtggacatgttgccccgggcccactttcacagcctctgccctccattctcagtgggaacgaggagcccctcgggagggcaccagcttggccctgcaggagaggtccctctgcccctcccaccccactgctgtcccgctgcatgctgggcacccagccaggccagggcatgcgagtggaggggtgtgctgcagatcttgttggtggcaccctgatggggcaggaacccagggtggtgttgtacctgtccaccttccaaggtatttctttctttattttgagacagtgtctcacttgctctgtcacccaggctggagtgcactagcatgatcccagctcactgcagcctctgcctgccgggttccagcaattttcatacctccgcctccccagtagctgggactacagatgtgtaccaccacgcccagctaatttttgtgtttttagtagagacggggtttcaccatgttggccagtatggtctcgaaatcctaccttcaaatgattgcctgccttggccttccaaagtgctgggattacaggcatgagccatgacacccagccccaagttattttttaaaagatgctgatgaaatcccttctgaagcactgagctgaaactgagggaaccagggaactgcacactcatcccctacattgggagctggctttagggatgtgaagacagaaccttgtacagacagcacaggagggctgtggggggtgctgggttcttgccgtcagggaaaggttttctctctcgctcatgattccagccttgcaagaacatccctcctcccttgctctgcgaagggtcatgaaatgtgggcttggcccttcctgagacatggagttgacctggggacacagcctgcatcagggccagggcctctgctccttataatgggcatcacagcgggcatggactcttaggagatctcaggattgccatggtctgcttcaggggctggggcacggccctgaggctggtggtgcctctcttccctgatggaactggccaggccacagaggccttcccaaggccttagtgtctgatgtgtgtatgaggcgctcaccagcacctacgtgtgctccagccaaatgcccttacctcagcccccagcgccccattggcccagcacccctgcccacttcttccgagggcctggtatctgacagggtaggatgttcaactggaattttcattctcctgtgcatgccctacttcagttctttctttcaaatcctggtgtttatcttcataatggtattccttttgttgcaaacaaaaaccatgtctatgtctcagaaacagctgcagcccttattctggggccaaaaaacacctattatttagccaatgagaaaaggcaggtacctctttgccctttgtggttcccagggagtcgtggctcagaccctgagtcctctcacacccagcagagcagcaagaaggtctcatggtctcctcgtcaggctgtacaaagtgcctgttttagacatttgggggctgtgaggacccaggagaatgagtctctgttttgttaccggttattgcg

SEQ ID NO: 26346 - DNA, 2300 bp, Homo sapien
ccagcacctacgtgtgctccagccaaatgcccttacctcagcccccagcgccccattggcccagcacccctgcccacttcttccgagggcctggtatctgacagggtaggatgttcaactggaattttcattctcctgtgcatgccctacttcagttctttctttcaaatcctggtgtttatcttcataatggtattccttttgttgcaaacaaaaaccatgtctatgtctcagaaacagctgcagcccttattctggggccaaaaaacacctattatttagccaatgagaaaaggcaggtacctctttgccctttgtggttcccagggagtcgtggctcagaccctgagtcctctcacacccagcagagcagcaagaaggtctcatggtctcctcgtcaggctgtacaaagtgcctgttttagacatttgggggctgtgaggacccaggagaatgagtctctgttttgttaccggttattgcgtaacagaccccccaagtagagtgaaagaacagcaaacagcagtcgcggctggaatctcacagcagaccacacaggctcatctgggcagcacctccgctggggtcctggggatctgtgcagctgcatgtggctgtggcagctgtctagaccctcccgctggggtcctggggttctgtgcaggtgcatgtggctgtggcagctgtctagacgccccctgctggggttctgggggtctgtgcaggtgcatatggctggggcagctgtctagactccctgctggggtcctgggggtctgtgcacatgcctgtggctgtggcagctgtctaaatcccccgctggggtcctgagggtctgtgcacgtgcctgtcgctgggcggctgtctagacctgggcgctcttccacatggcctcgccccagcagagcagcctgggacacttttgtggtggcttcaaaaaaggaaggctaccctgatgccaccatttcctgcccattccatcaaggaaagcaggtccaggccagagtccagggatgggaccagcacctttcggtgggacagcagcctgccatcctcgaaaggtgatactggggccagccctgggaccaatacgcttcctttgctggttttgagcccccagcttgtgtgtattggagcagcagattccattcaaggcatggtggcacctggtggcacttgttctggccctgccaccaacctaccagctactcacagcctcagtcacctataaaactgggtaatgatggctcccctcctaaaaggactgtcgtcacacttcactgaacagcccttggcccagtgcctggcacccggcgtgcccagggccgtgagctgggcatggtcctggtagcggtgtgcttcctggccaacgaggctttgctgccacttcccagggaggtgttgccttcccagtggacctggaagccactcagcttcccccatcctgtgtcaagccagggcctccgcgactcctagctcagccctagtccatggcggtgatataccttcctttctctttcctttttaatctctgtttcagctaaggatggaaaggagttggtcagcccttgcttgtctcccagtttcaaaggagagtgggaacacgcagaagtcacgtacagggtttcagggcagaaagcaggtacggggagggttgctgcctgttggtttctgcgggtgagagtggtggcctcctctcccccttgcctttcccacatcccatgggacgttccacgggaggctcctgacctctctttgaagagcctgtacctgccctggaagtgaaggtggtttggctgcaggggcctgtgtctgtgctgagagccagctccttccctctgcctctgttcaacattcccctgactgtcaccagaagcttcctcctgagggctgatttcctaacaggcctgcagggaggaaggactggaccagcttggggctgagatgcagggctgggactgggagcccaggcactctgtgctgtgctgggcgggaatagagggagggtctgcttccacccatcctgctcgaggctatggagcccgctggccctgggcaggctctagtgctctgcacccttgcagtttcttctgagagaaatgttcaaacgccattcccagactgggcactcggcatgaggggtgcatgccttcgcgaaccgttcaggtccttccaagtcaatcacccactggtgcgtgtaccggggggccgcatcaggcacagcaggactgcacagctgtgtcccacaggaggagccagacagtgaagctcatcgggaaagccttccaagagaaataaca

SEQ ID NO: 26347 - DNA, 2300 bp, Homo sapien
ccaacaggccagaggccactggtgtcaggcatcagcagcttcctcctcagagtccaggtctgccgctgccttcgtgcccacggtcttcactccctgcgccgggaccaacaatgccctggctcctgagggctgcttttgacctgtgcggggagcagccccaacttggggtggggtcttacaggcttctggacctgccttttcctgacaattcaggtcagagtctcaagtcccctgggaggggccccaagcagctgtgaggcctgggtgctcggagcccactgaccgctagccttgtgcttgtccccagcggcaagcctgcacgagctgtgtgctgccagagtgtcagaggtccttcaaaacagagtgcacaggacggaggaagtgaagcatgtggacttctatgctttctcctactattacgaccttgcagctggtgtgggcctcataggtaagggggcccggatgggctgagcaggaaggtcggggcggcagggggcgggggtggagggcgtgtgctccccgaggcagagggctggtggcaggcaagcaaccctgttgtcacatccctgcaggaggccagaagcagatttgagaaggcgtctcatcctgagtaggaaaagatcagttctttgagcccttcagtaaaacctcgtggctggtgacttgctgttgattccagttcctgctggaaggcaggtcctgccttgcactggcccacgttgtctcagactcagccactctgccctaccctgcagccctggctacaggaggcctcctgtgacctgcaggtggctgccctgtacccatgggagggatcagctcactgaatgtggagtctctctgactcaccctgcacagcccaggaagccagattagggcggaaaaaggtattcagagtttgctgaggctagtggtggtcaggctgtgtgggaactctggagggggttgcagagtcactatcatggtgagatcatcagaatgtatggcctgtggtacggataagaacactactgttttaaataagctgacacggtgccggctctctgggccctgcagcctccggcgggtctctgtgctgacaaagctaccactgactgggcctgggtggaaggtgggtggtcaaggtggaaggccaccaataaaccacccctcagtgtatttttcaagaacttttttttttttttttttacatttaggaaactgataccagaatactgttgctgagctcagttctatggcttcaggaaacatttcaatttctctacttttatttttcttaacttaaaattttactcaatttggggtcctgggttcctggtgagctttctcgggggacactgcagggttgggttgtggggtgaccctctcagcccccaaacccaccccacaccacatcacccagaagccgtcctcagagcacgtgagtgccgcctacagctggagggcctgcctcagaagccagtcagtgccttggggctcttgggctggcgttccccgtgccagcctcacgtctcagtggcatcgccaacctcacagtgctcctgcagactgggtgttgtgtctcccacagatgcggagaagggaggcagcctggtggtgggggacttcgagatcgcagccaagtacggtgagtgatgctgcaggggccatctcagcaggggcaggcgccccgtgatgctcgtgacgcaggcgctggccctgactctcctgggtgtagcccctcctaaacaatggccacaggcaggggcctcggccccagctgagaaaggaccaccgtccttgtcccaccctcatggggtcgtgaggaactgggtccctcgattccacttcctcagatgccattttactgctactagggtaaccccaagagtgatttcccctgggatgtcccagtaagttcatgattgtcacacaacccttaagaagccaaggccctacagaatggagcctgggatgtggggtggagggctgtccccggggtcgcaggtgaccagcccagcagaccctgtgccacacactatgcctctccactgtctccttcacgcctggcccagcagccaagccttggtgaacatgtcctgctcttggttgcccttcccaatgtgtgggtccaaagagctcaaatttgtacatctttccagaaaaagtactacccttcccctcccccaaaagtggcttttttaaagcttttgtgtcattttcccatttgtgcccatggacactgggtatccacaactacagcaggaaaaggctttgagcagaatcccaggacagctcttggtggatttgtccttcctcaa

SEQ ID NO: 26348 - DNA, 2300 bp, Homo sapien
cactaaccgagacttagcctctgtcatcccaatccaggctgcagctccagatagggggcgtctgcacacagcttcccacacttggccccgcggaacacagtcctgctggcctcagcctgtgggaaccctgcttcatgtaaaggtcacctaaactctgccttccctcaaccccttcaaactctgcctttcccttcgttcttgggaggcgctccctcattgcagtgggtcagtacacccgattttgtggaccacaggtttgctcctggtggtcttgggctgaaggggctgcaaaggttactgaatttcgtggaggtaaaaattgcccgcaggaaatgtcatgaaagtccaggtgcagtaggtttcctggtgtgatgcttcaaagttatcttcttacctggagccccttccagctgcagacttcagaggtcggaggttaatcaatctggaatgaccccacagcccacccagctccagctcgggattcactcctgcactatgtcctagggattctggagccaacaagatcgaacttcgggcacagatggcagggctgtggggtcgagcttggctgcaagctccgaacactgatgcaatctctctgagggtgatctggcaattcagaagtcataaaaatgatagtgccctatgaccacttctaccactctggggaattgagttcaaggaaagcttaagaagacaaaaagcaagttatgcaaatatgttatctgctgtggtgtggtaaagtttaatcccccagctgtggtgcacacctggcaaagaatggaggcgctgacacttattgatcattacttgcagtgtacacgtattaactcctgatccctgcaaatagcctgctattacccccgcttgacaatggagaaggtgagccacagagaagttaactcttccctaagcccacacagctaataagggaaacagccaaggttcaccccagccaagccctgctccactgcacaagcccagaaaaatgtatctgtgctcaaagttaatatcataaaccattgtgctgctaaaaggaatgactgttttaatagctagctaggaaggtgtgattgatgacacaatactgataaatgaaacacaaaaataaggatgtaatgcagaaatgacagtaatgatttgaatattactttcatttagtcaatttaaatttaaattaaataaccacatgtggctagggactactgtgttagaaacacaggtgtatatccaaacctaaacactggttatttctgaatggaagaattatcaggggggttatcttattttctccatacattttgtatttcctgttttttccacaatatttcttttgtaagtggagtaagttttagtaagaaaaactagaggccacagacttcactaatggatgctgatttaaggcctatatattctcttactggattgacttttaattctttgttactctggttaaataaattttaagtcctttctttcatagctacactttattaaattttccatgatcctgacaaaaattctttgaccaaactctagtcaggcttctgagccttgtagggccatcatacacttccctgtgacatctgttttagcaatccctgctttgtcaatttagcaggattccctgcccctgatgtctgatcccccttggtgacatctgatcaggctccccatgctccaccatcccccatgctgtccaatcaccctggcctgccttcaacaggaatcctatgaggtggtttagacacaatcacctggacccctgaagtgtcctcttagtaactgtccatccactgacccctcccccagtccttggctataaatgcccacttgcccatgctgttttcggagttgagcccaatctctctcccctgctgcaagatcccgttgcagtggtccctgtacctatcatgatggttgtgaataaagtctggtaccatgctttaacaaatgctattgattattttttttctttaacagttatcttacccagatgtcatttcctcttcctgggagctgccatggtccttcccctctcctgcagcacttagtccaatactgaatcttcatgatgtgactcttcataatgcgcatggttgacgcaggaaggagccctctcaccatcatgtctcctcacctcctctggccgctaatattgctgaagtggctaaatgagtcccagtattaattatctcagccattttcaggtaatttatttatttatttattattaatgtttttgagatggagtcttgctctgtcacccaggctggagtgcagtggtgcaatctccgctc

SEQ ID NO: 26349 - DNA, 2300 bp, Homo sapien
tcttactaaaacttactccacttacaaaagaaatattgtggaaaaaacaggaaatacaaaatgtatggagaaaataagataacccccctgataattcttccattcagaaataaccagtgtttaggtttggatatacacctgtgtttctaacacagtagtccctagccacatgtggttatttaatttaaatttaaattgactaaatgaaagtaatattcaaatcattactgtcatttctgcattacatccttatttttgtgtttcatttatcagtattgtgtcatcaatcacaccttcctagctagctattaaaacagtcattccttttagcagcacaatggtttatgatattaactttgagcacagatacatttttctgggcttgtgcagtggagcagggcttggctggggtgaaccttggctgtttcccttattagctgtgtgggcttagggaagagttaacttctctgtggctcaccttctccattgtcaagcgggggtaatagcaggctatttgcagggatcaggagttaatacgtgtacactgcaagtaatgatcaataagtgtcagcgcctccattctttgccaggtgtgcaccacagctgggggattaaactttaccacaccacagcagataacatatttgcataacttgctttttgtcttcttaagctttccttgaactcaattccccagagtggtagaagtggtcatagggcactatcatttttatgacttctgaattgccagatcaccctcagagagattgcatcagtgttcggagcttgcagccaagctcgaccccacagccctgccatctgtgcccgaagttcgatcttgttggctccagaatccctaggacatagtgcaggagtgaatcccgagctggagctgggtgggctgtggggtcattccagattgattaacctccgacctctgaagtctgcagctggaaggggctccaggtaagaagataactttgaagcatcacaccaggaaacctactgcacctggactttcatgacatttcctgcgggcaatttttacctccacgaaattcagtaacctttgcagccccttcagcccaagaccaccaggagcaaacctgtggtccacaaaatcgggtgtactgacccactgcaatgagggagcgcctcccaagaacgaagggaaaggcagagtttgaaggggttgagggaaggcagagtttaggtgacctttacatgaagcagggttcccacaggctgaggccagcaggactgtgttccgcggggccaagtgtgggaagctgtgtgcagacgccccctatctggagctgcagcctggattgggatgacagaggctaagtctcggttagtggctgagctccccggccagacgggcatgtttccttctccctgctgtaatctcaaagcggacagcgtctgccaggtggtttcgggaacagggtttctccgagggctagggggctgcggtccctccgaggcggggtcgtggtggcatttggctgtggctgcctcgcgccctcgggaacgggcgtctccagctcgctggcagctggttttctccacgtctgtcatcggcctggagtggcaagcaaatagctggtattttcagagccgccctgccccggacagagaagaccgggcccagcaggcgttggtggatgcctttcaagctgtaatcagtttccccgaacgtgtaccaggtctcggccacagcccgagcccagcgcgctcccgcggggcacctggtgacccggtgcagggcgggagggccggtcccaggaacccgagggccggagggcagggcccccttcccgcaccgtccccgggctggcaggagcggccacgacggcacgctccgaggccccgggtcccttgccccctccagtcgctcccactttctgccgggcttgcccaacgagggggcaaacaccacgctcaggtggcgtggacaggtcgctgccgcctcggactacaccagagatctcagctatgagcctggacgcccgccccgccctcccgaggccccgccccgccccccgaggccccgccccggcgcggcgcgcaggcgcggtccatcccgcccgcagagccgcagtgccgggcgccagagcagcggcgccagagcagctgcaccatcccggcgttcgcgtgtgccgccgctttcctcctccatctcttttcctccgcctccgccggcgcgatggcgaagccgctgacggacagcgagaagcggaagcagatcagcgtgcgcggcctggcggggctaggcgacgtggccgaggtgcggaaga

SEQ ID NO: 26350 - DNA, 2300 bp, Homo sapien
actgcaacctccgaatcccagcatcccgggttcaagcaattctcctgcctcagcctcccaagtagatgggattacaggcgtgcgccaccacacccagctaatttttttgtttgtttgtttttgagaggagtctccctctgtcgccaggctggagtgcagtggcacaatttcggctcaccacaacctccgactccctggttcaagcgattctcctgcctcagcttcccaagtagctgggaatacaggcacgcgccaccatgcccagctaatttttttttttttttttgagacagaagtttgcttttgtccccaagactggggtgcaatggtgtgatctcagctcactgcaacctccgcctcccaagttcaagcgattctcctgcctcagcctcccaattagctgggattatagggttgtgccaccatacctggctaatttttgtgtttttagtagagacggggtttcactacattggccaggatagcctcaatctcctgacctcgtgatccgcccgcctcggcctcccaaagtgctgggctcacaggcgtgagacacctcgcccagccttttttttttttttttttttaaacagagtcttgctctgtcacccaggcttgtgccaccacacccggctaatttttgtatttttagtagagacggagtttcaccatgctggccaggctgatctggcctccatctcctgtgcttaaatgatccacccacctccgcctcccaaagtgctgagattacaggcatgagccactgagctcggcccataatgtttttaaaaagtatatctggagatattgacacaattatgaatgcaggctgtaacacttagtaatatggtcaataaattattttgcaatttcaaagtatcattacaaaactaatttaaaaagcagccgggcgcggtggctcatgcctgtaatcccagcactttgggaggccgaggcgggcggatcacgggatcgagagatcgagaccatcctggctacacagtgaaaccctgtctctactaaaaatacaaaaaaattagccgggcatggtagccggcgcctgtagtcccagctacttgggaggctgaggcaggagactggcgtgaacctgggaggcggagtttgcagtgagccgagatcgcgccactgcactccagcctgggcgagagcgagactccgtctcaaaaaaaaaaaaaaaaaaaaagaaaaaactaatataaaaagctgttgaatttctaaacgcatttccaattgacctttatcaattgccaatagttttcaaagtgacaaatgctgaaatttctaacgttactttggaataagcaaatatctctctttgttatagatcatctgtaaaactaatgccatattgaagaaagccaaagttataaaactaaatttgtgaaacagccctttattctttccttttctctttctaggatgggttgaattagtactaaatttgggtttcataagggcgaatttatctttgaaatggattttcctcccatcaggtagtcttaattgctttataaaaatctaaaatctaacacaggtttttaaaaagtaaatttttcaagcagttcatttcctgatgttcggcccaaaagtaaacactgagtatatacatttacttcaaattaaaaactgacgaccggaaagcatacttttaaaggtaatgtccttgtggaaaaagaattaagaatcacgagaacggaactgctatttgctacctctggttttccgttcacagaagcacgaggagcccagcgctgcggctctgcctcgctgggccacccctttcgggcacgaccgggagcgggtgctcctcacaccgagcgcccgggcgagcacagctgcagcctgcggatggagcccagagccctgccctgcagatgacgcgccgctgcagcttcgcccaccctcccacaaaatggctgcgggtggcgccagggatgctgggcgcgcgctccttggaactagagaggaggtggccggggcggggccgggggaggggggtagggcagagccggcgggagcccggcgctgattggccggcctggctggcgggcccccgccgctggttcgtagccggcgcagcggcctgggctgggatgtgaggagcggcgggttccgggctccgggctctgggtggcggcggctgtgagcggcggcactgcggcgcaggccagcgggcgccgtcggcggctggccctgtcggccgcgggatgaggaagcggaccgagcccgtcgccttggagcatgagcgctgcgccgccgcgggctcgtcctcctccggc

SEQ ID NO: 26351 - DNA, 2300 bp, Homo sapien
aaatcagtctcctagaaaactccaagatagggattttaaaggataatttagtgggtagggggtcacaaagtgaggggtgctgattggttggatgagagataaaatcatagagagtcaaagctgtcctcttgggctgagtcagttcttgggtggggaccacaagaccagatgagccagtttatcgatctgggtggtgccagctgatcccatcaagtgcagggtctacaaaatatctcaagcactggtcttaggttttataatagtgctgctatccctaggagcacttggggaggttttagaatcttgtagcctcccgctgcgagactcgtaaatttctagtcttgtggctactctgttactcctgcaaaggcaatctagtccccagacaaaaagggtttcgctttggtaaagggctaagtatttgtttcaaaattaaactataaactaagtttctccccaagttaattcgccctaagcccaggaatgaacaaggatggcttggcggttagaagcaagatggagccagttaggtcagatctctttcactgtaataattttctctattataattttttcaaaggcggtttcaaaaaggcaatgtttgctgggtgcggtggctcacgctgtaattccagcactttgggaggcccaggcggacggatcccttgagctcaagagttgtcgaccagactggccaacatggtgaaaccctgtctctacttaaaatacaaaatagccaggtgtggtggcctgagcctgtagtcccagctactcagagggctgaggggggaaaattacctcagcccgggaagtggaggctgcagtgagctgagatggcgccactgcactccacctgggtaacgggagttaagaccctgtctccaaaaaaaaaaggcaatgtcattattcaacataagcctgagtaggccattcccatgcccattccttagatgacatatctactgtatatttgcaaaagatcaacatagtttctagggttagctagaattaatccaagattgcgccggttgcggtggctcatgcctgtaatcccagcactttgggaggccgaggtgggcggatcacgaggtcaggaaattgagaccgtcctggctaacacggtgaaaccccgtctatacttaaaaaattcaaaaaattagctgggcgtggtggcgggcgcctgtagtcccagctactcgggaggctgaggcaggagaatggcgtgaacccgggaggcggagcttacagtgagccgagttcgcgccactgcactccagcctgggcgacagagcgagactccatctcaaaaaaaaaaaaatccaagattgcttgttagaaattaacattgctttttgaaaaattgcctaataaaacaattctttagcagtgattcccatcttccatatgcttaagaaatattccataaccatctagccaagaaaattcctagtgaattcgtattaatctagggcagatattacaaatatttttaaaagactattttaaaatcaaagggtggtactgtggtgttggaaatggaaagcctaaataacagtctaatcactctggagctgtgtgaccttgggcaagttacctaacttctgtttccttattaatcccgggtcttaaaacacttcagagataattgtgggaatgaaatacacactgcagtccctaccagcactaggtacccaataaaagagagtttcattttaatatcaaacagaaaacccgcactgcaaaactgaaacccttgcgtcctaccaatgcacaccaagtttttgggcctttcctcttaacctcaaagtgctcttttcttgaacctaaacgagaatgaatgaatcaaaaggaaaatgacaaggaagctgcggggcgtgcatttatttccagctctgctgcccgtagagtcccccggcccactgcctgagaactggaaaagccgtctctgctcagccgaggggttctgccatctccggggcggggacctcaccttggaaagacccctcccactccgcccctcttggaatgcggctgagcggtggatgtcccttttcgggcgccgtaggcgcgttcctattggctagctttgttcggcgccaaagcgcggagcggaggccgaggcgagagcctggcgctgtaggactagaacgaaaggagtgaggcgccgagagcccagataccattttggcgtgagagctggtggttggcaaggccgcgggagtgggaagcgtccgccatgttctgcgaaaaagccatggaactgatccgcgagctgcatcgcgcgcccgaagggcaactgc

SEQ ID NO: 26352 - DNA, 2300 bp, Homo sapien
acaggaggctgggctatggtggcaggggctcgtggtccgggacagacaggtgtgtgcaggggcagccgagcaggggcctcagggaggggagccggctcaggggatgcttgtggagggggtggctcaagggagaggagaagagcaggtgtgtaacggccaaaggtgcccagagggcgagtgcccagtgtggacacaggtgcggggcacacttggaagcttggctacagagaggaaagggggctgtgggaaagggtctctccccacctgcctgtgaggctcggctgagcctctgcacctggtcccccccggcgctggccctggcgccctgtgcagaggctccccctagacgtcctgaggcacagaggggtcagctgggcatggaccccagagctttctgaggcgctgttggggctcccataggctcttggccttgcagctacaggctgtcagttttccagaggtgctctgcctatttgaggcacccttctctacttttgagtctaaaaggaaccctggaaaattgcctgggccagttcgagtcctttgaggtgaggagtaaggccacctgaaaaggccagcacttcctcagcacctggcgctgggaggcaccgctggggccaagggagagcattccacacccctggggccacgcctgccaccagcctctcagttgggaagcacctcaccaagtctgtccttgcagccatgtgggtcaccccttcttcctcgtgatttagaggaagacgctcccccaaagcacgtggcttccagtcagcatcaggaagctgggggcttccagggtagctcaggacactctggaaaaggcagatggggctccctaagagtggccacgagaggctgggcctgaagctgatgtggttgccgtttccatgtgggagggaagctagggcagtcactgtcatgcccatgtgtggttcaggaggaaggccccagaggccagagcagacaagagggatggggcctcgtagaggagctcagagggcggagggtctcccaggggagctcagagggcaaagggatggggactcacagggccctctccacgggaaggacaggaagggtggctgcactcaggatgggagatgatgccccatctgccgctctgcctcactccagcacccagaacacaaatgtccttgtttccagtgctcccctggggacgtctttccctgtccctgtgactgtcaaggtctgtagatgtggcccgtctcgcgttgccaaggaaggagatgaagaggactggatggctctccattcagtagatgtttacaggctgcccaccatgggcagagatcccccttgggctggaccctggccatgctgtggagcggcttaattagtgggggttcggtcccaggatggctgtggggggtggtgcagtccaaggacctgcaagcatcagagcccagggagttggggtgccgggccagagccttcctgggtgggtagatgtgcttgatgcgtgggagtcccgcaggcctgggcggcggcagccagagtgaccgtcttgagacgagccttcgggagaaggctgcgtttggtggagatgctatttagaactggttcttccctccttttctgtctcaaaccataagctgccttccagggcctggaaaatgtggggtgcaggtgtgtctctctggggtgacccccgtcctgaagaagggtgagctttacagtgatgacctggcccccccaagacaggcccccagctcggctgagtcagtgcagggactactgaagggaagccggacctggcagtgtggcgcagggtgttgccttccctcttcctccaccatgtggtgatgtcaggcccagcccaaatatgaccccgatggagcgtgcgtgattcccactccgtcttggggtctcaggtgagtaaggggtggcgtggccagttcttatagggtgccaaagaaatcctggtgaagcctccagtcaactggatgtaaattgtatttggatcttgcttcgagctgcttcattaaagtggctggcatagtggtgcacagtttactgtaacagctcagcccacctccagcagacagtgccatccaggaaaccaggcgctgccaggaattccagccctggccccaccttcccttcagcagtccgtgttgtctgggtagtctgtggccagtgtagccctgttgcagagtgaggtctccgctgaaaggagaactggcgtggtcgttgtttgaaaagaatcaggccccagcaaggttcactggaagctaacactggacgcagcagagtctgggtctgacaggaggtcagcg

SEQ ID NO: 26353 - DNA, 2300 bp, Homo sapien
gtgggtgctgtgagtgtatgtgggactcatgtggtgccatgtcagtgctttgagcatgcttggggcctgtagggtgcagtgggggtgctgtgagtgttccgggactagaggggtgcagtggaaagtgctgtgtgcatgtatggggcctgtggggtgcattgggggtgctgagtggggttgctgagtgtgcgtggggcctgtgtggtgctatgtgggtgctgtgagtgtgtgtggggcctgtggggtgtagtgggggtactgtgtgcatgggacccatggggtgcagtggggggtgctgtgtacatgcatggggcctgtgcggcctgtgggccccctggagtgtacgttcttggtgccactggctcctgtggctgtggtggtggtgggaagcccctgtgggactgtggtcattttcagggaagctaaaagtcaagtctcctttaaccaaacatgaggaggtgtctggtgaggcgaaaagccaggtacagggacaggtgcaggcagtggctggggcccttgccctccacatggaggtgctgggccaggcctcaaggcccgagttccctgccctgagcctggaaggcattttgttaggaagcggtatccctgctcctgtgggcagggagggtctctgtggtctccgtcagctgaactattctgggccagccttgtagcgttatcattcccacctggctggggaattcctagaggagggaccaaaagatgccccccggcccctgggggaggtgaccttgactttgttgcttaagacgttctcatagctccctgccttccggagcgcacatgaggccagcttggatctccagaggagacaattgctaacatttaggagctgaaagtatgtcagggagacccacggggagctccaggaactcatttcctctccctggacgccccctcctttctcctgacggctctgttgtaagctcggttcgtccacctctcactttcatcctgagtatcgggatccacctatccctgttggtgccacagggatcttggtgctgcctctcaggacctgaggggctgggttctgacctccagcgacttcgttctcccgagcacagcctcatcccagccttggggttagcagggcccctagacaagagtgctccttgtgagacacttgtgttcaaagctggaagtaagttgactcatactcagtttgagtaactgagaactgatttgcttctgtccacacgtgtataccttgattctctcccagccatttggaaagacttgtgtgaattgtctttcccagggttagaggattggaaacactctgtcctggaacctggtggagggatgcattcgaggtgctaagctgcagcctcagaacccacgtggccctgagagcttgggttttgtcccatgagcaatgggagttatgagtaggtttctgtaagtagcttttattattgcattaggttttccttattataaatgtaatgagtgatacatgtttattgcacacattttagaaagtacaattaaaggaaaaataaaaccagaaatctcactttcccgggggtatcactctttacattgcctatatatctttcaccttttttttctatgcacataattcttaaaaaaatgataccatgttgtggccgggtgtggtggctcacacctgtaatcccagcactttgggaggcagatcacgaggtcaggagattgagaccatcctggctaacatggtgaaaccccgtctctactaaaaaatacaaaaaattagccgggcatggtggtgggtgcctgtagtcccagctactcgggaggctgaggcaggagaatggtgtgaacctgggaggcagagtttgcagtgagctgagatcccgccactgcactccagcctgggcgacagagcaagactctgtctccaaaaaaaaaaatgacaccatgttgcatatgcttttctgatggccacagagcatctcacctgggtctttgtgtggatctgccataatttatttaaccatttccctatttttgtatatttcaaaagtttttaaagagtaggctgataggaaatatgtagctttaacactaccccaaaagatttatggagtattaaattagtcagattattgtacttccttcatactcttcccttttgagtgttgtttctttaaagttctaagccaagattaaaagcccgggctctggggcttaggtgtctcggacttggttatgggcgtcaccaggcttctgcagaagtaggagcctcgctggtcttcagtctgggtagacgtggtttgagaattccagtgaagctg

SEQ ID NO: 26354 - DNA, 2300 bp, Homo sapien
tttatctgaatatctttagggctttaatgttttttgtgttttagtaacattttctacttacaaaagtgttctacttgttctaaaatttttgagagatataaaaatatataaaataggaaatataaatgtgtaataccatgaaagcatttcttaccattttgatgtatttgtttcttttttccctttttttaaatatattttcctccagaaagttgcagaagcttcctggtagaattgttataaggcataaatgaattattatatgtaaagtgaccagtaagtagattagttattactattattataaagtttttattcttctacactgcccattctattaaatatttttcagaaatgtgattttggctgggtgcagtggcttacaccttgtaatcccagcactttgggaggccgcagcaggaaatcacttgagtccagaagtttgagaccagcctgggtaacatagtgagactcctatcttggtaaaaaaattttaaataaattagctgggcacggtggtatgcatccatagtcccagctacttgagaggctgaggcaagaggatctcttgagcccaagagttcaaggttacagtgagctatgattgtgccactgcactccagtctgggtgacagagtgagaacctgtctctaaacagtcaaaaataaataaatgtgaatttcaagactgtttaatattctgtcatataaatacacagtaatttgacaaactattcttctgttggatattttaggttattttctttcctgtccttatataaataatattctgatgaactcatatctttgtctgtaactattttcttaaatataaggaatttcatgtaagtagatactaggccagttaatattttaagtattcttgatataaagacaaagtaccccccagaaatgtttgccaattccttcctccagcagtggacgagatcccttgcttacaagaggcatccaggatttttagtcttgataatttgacagttacaaatagcatatcttggttttaatttgagcatttttagatggttattaattatatatatatatcttttgtgatttattaacatcctctgtgtatttttattggagtttcctttttttccttattgtaagcactttcatttagtacaattcagtaaaatttttactacctattatttgaaaaaaaaacagaaacccttgtaaggaaaaaaactacatttgtacgtgtgtacagaaaaattaatctgggctgcgtgcggtggttcacacctgtaatcccagcactttgagaggccaaggcaggcgatcacttgaggtcaagagttcaagaccagcctgtccaacatggtgaaacctcgtctctagtaaaaatagaaaaattagctgggagtggtggcgtgcacctgtagtcccagctacttgtgaggctgtggcaggagaatcacttgaacccaggagacagaggttgcagtgagctgagattacgctactgcactccagcctgggcaatagagcaagaccctgtctcccaaaaaaaaaaaaatcagattgtatgctggtcaaaatattaatagtagtgtttttatatggtagtggaatttttgatggttttagttttctttatactacatatctctattttctaattattctagaatagtttcctttttgagatagggtttcactctgctgcccaggctgaagaacagtggcactgtcaaggcccctgcagccttgaactcctgggttcaagcagtcctcccgcctttttctcccaaagtgttgggattacaagcgtgagtcacccatacctggcctaatggatatttttcatacaacaaagaaattctggttcttgtgactgacgactgaaggactatttatcctcactccctgttaacctgctctggcctctcctgcaagggtggagctgagtcctcccactgtgtgcttggccctgcaagggtccctggtgccttccccacatgccagctcctgcgtctgcttggaccatgtagctcggtgctcaccggcagtgtgggaatgggaggggaggtgggaaagtgtcctgatgttttcttcttcccttgcacactgccagcctgctatgggatggatgaagaagagaaccactatgtctcgcagctcagggaagtctacagcagctgcgacaccacggggactggctttctggaccgccaggagctgacccagctctgccttaagcttcacctggagcagcagctgcccgtcctcctgcagacgcttctcggaaacgaccatttcgccagggtgagtgtt

SEQ ID NO: 26355 - DNA, 2300 bp, Homo sapien
ctagaacacactatgagcgtctctgaaccactccctgtgtttgccttttgctctgcatggggtttagcacttgcaggcacttggaaatttcactcgcccttggaaactccgttcccccatagcctgtctttcatcctgcttccttctcaccccattttgcctctgatcctcacatcctctaaagtggagttcctacaaagtatatgcacctttctcatgctacagtgtactgtagctcattttgtaattctgatataactctctgacatttttgtatatttatgtttttatttttattttttggagacagagtcttgctctgtcgcccaagctggagtctagtggcaagatctcagctcactgcaacctccgactcctgggttcatgcaattcttgtgcctcagcctcacgagtagctgggactacaggcgcgcgttaaccacaactggctaatttttttgtgtttcagtagacactgggtttcaccatgttggccacgctggtctcgaactcctgtcctcaggcaatctgcccacagtggcctcccaaactactgggattacaggcatgagtcaccgtgcctggctgtatttacttttttttttctttttttgaaatggagtctcactctgtcgcccaagctggagtgcagtggcttgataaccacaacctccgcctcccagattcaagcgattctcctgtctcagcctcctgagtagctgggattacaggcatatgccatcacgcccggctaattttgtatttttagtagagacggggtttctccatgttggtcaggctggtcttgaactcccgacctcaggtgatccgcctgcctcagccccccaaagtgctgggatgacaggcatgagccactatgcccggccgggtatttacgtttttaaattgttttctgtgtaaactctataagggccagggattttttgcaccgctgttggcagcccctaggacaatgcctggccctagtaggtgttcgataaatatatacaggttgaatatcccttaaccgagatgcttggcaccagaagcatttaggatttcagattttggaatatttgcattataccaattgaacacccctaatctgaaaatccaaaattagaaatgctccaatgaggccaggtgcggtggctcatgccagtaatcccagcactatgggaggccaaggtgggaggatcacttgaggccagaaattccagaccagcctgggcaacatggtgaagcctcctctcttaaaaaaatacaggccgggcgcggtggctcacgcctgtaatcccagcactttgggaggccgaggcggtggatccatcccttgagcctaggagttcgagaccagcctgggcaacacagtgagactctgtgctaaaaatacaaaaattagcggacatggtggcagatgcctgcagtcccagctactgggggttgggacgctgaggcgggaggatcgccatagccgggaaagtcgaggctgtagtgagccatgaccgcgccactgcatcccaggctgggcagcagaagtgacagcctttctcaaaagaaaagaaagttaaaagaagaaaaaagaagtgctccaatgtgcatttcctttgagcatcaggtcagcgctcaaaaactttcagattttgaagcatttcggatttcagatgtttggattagggatgctcaacccgtattgatttaatatgcggtggaaacgtgacgacctaggttttaagtcgcggtttcctcagtggtgggtttggggtattacccctgcctggccggcctccgggcttgtttccagaagatgctaccccgagagctgcgaaccgccaagctccgcagcgcgcagggctccgacagggaccagcgaggtcagctccaagggtcaccccaggctccaaactggccagagccgccctgagatttgcggaggccgccttgcccccaccccgccccgcaatcccggacccgacccgccccctctcccgttcgctcgccccgccccctgttcgcccactgcgccgggacaccgagggggcggtgcctcgaggccgggaggagtgttgcgtcgcggcctccagacacaaagagcggccggcggtacgggggtggtgccgcgctcctggccccgcgcgggcggacggcggaggcgcctcccaggtgagccggcccgggcgtccggcgggacattcaggcggctggtggggtcgagagtccggggccgcccctgcgtcgcgacccgcgccttagtcaccagacccggctccgggagcgcggcctcgggtgctcctcgcggt

SEQ ID NO: 26356 - DNA, 2300 bp, Homo sapien
atttattcaacatttgccatgtgtcaaacgaggataattaagacagcttgttccctcccaagaagctcactatttagtagtaggcacctgagttgcaaaattaattgaaatatcctttgacagatgcattaagaaatatctgaacaaaatacagcactactataagtgagggtgtaaagaccagggaggcatacgatttagtctttgttttaaaaatattgctgtggcaagaatgtggaggacacactggatgtggtaaacctggagacaagcccacagcaacagtctaggtgagagatgagttcagctgtaactgagacatgcacggggcatgtgcagtggtggacagacagcgtacgagggtggaaggtgctatagttcgctgagtggacactgcaaccatgggcttcccaagtattacagggttattgaggactaatataattcacattttatgaagatataaggctccgagtggttaattccttgaggcactttcagctaggttttgggagagctgtgattcatattcaaatgtctgattttaaagcccaaactctgggcctacagcaagaattggcctaaagcaataatttaattgaaatgcacaggactcagcttactaataacacacaggtaaatatgtaacatctgcagcgagagatactggaggcaatatggcacagggtggcacccctgaggtggaggccaacaagttaaaagtgtggaatgcctcagtaaagtcatgaagacagactttaaaaatgtctactgattccggcattttgggaatgcctagtgatccagcaagtctatttcagtctagcggtgaagataaagcgacattacgatggatttagtaataaataggaggtagagacaaggagataacgggtatagatttctccgggaaaacatggctgtcaagagagacaggcaacatctacagcaggaagaatagcccaaagggaggcatcctttttacagcttttttaaaactatagggcaaacatgaatatgcggcaggagtggaatgcagctaaaaagaaaacggatgaggtagtggaagatccagggacacaaaaactaactgatgaagcatgaagaggacggggcgctcaggtttggatgaattagcttttgaaagtgagttttccacatctgataaatccttccctttccccttgaagctgaaggtagagaaagggaagccggggtggactggggctggaacacgggaaggtctgaaagcgcctccgcgcgtgtagaggggcagtgccgcggaggagcgcctcaggaagggcatgccctcgcagcacgggcttttgctgtgtcacgtgtcagaaagccacggtgaccaccaccccgccagggaggccagaagaagttctgcggcgacaattctctaaagcagggcttaagtccaggctcggtactgacagccgtgtcccttcttgggtcaacactggggctaactctaccatgtctcctcccagcaaccccgaaagtcgcatgggggacacgaccctctgtcgagctccacaccgacagtctgaccgggggcgggaccagcgcctggtctcgcggctttgctgtcgcctcccgcgcccacgggcacctccgccaccgtggcagccgtcacggagcccttccgcgtcccgagcgccaaggcacctgcgagcagccgctccagggctcgagattgggtgacaagcggccgccaggccagggaaagcagacccgcagggcccgcgcgcctccagccacctccgcacccgcacgctccacaggtttcaaccagcaagagcggcccgcggcgccggggtggaagtggggtcaaggggaggtgagcgtgcaggacggggcggggcgcactgaccccgcccagaggagcgccatgggtggggacgttacctccaacatgcctctcctgctcgccccggccgtgtcgatgagagtgttgtccaagtcaaagaaaaccgcccgcacgcggctcagccccatagcgccggccgctggcgcgaaccgtagccttgccaccgccgcctgcgcatgcgcaaggcggactgcccagagagacgtgggaggagccgcgaagtcaccagaccatctcccggcgcgggtggaattcccgcgatctgtctcattccctgcgccgccgagaaaagtgagatcccgcgagactcccagggtatggtctctcaagagccctggaaacgtgtgtcggcgccgccggatgcggcgacttctcagtggctgtggctggcgttggtccgaagcgtggtgttcttccctggtgt

SEQ ID NO: 26357 - DNA, 2300 bp, Homo sapien
atagggtgctctacacaaagttggacaggtcatggaatgccattagacgacttgtcacaaaaggaaatctatcaaacaacgcatccccttaaaaggattatacagactgctatgcctcatctaaccttagatttttgcctaaatcagcaaacaacaaactctgcatgcaagtcagaaaaaaaaaaaaaaagctgctccaatcctataagcttcctgtgcctatagttttatgctaaattgattctgacatttcaggcaattaaaagtaactccaattaattcaccataattttggctgattgctaatctaaatgtccacaattgataggctagccctatacgtcaatgaggtaagcacagaaaggagtcatggttttgaggaatgcctatgggtttattctccaccatagcaatgagatgtcaactgtgattgtgctccataaaatatagaaactgtaggtagtctaacgctgcagaagaaactcctattaatataaagataaaccaattaatctaacctactgaacatcagtggtctgttaaggagttccaccagcgaggtgagagactggcaatttttttctctaaagagctaaataatgaatattttaggatttccagccacgtggtctcgcttacaattactcaactctgtctgcttctgtatggcaacagcagccacagacgatacagaaatgaatgtgtgcgctgtgttctaatgcaactatgggcactaaaatttcttgattttcatgtgtaacaaaacactgttattttgattttttaaatccatttacaaatgtaaaaatcacccttagccaggcgcggtggctcacgcctgtaatcccagctctttgggaggccaagacgggtggatcacgaagtcaggagttcgagaaccagcctggccaacatggtgaaactccgtctctactaaaaatacaaaaattagccggggggtggtggcatgcgcctgtaatcccagctactcaggaggctgaagccggagaattgcttgaacccgggaggcggaggttgcagtgagccaagatcgtgccactacacgccagactgggtgacagagcaagactccatctcgaaaataaaaataaaaataaattaaaaaataaaaaaaaccacttagctcactggctaaacaaaatcaggtaattggcctgtacctgacagtcaatttctggtcactaatgatgaccacatatccaaattacagtaaaggtacccaagagagacaaagattagagattagtgttacgatccccgttctgccagcactaggagacaagagttgctacagcccttccgcgggtttaaaaggcggtcgacgtccctcaacctcttgctatgcctgaaaacaaccgagtaaaaggcatccaaagacctgagaacgcaaggtttcaggaaaacaatcaggaagggcaaaacatggggcagccactacacagcccctccgtcttagggcacaggtactaaacgggttgtaagagacccaagtcacatccttcagaaacgtgctggcgcgggcccaggcagacagggattccaccccggcgaaggccgcaaatggcgcgaggcgggaaggcgcaggctccaccttcccccgtccccagatcacctacagtgacctgcgcgtacaggcaggctaggaccgcgggcgctcaaggcagacatcaggcccgccgacgtctccgcgccgcccgcccggccacccggagagcctgctgcccagcgcctggcagcgcggacaacctctctcggggaggtgatgacggtccctcgcgccggagggcccagggaggaaagagataagcagaaagacaccagggaagaacaccacgcttcggaccaacgccagccacagccactgagaagtcgccgcatccggcggcgccgacacacgtttccagggctcttgagagaccataccctgggagtctcgcgggatctcacttttctcggcggcgcagggaatgagacagatcgcgggaattccacccgcgccgggagatggtctggtgacttcgcggctcctcccacgtctctctgggcagtccgccttgcgcatgcgcaggcggcggtggcaaggctacggttcgcgccagcggccggcgctatggggctgagccgcgtgcgggcggttttctttgacttggacaacactctcatcgacacggccggggcgagcaggagaggcatgttggaggtaacgtccccacccatggcgctcctctgggcggggtcagtgcgccccgccccgtcctgcacgctcacctccccttgac

SEQ ID NO: 26358 - DNA, 2300 bp, Homo sapien
tttcttctccttcctctttttaggatcttctgtgtgtaactgagccagggctgctcaaattaaagcccataacattaaagattttactgggacctgatgcctttgcgcctgatgttgtttaaggtttctccccacttgttcccagagttctatgtctagaattccttcctctgggaaccatgggctttgtactccattattgaccacactagtttttaattccttcaacaacttaaattcctgtggagtgtgttcatgaattacctactatggattatttggatcaggccttatggaaacaggaaaagcgcaaggtcctaagggctctccagctatgacagcagagcgtaaaattctttgtgttggggtttctatttctactaccgaaggaggcagcaccgatgtttctgcaattggaggaggcggtataggccaattttaatcctccctctcctgttttttattttcaattggtgctatgtgtgggacaacagattcagatttttatgaacagcaacagaatagggtgctctacacaaagttggacaggtcatggaatgccattagacgacttgtcacaaaaggaaatctatcaaacaacgcatccccttaaaaggattatacagactgctatgcctcatctaaccttagatttttgcctaaatcagcaaacaacaaactctgcatgcaagtcagaaaaaaaaaaaaaaagctgctccaatcctataagcttcctgtgcctatagttttatgctaaattgattctgacatttcaggcaattaaaagtaactccaattaattcaccataattttggctgattgctaatctaaatgtccacaattgataggctagccctatacgtcaatgaggtaagcacagaaaggagtcatggttttgaggaatgcctatgggtttattctccaccatagcaatgagatgtcaactgtgattgtgctccataaaatatagaaactgtaggtagtctaacgctgcagaagaaactcctattaatataaagataaaccaattaatctaacctactgaacatcagtggtctgttaaggagttccaccagcgaggtgagagactggcaatttttttctctaaagagctaaataatgaatattttaggatttccagccacgtggtctcgcttacaattactcaactctgtctgcttctgtatggcaacagcagccacagacgatacagaaatgaatgtgtgcgctgtgttctaatgcaactatgggcactaaaatttcttgattttcatgtgtaacaaaacactgttattttgattttttaaatccatttacaaatgtaaaaatcacccttagccaggcgcggtggctcacgcctgtaatcccagctctttgggaggccaagacgggtggatcacgaagtcaggagttcgagaaccagcctggccaacatggtgaaactccgtctctactaaaaatacaaaaattagccggggggtggtggcatgcgcctgtaatcccagctactcaggaggctgaagccggagaattgcttgaacccgggaggcggaggttgcagtgagccaagatcgtgccactacacgccagactgggtgacagagcaagactccatctcgaaaataaaaataaaaataaattaaaaaataaaaaaaaccacttagctcactggctaaacaaaatcaggtaattggcctgtacctgacagtcaatttctggtcactaatgatgaccacatatccaaattacagtaaaggtacccaagagagacaaagattagagattagtgttacgatccccgttctgccagcactaggagacaagagttgctacagcccttccgcgggtttaaaaggcggtcgacgtccctcaacctcttgctatgcctgaaaacaaccgagtaaaaggcatccaaagacctgagaacgcaaggtttcaggaaaacaatcaggaagggcaaaacatggggcagccactacacagcccctccgtcttagggcacaggtactaaacgggttgtaagagacccaagtcacatccttcagaaacgtgctggcgcgggcccaggcagacagggattccaccccggcgaaggccgcaaatggcgcgaggcgggaaggcgcaggctccaccttcccccgtccccagatcacctacagtgacctgcgcgtacaggcaggctaggaccgcgggcgctcaaggcagacatcaggcccgccgacgtctccgcgccgcccgcccggccacccggagagcctgctgcccagcgcctggcagcgcggacaacctctctcgggga

SEQ ID NO: 26359 - DNA, 2300 bp, Homo sapien
tcagcctcccgagtagctgggactacaggcgccgccaccactcccggctattttttgtatttttttgtattttcagtagagacgggtttcacggtgttagccaggacggtctcaatctcctgaccacgaggaggaggcccgcctcagcctcccaaagtgctaggattacaggcgtgagccaccgcgcccggcagagatacttacccttacttaacctatctgtagttctccgcttaggaacaaaaggaaaggtagcttcttggatgaatcagctttcagcttaatatttttcttttggcagagtggtttgggttccaacgtttttattttcctttcactgctttcagggagcaaaagagaaaaacctacattactatcttaatgcagaaaaatacttgataacatttcacacctattcagggtaaaaattctcagtaaatgaggaatagaaagaatttcccttaatgaaacaaaggttatgtgtgacagcctggctgcaatcatcatatttaatggtgaagtgtgttcacactaagatcaggaacaagcattaatgttgattcttatcactcttatttagcattatcctagaataactagctaacctgttaaggtattaaaaaggaataaaaggcataaacgttgaaacagaaaaaaaaattttttattcacagaagatgtgagtatgtacatggaagaatagttaaacaactagatactagtaacacacagtttaggaacttcagaaaataaggtcagtatttttaaaaagcacttgtatttctgtaacctagcagcaaacagttaaaaaatgaaatacatatttatactaccatcaaaaacaacatatttaaacttctaagagtaaatgtaggggaatatctttgtgactttggaataggtaaagatagcacagatgggacatgaaaggtaaactatttatgtaagtatatagaaagaaataacaaaaatgttttaaatcacctttcaactgccgtcagaggaagaaatttcactgtttttcttctccaactacatgtaaaccaaaaagtatcagagtcaagtaccaatttagatgtttattttgccacagttgaggacatgccacagaaagaggccagtggctttccccaaagatgagtttgagagcctcattgtttaaaaaggaaaagtaggctggaggggaaagaggaaaggtgtggtaatccacctgtgacaagagaaaaggagcaggtaggaaaatagttatgcattcatctcacactcagtaaatcagcactttacataagatacggtgtgcatagagtagctactatggagatatttaacgttttatctgtagctatctccttaagaacaaaaggaaaggcagcttcttgcatgacttagctttcagcttaatgtttttccttttggcagagtggactggggtccctagttttattttcttttcataacaccatagtatttgttcacttctgtctcaaagttactggctagtggatgtatgctgtgttcatcataatcaccacatgatagcatctttgttccttcacatttccttcttttcacccctatatgtctgtgtttttaattttatttttttagtcaaaacattcacttaaaagtatagtgaatactctaatgaaatcattacacccaccactttaatttacagttcttttcctgtatttctactggaatttttttcaaaaaattcggagaaaataatataatgaacccagtacacattattcagttctaaaaattatgaagtgtggccagtaatgctcaattgacttttgagggtgagaaggggtgtttaagcacatccagacatcattttcactcatgaatgttccaaaagtttgtatacaaggaagggctcatgtttttaaaacccaaaatacttttataacaacaaaattaatgtttgataatctaatatccaattagtgttcagatttcactggctgttaatactcctcacatattctttgttgcaatcaggatccaaattgcattggatcactcattgccttagattaaccatgtgtctgaggacttttattcctgacagctcacactccccatgctattaatttgttaaaggctttggtgttgtacagtactgaataactgccaatgccatctgcctgtggccttctcaagtttgtctgcacctgtggttatcctgacttcaaacccggggagacagaggctagaagaggcagacagctcttgtgtattctgtccagtgcaaagaacacctggaactctgagccctaaccttaaatgca

SEQ ID NO: 26360 - DNA, 2300 bp, Homo sapien
atataaggagctaaaacaactcaataggaaaaagacaatctgatattttaaatggagaaaagatctgaataggcatctctcaaaataagatatatgaacggccaacaagtgtatgaaaaaaaatgctcaatgccactaatcatcagagaaatgtaaatcaaaaccgcaatgagatataatgtcaccccagtcaagatagcttttattcaagagacaggcaatagtgaatactggtgagggtgtggatacaccctcatacactgttgttaggaatgtaaattagtacaaccactatggagagcagtatggaggttcctcaaaagaattaataaatatatacatgatcccgcaatcccactgctgagtatatatccaaaagaaaggaaatcagtatttcaaggatatatctgcactctcatgtttactacagcactatccaaaatagtaaagatatagaatcaaagtgtctatcaacagatgaatggataaggaaagtgtggtacattaacacaatgggatattagccagtcattaaaagaatgaaattctgtcattttcaatagcatgtatgaaaatggaggacattatgttaagcgaaatgaggcacagcatgacaaatatcacatgtgctcactcatttgtggggctaaaaacgtgaactcatggagatggagagtagaatgagatagttaacagaggctgggaaggatggtgggtagaggagataaagagggacttgttaatcgatacaaaaatacagttagaatgaataagatctagtagttggtagcactatacagtgactatagttaagaacaattttactatatatttaaaaataagagagaattggaaacttcctaaaacaaagaaatgctaaatgcttgaggggatggataccccaatcaccctcatttgaccattaaacactgtatgcctgtatcaaaacataacatgtaccctataaatatgtacaactaatatttatccagaataattaaaaatttaaaaaccaaaagagaaaaagcaaacagcaagtatacctagtaaaggcctgaaatataaagtctacgtggtttggcaagccacaaaagatatcagcatattatacaccctacataatgaaagaattctggcattgatgcataattagataaatgggggaacaattagaaattgaaatgcaaatgtaaattgagtatactgaattatgtagctgaaaccttaaattatttggtaaaagactatatttttaataaatttaatgggaaattaataaaatattagaaaattttaaaaataattgtatatttacagtgtgtacctggagaaaaattaaaccattgagagatctaaatgtgaatgataaaaccacaaaatccgtaggaaaatcagagatcaaaagtactacatagcaaaaaaaagaaacaaaagaaaaaaaaaagacatacccataatcaaaagacagtgggaaaattatttacctatatcatagaaatgggaaaatatgcttaatgtatgtatagggctacctaaataaaagaaatcgccggttctgaaaggatccctccacgtccaaacgaccataggctcgccccacctgtcagagaggagtccttccgagaagtccttccaaggattccgggtcgcgcagtcccgggtggaccgctatgaccaatattctggggcgtgtacctggacgactcccgaggactctggggagtgtagtccaccgaggggatgcgacgcgcagggtcgcatagcctccgggccgcgccgaggatgctgggtagcgtagtcccggccgcgctgaggattctgggtagtgtagtcccgggcggcgcagagcgttccagatccctgggcgtcagcgagccgtgagatgcgtggtccaccatcggtgacctcaccgcctcggttcgccctcagccgccccggtgagctgcgctcctgcgggtccctctctgcagcgcgcccttccggcgcaggaagaagggccgggaaggcctgggacgtgagggcgctgctggggccgtagcgcgcgctcctccaggcccggcgtctccgcgttctggggaggggcggagacccaggccgcgccttgaagtgggcggtggggctgcggcttgccgagcgccccgggtctgggccgccactcagtctccgttcccggttgcgtgtagtggcggctcgggcggtgaacagcccggatttcacaggggcgccgagcaacccaggtcctcttgtgccagggtcgccgctcctcgggtggggacgggccagcggcctagcgagctgcc

SEQ ID NO: 26361 - DNA, 2300 bp, Homo sapien
taaaactactagaaaaaaacattggggaaacactccaggacattggtgtggacaaagatttcttgagtaagactgcaaaagcacaagcacctaaagcaaaagtggacaaatgagaccacatcacataaaaatcttctgcaagcaaaggaaacaatcaacaaagtgaagtgacaatccacagaatgggagaaaaaatttgcaaactatccatctgaaaagaaagtaattgccagaatatatataaggagctaaaacaactcaataggaaaaagacaatctgatattttaaatggagaaaagatctgaataggcatctctcaaaataagatatatgaacggccaacaagtgtatgaaaaaaaatgctcaatgccactaatcatcagagaaatgtaaatcaaaaccgcaatgagatataatgtcaccccagtcaagatagcttttattcaagagacaggcaatagtgaatactggtgagggtgtggatacaccctcatacactgttgttaggaatgtaaattagtacaaccactatggagagcagtatggaggttcctcaaaagaattaataaatatatacatgatcccgcaatcccactgctgagtatatatccaaaagaaaggaaatcagtatttcaaggatatatctgcactctcatgtttactacagcactatccaaaatagtaaagatatagaatcaaagtgtctatcaacagatgaatggataaggaaagtgtggtacattaacacaatgggatattagccagtcattaaaagaatgaaattctgtcattttcaatagcatgtatgaaaatggaggacattatgttaagcgaaatgaggcacagcatgacaaatatcacatgtgctcactcatttgtggggctaaaaacgtgaactcatggagatggagagtagaatgagatagttaacagaggctgggaaggatggtgggtagaggagataaagagggacttgttaatcgatacaaaaatacagttagaatgaataagatctagtagttggtagcactatacagtgactatagttaagaacaattttactatatatttaaaaataagagagaattggaaacttcctaaaacaaagaaatgctaaatgcttgaggggatggataccccaatcaccctcatttgaccattaaacactgtatgcctgtatcaaaacataacatgtaccctataaatatgtacaactaatatttatccagaataattaaaaatttaaaaaccaaaagagaaaaagcaaacagcaagtatacctagtaaaggcctgaaatataaagtctacgtggtttggcaagccacaaaagatatcagcatattatacaccctacataatgaaagaattctggcattgatgcataattagataaatgggggaacaattagaaattgaaatgcaaatgtaaattgagtatactgaattatgtagctgaaaccttaaattatttggtaaaagactatatttttaataaatttaatgggaaattaataaaatattagaaaattttaaaaataattgtatatttacagtgtgtacctggagaaaaattaaaccattgagagatctaaatgtgaatgataaaaccacaaaatccgtaggaaaatcagagatcaaaagtactacatagcaaaaaaaagaaacaaaagaaaaaaaaaagacatacccataatcaaaagacagtgggaaaattatttacctatatcatagaaatgggaaaatatgcttaatgtatgtatagggctacctaaataaaagaaatcgccggttctgaaaggatccctccacgtccaaacgaccataggctcgccccacctgtcagagaggagtccttccgagaagtccttccaaggattccgggtcgcgcagtcccgggtggaccgctatgaccaatattctggggcgtgtacctggacgactcccgaggactctggggagtgtagtccaccgaggggatgcgacgcgcagggtcgcatagcctccgggccgcgccgaggatgctgggtagcgtagtcccggccgcgctgaggattctgggtagtgtagtcccgggcggcgcagagcgttccagatccctgggcgtcagcgagccgtgagatgcgtggtccaccatcggtgacctcaccgcctcggttcgccctcagccgccccggtgagctgcgctcctgcgggtccctctctgcagcgcgcccttccggcgcaggaagaagggccgggaaggcctgggacgtgagggcgctgctggggccgtagcgcgcgctcctccaggcccggcgt

SEQ ID NO: 26362 - DNA, 2300 bp, Homo sapien
aaatttgaagtacatcagactataagttggcattttgtgcaactaattaaaactacgtttgaaagagagcaattgcatatttgttactgagtaatattaagcaaccatgaaaataaatagaaataaccaagaaattgttatatttaaatcctccctccttttttggaaagagaagtattgatatttttggattctaatcaaaacttctcttttaaaataaaattgatgattctatggagatagggagggaataacctatgtttattgaacacctaatattccacttacccaaatgtcatttattctatattctaggtttttgttgagacagggtctttcttgctctgttaccaagcctagagtgcagtggggtggtcacagctcacagaggtataccaccatgcctggcattttattttattttattattttaattattttattttattattattttattttattttattttattttattttattttattttattttattttattttaatttttgcagagacggtgtctccctatatttcccaggcttgacttgaacttctgggatcaagcaatcctcctgccttggcatcccaaagtgctgggattatacgcataagccactgtgttcagccaatattatagtcttgatagtagaagtgtctcagtgtactggaaaactttgtctaaattttgaaaaaatattacaaaacacgttggttttatttggccaatactgatttctttgctccatcattatttattggcattattagcctgttgactttcaatttccttacatccctttcactccatttcttttgttttgcaccccaaatagaaactcttttttttttttagatggattctcgctcttggctcttgtgacccaggctagagtgcagtggtgcagtcttatcactgtaatcttcaccttccaggttcaggcaattctcctgcctcagcctcccaagtagcctagattacaggcatgcgccactacaccctgctaattttttgtattcttttttttttttcttgagatgcagtttcactcttgttgcccaggctggagtgcaatggcatgaactctgctcactgcaacttctgcctcccaggttcaagtgattctcctgcttcagcctcccaagtagctgggattagagggtgagccaccacacccgactaatttttgtatttttagtagagacagggttttgccatgttggacagtctggtctggaactcctgatctcaagtcatccacctgccttggcctcccaaagcgctgagattacaggcatgagccactgtgtccagcttttttgtatttttatatttatttatattttgatagacagtctggctctgttgcccaggctggagtgcagtggcacagtctcggctcactgcaacctccgcctcccaggctgaagtgattctcctgcctctgactccccagtagctggtattacaggcacctgctaccacacctggctaccttttgtattttaattagagacagggtttcaccatgttggccaggctggtcttgaactcctgacctcaggtgatctgcccaccttggcctcccaaagtggccttgcttgaggccaggagtttgagaccagcctggccaacatggtaaaacctgctctttaccaaaaatacaaaaaaaaaattagccaggtatggtggtgtgtgcctgtattccaagctactttaatggttgagtcacaaaaaacacttgaacccaggaggcagaggttgcagtgagctgtgatcacctcactgcactgtagcctgggtaacagattgagacttgtctcaagaaaaaaaaaattcttggcaggacgtggtggctcacacctgtactcccagcattttgggaggccaaggtgggttgatcacctgaggtcaggagtttgagaccagcctgactaacatggagaaactctgtctctcctaaaaatacaaaattagctgggcgtggtgctgcgtgcctgtaatcccagctactcaggagggtgaggcaggagaatcgcttgaacccaggaggcagaagttgcagtgagccgagatcacaccactgcactccagcctgggcaacaagagcaaaactccgtctcaaaaaaagaaaaaaaaatctttactttggataaatacttagaaatggaatttccaggtcggcctttagatattattaatggatttaatatgaaaaacctttacttgaggatgtataaagctttaaaagacagggtccctattcttaagttataagtaaagcagcatttgtaag

SEQ ID NO: 26363 - DNA, 2300 bp, Homo sapien
aaggggagtcccgagaacccagcagacatcctgtagctctccctcccttggtgggagtcggctcaaggaggtcctgaggacaggacttctgggggtttcgccctgggacaggacaccggccacagcctctaccaggccgctgcaaactttaccctggatccagtcgctgccgaggctgcaacaggagcccatctgctaccgcgcagtagccattgtttaaaggggcagctgcctgccgtccagcaccggagctttagtcggcccagccagtgtgcctccgcgtggctctagctgattgtctcgtcacagtgatttccactgttgtcttagtatccagtccctgaattttggcatagcaggagttctccatggctgtgcttcagtgaaggggcttcgtgcctccggcctgtcttgcaggagttttaatatccttcccatcctgtgctgcctccttgctaggatcaagacgactgcaccccagccaaggacaaaggcctcagaggtgctcattgtccacctgcaggagtgtgcccacagagcttcaagaagatggttctcactcctctcgccctttgccctcattgagaaagctacccacagctatacactgggacggagaaggaagctggctacaagatggggcaagcatgtctgtcactcaaacgctggccttcctggcctagtcacccatttggcacattttcccggatgcccgtgatagtggcattgtgctgtggcattggcctctgctctgtcctccctcttgttctgtctgcccagttcctgtgaagcctagaggcttcttagtctggctcaatgtcttcaacaaagaacacttctcagtccattaggaagaaatttcgttggggtcccttttatgattgcttccctctccaaacctatttctggatgatagggtgtcatgatcctggagttctgggcttccatacctgtcttggacagggaagctccctttgtctgcatgtcccaagtgatggctttgtggtccgtccaggaagagcgggaggcaaccccactgtggctgacctttgccttctagaaaagttagtgttgcatcccacctgcccttcctctctcattcctgagggccattccgttcctctgctcctggggaaagtgcctctaagcactgaatcttttggctgccacggatgtcagggagccaaagggactgggttttgctgggtgcaggggaggtggcgtcaggggtacctaccggtagcgggatgtcggtatggtgtcgtttgtcgaaacctcttggcccctctggcagtcatccctgaatgtggcttggactcaggcacaggccctgtctcacaggttttctagtgtgcttggcttttccttggctttgtgtgggaggtcccagtgacccacctgcgcacatctggacgtcactatccgtctcagcatcaccccatatggcctcaaagacccaccctgactccatctgctcttggggaacattagtgccacgtgtggtcacattggctccatctcggactcacctctgtctctccttgcacatgctgcggaaagcagtgtcgggatgccagagccccgaaccttggagatgaagtcaggccactgctccacctaggaaggagggaggcagtgggctcatgggtcagtgcattttcagctgacagttcaccttgcagcccttaggatctttctgtgccccagcgagacccttcccgcctcactgcattgtaaccccattcttgatcaccccgtgggatccatagtcaggtcgaagaggattccagagagcccagccgcaccctgaagctcctcctccaccggtaaccgaagcagaagaccgatcaagaaggtcctgatgacaggacctctatgggtacaacccttgggtctcccgcaggaccctatcgtagtcctcttcccacccgccgcctcggactgcgctgccgccgccaccgctgccccagtcccctcagccgcgcgtcgccgccattttttaaaggatccgccgccggactctgcggagcaagcggggattcggtctcgccagtgcgcatgcgcaaggcctgagcctccgctttggtcgtagtgattgccactgttgccgtggatgggtccctgagactttgcgaagtaggagccctgtgtgatagtgcgtcagagtcgggcctgagagcagtcctggccagggctttaacaggatggtctccggagcctgggattctcggagggctgaccaccaggaagaaacctcagaaggtagaaacctcaggcggatcgccgggcggcagcgcgag

SEQ ID NO: 26364 - DNA, 2300 bp, Homo sapien
tgtgtgtgtgcccgtgtccatgtgtgtctttggccgaatgtgccctgtgtgccacaaagcggtttctcgcatggcggcctgtctttggtgagcctctttctgcatctttgcctgggtcatgaggccggttgtcaatcgttttcgcggccgcggatccgctttgggtgtgtgaaggcctggcccacgtgaggagatgcgtcggtcctggagcaattgaaatctcatcctcatcctgagcagcctcttttctagcatcaagatgaaaacactgcagctgaggacaagagccccacaggagctctttgtcccacaggagagcagcggacccacgtcagagaagatgcttgtatcttttcacggctcttctctgagaaatgaagccatagcacgatacagtctgcaagaggaagccgggaatgggagatggcaacaatccctgtcactggatcgctggtttctctggacaagccacgcttttggatcccctccccttatgcctgtggcggtggcaccgtgctgtttcctgcctgggctccggcctctgctctctccttcttcttgctctgtcctgcctctgctctgtcctccctcttgctccttctgctctgtcctccctcttgctctgtctcccctgtcctagatgcctctctctctggccacatgtcttccctgtccatcagggacttcccagtccgtgacttcccagtctgtcagggagacatttcctggagatccctgttatgattgtttctctctccaaacctgtttctgcttgattgggcagatctcgtgaccgtggagctctttgctcccataagtgtctcagacaggaaagcttgcttgttctccatgtttcccttcatgggtgcgtggattgcctagaaggagcgctaggcgaccgtgactggccttgtcttcaagaacaggtagtgtcccatttcctctgcaattcctgtctcattgttgagggacacctctcctctgcttctgggtggactgtctccctggatcttttgcccgtaacgaaagtcagggaaccaaggtgactgggctgggtctggggctggggctggggctgttgctggtgctggggctggggcttggtgcaggggaggttgtgtgagggctacctgggcggtggagctttggccttggggtgaattttgcagaaacctatttgttgctctggcaggaatttcaaattttggatccggtcagtcacaagccgcctcctgtttcccaagtgttctttaatttttcattgctgtgatggaaatgtcacttgaccctcccttccaccgggcacatgcctagacagcatcgtttgtttcgccgtcgccccacattcctctggttacacacattcaagccatctgctgtgggattggtcagtgccacacgtcaacgcatggtctccacctgggattcgcccctgttcctgtttgcacgtgtcctgtaaattgcgattggcttccagagccccagggcttttagaagcccggcaggccagtgttctttaaaaggagaagggaggcagagggctgatggatcagtgaaatttcagctgacagcatgccttgagacccatgggatcattgtgtgctgcagcgaggccctgcctgcctcaccagatgtggtgagcccatcctatctcactcggtgggggccaaaatcagatctgaaggggagtcctgagaacacagcaggcgtcctgaagctccccctccctccctcggtggaagtcggctcaaggagtttctgaggacaggactcctgggggtttggccgtgggacagaagaagacacccgcggtcccctctcccacgccgacccaaactggagcccggatccagccgccgccgcggctgcagcaggagcctccctgccgccgcgctgcggtggcgttatttaaaggggacgcagcctgaccgccaggagcggagcgccagtcgggtgggccaatgcgcatgcgcgaggcgcgagcgccttctcccgtcacagtggttcccacggttgtcttagaaaccagtccccgaggcttggcaaagcaggagcgctccgtggcagtgcttgtgtgtcggggctctgaggctccggcctgacctctcctcggggtcgacgggaaggtctccggatgccaggactcgcaaagggccgaccagaatgaggaaatcccaggcggagtccgggggaggcagcacggcatcccagcctcagggctgcccggacggtgttggttggggtgagtctcgccaaaagtcgtgccgcggtgacctccaggacaggtcggcctgagtacc

SEQ ID NO: 26365 - DNA, 2300 bp, Homo sapien
caggggttgcctgggagtgtgtgtttctgtgccaccgctgtaggactgtgtgtgtgtgtgtgtgtgtgtgtgtgtgtctcccattctctcttctctctctgtctctcaccctctgtgtgtttctttccctctctctgtcggtctctgtgtgtgtgtgtttttctgtgtgtatgcccatgtgcgtgtgtgtctttggacgactgtgctctgttcgccaaaatgcgattttttgaatgttggccagtgtttggtgagcctccttctgcatctctgcctgggtcctgtggccggttgtccatcgttttcacggcggttccactttgggtttgtgaaggccttgatcacttgaggagacgcgtcggtcccagagcaatcaaagtctcatccgcatcctgagcggcttcttttctaggatcaaggggaccacactccagcccaggacaaaatgccacagtagctcattgtccagcaggagaggagcagacccacctccaagaagatggttgtacccttgcacggctcttctctgagcaatgaagccacaccacgatacaattctgaagaggaagccaggaattggagatggtgacaatcactgtccctggaaggctggcctctctggataagtcacgcgtttcgcacccctccccttatgcccgtggtggtggcaaggttctgtaacctgcctgggctctggcctctgctctgtcctccctcttgccctgtctcccctgtttctgaggggcccagttgcctcttggtctggctgaataacttctacgaagatcacttccgagtccatcagggagaaacttcctggagatccttgtcatgactctttctctctccaaacctgtttctgctggattgggcaggtctgatgagcctggaacacttggcttccatacttgtctcagacagggaagcttccttggtctccttgtttcacctcgtgggtgggtggattgcctagaatgagcgctaggcgatcatgactggccttgtcttccaggacagatggtgtccccttacctctgcacgtcctgtctcacaaatgagggacgtcctctcctctgcacataggtagactgacttcctgaatcttttggctgtaatgaatgtcgggaaaccaagggaactgcactgggcctggatggggttggggctgggtgcaggggaggttgcgtcagggctacctgggcggtggaggctttggggtggagtgaatgttgtagaaatctctttgctcctctggtaggcatttcaaaatgtggcttgcactgaggcacaggactcctccttgttcccagatgttctttgattttccttggcactaagggaaaggccacttgttccgcctttccaccggtcacatgcctggagccattgttggtttcgccatcgcaacatatccctccggtgacacaaattcacaccatctactgagggatacgccagtgccacgcgtgatcgcattgtctccacctcggattcgcaccgaccctgtttgcacctgtcctggaaagcggtgtccgcttgcaggagccccagggcttttagaagcggggcacgccactgctctttcaacggaggagggaggcagagggctcacgaataagtgaactttcagctgacatcactccttgagggccatgggatcattctgtgctgcagcgaggccctacctgcgtcaccagatgtgctgagcacatcctttctcacccggaggggtccaaactcggatctgaagaggagcctgagaacccagcagtggctctgaagctccccctccctcagtggaagtcgggtaaaggacttgctgaagactggactcctgcgggtttggccttcggacagtatagttaaggccccctctcccatgccgccccaaactggaccacggatccagccgccgccgcagctgcagcaggagccctgccttcactgagcagcggtggcattatttaaaggggacgcagcctgactaccaggagctgagcgcgagtaggcccagccaatgcgcatgcgcgaggcgcgggcttcttctcccatcacagtggttcccacggttgtcttagaaaccagtctccgaggcttggcaaagcaggagccctccttggcagtgcttgggtgtcggggctctgaggctccggcctgacctcttcacggggtcgacgggatcgtctccggatgccaggagtcccaaagggccgaccaggatgaggaaaccccaggcggagtccgggggaagcagcacggcatcccagcctcaggcctgcccggacggtgatggttggggt

SEQ ID NO: 26366 - DNA, 2300 bp, Homo sapien
tggtttcaaattcctactcctcaaagagattttcttaaataactgaacctaaactgacctttcctctttctccttctttcctacagcctatcctctagtcattccttatcacattctgttttatttttatgccatttttctttgctttcagaagttatcacaccttagaagtccacagaagagtttgtgtatcttgattactatctgtaacagaagctatgcattcttcactcctatctctaaaggctgctctggaaatcacctgcaacttcagttgttgtttctcttatattctaaagagctttctatctcaacatctctcagcctgaggccattctctgagtattattcctagcagacaagaaatgccaggaagttaagggctcaaggtattaggatggtgcaaaattaactgtgggttttgctattaacacaacctttagtccatagataaaatcaggaaattactatgtacacggctccttcattcctcaggtggccaattataaaggtgtgttcgacgtctttcacagtctccagcatgactgaaccctagttgcccacagtagaaaccagcttattcatgtgcacttcattgcctttcatttctctatctattttgttgttaaataaaacaaaatcacacccacttccctgtccccagtgcctgactggactcatcatacatactattgtcctcttccctcctctttgttttcaccattttccttccccactggcttgtcttgtctccactaataatcttctttctataacttccttctctaagccatatgcttttatctctcaccaatgccctggatcactgtcttgaaggtggttatctccacacggcctttttgtctccaagtttcgataactaatactgcccttcatcccttcaggcctagagaaggtaacagttgcagggtacatacagaattatcccttttggtttatctatacactatccacagcttttaatttactcttttattatattctattcaaattaaacaacttaagtgtattgtgcattttccctagtacactgataggtaccatttgtacattcaggttttagtgtatattcaaagagcgattttcctttctttcttcctatgagatttttcacttatttcttgaaattggcttaaagaatacagcatatccaggttttaggagaaaagagactcagccctaaaaacaataatattttgctatgcactaaattcacaagaacaatttttctttatctatttctgcttcttttttaattcctagagaaacaactttttgtctgatatctcctctttcttcagaaaccttatttttgttatagctcaaagtaaagctctcgggcttctcttttggaggcaaaccttctctttggagtagcataaagacatagtactcttatttacttctcttcagttttattttattttattttattttatgaggaattaaatgtatagagtgaaatatacacatattcaaggtataaacccaagtgacacacatcttaatctgaacacaaaacatttctttcacctcataaacttctctcataccgctttccagtcagtattgctgcaacataaggcaactggtgatgtggtttctatcaccataagttagttctgccagttcttgaacttcatataaatgaaaccatagcgcatgtaatctttgggtctagcttctttcactcagtgtagtttttgaaatttgtctgttgctgtgtgtcttgatagtttgttctcttttgttactgaacagtgttgagtaaaagagtcaaactctgtaaaatatttgaagagatttattctgagtgaaatatgagtgaccatggcctatgacacagccctcctcaggagaccctgagaaaatgttcccaaggtggttggggtttaggttgattttatatattttagagtgttgaaacacactaaatatgtcctgagaaggactccatacttctatatttgaatctttgtggacaaactgcaacctaacttaataggtagacaaggttgaaaaacctaacttaggagtatgcacctgtaacaatagctgagtgtaggccaatcccagcaaccatacttcaaccactcttacactactgagtgttcaaactgtgctcaactaaggcaaatgctaagctgtaaccaattcagttgtttctgtacctcacctccaatttctgtacctcatttccctttttatgtctataaatctttcaccacgtggctgtgctgaaatctctctgaatctgctgtgattccagggactgccct

SEQ ID NO: 26367 - DNA, 2300 bp, Homo sapien
gttctccttggcagtgcttgggtgtcgggactccgaggttccggcctgaccgctccacggggtcgacaggaacgtctccagatgccaggagtcgcaaagagccgaccacgacgatgagaccacgggcggagtccaggggaagcagcaaggcatcccagcctcaggcctgcccggacggtgttcgggtgagtctccccaaaagtcgtgcccccgggatctcaaggacaggtcggcttgcgtgcccctgggctgctctctcacccgagggtcgttctcatccagagcagaaccccgcagcctcaggtgttgcctgggggtgtgtgtttctgtgccactgctgtatgactctgtgtgtgtgtgtgtgtgtgtgtgtctcccattctctcttctgtctctgtctctcactctctgtgtgtttctttccctctctctgtccatttgtgtgtgtgtgcccgtgtgcgagtgtgtctttggacgaatgtgccctgtgcgccaaaaagcgatttctcgcatgtcagcctttctttggtgagcctctttctgtgtctctgcctgggtcctgtggctggctgtcaatcgttttcaccctggtaccactttggctgtgtgaaggcttcgaccgcgtgaggagatgcgttggtcccggagcaattgaaatctcatcctcatcctgagcggcctcatttttaggatcaagatgaccacactgcagccaaggacgaaagccccacaggagctcattgttttgcaggagaggagtggacccacgtcagaaatgaggttgtatcttttcccgggtcttctgtgagcaatgaagccacatcacgatagagtcttgaagaggaatccggaaatgggagttggcaatccctgtcactggaacgctggcctctctggacaagccacacttctggcccccctcctcttatgctcgtggaggtggcacggtgctgtatcctgcctgagctctggcctctgccctgccttccctcttgctctgtctcccctgtttctcagccgcctagatgcctcttgctctggctgaatgtcttcaacaaagatcatttccctgtccgtcagggagacacttcctggagatccgtgtcatgattgtgtctctctccaaacctgtttctgcttgattgggcaggtttgatgtccctggagctcttggcttccatgcgtgtctcagacagggaagctaccttggtctccatgtttcacctcatgtgtaggtggattgcctagaagcaacggtaagcgaccgtgaccggccttgtcttctaggacaggcgtggtgaaacatgtcctctgcatctcctgtctcattcttgagggacatcctctcctctgctcctgggtggacggactccctgaatcttttggccgcgtcttagatctgaggtgttctttgattttggttggcattgatggaaaggtcacttgtgctccccttcagccgggcacatgcctggacaccattgcttgttttgccattgccccatatgccctcagtgacacacatccataccatctgctctggtatacgccagtgccacacgtggtcgccttggctccacctgggaatcgcctctgtccctgtttgcacttgtcctggaaagcggtatcagcttgcaggagccccagggcttttaaaagtggggcgggccactgctctttcaatggaggagggaggcagacagctcatgggtcagtgaaatttcagctgacaccatgatttgaggcccatgggaacattctgtgttgcagtgaggccctgcctgccttagcagatgtggtgatcccctcctttctcacccggaggggtccaagatgtgattcaaagaggagtcctgagaccccagcaggcgccctcgagctctccctccatcggtggaagttggctcaagcagggcctgaagacaggactcctgaggtcacccgcggacctctctcccacgccgccctctactgggtcctggatccagctgccgcggaggctgcagcaggagtccccctgccaccgcgcagctgccattgtttcaaggggactccgcctgactgccaggagcggagggcgagtcggcctagccaatgcgcatgcgcgaggcgcgaggcgcgagccgcttctcccatcacagtgattcccacggttgtcttagaaaccagtccaggaggcttggcaaagcaggagccctccgtggcagtacttgggcgtcgggactccgaggctctggcctgacctctccacggggtcgacaggaacgtctctggatgccaagagtcacaaagggcctacc

SEQ ID NO: 26368 - DNA, 2300 bp, Homo sapien
aaatcctgagttcaggcaatccacccacctcagcctcccaaagtgctaggattacatgcttgagccaccgcgcccagcctagcttacagttttattgaaaaccctatttaactcaaaacagcttgtttcttatgaataatagtctttgtttgtttgtttttacaaacggctatgaaatcatcaagatttgtggatcatcaataaaagaaacatcctgataaagtcgagaaacagaatatttaaaaagtttaaaatagaattttgaactgtgacactgttacttcttatttaagaaagacaagctgcggggggaggtggctcacacctgtaatcccaacactttgggaggccgaggtgggtgtatcacgtgagcccaggagttggagaccagcctgggtaatatggtgaaatcttgtctctactaaaaacacaaaaactagcctggcatggtgtgtgcacctgtaattccaggtactcgggaggctgaggcaggagactcgcttcaacctgagaggcggaggatgcaatgagccgagattgcagcaccatgctccagcctggactatagagcaatacttggtctcaaaaaaaaaaaaaaaaaaaaaaaaaggataagcaaaccaattatgatgaaataattgccttacaaaattgcagaaataggccaggcgtggtgactcacgcctgtaatcccagcaatttgggaggccgaggcaggcgcatcacctgaggtcgggagtttgagaccagtctggccaaaatggcgaaaccccgtctctactaaaaatactaagttagccaggcgtggtggcacacacctgtaatcccagctactcgggaggctgaggcaggagaatcatttgagtcccggagacggagcttgcagtgagctgagatcatgccactgcactccagcctggctaacacagcaaaactctgtctcaaaaaaaaaaaaaaaaaaaaaaagaaaaagaaaagaaaagattacagaaatcattgtaaaaccccatagtgctttatacttgctgaaactgtcacaggactcacatgagagacggtaacttcaatagtgatgtaatacattgccactatttcacaatcactcctattgagcaataattcaattcaaagatgcattaatgagatgtcaggtaataccaaagagtagctgattaatcaagtaagtttcctattcagatcaatgaaatcagttactgagagtaaggcctgacaataggacatgtttgttatttcaataatgactgcaaactagaagaagagatattgtttgtaaaatctttagacgctgaccgtaccagagcatctattcttgctgctataaaaacttggtttggggctgggagcagtggctcacgcctgtaatctcagcactatcattttctcacatgaatcggaaaatgccgacgtctgcatcctaaatctaaactaatttcccactcacttgctaagcttcagtcacaccaggctgctttctgtttctggaatgctccaagtgctctctgatttttcagggccttcagtgtaactgtgcctctgcttggaatacccttccacactgatggctcctcaccaccaaagctcgagggttatctctcagacacccgtcctatcaatgctacgggaaagatccctcaagttactgcttataccacctattgatatatttcatagtatttatcacaatataaaattacttcattttccccttttaatttaaaatcttttttttttctccagacaagaatgtaaacctcatgtgggcagcagacatgtctgcttacttttttttgagacggagtctggctctgtcacccaggctggagtgcaacggcgcgatcccggctcactgcaacctctacctcccgggttcaagcgattctgctgtcccagccttccaagaagctgagattacaggcgcccaccaggcccggctaatttttgtatttttagtaggggagcagtcgggctctggactacatttcccggaggattctgcaggccaataccacgtctcgcgagatttcggcttcctcttagccaggtggcagattctttcgctgtgcccaattagctgctgccgcgccttggagtccggagtaacttggccaggctggccccgagcggaactggagaaagctgagggtgaggaatccggctccggtccttttgtgtgtggagggctgaggagaggagtttgcgtgtgtgattgccatggttgccgtgggtcttcgtggtctgtgactgtggctgcgtggtgctgactctgggtgatcaagtgg

SEQ ID NO: 26369 - DNA, 2300 bp, Homo sapien
gggtatagtccacctcgtggctgttttcatggactgatgttgagtgtccatagcttttccaggctcatggtgcaagctgtcagtgaatctaccattctggggtctggaggagagtggccctctcctcacagctccactaggaagttccccagtaaggactctgtagagaggctctgaccccacatttctcttctgcagagccctagcagaggttctccatcagagcaccacccctgcagcaaacttctgcttggatatccagatgttttcaaacatcctctgaaatctaggtggaggtttccaaacctcaattcttgacttctatgcatgtgcaggctgaacacaacgtggaagctgccaaggcttggtgtttgcactctcaaggccatggcctgagttctatgttggcccctttcagccatggctggaggggctgaaacgcagagaaacaaggccctaggctacacacagcacagtgaacctggcccagcccagaaatccattttatcctcctaggccccgggcttgtgatgggaggggctgctgtgatgacctatgacatgtcctgtagacattttccccattgtttttgggattaacattcagcttcttgttacttatgcaaatttctgcagacaccttgaatttatcctcagaaaatgggattttcttctctatcacattgtcaggctgcaaattttccaaaactgtatgctctgcttcctttataaaaccgaaggcctttaacatcacccgagtcacctcttgaatgctttattgcttagaaatttcttccagcagataccctaaattatcactctcaagttcaaagttccacaaatctctaggacagaggcaaaatgctgccattctctttgctaaaacataacgagagttacctttgctccagttcacaacaagttcctcatctccatctgagaccacctcagcctggaccttattgttcaaaacactatcagcatttttgtcaaagtcattcagcaagtctctaggaggttccaaagtttcccacattttccagtgttctactgagccctccaaactgttccaacctctgcctgttaccaagtttcaaagttgcttgcacatttttgggtacttttttaaggagcacctcactccactggtatcaatttactgtattagtctgctttcaccctgctgataaagacatactcaagtctgagaagaaaaagaggtgtaaagaaaaagaactgtaattggatttacagtcccaaatggtgaggggggcctcagaatcatggcaggaggtaaaaggccttcttacatggcagcagcaagagaaaatgaggaggaagccaaagcagaaactcctgataaacccatcatatctcatgagacttattcactatcatgagaatagcacaggaaagactggcctccgtgattcaattacctcaccctgggtccctcccataacatgtgggaattctgggagatagaattcaagctgagatttgggtgtggtcacagccaaaccatatcaccaaatatggagagactgtggatcaacaagatcatctcaaactaatacaggaggtgagagtttaaattagaacaaccactttggaaagcaatttggattatcttataagtttgagcattctcatatgttatggcaaagtaattcctctaccataggccctggagaaactcttgcccatatgtaccagaggtagtaaaaaaaaaaaaacgctcatgtaattccattcataatagcgaatatatggaaacaagccagattttcattaataggagaatgggtaaattaataggataatgggtaaataaattatacccttaaaaactaaataatatatcatttaaggtaatcatatgtatgaaataaacaatgttttttttttaaaggaagagaatcctaaacataaattcagggtagtagttaccctcgggctgaagggtgaaaatcaggaaaaaggacagaggaggagcagatgttagggtcagaaccctggttctttggttgtgttgtaagttcacaagtgattaccatattattcaaatacatttacacagaggcccaggcacagacaaggatgaaataggagccaaggtatgctatgagccaaggattatgagtaatccagttttgtgcactttaagccatttgaaaaacagaaaagcaaaacaacaaaataatttttaagaaattgaatatagggtgttatgctctgaatgtgtccccctaaaattaatcaccaatgtcataagattaggaagtagggctttaaggtagt

SEQ ID NO: 26370 - DNA, 2300 bp, Homo sapien
aagcagcacggcatccgagcctcaggcttgcctggacggtgttggttggggtgagtctcctcaaaagtcgtgccgcagccgtgatctcgaggacaggtcggcctgcatgcccctgggctgctctgtcaaccgagggtcgctttctttgagagcagaaccacgcagcctcatgggttgcctggggttgtgtgtttcaatgcttctgctctaggactctgtgtgtgtgtgtgtgtgtgtgtgtgtgtgtgtcggtgtgtgtctgtgtgtgtgtctcccatgatctcttctctctctgtctctcagtctctgtgtgtttctttccctctctctattggtttgtgtgtgtgtgcccgtctgcttgtgtgtctttggacaaatgtgccctgtgcgccacaaagcggtttctcgcatggcggcctgtctttggtgagcctctttctgggtctctgcctgggttatgaggctggttgtaaattgttttcactgtcgcggaaccgctttgggtgtgtgaagacctggcccacgtgaggagatgcgacggtcccggagcaattgaaatctcatcccaatcctgagtggcctcttttctagcatcaagatgaaaacacagcaaccgaggacaagagcctcacaggagctctttttcccacaggacagcagctgacccaggtgagagaagatgcttgtatcttttcacggcttttgtctgagaaatgaagccacaccacaatacagtctgcaagaggaagctgggaatgggagatggcaacaatcgctgtcattggaacgctggcctctctggacaagccacccttttggaaccccgccccttatgcccattgcggtggcacggtgctgtaccctgcctgggctacagcctctactctgttgtcacactcgctgtgcctcccctgtttctcagaggcctagatggctctcgctctggccaaatttcttcaacaaagatgacttcccagtccgtcagggagacactacctggagatccatgttatgattgtttctctctccaaacgtgtttcagctggattccgcaggtctaatgaccctggagctctgggtgtccatacatgtctcaggcagggaagcttccttcttctccaggtttcctctcatgggtggggctgtggctggggctggggctgggtgcagccgaagttgcttcagggctaccagggcggtggaggtttgggggtggggcgaattttgcagaaacctctttgctcctctgctaggcatttgaaaacgtggcttgggtcaggcacaggcgcccccaccccccgggtcccaggtgttcttagattttccttggcattgatggaaaggtcactcgttccccacttccgccggcacatgcctggacaccaccatttgtttcgccgtcgccccgtatgcctccggtgacacacattcacaccatctgctgtgggatacgccagtgccacgcgtggtcacatggtctgcacctggcattcgccactgttcctgtttgcacgagccctgtaaagcgcggtcggctttccggagccccagggcttttagaagaggggtaggccactgctctttcaaaggaggagggaggcagagggttgaaggatcagtgaatttgcagctgacactaggcctcgagacctatgggatcattctttgctgcagcgaggccctgcctgcctcagcagatgtggcgagcccatcctatctcactcggtgggggccaaaatgggatctgaaggggtgtcctgagaacacagcaggcgtcctgaagctccccctccctccctcggtggaagtcagctcaaggagttcctgaggacaggactcctgggggtttggccctgggacaggacaagacacccgcggtcccctctcccacgctgccccaaactggaggccggatccagccgccgccgcgcctgcagctggagcctcgctgccgccgcgctgcggtggcgttctttaaaggggacccagcctgactgccaggagcagagttcgagtcgggccagccaatgcgcatgcgcgaggcgggagcggcttctcccgtcacagtggttcccacggttgtcttagaaagcagtcctcgaggcatggcaaagtaggagccctccatggcagtgcttgagtgtcggggctctgagtctccggcctgacctctccacgtggtcgacgggaacgtccccagatgccaggattcgcaaagggctgaccaggatggcgaaaccttaggcagagtccggggaaagcagcacggcatcccagcctcaggcctgcccggacggtgt

SEQ ID NO: 26371 - DNA, 2300 bp, Homo sapien
tgttcttgaaagtagttagaatttaaaaaacattactaagagggttttttatttttcatctttggaaagaaacttgggataaatggttgtctttcatctttgtcctcctctctactcacaactccccgttccagatcattagctaaacttgtgtgctgaggttaatattctgttttacctttcttgtcaaattgctagatacaactttgttcagttatatactgtacaaacagcatcttaactttttaatctctctctttttaacaaatgtgttcaccctcagatttgttgtcatttagaagaggacttcctattggaaatataataatttttcttcatgtggaatcttcaatacaaaaaaaaaaaacacgtatcaatggtttgcatgtgtcatgctgatagttggagggcaaatgatattagaaaaagtaacactatatttctgaacataaaccttgtttcatcttagaatttggtgttgaaccaattttgtacctcattgctataaaccttatgtatctaaagagttgttaatatgtgattaactgccttggccaaactcaaaatcttattcacacatacaatacacacagataacttatttttatttgttcgatcactcctttagtccctcatttatttcacaaacattcattgacacttacgtggcagcactcttgtaagaatagaatatggtgatgtcatgctctccctggccgtgtccgagccgcgacgggcgaggggcggacattcgtggcgaatgggacccttcttctcgtcccgcccgcgggggccccttgtctctcctcttcctcgcctgcgggtggtgcgttgggaaggcatggggtgcggaacccggcctgacctcgctgtcccgcccccgccttctgcctcgcggggtgggtcggggggtcctctgacgcggcaggcacccctcgctctcgcctcctgtggttgtcgacttgcgggcggcccccctccgcagcggtgggggtgctgtcccgccggcccgtcgtgctgccctcccggggagtttgcgcgagcgttggctccccctgggcctttgcggtgctcctggagcgctccgggttgtccctcaggttcccgaggccgagcggtggtgtgtcgttcccacccccagcgccccctcctccggtcggcgcctcggtgtccgcgcgtgggtcctgagggagctcgtcggtgtggggttcgaggcggttgagtgagacgagacgcgcccctcccacgcggggaagggcgcccgcctggtccggcgagcgcacgtccggtgctcccctctggcgggtgcgcacgggccctgtgagcgatcgcggtgggcttgggctggtgacgcgtgcgccggccggccgccgaggggctaccgttctgcctccgaccggtcgtgtgtgggtttactcggaggtgctttgcctctgaagaaaagaggcgggtggacggggtgggggggggggtgggaggcgggggcttgtggagttgcgctcacgctcgcacctgccggtccccgccctgaccgcgaacgctcaaggttgccgcacgcaggtttttcctggtaccacaggccccctcccttccccaggcctccctgagcgcctctgcgggcccctcgggccccacgaggggcggctggcgggtggggagtgtgacccatcctcggtgagaaagccttctctagcgatccaagaggtgtgccttggggtacgggatcccccggcctgccgcctctgtctctctctccgttatggtagcgctgcagtagcgactcgcttgcagaggaaccctcctcagcttccccctcgacggggtgacggggggagagcgagggttccgccggccaccgcggtggtggccgagcgcggctcgtcgcctactgtggccggcgcctcccctttccgagtaaggggaggatcccgccggcagggcccagcgtcctagcgggttgggacgcggctgacagcgagcgatggctgcgcgcagcgttccgtccggcgagtgacccccctccgccgcgagtcagctctccgcccgctcccttgccgagtcgcgaccggtgcggacgacggcgtttgcgtggcacgtggtcgggccgcctggccctgggaaagcgtcccacggtgggggcgcgccggtctcccggagcgggaccgggtcggaggatggacgagaatcacgagcgatgtggccctggcgttgagtttgtggctgtggtcgcttcggggccccggtggcgggaccaggggctcgtgaggcaggtcttggtgggtgccgagggccttccggcg

SEQ ID NO: 26372 - DNA, 2300 bp, Homo sapien
tgtgttgatcttttatgacaaaatagatatctctttctttctttcattgttgctttttctgtgggcaagttgatagacattgtagtcctgatgttatttaagggcatacagttgaagttattagatactttagagtttatttaattataatatgaagctttgagtttctgtttcattattaaataatttattttatgatagtgttgcttaacttagtgtgcaaggcctacaaataaacctaataaatatcttacaaactaccttaaaagaaatctaatgtttttcactgaagtatttttaaacatattgaagttggaattccaggtaattgtatacacacacacacacacacacaaaacacacacacacacacatacacacattaggttttcatttggtttctttgttcctattattgaaattactatgctaataaccatatcaatttatgaaactcattttgagaaaaattgcctaaaatataactcatttttaaaattattttctcttaatttataatgtaatattttaataaaatatggtagggcaattttgtataaatatttatgctaagctttctacataagttactgcatatagtctagtttttaatagaaggttttttttttacttcagtatccactttaaagtcattgacatttagtgttttttactttacagttctaagttacttatgcttaaaaagtcatctgacttttaagttaatgtccaacttgattgttatctctctatatcttattgatgtgttcttgaaagtagttagaatttaaaaaacattactaagagggttttttatttttcatctttggaaagaaacttgggataaatggttgtctttcatctttgtcctcctctctactcacaactccccgttccagatcattagctaaacttgtgtgctgaggttaatattctgttttacctttcttgtcaaattgctagatacaactttgttcagttatatactgtacaaacagcatcttaactttttaatctctctctttttaacaaatgtgttcaccctcagatttgttgtcatttagaagaggacttcctattggaaatataataatttttcttcatgtggaatcttcaatacaaaaaaaaaaaacacgtatcaatggtttgcatgtgtcatgctgatagttggagggcaaatgatattagaaaaagtaacactatatttctgaacataaaccttgtttcatcttagaatttggtgttgaaccaattttgtacctcattgctataaaccttatgtatctaaagagttgttaatatgtgattaactgccttggccaaactcaaaatcttattcacacatacaatacacacagataacttatttttatttgttcgatcactcctttagtccctcatttatttcacaaacattcattgacacttacgtggcagcactcttgtaagaatagaatatggtgatgtcatgctctccctggccgtgtccgagccgcgacgggcgaggggcggacattcgtggcgaatgggacccttcttctcgtcccgcccgcgggggccccttgtctctcctcttcctcgcctgcgggtggtgcgttgggaaggcatggggtgcggaacccggcctgacctcgctgtcccgcccccgccttctgcctcgcggggtgggtcggggggtcctctgacgcggcaggcacccctcgctctcgcctcctgtggttgtcgacttgcgggcggcccccctccgcagcggtgggggtgctgtcccgccggcccgtcgtgctgccctcccggggagtttgcgcgagcgttggctccccctgggcctttgcggtgctcctggagcgctccgggttgtccctcaggttcccgaggccgagcggtggtgtgtcgttcccacccccagcgccccctcctccggtcggcgcctcggtgtccgcgcgtgggtcctgagggagctcgtcggtgtggggttcgaggcggttgagtgagacgagacgcgcccctcccacgcggggaagggcgcccgcctggtccggcgagcgcacgtccggtgctcccctctggcgggtgcgcacgggccctgtgagcgatcgcggtgggcttgggctggtgacgcgtgcgccggccggccgccgaggggctaccgttctgcctccgaccggtcgtgtgtgggtttactcggaggtgctttgcctctgaagaaaagaggcgggtggacggggtgggggggggggtgggaggcgggggcttgtggagttgcgctcacgctcgcacctgccggtccccgccctgaccgc

SEQ ID NO: 26373 - DNA, 2300 bp, Homo sapien
ttgggactctccaggagcctctgttttaagaatgaggccaaatgtgcaggctcaggccaagcggcagagatgaatgaggtgatgaccacagccttgatccggcaggagctcagagatgcccgggaagacggggggcccgaacggaagcagaaaaacacttatggccgctgggaagttgggagagcgaggctggggctctggcaggcccagggaaagttccctgtctaggctctttattaaaaaatttaaaaggaggagttgaggcaccttgaatattccttcgcgagtttggagactagccgatttttcatgaagcaagcaaagaccgcggtcccggatcctgcaacttctacctcattttctccaggtacagttttctggtcgtttaattagtttgttttcttggcggtgatgggaatcacaggcgtagagataataagtttgctagagaggaagccaccccacagtttcgggtctaacaaaatccctcctttaaaaacatttgtacccccaataaaaataaaattaaagaggaatatagaagcacaaattagccaacttttttaaaagagaaaaaagaaaagaaaatcatcgtaacaaatgagcgtgagaacttctaaaaaatttgtcacgaaccctttcagaggtctggattcttttccagtagccagtgacacatttggtctgaaaagagaaatacactatccactgagtcacttatttaaagccagcacacacacacacacacacacacacacacacacacacacacacacacacagacacgcattcagaaagctctgggtgccctcacatttgaaaacaacacctggtggaggacgctgcgatacctaattggacaaacagcaataaaataagaccagtggaagtgctgagcacagggcgcagggctagggcccaggttttgtgttcaggcctgcggcgaggcagcggccctgggcgatggggcgccgggcggtcaggcaccggctggcgactccgctaggcctccgaagcccggcctgcagaccctttctcccaacctctgtgcctcgtgggctctctccgctccgacgcctggtcggggcttccctgttgagagggttttaggcagaagggccaaacgactcaagccagactctgctttttcatttttctcccttaggcctctccacttgcccgagctctcagccaccaggagacagacggaaggggcttctggattgcgttgggagcgggcactgtcccctacccactcctgctcagtttcccaaagtccagcgacttccgaccctccttggggggaaaaataccagtacccagacacctttgcaccctgttatatgactgggcttgcttcaggaatatcttacaaagaagaagaagaagaaagaacggcttggagtcatgtttacatctagttctactgatccgttcacatctggagagtttatttataactccctctataactctctgtttggagacactgtggctctattgacagactgatatctaggaaatattgctctatgtctaaccgtacctaaatgtgctgtggttgtatttacagatttatgtttgagggaaatataactatttccattgtatttgtgcatatacagtagttataggagcagatttatatatgggaaaatatacgactctcttacagccatccagctttatgtacatttgatatcctgacagatttatatctctgaacagctatatagataaaaacgtatattgttagaattatgtatcagaagatatatacttattgattgtgaaatagagtagttagagcattcatttagagccatatatggctatggagatattgctatattattatcactatatataggcatatctatttataactacatagttataaaaatacatataagtaattacagtcctatatgtgcatgctgcaatctctctctagagttatagacactttcaaatataactctatagagagatctgtatgcatataaggtgtaattatcttgtgatgtgtttacattgggacttaggcccgtctgtctagaacacacatatttatatgtaggggctgggagagacttgttcatagatatctgcagagggccaactggaaacactgtatctgccctctaggaaaccagctaggagagttgtgtacttacggagggatggagttacaaaaggtaaatagagcttagtgagccttaaggaggggaggtgaatggagggtgggtaggtggtgggctcccccaggcggagacgggggaagcagcaggggctcccag

SEQ ID NO: 26374 - DNA, 2300 bp, Homo sapien
tttcagaattctgcctttgctgaaagtgtttgttccctcctcctctactcatcaagacctgactgcttatgtaactcccccaaaccaccaacacctgggaggagttgaaaatgattttaatgaagaagaaaagctgatgtttaatttcaaaactgacggtgacaatagaagggagaggcatgaatttatcttgattctaacacgaagcattgtatttcagtcaacaaacgaaattggtttcatttttattttttgtaagttttcgccaaactctatgcatatatagaggctgggcaagaaagaaatccagaaatatggcatatgccatcccttatttatttccccatgcgaccagccaacagcttcttcacctagtccctgcttcaagctgactttgtgtctacttctctatcggaaatggagcttccctaaagactgcctcaatgtcagttacccagaggccttttttccatcttgtgctcctaaacttctatgatattaaatgatattaccctttctggaaattctccttagctttgattttataattttactctaactgtttaattccttcttttatagcctttcttttctctatccctttactgcagacatgttgtacggctttgttcttgaccttctgatctctccacattcattccctcagagcatgtatccattttcttggtgtcggccttcctgactatctgattattaccatcatataacgatgttggtgatgagcatagctaacatatcctaggcattttccatgtaggttataataagcactctatataatttgtaccatttaattcttcaaccctaaatgatactattacgaaccacattgtatgagatgaggaaactgagattttcatcaaaaccatggaaagccaacgtgaggagcccctgtgtgtctcctttgttaatgcctctgggcatcatggcatgtggattgccctagaatggggattaggaagcgcagcactgtgaaaacaccagaaaatacgttatgatagcgggtaaggacgctcatctccgcacattgagatggttttatttctgagtcaggtttgaaatgagccaatcctgactccatggtgccaccagggatcacgaatttaataagatctttgtggatgcttggaacccaactggtctctgttttctactttagggaaagagccacagcttgagtggggtggttttggtgtcacatacgctatcaataatacccaccgttttggtgtcacatgtgcgattaataatacccaccgctgcagagggatcaccgtggactactcctcgtttcatcccatgctcttgcgatggatccctctcacctgtttaatgatttcattcaaattcttcagcgaccgcaggaccccgatttgccttctctatcctggttcccatcactctgctttacaggcctggcctgctcgcggctcctcacaccagcactgcgcatctccctccacgcctctgccctgtttcctccatcagacaggactagcttcctccatctctatcgggcaaaagcctgcccagcgttcaagaccctcctcagatgccgcctccaggattaggcttcttcctgacccctgagcctgtaacacgcgccaccataactctccacctccgcccacattcccacagcactcgcgacatccgcgggcctcaacatgtctcttcattccattttagggtatttcctgtttgtttcctgcacacacagtcgcgcgaggcacagccctgagtgacctgcgcgggagtggcccgcgcttcaagatgcgccgccgcaggccggggagggcagcctgagccgcttcccgcccccgcggggaccgtcgccagcccgcatctctagcgagaggaggttccacagcgcgcccggcagccccgccaccgtcagcacctgcgcctcgggcgggctttccccacctctgggaggcacgaatcctcaggggctcctcgagagggcgccagggagcagatgcatgcggacacctttcggccctctgcagccgccgtagctcctccctcacgccccgccccccccccccctcccggcagaaacctggaagtggaaatctcgggcattcaccgtttgggtgaagacggaggcgggttctggacagacgtaggctgtcagggagtgtttacttcgcctccacttctgttcctccctgccctggtgctgctccaggtcacatactcgtcctgagccggcttcagcctgtccgcgcagaagtctcccggagccatggcctagtactcttatgtgaagtctagca

SEQ ID NO: 26375 - DNA, 2300 bp, Homo sapien
tatctttttgtgttttttttttctgaataaaatattcagaggaaatgcttttacagagttcttgagttgttgtgaaattattgtttagctagtagctagtttaaccaggattaaacaagtttaatcaggattcttcatggatgtacttccttggctaactacagtttttcacatggaaatgaaacttacagtacacacttaacgtatcacagaatttttttctggatttcctgtcctgaagcatgaagtgtactagaaaccaattcttcctgcgctacttgtggaatctttcttactggatcataatcttactttactttatacaatagatgcttaatcagtgcctttaataggaagttggaaactccaaatccaatcaacaaggctttgattctgcctcctaagtactacccagatcacagacaatccaaatatcagaactaggggtctgggcagagaggacaaatcatctattagggagtgggacagaaagtggaaacattacaaaggagcaagtaggctcagaacagaggggagagtagtactggggaaactccctacggaggacaggttagccacagtggatatgtatgtgatgcttttgtcctcgtgggctggaatggaagctgataaagaagttcagacgctacgtgttgcttaggtctgcttcgttgaagcctgtctctttcagagttcctaaacacaatattcccatggcatctaatcccagtgagtgctccaaagccaggctgtgtatcagatgccacgggaaattctgcctcaggactgaggttggttcaagcatctggatgatgtcaaaagtccacattgtgtgctggcctaacctgaaagaccctatctagttctagcctttaaattccttctgtcaccaaatctggagttacatggcatctgtacaatctgggtagctgaggcatgggatcagccctttaaaggagattttggagctttcattgtaggtctagcttcaacttggcactcccagttccaatagctggactttctctcatcgtgtgttctgatccttggattgggaaaaaagtaaccactctgatcccacaatgcagtggttccagttcccaactggtgactattttgcctcccaggggacatttttggttttcccaactggaatgtggtgttagagagtagaggctagggatgctgcgaagcatgtggcagaatcctgttccacccagaatgctaacagtgccaaggttatggagccttcccacccaagggcttggtctattccttgcttttgccagctgcctaacccttaaacacaacagttcaaatctatatgcataagcatctcctagggaccctgcacgtttccaatatcgactactgagacccatccgtagagatacaggctaggaagtctaggattgggctcaaaatttgcattttaacaagtactccaggtcattctgaagcaagcgatacaaaccacagaatgaggaacaccgccttcaagagactgagtcttgcttcccaacactagcttggtatctgagaccatctgcctgctgactggcttttctggcacaaacattctgcatgtaggcccagtgtgttcctcgactccatatcaacccgttcaccctcatgttcccttggttcctgtccccagtccagcgagcagaactgattacagatcttgacaacagaaggtacagatttaaaataacttgcctgttcccgtggaatttatccactagtgaaggaggacaagtggacaaggggagagggtaggtgggcgctccttcccttttcctcccattccactttatacaaaccccagctagaccactgggagagcaacggaggttaagaatgactgcctctaaatattgtcatttggtccactcttcttccatcttgtatacaaggatatcatgactttggtttaaagcactactgaaaccaagataaactgtggcttagcattcccccgatggatcagtctagtaatcttatcaaaaccaagattacctaaaagcactaaccaaaggaaaagctccctcaccccaacctatgactgctcacatttttcagattgaatcatttcaattgtattttaagatccattgactctttaccacctccaagctgctcctgaacacaactgattattttaattttgaaaactttctcacttctagaatttccacttgagcctttgttattattgtagtttcttcttctctgctgtgatttcctatccatttattttaagggtttttggggttttgattttagtaagaattacaata

SEQ ID NO: 26376 - DNA, 1012 bp, Homo sapien
gatccaaatgaaatggaatggaatgaaatggaatggaatggaaaggaatggaatggaatggactcaaaagtaatggaatggaatggaatccaaaggagtggaatggactcgaatgtaaagtaatggaacttaatgtaatggactcttctggagtggactcttatggagtgaactagaaaggaattgaatgtaatggattcaaattgaatagaatgaaatggaatggaatcgaatggaatagaatggaattcactcaaatggaaaagattggaaaggacacaaacggaatagaatggactagaattgaatggaatggaatggaatcaaatggaatgcagtggaaagaaatggactccaatacaatggagtgaaatggactctagtgtaatggaatggaattgaacggactcgaatggattggaatgtattggaatggagtggacacgaatgcaatggaatgtaatggaatcaaatggtatgaaatggaaaggaatgcactcgaatggaatggaatggaatggaatggaatggaatggaatggaaagaatggacttgaatggaatgtaatggaatggagttgaatggaatggaatggactcaaatggattcgaacggaatggaatggaatggaatggaatggaatggaatggaatggaatggaatggaatggattggactcgaacggaaaggaggggaatggtctcgaatggaatggaatggaaatgaatggactcaaatggaatggaaagtaacggaatggaatgaactcgaatggaatggaatgtaacggaacgaaatggactcgaaagcaatggaatggaaaggaatggattcaaattgaatggaatggaatggaatggaatggattggaatggacacgaatggaatacaatagaattgaatggacacaaagaatggaatggaatggaagggaatggaagggaatcgaatggaattgaatggaatggactcgaatacaatggaatggaattgaatggtctcgaaatgaatg

SEQ ID NO: 26377 - DNA, 2300 bp, Homo sapien
aaaagttttgtactcgaaaggaatggaatcaaaaggaatggaatccaatggaatggaaacttatgtaaggtattcgaatcgaatgaaatggaatcgaattgaaggggtatgaatggaatggaatggaatggaatcgaatcgaatttaatggaattgaataggaaagaatcaaatggaatggaatcaacccgagtggaatggaatggaatggaaaggaatggaatggaatggaatggaatggaatggaatggaatggaatggactccagtggaaaagactggaatggaacggtttcgaatgaaattgaatcgaatgaaatggaatggaatgcaatggaatcaaatggaatggacttgaatggaatggaatggaatggaatggaatggaatggaatggaatggaaaggaacagaatcaaattgaatcgaatggaatggaagggaatggaattgaatcacatggaattgaacggaatcaaatggaatatcatcaaatggaatggaaaggaaagtaatggaatggaatagaaaggaatgaaatccaatgcaatggcatgaaatggaatggaatcaaatggaaagggaaagaatggaatgaaatggaatggaatggaatggaaaggaaaggaatcatatggattagattcgaaaggaattgaaaggaatggaatggaatggaatggaatggaatcgaatggaatcgaatggaatcgaatgggtggaaattgaatggaatggcttcaaatggaatgggaaaaaatggaattggaaaaaatggaatggaacggaatggaatggaatgctatggaatggactcgaatgtaaaggactggaaaggaatggactcgaattgtaaagacacaaatggaatggaaactattggagtggaatcaaaaagactggaatcgaatggaaagggattgaatggaattgaatggaatggaaaggattggaatagaaaggaatggaatggaatggaatggaatggaatggaatggaatggaatggaatggaatggaatggaatagaatggaatgtgctcgaataaaaagactagaatgcaatggacttgaatggaatggactcgaatggaaaagatttaaaaggaattaacacaaatggaatggattcaaacgaaatgtctcgaaaggaatgctatcgtgtggaatggaatcaaataggatggaattcaatggaatggactgtaactgaatggactcaaaaggaatggactcgaatggagtggactcaaatggaacggaagtgaatggaaaggaatcgaatagaatatactcgaatataaggaagggaatgaaatggacttaagtggaattgacttgaatggaatgaaattgaataaagtggaatggaaatgaatggaaaggaatggaatggaatggaatggactgtaatgcaatggactcgaatgtaaagggctggaatggaaaggactcaaatggaatggaatcgaatggaatggactcaaatgcgtccatttgaggaatcgaatggcatggaatcgaatagaatggaaccgactggaatggaatggaatggaaaggaagggaatggaaagggatctaatgtaatggcatggaatggaatggaatggaatggaatagaattgaatggaatggaatgtactcgaatgtaaaggactggaatggaatggacttgaatggaatggacttgaatggaaaggattttaatgcagtggactagaatggaatggattcaaatcgaatggtattgaatggaatgctatacagtgtaatggaatcaaatgggatagaatcaaatggactgcactgtaatagaatggattcgaaaggaatggactcgaatggaatggactccagtggagttggaaaggaatgtaatgtaatggaatggaatgaactcgaatgttaaggactggaatggagtggactggaatggaattgactcgaatggaacgcaatcaaatggaatggaatggaaaggaatggaatggaaaggaatggaatggaatggactgtaatggaatggaatagaaaggattgtactacaatggaatggactcgaatagaatggaatcaaatggaatggattcgaatataatggaatggaatggaatggaatgatacggaatgaaatggaatggactcaaaaggaatggactggaataacatggactcgaacgtaatggactcaaaaaaaatggaattaaatgaaaagaaatcgaatgcaatggaattgaatgcaatggactggaatggaatagacttgaatagaatgcaatcaaatagaatggaaacgaata

SEQ ID NO: 26378 - DNA, 2300 bp, Homo sapien
aatggaatagaatggaatggaatcgagttcaatggaatccaatatactgcaatggaattgaatggaatagaatggaatggaagggaatggaatggaatggaatcaaaaggaagggaacgaatggaatggagtggaatggaatggaatggaatataatggaatggaacggaatgcaatggaatggaatttaaccgaatggaatggaatagaatgggattgactgtaatggaatgaatggaatggaatgcactcgaatgtaaaggaagggaatggaagggaatggaatggaacagactctaatataatggaagaaaagtgaatggaatggaatgcaatggactgtaatggaaggaatggaattgaatggactcgaacgtaattgactgaaatggaatggaatcgaatggaatgaattgaaatggaatagaatggaaaggacaaaagtggaatggaaaggaatggactgtaatggaaggaatggaatggaatgcacacgaatgtaactggaatggaatggaatcaaatggaatggacaggaatggaattaaatggaatggaatggaatggattggaatggaatgaaatggaatggaatggaatggaatagaaaggaatggaatggaatgggattgaatggaatggaatggaatggaatagaaaagaatggaatggaatgggattgaatggaatggaatggaatagactggaatggaacggaacggaatggaatggaattcaattgaatggaaaggaatggagtgaactgtaatggaaggaatggaatggaatgcactcgaatgtcattgactggaatggaatggactcgtatggaatggactggaattgaatggaatggaatggacagtaatggaagaaattgaatggaatggactcaaacggaaaggactcaaacggagtggactcgaattgaaaggatgtgaatggaatggactcgattattgtggattcgaatgcaatggactcgaatggaatgcaatcaaaaggaacagattcgaatggaatggaatagaaaggaatggacacgaatggaatggagtagaatagaatagactcaaatggaatggactggaatggaatggaatcaaatggaatggaatggaatcgaatggaacggcatggaattgaatgtgatggaatcgaatggattgaaatcaaatggaatggactggaatggaatggaatcgaatggaaaggactcaaatgcaatggactcgaatggaatggaatcacatgggatggaatcgaatagaatggaatgcagtggaacggagtcaaaaggaatggactcgaatggaaggaactcgataggaatggaatggattggaatgggatagaatgtaatggactctaatgtaatgaactggaatgaaatggacttcagtggaatggactcgaatggaatgcaatggaatggaatggactctgtttgaatggacatgaatggaatgcaatcgaaaggaatgaaattgaagtgtaaggaatcaaatggaatggacaggagtggaatgcactggaatgtaatggactcgaatggaatgaactggaatgatatggactccaatggaatggactcgaaaggaattgaatagaatgcagtgaaatagaatgcattggaatggaatcgaatggaatggagtccaatacagtggaatcgaatggaatggaatcgaatggaatggagtcgaaagtaatggactggaatggaacggtcttgaatggaatggaatcaaattgaatggaacctaatgtatcggactcgaaaggaatggactggaatggaatggaatcaaatggaattgactcaaatggaacggaattgaatggaatggaatcgaaaggaaaggaatggaatggaattgaatcgaatcgaaaggaatggagtggaatggaatagaattgaattgaatggaatggaatggaaacaaatggaatgtaatcgaacagaatggaatggaaaggaatgcaatggaatcgaaaggaaagaaatcaaatggaatggaattgaatggaatggagtcaaatggaatgtattctaatggaatggaatcaaatggcatgtgatggaatggaatggaatcgaaaggaatggaatggaatgcaatgcattcaaattgaaagggatcaaatgaaatggaaagaatggaatttaatcgaactgaatggaatagaatggtatcgaatggattcgaatggcttgtggtgaaatggattggaatgggttggaatggaatgggttggaaatgaattgaatgtagtgtagtggagtggagtggatggag

SEQ ID NO: 26379 - DNA, 2300 bp, Homo sapien
tgccacgtttcttggacaactcagtgtacaatttgagatttactgagccatgaatgggctcttggcagctccatttatttgcttcttattacattgtattccactacactccattcctttccactccactccattccactccactccattcctttcctgtccaatcaattcgattcctttccactccattccattaaattccattctattccattttatttcattccgttccattgcataccatgccattccatttgattccattttattgcattccattccattcgagaccgttcaactccagtccattccattctagtccattcctctccaatccattccatttgattccattgcattcgattccattccattctattccattctcttcaattccattcccttcgattccattacactgcattcaattccatgccattcgattccatgtcattcgattccattccattcgagaccattccattccagtccattccattcgagtccattgcattccagtccattccattcaattccattccattcgaatttgttccatttgatttcattacattctatcttattccatttgattacattccattcaaacccattctattcgatttgattcgattccattcctttccatgcgagaccattccattggattccattccattcgattcttttccattcgaatccattccattcgattccattccaatcgagaccgttccattccagtccattaccttcgagtccattccattccagtccattcaattctattccatttcgttcaattccattacattcgattccattacattcgatttcatttcattgcattccattcaattccattcaaatccattccattttattccattccaagagaccattccattccagtccattccattcgattcaattgcattgcagtccattccattcaattccattcgatttcatttcattcaattccattctattcgattccattccattagattccattccattgcaatcctttccattccattcgattgcgttttattcgaacccattctattcgattccattatattagtttcaaattcctttcttttgtttccattacacccgattccattccattcaaatccattccattcaagtccattccattacattccattgcattctgttccattccattgcattccattggattgcattccattcaagttaattccattccattccattccattccattccattccattccattcgaatcctttccattccattccattccattcgagtccattcccttcgagtttgttcctttcaagtccattccattacagtccattccattcgattccatcccatttgaatccatacccctcggttgtattcctttcaagtccattccattcgaatctattctgttcgagtccattccactcgaatacattccatttcaggccattctactcgagtccatttcattccagtgtatagcattcaattccattccattcgagtccattccattccattccatttaattgaattccattccattcgtttcaattccattccacaaggttcaattccattcgattcaattctattcgattccattccattcgagtcttttcaatttgagtccttaccattccattcctttaaattcgagtccattcctattccattccattctattcaattccataccattctattccattgcatttcattcgattccattccattccattccttttgattacatgccattcgaatccaatacattccattcgattgccttccattcgagtctattccattggagtacatttcattcgagtcaattccattctagtccattccaatcgattccattcctttccattacatacgtacggttccattccagtccattacattcgagtccattcaatttgattccattaagttcgactccattccattccattcaattccattccattcgattgctttccattcgagtccattcaattggagtccgtttcattcgagtccattccattctagtccattccaatcgattcctttccattcgattccattccattcgattgcattccgttcgagtcgattccatttgattccattacattcgagtcaatacaattccgctccattgcattcgagtccattccattccattctattccattgcattccattcaattccatttgattccattccattcaattccattccattcgattccattccattccattccattcgataccattcc

SEQ ID NO: 26380 - DNA, 2300 bp, Homo sapien
aaaatctaataagtaaacagcaatggaaagttcaggtatatttcttaatggatatggactgcatttatcccttgacaagagtggctggctgtgggcagtggaccagggactcgcgggacaccatggactacatggactacacccacctagcttctcccctgtgatgagtccttccgcttcaggccttttttttttttttttttttacagcccttctccattcccaccaccaccactaccgtctcagatatgagatcaggctctgtgaattgggttaggggtaatccagattttcctgcttttctgtagcaagagcgaaaaaaggtgtttctcaagttcttcagtttagaaagggtcagggatctctgcacttatcaggacatgtagagaaaccattcataaaattaagaacatagatttgtatgcttagaaggaactagaaaagacattctttattctatatagaaatccatcctatttaatcacttagaccctgcttgaaaaatgagttatagagtaccccctccctctctgggaaacaattccatagtaagagagttctgcctgttagaacatactaatctaaaattaatttggaggccaggtgcagtggcccatgcctgtaattccagcactttgggaggccaaggagggaggaccacttgaacccaggagtttgagactagcctgggcaacatagtaagacctgtctctcccaaaaaaatttttttaaatattcgggcatggtggtgaatacctgggcagtcccagctactcaggaggctgaggtgggaggattgcttgagctcaggagcttgaggctgcaatgagctgtgatcgcaccactgcaccctagcctgggctacagagcgagatcctgtctcaaaaaaataaaaacataaaacaaaattaatttgaaaatagcccaccaccatgctacgctttccacatggttccatccagaagagaagtctcctcaatcacatggcaaccctgctaattcccatcaattattctcacagtgaaagttatcaattccagaagagaaaaatcagcaacctcctctgtaaaagctttacagagacttttagagccgagtaaacaagagggagcaaaagttgaaacacgatgaaaatgcaactaaagcaatgcaggacctaggctgactctgggggtgacatcgaggttccacatcccaaaggcaagtctaaatgttggggtcttcatggacagctcccagacctctgatgaccctcatggtgccgttgtcaaaggtaacatcccaaattattgtagatctgtcttcagcagggatttttttttttttttttgagacagagtctcactctgttgcccaggctggagtgcagtggtgcgatctcagctcactgcaacttccacctcctgggtttaagcgattctcctgactcagcctcctgagtagcttggattacaggcacccaccaccacacccagctagggaattttttttttaatgacattgggtagcatccccctttgagtcttataaatgatctccctcaaacttctgcagcaagtgacttcttgggcaagtcattttccctgttgggcacatatgtaagagagggatttggcttatagattgacatgtgttcattatcgtttatttccacaaaccttcactgagagcatgcttcgtgccttgggggctcaaaaatgaaagacacgttccctactctcaggaatttcacaggctggtgcggggagacacacagataagtagaccattcaaaagtaggtttatgctagagtgagaggggctgtgaagaagggctgagccctaatgagagatcggggaaagctagggaagatgtcccagtgtgaatcttccctctccattgctccaaacacctcctcaaaacctgtgacttgtaaccctctgcatgccctcccagtgcctggatcaaatgctcagcttatgtgccacacactagactgatgttatgcatggataagctcttagatatccggctggttctgtgcccatccctctgcccccactgcagagaggccaataaaactcttgttcagactcacactgcacacagtattctgaactcctggatctaccacctcctgcttcccaaggaccatgaaactcctgctgctggctcttcctatgcttgtgctcctaccccaagtgatcccaggtaatcagaggtcagggaagatacaaaaatagaggtatagtgggttctggctcatgaaaattccaatgtgtcacggtactccccaacatgggcagctccacagttccca

SEQ ID NO: 26381 - DNA, 2300 bp, Homo sapien
aaagtaagctatatttatttgtctacagatatttattaaatattatttaatatttaatgtcaggtatgttagagattgctagaactccaccccccatgtatctctttcccttcttaataagacaacccctatattttagctagaaatggttgcctagaataaggaaaatatttccagcctcccttgcagctgcgcatgatggtctaaatgagctctgggaggtggacaggattggaagcaaagggtgcaacttattattcttattttttggagggacggtgtctcaccctgttgcctaggctggagtgcagtggtacgatctcagctcactgcaacttccacctcctgggttcaagccattctcctgcctcaggctcctgagtagctgggattacggtgctcaccaccacgtctggctaatttttttttttttttttgtatttttagtagagacgaggtttcatcagtttggccaggctggtcttgaactcctacctcaaatgatccaccgaccttggcctcccaatgtgctgggatcacaggtgtgagccactgtgccaagccgaggggtgaaacttctgagtggtgtccttaaagggaaaggtgttgcatttcacttccatcactcctcctttcctgatggctggatgggaacttgacggtgggaactggagcagctcagggtcatcacatgatgcagcctcttgaggatggcagagcatcaagccaaaaggaacctagatccctgctgaatggtgaagctgtcacacttaactgcatacccagacttttacataaaaaagaaatccatgtctgtcttttggaatcattcttatttggggggaatatcagttaaaacagttgaataagtatcttaatacaccaggtgatgttatgggtactggggttataagccaggtttctgacattctaagtggagagacaaaaatcaaacatgtaaaataaaatttaaaagaatagatacatatatgaagatcataaaccaagttattacagtccagagtgactgtgggttggagttaccgttatctaaggtggccagggaaagtctctccaaggaggtgacatttgggatgatatggaatgatgagcaggagattttcatgggaagatttggagaaagagctttacagggagaacagatgacaactgctaaggccctgaactggaaacaagattggcaagttcaaagttctgaaagacattacacatgtgtatccttctgttagaaagctgagacacatgtgtatccttctgttagaaagctgagaataagtaattctcgtttaatttattttttaaaatttttttatttttattttcgagatggagttttgctctgtcacctaggctggagtgcaatagcgtgatctcagctcactgcaacctctgcctcccaggttcaagcaattctcctgcctcaacctccctagtagctgggattacaggcacctggctaatttttgtatttttagtagagacggggtttcaccatgttggccaggctggtctcgaactcctgaccttgtgatctccctgtcttcgcctcccaaagtgctgggattacaggtgtgagccaccacacctggcctgtttaatttagtttttaagatttaaatatcttttaaacatttataggaaaaaatatattttaaaacagaacataatcatggagaacaatattgtcaccaaacatgacaagacagttaatataataacagcactgaagagctcttgcaaatcagcaagtacccaacaacaccccaatagaattgtccagatatctgactaaataattcaaaaggaagaaacaaagagacaaatacatgtgttgaataaatgttcttactatttatcagagaagtgcaaagtaatttttaagttaaatatttcttgatatgtatttattatgcattaattaattcctttgtgggtctcacaggccaaatggctttaattgacctgtccctttactggcattggtactggccagtttcccacactctcatcttgtgctttgctgagacatctgctacacactgtcctttggcctggatgacctcatataaatcccctcctgttctaattcactgcccacagccctgctgataaaagcaaagctcatctctgccgtgctgcagggaaccctatttccttcccctgcagctcagccacctcctcctctcaggtctgccagccatgaaacttctttacctgtttcttgccatccttctggccatagaagaaccagtgatatcaggtaacgtgaacctctctcg

SEQ ID NO: 26382 - DNA, 2300 bp, Homo sapien
tgtgtgtgtagagatggagtctcgttatgttgctgaggctggtttcaaactcttggcttcaagcaatcctcctgccttagcctcccgaattgtggggattacaggcaggagcctctgctcctggcttgttgttttcttccatgttagaaagaagatattcctcttattagtatgtctttatttctgtccattttgaaatgatagacctaggccaggtgcagtggctcacgcctgtaatcccagcactttgggaggctgaggcgggtggatcacctgaggtcaggagtttgagacaagccatggccaacatggtgaaacctcgtctctaccaaaaatacaaaaattagctgggtgtggtggcgcgtgcctgtagtcctagctactcggggggctaaggcaggagaactgcttgaacccggggggcagaggttgcaatgagctgagatggtgccacggcactccagcctgggcaacagagcaagactctgtcttaaagaaaaaagaaaaagaaaagaaagatagaccttaccattattgtcctaaaaagcacttggctctttcctgatctatctgctggccttgtgtataagttagccattactatgtaatgttccactccaaaactcagtggcttaaaacatcaatcctttatatttggctagattgccctgcttgaggctggaatgcctggggcagctctgtttctcactgtagatctgtgagtcgcctggagtagctgtgccccacgtatctctcatcctccttggaccactggggcatgttcttctcatagtgatggcagagacacagaagggcaaatgaaaatattcatcatctcttaaaacctaggcttacaaccggcacaccgtcacttctgcccacatatcactagccaaagcaaatcacatgccaaggccaaagtgaagggaaaatgaaatagagttctcctaggatgagaccttggcaaatgtgtgaattcaagtagggatgaagaagtagggccaagattacaatctaccatttctttctttcttttttgagacagagtctcgctctgttgcccaggctggagtgcagtggcacaatctcggctcactgcaacctccgcctcccggattcaagctagtctcctgcttcagcctcctgaatagctgggactacagtggccagccaccacgcccggctaattttttgtatttttttttgtagagacggggtttcactgagttagccaggatggtctcgatctcctgaacttgtgatccgcctgcctcggcctcccaagttgctggggcaatctaccatttcttataagaaagaccaagctgggcatgatggctcatgcctttaatcctagcactttgggaggccaaagcaggagaattgcttgagaccaggaattcgaggttccagtgagctatgattgtgccactgcactccagcctgggtgacagaacaagactgtctcaaaaaaataagtaataataaaaaaaagaccacaacaataataaatggcttttcttttgctacctatgagggtgctacttgttcctattaaatatgtactgttaaaagtaagggctatggctttcctgctcattccactccatgaatactgacattctggtttccagtggtgatggccatggagctattaaggtattttcccctgctctgcccttcatttggtattataatgaatcatcaacatatgggacatcctaagatgtccttgttgctgggaagaacccaaggcgcagagaagtatcactccttttctgtcttatctctttttctctctctttttttctcattaatgaaaaacaaattagagatgaaaatatttttccccttcttggttctccagctgtattataaaattcttcagaggcaaggccgtatcttctctttgttaacgtcccttccccctctcccagcctcctcaggcagtgtggttgataccttccttgcctgcctgtctgatctcaaatgactgttcccgttctggttcactgatcttggctctgccatgctcctcaaggcaataaataccagtctggactgcccagaatggagtcctctgtctgttttaccagttgagaagcctcctatccctccctgatcattcatcattcatgaagctccttcttctgcttttgactgttactctgctcctggcccaggtcaccccaggtaaacaggatctccagaaggggatgggagtcaggaaacctgatgcatgttcagagaactctggggactctgacaggttgggctgggagaatggcctggtagagctc

SEQ ID NO: 26383 - DNA, 2300 bp, Homo sapien
cagaaactttctgctcattgattagtaattcctaatttccctcactccccagctcctgacaatcatcatgccactctttgttgatataagtttgactgttttagacacttcgtataactggaataattcagcatttgtctttccgtgactggtttatttcacttagcataacgccctcaaggctcattcacgtcatcacatgttgcagaattcccttatttttaaaggctgactagtattctgctgtgtgtatacaccacattttctttatccattcatttgttgatggacatttagcttgtttccatatcttggctatggtcaataatgccaatgaacgtgggtgtgcagatatctcttcaagatactgattcagtttatttggatatatatccagaaatggaatggctgggtcatataatctctttctttccttcctttccttcctttgccttcctttccttcctttcctccccttccccttccttcctttcttccttcctttctctctttccttctttctttctttcttccttttgatggagtttcactcttattgcccaggctggagggcaatggcatgatctcagctcactgcaacctctgcctcccaggttcaagcaattctcctgcctcagcctcctgagtagctgggattacaggcatgtgccaccacggccagttaattttgtatttttagttgaggcagggtttctccatattggtcaggctggtctcgaactcctgacctcaggtaatctgcctgcctcagcctcccaaagtgctggaattacaggcgtgagccaccttaccccgcctatctttcattttttgaagaacctccataccgttttccatagtggccacaccattttacattcccacccagcgtgtgcaagggttccattttctccacagccttgcccacaattgtcttttgttgtttggataattctggctttctgcattctaagcccattgtaggattgtacttttggccctcttgtggttggatggagccatgtcactgtcgtagccagtggagttatgaggtggttacattttacttccaaggccagggcatataatggctagttgaagactctctagagctctcttttcctctgccatggtgatcagcaccaaatgagtggctactcagtcagcttgggttccacactgagatatggggcagtgtccccagccagccttcagtggatatgcagcatgtatgggaaatagacaaacagacctctgttcttagaagccaccaagattcttctttttttggttactgtggcataccctggtttatcctaacagagctggctgttagaggacagtatccttactgctctgaattcctggtgctcaggagagtgctctgtatgtaaaaggtacttaatcaagatttgatttatttagaaaacatttcttgtgtgtgcttttgagggatatgaagctcatttaaaaatacttgtttcccattttcctcaataagcggtaagcatgttagggacagaaaccctcttgaacatttctggcctcatctccccgcacctttgtccttagtccacaggaaacttaaaatggcctgggtagctttggatgtggagtagttaaaggcccttgaggagggatgagaagctgatctgacaagaagagagcagtggttcattcctggacaagaagacaaatgaacaattgagggaaagagcagcttctggaaagatttggtaacagtaaagataagaggccagtgaagagatcttgggagggacaaggagagctgggaaaagggataagcttggaaacatgttctgataaaaagccaggcatttcctctgttatctttcaccagtgcccgaacagagttacatcgtatacactctggacacaaaggagagctgtccttgagcctcgactctgggtgagccctctgggtcttagatttgagatgcaattttcaaacttgaagatcacggtgagcagagagatctctgagctactgccaatcctaatgtcccttgtattgagcgttgactgtgttgacaatgaaaagccagaagagcctcaaggaggaaagaggtcaatagccaaatgtttcaagaagtcaaggaaggtgaggattcatagtaaataacagtaactaccagttgtcagaggctttcctctatgccaggcactattccctgagctttacaagcatcacctaatttaatcttcacagcaaacctctgctgtcagtagtatcatctccatattagagataattaaactgaagttcagagagattaact

SEQ ID NO: 26384 - DNA, 2300 bp, Homo sapien
ttgttctttccccatttctgaggaaagaaaaatccaccataggctatttaggcaaggaaattcttaatgcattctcttgcctctttttggacactgagtttacctctgagcaatgaaaaagaaacaaaatgtattgagtgtcccatcccatctaaccccatctacaactacagccaattaagtcactggaaagaaggcatttgtgttgcatctttaaaatcttgaataaatattgaaaaaagatacattaagagttaatgttgagtgatgctacaaagcaggcccctatcatgctctggacaacacagaaacccctaaggctgaatatccctgtggtctggacagcatcaagattctatgaaaccaactggaaggagagattctgggctaccgatgggaatggtactgagggaccatctacactttgtccagaagcatatccagactggagtacctttatctgggtctccaccacatcctagttgaaggtgctggtgttgtcaaaggtagaatctgccagtggccaaacatgaactgggggaaggtgtgacaacccctgtagcacctaagatgacaataaacccaaaggactcactgataggtaggctggcctttgccacaaacatgggagatagctcctgagactcctcttatggtatcctgaggcttcctgttcaggataccacagaagacccctaccatttgttctggacattgcattctgggcaaaagtgaaaagacaaggatagccatttgttgagaaactaggtccttgatcctatgaaactctgggattatcattataaaaaaagagcttcttgtcaatttgataggtgaaaaatatagcttgatgtcactttaattcgttgttgttgtttttaattcctgatgagatttggccctaaggagttttggtccaccatgaacaggttgtgatgtctgacatgtgcccagaggtacacagacagaacaaggtcttccctgctctttcatcagtagctaatggatctcatgtccaaaacagcctgctgtgatgagaccccttcaagggctctagggagaatattaagcttttataataatcagagtaaagttttgtgctttgactatacaagaagcaggcccaaagagggactgtgttttgcagggaccatatagcatatcaggtgtaggtatcaggggaagaggcctctgaccccagtgtgtaaagagaattggagtctgataagggcagccctgagaatcctaaggtgtaaacccaatgagtgttgcctaggctggggctgaaaacctagagttccaggcattccattttccatgccttttcacacccaaagaatcatagtatatgaggattgagttaatccctacagcccatctgctccaatctgctcattggtgagattaaagcccagagaagggaagtgactctcccaaggtcacacagccactaactggcacagccaggacaacaagctgaatatttcagcttgtcttttctcaccctccatgccaaaatgcttcctgaaactgaggattttaggtactcgggctttctttcttaggaaataatccaatagacacattctccctaaaatatgaatgatcgtcctttcttctttactcctctgctctcaaactgggaattgcatttgaaaaaaggagcttgcttcatttacattagaaccatgataatggtggatttctaaaccagagaatatagggctttgcagggcatagtaaagattgtggattttttttttctagttgtggagtcttggaggatttttaagctgtattataacaagggctgacatacatttttaaaagtatccttctgggtgttgtatgatttatttttgctggtccctaaaagatgatggtggacaaagggaggcgtgcgagctcaggggtgtggggtccacactctgggtgcaggggtgttgggatggtgactgagcatgaaaaaaaaaggcaggttgtcccagagcaaactgtacccatgggcagatagtggcacgtgtgagtgacacacttcccagctgattagaggcagcagagagtcctgagctcgcctccatttcctgccacttcaccagagccgagactactctgtgggctacttgaagtcatgaagacttttttggtaactttggctgtgctgctgctcttcctccaagtcattccagataacctagacctctctaggggagggactgggagtagacagtgagtcttggtcagggcacaccagggcctgggaggatgggctgacagggagcagtgtgaaatattaattg

SEQ ID NO: 26385 - DNA, 2300 bp, Homo sapien
aatttaaaccacaaaataaataagagctcagaatctagtggcaccataaacatctagaaacagggagaaatgtggaagagttaaaataaggaggtttggttgaaatagtgtttaagaatcaatccttagatactctattccttctccttttcatgcaggcagccatcactctatacctatcatactatactaccccaatcctgaaaaaaaaaaagacttaacggcttttgtagcaagggtaaaacagaggctctctgaacctggggattccaagcatcactgaagataaacttagtaagcagaaaatgggaggattagctgaagcatgtatattggttgctgagaaactatttagcccccaggcttcattctccacttagctctcagaattcccagcaggagattagcagagaagcagaaaagatcctaaaaaaactgacactggcatttctccactaaatggcccagtcaaatcacctcactgtcaatgtcacaattggtaagccccgttcgtgtgcttaatcagcattttagtctctcactcttaaaaattaacaaatatcagccaggtgcagtggctcatgcctataattccagcattttgggaggccgaggccagcagattacttgaggtgaggagtttgagaccagtctggccaccatggcaaaaccctgtctctactaaatatacaaaaattagctgggcataatggcagacacctataatttcagctactcaagaggctgaggcaggagaatcacttgaacccaggagaaggaggttgcagtgagcaccactgcactccagcctgggtgacagagcgacactgtcttaaaaagcaaagcaaaacaaaacaaaacaaacaaacaaacaaaggaaccacaaatgttgccattaaagtatctattatgaaaattagataccaaaaccaaacagaacaaaatcattcattgagtttctaataagctttgcagtgaaacacttttatatataagtacataattaagaatcattagtcatatgatcattgatgagaggcaaacatctaatgtaaaacagatcaaccatccaaccaaccaacaaacaagttataggaaatagattatgcagacaggaaaacattattaaaagcctcgcgagaaattagagatgctactacaaccatgaaacaagaataggatactacaaaaaggaaaagttagggaataaataagaactcttagaaataaaaaatataatagcagaaaatggaaaagaaagattaatagaaaagctggaagacaaatttgattaaaatttttgagaaactagaggaaaaaagccaaatggatggaaatcaggagagaaaatacataaaattagagaatcagtgcagagagcccaatatctggaaaataagaattctagaaacagggaacaaaaaaatacaaagaggaggaagatattactaaaaattatttgaatatagacaaaaatacgaatagacagtccacaaaaaaaggtaaaaaagggcgttaaacatatgaaaagatgttcagtttcactcataataagaatttaaaaaaaatttgtcgtgggttgaattgtgtctttcccaaaatatatgttctagtcctaacaccaagtgcctgtgaatgtgacttatctggaaataggatatttgcagatgtaatgaagttaagatgaagtcatgttggataagggtgagctctaatccagtggctggtgtccttataagaaaaaagaaatttcagctgggcgcagtggctcatgcctgtaatccctgcactttgggaggccgaggctggtggatcatttgaggtcaggagtctgagaccagcctggccaacagcgtgaaaccctatctctactaaaaatacaaaaattagctgggtgtggtggtaggtgcctgtaatcccagctacttgggaggctgagacaggagaattgtttgaactcgggaggtggaggttgcagtgagctgacatctcaccactgcactacagcctgggcaacacagtgagaccctgtctcaaaaaaaaaaaaaagaaaaaaaaaaaaagagaaatttggacagagacacacagggagaatgctgtatgaccacagaggcagagattggagttacgccactacaagccaatgatcatttagcaatcaccatggactaggagagaagcatggaacagattttccctctgtgccctaaagaggaagcaacactgccaacactttgattttggacttctgacctccagaactgtgagagaaaataatttttattactttaagccactca

SEQ ID NO: 26386 - DNA, 2300 bp, Homo sapien
caagattccaactctctctctatatatatatatatatatatttttttttcttggcaatttgattggagaaatgatacctcactgtcatctgaatttgtttgtccttgattcctggtgaggttgagaagtaggcccttctgactcaccatgaacaggccatgatgtctgaggtgtgcctggtgtctgatgtctgaggtgtgcctggaggtgcacatataagtctccctctgctcccttgacatctcccttatcccctgcccattgtggatacacagctactccagagtcctcaggaggactacaaaggcttcaaaacaagagcaaaattgctacattgactatgcaaggagcaggcccagagatggacaatgattttgcaagacccacacagtgtacttgggagttggggtcaagagaaaagacctgtgatataagtggttcagagacttgggggctgataagggcaggctagagaatccttatctgaaaacccaattaccttgccctgttttggtgttgaaaacctggattgctgcattcttttactttctgtgtcttttatatagaaaaccatataatatgatggatatattgatccctactgcacatctgccccaaatccttaattgaagagattgagacccagaaaaaaaaaaaaagtaattcttccaaggtcacatagaaagctagtagcagtgtcaggactagttacccaatattttcaactctgctgtcactctcaatacaaaaatcctccatatatcctggcatttcaggcagtgggaaaatctcttcttttagggagaaaagaatccaacagatacattatttctccaggcctgggcaacagagcaagaccctgtatccaaaacaacaacaaaaacaaaaagataaaaaatagtttttaaaattaagaaaaaaaaagaaatgaaatgagcctccttaccaaaaatgaacagcacaggaaaggtggacttccaggctttccactgagtcccttcctagccagtgtctcttcttctcttcattgtaagggttttagaaagaattatttacacttgctgacctcactgtttcacttacctttcagttttcaaccccattgactgttttctgcccctacagaaatggctttcactgttgttgttgttgttgttgtttttcccttgtaatccctctgtatgctattatacccttgacatctgtttcaagcagggtccagtcagagaaacagtaactacaggatgcagctaccacccgagggctgagggaactaaaggaaagagatgccttttcttttcttttctgagacagagtcttgctctgtcgcccagtcgggagtgcagtggcgcgatctcggctcaccacagcctccccaggttcaagcgattatcttgcctcagcctcccaagtagctgggattataggcatgcaccaccacacctggctactttttgtatttgtagtagagatggggtttcaccatgttggccaggctggtctcgaactcctgacctcaagtgatccacccaccttggcctcccaaactgctgggattacaggcgtgagccaccgtgcccggccaagaatgagttttcaaaacccgagttcagaagaaggattctgagtggttggttctcagatctctgaggaagcggaaggatgaccctagggggagggccaccgcatgttagaacccagcagggggctgtgacagacaggctggtgctcggagcttcatctctttctgccgttttcctctcagtttttgctctggttatgtcatatttctcattttcaacaccaacatgagcctttgtacagacattcctccacctggaaccccatttcagctcatctacctgttgctttgtatttattcttcaaaactctgccgtcttccctgaccttccggagccggtgtttgtggcgcctcctgctggtcactgggttcaggcagtttggagctgggtggaaggaacgggtagtatattaagtcttgggccctggaccttgttggctgtcctctccctgctgacctaaatgacaaagggaggggtgtccagtcagagtgtgagggctgtacccgtgggcagctgagggagtgcgagccacaggccaggcactctccttctcccattagctcagccgtggcatcggacttgcagcttcattttgggctgccttagccatgaagctccttttgctgactttgactgtgctgctgctcttatcccagctgactccaggtaacctgaacctccttaaggaaggggcagggcttagagactaaggcctgg

SEQ ID NO: 26387 - DNA, 2300 bp, Homo sapien
cgtgggaactggtcagccacaccctccggagcctgttgagctcggaaggggaggtagaattttctgaggcagtgtctagggtcagaaactagacatcttccccacctaagagagtggaaaaaatcttggcttaagagagacctagttcaatcccccgcatctccccctaactgctgtgagacatcagacaagtcacttaacctctctgagcctcaggctgttgtctatgaaatgatgacaagcatcccttacaaggccaagtgaacagcatgtatgcaggcctactctaaaatgggaagagtaatagtacccatgtcatagagagtaatagctacccatctcatttaggggactaaatgaagtaatacagtggctcctatactatggttcccccagcaagcagcagcaacacctgggacttgttagaaacaccagttctttagccctaccccaaacctactgaattcacctcttcctaagcagaagaaggccacaggtcacagagcagcccatgggtcacaggttaaaccactggttacaagttagaccacagattcactaacactggtcacaagttagctctctggtcatttgttagatcactagtcatagatgagagtatgggtgggtcccggcaaaatgtggcttaacaagccctccaagtgattctaacacaccgccaaagtttgagaacccctgagataatatccgtgcagagcttagaacagtgtctggtacacaggaatctaagttgcatcatgaaagatgagtaggggaaaaggtatcccgggcagaaagaatagaatgtgcctagaagagtagggcatgagccaagcaagggttttcctgggaggagaggttgaaatgattctgcagagaataggttggggcttgaatgccaagttcagacttttgtattatagacaaccaaaagttttttagcaagagtgtaagctgttcatattatagttttaaataaagaaactgaaacccaaagagggaagttgacttgcctaaggtcacacagcaattgtgctgcagagatggaaaagccaagtcacctcactcccagacaatgaagggtgctgcaccactcatggcccatcttgcaagttagaaaggtaagcttagagggccaagccacggaaggaagccaggcacgagggggttctgtatcagctccaagacctgtgggggctgagccagtctgttcagctgctgtgggagttattccaagctgaacacctgaatcccctcagccatgacaatgagccccacccacaggtgcagcctggtctccatgggctccacacacagacacaccccaatttctcaagacctaaagggaggcagcccagtcaaagagtctggatcctggccccttggatggccgacgtcaccagcaatctctttcctcctcctccatacctgggagcattttttttttcagccatcagtaatagaaacagtagacagagtggcagagacctcaggcccaggcccagctaagcctcagttggtgaatgaatgaatgatgccaaaataagattttcataattcttcagtgcagacttcctgagctctctcttcctccaagccacctcccaaaattaattcttcatccagagcagagtttcttaaagtgaggtcagtgaaccgcctgcatcaggatcacttggggcacttgtttaaaacgcagattcccgaacccctcccccagcaccgtggaatccgcctctcttggaaggcgggacctgaaaatttagcaagttccccaagtggtttttctgggggctaatatgttagtgcatccccttgatggagtggacagatgtggacgcagatggagctccagacccaggaatccagagcccccatccttcctttctcgtctgccaccctcacccggtgcgtagggctggcagaagcgggtcagctgagctctgcactttcagaaaagtcactgagcggccagggccttggggcggggaccccggggctgccctaatggggcggggctggatggggcggggtcgcggctcctcccccggccgaggcggcgaggggaggggaactggcctgaggggctgctcactgaggcgggtggtacagcctggagcatccagccgctggagctgcgagggaccctggacccctcccacgccgaggtaaagccctgcgctacgcgccgccaacttgctcaagttggagcagagttcgccaggcgattgaagggggattcggcagcgttggcaggaataggggggcttcgaaaccgcgtccctagggtgagggtcttc

SEQ ID NO: 26388 - DNA, 2300 bp, Homo sapien
aaaattagccgagcgtggtggcgggtgcgtgtagtcctagctactcgggaggctgaggcaggagaatggcgtgaacccggaagctggaggttgcagtgagccgaaatcgtgccactgcactccagcctgggtgacatagcaagactccatctcaaaaaaaaaaataaaaaataaataaaataaaataaaataggcactcttgcgggaggtggcagctcatgcctataattgcagaactttgggaggccgaagtgggcagattgcttgagcccaggagtttgagaccagcctgggcaacatgccgaaaccccatctctactaaaaacacaaaaagttagccgggcgtggtggcacacacctgtggtcccagctactggggaggctgaggtgggagaatcacccaagcccagaaggtagaggctgcagtgagctgtgatcatgccactgcactccagcctgggtgacagagtgagaccctgtctcaaaataataataataataataataataataggccctccttgaagttttttgtttgcacagtcacacagtgatgcttagatgttccagtatctaatatagccacagtaggctgcaagcagtggctcatacctgtaatcccaacactttaggaggctgaggcaggaggatcacttgaacctaggagtttgagaccagcctggccaacatggcaaaaccccatgtctaagaaaatatatatttttaacttttttaacaatatcaaaaataagaatcacataaataaacagattcttcaaattctgaaaagagccacaaagctttataaattgtacaggggcatgaactcgtaaggtattataattgcctggcacatagtaggctctcaatacatttgcaaactccacacacaccttactttcttttgctttatttttctctatttatctgcattaacatgctatgtaacacataactatacattaacgttttacaaattacaaatttttcttgttttttttttttttttttttgagacagagtctcactctgtcgcccaggctggagtgcagtgggctcactgcaacctccgcctcccaggttcaagccagtctcctgcctcagcctcccaagtagctgggattgtaggcgcccgccaccacgcccggctaattttttatatttttagtacagacggggtttcaccgtgttagccaggatggtctcgatctcctgacctcgcaatctgcccacctcggcctcccaaagtgctgggattacaggcgtgagccaccgcgcctggcctttttttttttttttttttttttttttttcagacggagtttcgctcttgttgcccaggctggagtgcaatggctcagtcttggctcactgcaacctccgcctcccgggttcaggcgattctcctgcctcagcctcccgagtagctgggattacaggtgcgtgccaccacgcccggctaattgtttgtatttttagtgcagacggggtttcaccatattggtcaggctggtctcgaactcgtgacgtcaggtgatccacccgcctcggcctcctagagtgctgggattacaggcgtgagccactgcgcccagcccattttacagacttttattttgttcagtttctttattgtcttcccaacgtccccccacacacactgcactaaaatgcaaacttcacgaaggcaaggaggaacttttgcctgtattgttcacctcagtgtccccagagcctaggtcagttgttggcatattgagggacattcaataaatatttaaggagtgaataaacaattggatacccaataaatgcatgtatgaataaacacattcttagttattcggaatatgaggatttgcggagagtggacagcaggggattgaggagaccggctgggactgggaaatgggcattcgggtcgcatgcccaccgcagtggcccagagcccctgtccggaccgctaacaagttgcttagcaacccgccgcccggccctcggccaccgctagagggcgagcgggcggggagacgtgcacgcgcgcgcgcgtgcgtgcaagcgtgtgtgcgcgcgtgcgcggcgcgggcttgggagggagcacgtcacttcctgttgccttaggggaacgtggctttccctgcagagccggtgtctccgcctgcgtccctgctgcagcaaccggagctggagtcggatcccgaacgcaccctcgccatggactcggccctcagcgatccgcataacggcagtgccgaggcaggcggccccaccaacagcactacgcggccgccttccacgcc

SEQ ID NO: 26389 - DNA, 2300 bp, Homo sapien
ttagagttgtgaaaaagactacagaagttgatcaagccgggtgacagagtaagaccctgtatcattattattttattttgaaacagagtcccactctgtcgcccaggctggagtgcagtggcataatctcggctcactacaacctccgcctcctgggttccagcgagtctcctgcctcagcctcctgagtagctggggtattacaggtgcgcgccaccacacctggctaatttttcatttttagtagagacgggatttcaccatgttggtcaggctggtctcgaactcctgacctcgtgatctgcccaccacggcctcccaaagtgctgggattacaggcgtgagccactgcgcccggccccctgtatccttttttttttttttttttttgagacgagtctcactctgtcgccaggcttgagtgcagtggtgcgatctcggctcactgcaacctccgcctcccaggttcaagcaattctcctgtctcagcctcccgagtagctgggattacaggcgaacgctaccatgcccggctaatttttgtatttttagtagagatggggtttcaccatattggtcaggctggtctcgaactcctgacctcaggcaatccacccgcctcggccttccaaattgttgggattacaggcgtgagccaccgcgcagcccttcattttttaaaataagaaataaatgaaaaaagatgatcaagacaaactcttcatacagtgcccgctgtacaaagtaagaaattaataatggtcacgtttgtgattattatttaaacaccaagcagatattaaatattagggctcagagagggcatgcgacccgcctgaattcactcagctgcagagctggaaagagaactcaggcctttttccccacgctggaaggggtagctggggcggagaggtggggggagcggtgaagaaaccccaagcggcccaagctgtgggtctgggttgggagactcgcaggtgtggggcggggaggtaaggtgacccttgctcagcgaccgcgcccgcaagaaacgcattcccaggcctcccgcccggggtctgcaggtgacgggctggggggagcacgggaactagctagaccagtttgtcgtctccatggcgaccgcccgcgcggcgccagcctgacagtccgtccgggttttatgaatgggtgacgtcacaggcctggcgtctaacggtctgagccgctggttcagacgctgacacagaccggcccgggaagggaggggggagactgtagctccgcagctgccgcgccgtgggagggagaccctgctctgaggtctttgagaagaaaatttaaaaagcagccaaaaatgggaaaaaacattaaaaaatcacgaactgttgcaggttcaggaaatttttgcaaggagctgcaaattcaaggtggaatcgaatgcagcctcactccactgcgctctatctagttcacttcccagccacccagccccaaacttactagactttcccgaattaattgctcccacccgggagggatctgggtaggccctccgggtctcaggaacacgaacagcaacattatttaggaattgagaaagcccaggggagcagatgtaaaggagcgcccgctttaaatttcggtcctgatatttgtagatcagggtccgagaagcatcttccaagagggtccggaaacccaggctctctgggctatccagagccagccgcttctccgttcgggcctcaatttctctcatctgtgaaatggagctggagaagtgagaaagtgaatatgggaaaaactgattcctgaggtcttttcattataaggcaatgcctgcttagcttccttgcctccttccagaggagcccagtgcggccctcgcctctacccgctgccctgcccggtgccctgccaccgacccacccttgctgttctgaaacccgggtcgtctttccacactgcgagcaggcactagacgagcaggaggctggacctaggagcgcgggtcacgcccccatgccgcccattggctgcttttgaacgttctgagcccgcccctccgggggccgtggcgtgtttataaaagacaagctgtggctccgcactctcattccacgttcttaactgttccattttccgtatctgcttcgggcttccacctcatttttttcgctttgcccattctgtttcagccagtcgccaagaatcatgaaagtcgccagtggcagcaccgccaccgccgccgcgggccccagctgcgcgctgaaggccggcaagacagcgagcggtgcgggcgaggtggtgcgctg

SEQ ID NO: 26390 - DNA, 2300 bp, Homo sapien
gttcagttgtttttttttttttttttgagacggagtctcgttctgtcgcccaggctggagtgcaatggtgcaatcttggctcactgcaacctccacctcccgggttcaagcgattctcctgcctcagcctcccaagtagctgggactacaggtgcatgccaccacgcctggctaattttttgtatttttggtagagatggggtttcaccgtgttagccaggctggtctcgatctcctgatcttgtgatccacctgccttgacctcccaaagtgctgggattacagcgtgagccactgcacctggcctgtctcttctgttttttgaacatgctgtgttttcctgcctctgggtctttgcacaggccttttcctctgcctagaacagaattgtaagccctgtgggggcaggaactatgtctggttttttttggctctatagcccccaacatttatcctggtaaacaagtatgcaataaatgccagctgaaacaggtctttataagttttttttaagtttttttttttttttttttttttttgaggagtctcactctaccacccaggctggagtgcagtggtgcgatcttggctcactgcaacgtctgcctcccaggttcaagcgattatctagcctcagcctcccgagtagctggaattataggtgtcccctgccacactcggctaatttttgtatttttagtagagacgggatttcaccacgttggccagggtggtctcaaactcttgacgttaggtgatctgctcgcctccgcctcccagagtgctgggattgcaggcatgagccaccacgcccagttttataagtaattcttgaataaatgtgcctgagccttgtctattttttttttttttttttttgagatggagtctcgctctgtcactaggctcgagtgcagtggcatgatcttggctcaccgcaacctctgccttgcgggttcaagccattctcctgcctcagcctcctgagtagctgggaccacaggcgcctgccaccatgcctggctaattttgtttgcatttttagtagagacggggtttcgctgtgttagccaggatggtctccatctcctgacctcatgatctgccccccttggcctcccaaagtgctgggaattttttttttctttttctttttctttttttctgagacagagtcttgttctgttgcccaggctggagtgcagtggcccgatctcggctcactgcaacagccgcttcccaggttcaagtgattctcctgcctcagccctctgtgaagctgggactataggtgcgcgccaccacgccctgctaactttttttttttttttttttttttttgagatggagtctagctctgctgcccaggctagagtgcagtagccggatctcgactcaccgcaacctccgcctcccgggttcaagcgattctcctgcctcagcctcctgagtagctgggattacaggtgcgtgccaccacgcccagctaatttttgtattcttagtaaagatggggtttcaccatgttggctaagctgtctcaaactcctgacctcgtgatttgcctgccttggcctcccaaagcgctgagattacaggcatgagccaccgcgcccgcccaatttttctatttttaatagagaaggtgtttcgccatgctgggcaggctggtctcaaactcctgacctcaggtgatcctcccgcctcggcctcccaaagtgctaggattacaggcgtgagccactgctggcctaaaagatgcttctggagtaggaggcattgggcctggctggaaggtttgcgtctgcaaaggcctgaagagaacatcccaggtgggagaaacagcaaggaggggaggtgtggaggaggcagggagaccctgttcttgggactactgtctgcagagggtctccagaggcaggaccccggtagggacactgatgcaggaggcgctctgcagtgcctccccccaatctgtgggccggggtgcccccagggacgcaggctgtgcgctcccacgccctgccgaagcaggacgttcccacgctggggcggccccgagaaaggctgtggggcgggccgggggcgggcgcccgcactcaggtccctccgcagcgggttctcagttgctcgctgggcagacccaggtcgcgctcccactgccgagcccgcgaggtgagtgagttgggggaggaccccgccacccaagcccgcgcgggtcaggggcgcggctcggtctcctgccttcgccgctgggtcacgccccagtggtccctgtcttagagggttggggggcttct

SEQ ID NO: 26391 - DNA, 2300 bp, Homo sapien
tggtggtgtgtacctgtagtcccagatactagggaggctgaggcaggacaatcacttgaacctggcgggcagagtttacagtgagccaagatagcaccactgcactccagcctgtgcaacagagcaagactccatctcgaacaaacaacaataacaaaaaaaaaaaaaaaaatgaggaaagagttcaacagaaagaccacctgaaaaaggggtaaacaatatgaagaaaattcaccaatacaagatccaccaccctccaaagaaagactaaaaaatatgacaaattgctcaacttcattcataataaaaaaagaaatatgaaagtgccttcggtttttacccatctaattggcaaggataaaacatttgataacacactgtgtggttcagggtgtaaggaaattggcggggcgcggtggctcacgcctgtaaacgattctcctgtaagcgagtctgctgcctcagcctcccgagtagctgggattacaggcatgcgccaccacgcccagctaattttttgtatttttagtagagacggggtttcaccacattggccacgctggtcttgaactcctaacctcaggtgatccgcccgcctcggcctcccaaagtgctgggattacgggcgtgagccaccgcgcccggcctgtcctatggagtttacaattaataactctcttaatcatcacaatagctcaacgagagaggttggtactattacccattttacaattgaggacattgaagcacagagcagttgagaaacttgcctaactagcagagttagaatccagacaaagtgcttaaccacaaggcgatgcttcttctatatataaactgacggacggatgaaataggctgattgactgatgagtgactgactgactgactgaatgaataaatggaaatgtgattataaatgttgattttttgcgcctcccgattccccagatctaccgcgagggggcgatctctccccggtcctgatgccagtcactcaaggcgcgcactccctttgcgtctcgggctcgcgcgcgttgccgcggcaccggaagtgactgagcttgcaagttcccctgtctcttcaggggaaactgaggccggcttgttcgggagagacggcgcgagcagtcagccaggtaggccggcagccaggtaggccggcccgggtccgcggcgcggaactcggccgcgaagagctcttgcgtctggaagctaccgggccgatgaagggggatgtggccccccacggctcgcggggctcgcaggtgagagcgccgcctcccctgtgcgtgacagccgttgcgcccaataggagccttcgccgtcccgcttccgtgccggctgggctcgctgattggctgcgctggggcggaccgccgggggcgaggcccctcctctcaggaaggtctagggggcgcccccgggggagggcggttgcctagcaacggggcggtggctcggcgggtacccggcctagtgagctcgagaagccgctaggccgcagccggcccaccctgggctccggagaggtgcagcccccggccccggagccctcccgggggcgccagaaagccactttgggcctgtccccaggaaaacgtggtctcagctgtggggccgtcgagcaggcctcgacccctcttcctgacctgaggagaggcccagcgcctcaccctcacccagtctttgtgcagggcgccggcggccattgtgtccgggcggggaatggaggacccggcaatccccaactgccacgttctgggcctttggggaattcagagcaaaccagcggcatttgttgggggtctccggccttcaacatcacagacaggcctgggggtggccttcccaaagtcagattgcagatctgaggcagtttccccctccctgcgtccctcactgaaaccttgaaccccattgagaagtccctttagggtttcggacgcctccacctcaccctgggctggtgcttaaatagaaaaaagaaaaacaaaaaccaactaaatccataccagccacctccgggagagtactcctggctcccagtaggaggcggagagccaaggggcgtgcaagagagagggggctgggctcccgggtggcaggaggccgcggctgcggagcggccgccctcgatccgggcgatggaggaggaagcaagcgagggggctggttcctgagcttcgcaattcctgtgtcgccttctgggctcccagcctgccgggtcgcatgatccctccggccggagctggtttttttgccagccaccgcgaggccggctgagttaccggcatccc

SEQ ID NO: 26392 - DNA, 2300 bp, Homo sapien
tcccctcagccatcccaatttatttccaggacaccatgggctctcacgctgggctgccaggccttcgctcaagcaatatcttctgcttaaaatgctcctacatcctttctcacccaagcaaaattctattcttttgagggccagttcagtaaagcccctatctgtggacagagtttatctgccctctgctgggctcccaaagcacactgaggcttccataatgatagttttcacattgagataattgtggcaccataggttcaaaaatgtaaatcagaccgggcgcgctggctcacacctgtaatcccagcactttgggaggccaaggtgggcggatcacgaggtcaggagttcgagactagcctgaccaactggtgaaaccccgtctctactaaaaatacaaaaattagccgggcgtggtggcaggtgcctgtaatcccagctactcaggaggctgaggcaggagaatcacttgaacccaggaggcgaaggctgcagtgagccgagatcgcaccaccgcactccagcttgggtgacagagcaagactccatctcgaaaaacagcaaaaaaaatgtaaatcagagccaggtgtggtggctaatgcctgtaattccaggactttgggaggccgacatagacagatcacttgagcccaggagtttgagaccagcctgggcaacatggggaaactccattctctacaaaaaatacaaaaattagctgggtgtggaggtgcgagcctgtattcacaactactggggaggctgaggtgggaggatcacctgggatggggaggtcgaggctgctgtgagctgagatcacaccattgcactgcaggctgggtgacataccctgtctcaaaaaaaaaaaaaaaaaaaaggccgggcacggtggctcatgtctgtaatcccagcactttgggaggctgaggcagtcggatcacctgaggtcagcagtttgagaccagcctggccaaaatggtgaaaccctgtctctactaaaaatacaaaaattagccgggcgtggtggtgtgtacctgtagtcccagatactagggaggctgaggcaggacaatcacttgaacctggcgggcagagtttacagtgagccaagatagcaccactgcactccagcctgtgcaacagagcaagactccatctcgaacaaacaacaataacaaaaaaaaaaaaaaaaatgaggaaagagttcaacagaaagaccacctgaaaaaggggtaaacaatatgaagaaaattcaccaatacaagatccaccaccctccaaagaaagactaaaaaatatgacaaattgctcaacttcattcataataaaaaaagaaatatgaaagtgccttcggtttttacccatctaattggcaaggataaaacatttgataacacactgtgtggttcagggtgtaaggaaattggcggggcgcggtggctcacgcctgtaaacgattctcctgtaagcgagtctgctgcctcagcctcccgagtagctgggattacaggcatgcgccaccacgcccagctaattttttgtatttttagtagagacggggtttcaccacattggccacgctggtcttgaactcctaacctcaggtgatccgcccgcctcggcctcccaaagtgctgggattacgggcgtgagccaccgcgcccggcctgtcctatggagtttacaattaataactctcttaatcatcacaatagctcaacgagagaggttggtactattacccattttacaattgaggacattgaagcacagagcagttgagaaacttgcctaactagcagagttagaatccagacaaagtgcttaaccacaaggcgatgcttcttctatatataaactgacggacggatgaaataggctgattgactgatgagtgactgactgactgactgaatgaataaatggaaatgtgattataaatgttgattttttgcgcctcccgattccccagatctaccgcgagggggcgatctctccccggtcctgatgccagtcactcaaggcgcgcactccctttgcgtctcgggctcgcgcgcgttgccgcggcaccggaagtgactgagcttgcaagttcccctgtctcttcaggggaaactgaggccggcttgttcgggagagacggcgcgagcagtcagccaggtaggccggcagccaggtaggccggcccgggtccgcggcgcggaactcggccgcgaagagctcttgcgtctggaagctaccgggccgatgaagggggatgtggccccccacggctcgcggggctcgcaggtgagagc

SEQ ID NO: 26393 - DNA, 2300 bp, Homo sapien
cactccagcctgggtgacagcaagaccctatctcaaaataacaaaacaaccaccacaacaactaccactcccccatccctttgtttttgaggtagagtcttgctctgtcgcccaggctggagtgcaatggcaccatcttggctcactgcaacctctgcctcctgggtttaagtgattctcctgcctcagccttccaagtagcaccaggcaaccaccccattttaattgtggaaaatttcaaactcatacaagagtatatgtatgtatttatgtatcatgaacccatcaccaggttcaacaattatcaatttgtagctaatcttgtttcatctaaatccccacctacttatcttcactgcctactcccaattatttggaagccagtgccagagtaatttcatccctaccgtatctatatgtatctctacaacacaaggactcttaaaaaagaaaacaaaaggtgtggtggctcacacctgtagtcccagcacttgggagggtgaggcgggggcatcacccgaggtcaggtgttcgagactagcctggtcaacatggtgaaaccccgtctctatcaaaaaatataaaaattagccgggtgtggtggcgcatttttaatcccgggtacttgggaggctgaggcaggagaaaccgggaggcggaggttgcagtgagctgagatcacaccgttgcactccagcctgggctacaagaacgaaactccgtctcaaaaaacaaaatgaaacaaaacaacaacaacaaaaagaaaacaaaaccaaactctggcagtttatgttttgaaggaactaaattgtcctgtggttttcctgtctggattttgccgattgcacccccatgggtgtgaattaactgaaccatactttaaaaattactataatttcatgttaatatgtacaaaatctgtacataaatcccccaatctttttcaaaattcaagatgccagtacttgtactcttccataggaactttagaattaacttggcaaattccagaacagaacccactgggactttcattggaattgccttgacctttttttttttgttttgagacagagtctcgctctgttgcccaggctggagtgcagtggtgcaatcttggctcactgcaacctccgcctcctgggttcaagtgattctcctgcctcaacctcccaagtagctgtgattacaggcacgcgcgagcacgcccggctaatttttgtatttttagtagagatgggggggggtttcaacattttggccaggctggtctcgaactcatcgcctcaagtgatctgcctgtctcggcctcccaaagtgctgggattacatgcgtgagctaccgcacccagcctaggcttaatttttgaatctttagcttttgctggtattatgaagggggttgttttgttgttcttgttgctgctattttctaattgattaaaaaaaattaagatggtgggggtggtctcgttatgatgtctacgctgttctggaactcttggtctcaagggatccttctgctttagcctcctgtggagctgggattataggtgagcgccacgaagcccggcctctaattaattatcggtggtgtataaaaagaacagaccttcttaattcgaatcccatcttctccatttattatgtgattttggacatgtttgttcaacttctcctagactttgttttctttttacgacatggggatcataaagccgggatgcagttgggaataaaaccggataaagctcccaacgaaccgcgggtttcataagatcagggcagggactgggtaaaaggtttcaaagactcctgcactattgggaaggacgctacgggcgagtctatgttgcatgcaggcgactccatgttaagacgaagtgaactccctgaaccttcaagggataatgcacaaccataacgagaataatttttaaaaatagagttttcttccctgaaaacttggagaggtccaggatgcgcgccattctgtgatctaggttgactctccacctcttcagttggtaccacctttcccaaatagtttggagcagagcactccggtctttgtaataacgtactcctaagagctgttccagtggactcacgcaggcgcaggagactacacttcccaggaactccgggccgcgttgttcgctggtacctccttctgacttccggtattgctgcggtctgtagggccaatcgggagcctggaattgctttcccggcgctctgattggtgcattcgactaggctgcctgggttcaaaatttcaacgatactgaatgagtccc

SEQ ID NO: 26394 - DNA, 2300 bp, Homo sapien
ccactgtgcctggccccactttaacagtttgaaatgatcttctttatccccattgaaattctgtgctctgaaacctactttgcctgatattaatatagccactctagttttcttttgattggttttagcatggtatgtctatatttaaagtgcatttttttgtagacagcatataattgggtcttgctttattatttaatattattgttgctgcattttaattggaataaatgcatctattttagccttgacatgctatgctattattttgtgtgtgcgtgtgagtctctctgccccaaaaatatttctttaggagatgaaccaaatgattgttctctgaaatgaataatgcctaaactatgttttcatggcctatcttttcttccctgtcatcttgttgcagtttaattcctttatcaggagtcagttcatatgctatgtgattaagtgctgtttcttccatgaagcctttacttgtttcttattctgttttgtttttttgtttttgtttttttttttgcagacagggtctcagtgtgtcaccccatctatagagcagtggcatgatcacagctccctgcagccttgacctcctgggctcaagtgatcctcttgcctcagcctcctgagtaactgggactacaggcacattccaccatgtctggctaactttctcagtgttcccataacactttttttctatttcgttaaaaatgtttatcaaggctgggcttgtagttcatgcctgtaatcccagtactttgggaggccaaaatgagaggattgattgaggccaggagtttgagaccagcctgggcaatatactgagacccccatctctatttatataatattgaaaagcaaaaaaaaaaaaaaaaaacgtttatcaaaataaaacatggccatggtaacatggctaacaatacttagagtttatgttaaaataacccctttctcttcccatccctaccccctgtcctttttctcaaactcatattggttttgttgttgttgttgttgtttgtttttatattttgttttacaggtgggatctcactgtgttgcccaagctggtctcaaaatcctgggctcaagtgatcttcctgcctccgtcttcccagtagctgttttaactcactattttaacttgtgctgtggttacattcataatgcctgatagtatgattatatcagcagtatttacaatgttatgattatataaatattgttcaatgccagatcaataactgtgatgcagttgcatcccttcttggtactctttggctatctttggttgtattgtcacaacccctgagccacataaagatgattctgacatcaggagatcagtggatttgcttttctttaaactttatcaatttcttaaatttctgccacactttatcttgcttcatattggacaatgatccttggaagttattactacttttttgggagagcattattatttttactatctttgctgccttgtttcctggaccttataactttcttctggatatactccttcattatgtgggagtgcatcctcaggaaactttcttaaattagtgcaggagagaaaaactttgagttctcacatatttgaaaatggcattgtttcacttttatatacaattgaaagtttatcttaatacagcattatagattgcaaattattttttatcactactctaaagacattgttcctttatcttctatttttatgtattgctgatgaaaaattcagtgcttatctaattttccttactttgtaagtgattttttttcttctttatggaagctttcagaattttatctttaccagtgtcctgaaatgtcatgagattgtgtttgggatgctttttttaaaggtagtaccttaggctggcaaataggcaagccctggatacatcatttctgtttcaaccaaagtagcttttataaactggtcttctgtataagatttaactggaactaaggtttctgtggcttagacagggtgtgtgtgtgtgtgtgtgtgtgtgtgtgtgtgtgtgtgtgtctcatctccaattattttccttggcctttgagtgctgactagcttttggtcttccgcagttgacaacacttactacaaagaggcagaaaaagaaaatcttgtggaacaatccattccgtcaaatgcttgttcttccctggaagttgaggcagccatatcaagaaaaactccagcccagcctcagaggtaagactttggaatctcaaagtggtggttatgataataatgttcaaaggatagttactggacagaacat

SEQ ID NO: 26395 - DNA, 2300 bp, Homo sapien
catctctgtttacagacctgttaccctccaaatcttctgtgaccaagatttgcagagacccacagactcctgtactgcaaaccaaacaccgtgcacgggctgtgacctgcaaaagtacagcagagctggaggctgaggagctcgagaaattgcaacagtaagtcccactggcagtatctgaggaagagttccacgaacctgcctactttattttcagttctgttagggtgacagttgctatttttctttccgtaaaaatttatggcatttgagtagtaggctctgcaggctacgcccctgcctatatgatttaaggactatagtgggaatatggagatgttctggagtataaactggtaaaaattgaatccaggctgggtgtggtggttcacacctgtaatcccagtaccttgggaggccgaggcaagaggatcacttgagtccaggagtttgagaccagcctgggcaacatggtgaaaccccatctctacaacaaataccaaaaaaaaattagctgggcatggtggcatgcgtctgtagtcccacctactagggggcagcctgaacccaggaggtcaatgcttcagtgagccaagatcacgccaatatactccagcttgggtgacaaagcgagactgtcttgcacatacacacatacacacacacacacacacacacacacacacacacacacacacaaaatctaatccagaggttgcagtagaagaacttacttaggatttcaattaaggaatgccctctaaggttaagttaggtagatcccacccttttgtgactccccaagggattgttacagctattattagtggagggaaatggaaacttagtgtgattcgtagcattggagtttatttcctgtatccttcttccattcctttttgtgcttcttttgaggagggggagcttcttctgtgaagtgaagcctcaattcttaagtggtagggatgttaggactgtctgatttattctttcttcttttattcttttattattttttatttatttattttttttgagatggagtttcgctcttgttgctcaggctggagtgcagtggtgcctctaagctcactgcaacctccgcctcctgggttcaagagattctcctgcctcagcctccctagtagctgggattacaggtgtgcaccaccacgcccagctaatttttgtatttttagtagagatggggtttcactgtgttggccaggctggtcttgaactcctgacctcaaattatctgctcaccttggcttcccaaagtgctgggattacgggcatgagccaccgtgcctggcccattgtttttcgtttttatttattttattctgttgtccagtcaatgggagcataatcttaatgattactattctttgtggttggcttactttgtttgtgaagttttcattttattaaaattttttttgtggttatttaaattttcaccttacagatacaaattcaaagcacgtgaacttgatcccagaatacttgaaggtgggcccatcttgcccaagaaaccacctgtgaaaccacccaccgagcctattggctttgatttggaaattgagaaaagaatccaggagcgagaatcaaagaagaaaacagaggatgaacactttgaatttcattccagaccttgccctactaagattttggaagatgttgtggtaaggttgaggctatgtgtgctggcagaagtgtactgctcatgaccagatatccacccattcacacaaaagtttgggtagatattatgagcagggcatcatattaggaactgcaggtgataaagagacttatcggaagtggattttgcttttagttaactcaaagtctggtatgggagacaatatatgtgtgaataatagaaaatggacagaagtgttctgagagagatgacagttaaaataggaattcagaggagaaaatggtttcttccagatagaaagttcagggtgtgctttgtagagaggcacatttgacctgagccttgacgatgtactgtagtaatagttattgtgttgctattgttgtcataatagctgacaattttactgtgtgccaggactgctctaagcccttttcatatattagcccattagttttgacaacaacccctttaggtgggttattttatcacctgtttcagatgaggtaaccgaggcacacagaggttatgtagtattcctagagcactcagctagtacatggtggagcaagtaagagttcagacactctagctacagagtctgtgatcctaatacctcattatatgcctc

SEQ ID NO: 26396 - DNA, 2300 bp, Homo sapien
cgatctggccgtacacttcattcaaaacagcagccaagagataccattttgcagttaggattaattgccagatttgtgatagaatataaactctgtgtgaatcaaaaaatgctgtggaacaactctctaaaatgtgttagttttaaattatgtgcacaatatgatacatgtcatttattccacaacgatttgaaatgttagcagtgttttaaaatcattaaggaaaaatcttcagggtagttgaatgtgttggaattatgagatataaggctgggtacagtggttcacgtccgtaatcctcacactttgggaggccaaggcaggagattgcttgaggccaggaatttgagacccatctctacaaaaaatgattagctgggcaaagtggtgcgcgcttgtagtcccagctactcaggaggctgaggtgggaggatcacttgagcccaggaggcagaggttacagtgagccgagattgccccattgcactccagcctgggcaacagggtgagactctgtctcaaaacaaacaaacaaataaaaggattatgagatgtagaaaattaaatttctctcttaattcaccctcaaagagatatgagagttgacaatttggtgttctttcccttttatgttcttttattttctgtgcttagattaattatattttaaaaactcaaaaatatcattctaggccatgtgcagtggctcacacctgtaatcccagcactttgcgaggccaaggcaggaagattgcctgagcccaggagtttgagaccagctgggcaacatagtgagaccctgtctctacccaaaggggaaaaaaggatttaatcttctcatacagcttagtggagatcattttgtgatatctaattgagttgcttactcctttcagggtgttcctgaaaagaaggtacttccaatcaccgtccccaagtcaccagcctttgcattgaagaacagaattcgaatgcccaccaaagaagatgaggtgattccctgggagtaggggggttctttttccttctatatagtcagtcaatctaagccttatcatttattaatcttaatggagttcaaaggcaaccactcttttttggacttgtctttaagaatgggtatgaacatttgttcattttttttgttcctccaagaacaaagtaattggtaagggtatgaattttctgctcttagtgataactagttacaatttatggaaacagtaaggagcagttaagcattggaggcttgtctgctgtagcattgaaaatcagctgctctttgtaacatggatcaaaagttgcactttattttgccttagattgtcactattcagtgatggactttgaaaattcatactaagcaattacatccaccttgtcctatctccgttaacccagaggagttgcaaaggtgactgtggtgatcgtttatggaattgtaatatataaactgtcattggtcaggccagtttcttgttacatctcccattttatctataaatatccagagttagggtaattttatagcagattgcaagcataagcctttttataggttcatttgaaactaaaatacgcagtaatcttgtgttaccagcttgaacccaaacaacttgggtttggcaatcctattctgggtttggcaaccattaagtcccagtcacatgttttaatgaagtctagaggctgggtcaaagaagagactaaggtatatgcttggttgggaccgatcttctgatgttcattttattcataatgttagatcttatttagtttttacaacattcctgtggaaaactagatcttttaagagtaattgtgttagcccttggtggtagatgacttacctaagtcatcatccttcttggatagaaaaggaagctaagacttcctttaattttgttttaattaatgccacatattaatataatgtcttctgactccacattctggggaagttggagagagtgaggagtcttatttctaaactgcaattttttccctaggaagaggacgaaccggtagtgataaaagctcaacctgtgccacattatggggtgccttttaagccccaaatcccagaggcaagaactgtggaaatatgccctttctcgtttgattctcgagacaaagaacgtcagttacagaaggagaagaaaataaaagaactgcagaaaggggaggtaggtgtttccatttctgcaagtagtgtaatactattctttgatccctcaaagacagttttttctgtagcacttttaactataaaatcactgacttcttttgatctttctaag

SEQ ID NO: 26397 - DNA, 2300 bp, Homo sapien
attttaggaagggaagagggctttggagtttgaagaacgacattccaagctcaactcccttccttgctgagtgactttgggcaagctactgattcctttaactctcctcgtcctcatgcagaaaatgagatgagcgctccccacagagttatcatcaagatgatgcttaaaggcaagatggctaaaacgaatgacaggtgctcagcaagtggaagctccctttctgcaggggacctgggttcagagctcagttcagccccttccaagctgtgactttgagtaaattacataacctctccatgccttggtttccccatctctctagtacctaccgcactgggttcttctgaagaccatttgggtggatcaacatgagagcatgcagagcgaggccaggcacgtggtcagtaccgtataggcatcagctgttacttttgcttcctggaagaggcagactgttaactggaccttaaagaagagaaatggaggagaggaggaccgggcctggagaggagggccaggcagagcaaaagtagtcaagactggggaaagagctccaactatggtttttaccagcttataccaaaaacccttgacatttgctcacaaaacaaaacatcccactcattttgaatagtagcctgttcacatagttcatggttcaaacagaaaagtcaaagtatatacagtgatgtctccttcccacccttggggcccagttccttgcttatcctaccaaataaattcttatgtgcataaagtgaaatatatattattcatatattattctcccttttttttttgcacaaatggatagcacactctacatgctactttgcatcttgctttttttattccccccactttggtggtcactttttgtcagttcattaacagcttcctcaatctttttttacaggttcctatttccccactgcttagaggggctgcattctccctcctttctctcatcaagcgtttttccaatggcttcccatttgacagaggagccgaggccatggagtgaagtgactggtttgctgcagtcaggacctgaacctggataaccactctacagctacttcattttatcttactttttaaaatataaagacggggtcttgttatgttgcccaggccagtctccaactcctggcctcgagtgatcctcctgcctcagcttcccaaagtgttgggattacaggtgtgaaccactgcttctggcctctacagctacttctaatgcacccaggtctggccagttctcaagagccccctctgagaaaggctctgggtgatggaaggctccttggatcatagctgtcctcatcctatctcgaacacctcaggctagagtgcccctcgggccacccctgtagtggagcatccttgaaaagactctctgccagcccccttcttccatgtgggtcatgggtgagaactggatgagcttgggggaggggcacagagcactctccatctcccatggctactcagggcagcctccgtgtccccaggagcccaagaaaaggacagtttcaaaagaaaaagcttccaggcctatggacatgttgagaaagtgcccccgagacaatttcttacccaaaggtgacgcaagcaggtccagatgtcgaggcacagagctaggcactagggtcagggagattatccctgggactttgtggctctagccaggttctggggagccccaggagatgtggcacacaggtgggcagaccagggctcagcctgggcatactcttgcccttcaggcctgcctgagtactccccttcttccaggccccctctgatcctgtccaagtcagggatactgagcaaggcctggggaaagggctgctcccccagcgtcccagatacccctcccttttctcgcttgttccaacatcattctccccccagtcgggccatgggaagaatgccgtgtcctctgaactggggccaagagtgacaggtggcggcagtcccagctgcatggcccctggtgtaagagatcctctcctccgtccccgcctccactgcccacacccctgcctccgcctctgcccacccggcccaatcccttacaactgcccaggactgctcctgagcagccgctgggagacagacggcaaccaggttgcccctctttgctccaggtacctctctcccctcagttagcaggcctcggcttcctgtctcactgcagccagacgagaggggaaattggacagcctgacacactccactcttgtttctgcagctagaaagacttgagttagacaagcagcagcacacgcctc

SEQ ID NO: 26398 - DNA, 2300 bp, Homo sapien
ctgggagtgaagtgggtgtggtctccaccctcagggagctgaagccaaggtaaacaagcctggcctagagctttgcctctagtacccacggcctgggctgggttcagaggaggccacgagcagtgtttgttgaaggaatgaaaggatgcaggcaggtagagtgagggagtctgctgtgtgaggaggtaatagcaacctcgtgtgaccacagctgtgactcagggaaactgcggggtagcattttggggttcaagagagcttctgactcaggccgaggggtcagggaagcttcctggaccagctgccttttgagcgagggctttgaggagacgttccagtggagaaggcaggggcagagtttcaggcagaggggactatgggaggaaaggctcgagggccagagatagcaggaggtgctggggagtgaggttctgggcatcccaggcagaagccacagtgtgggcacaggcccgaccccagtgaaagcgtgagaagcagctctagccgctgcagccctgggtccccattatggctctaagcacactggaaggagtgcattttctatgtgacaacgtcctttttcgtctcttccacttacagggcctgggtccgtgttattgtctcctaggtcccaggcctctgtcacaggctctggctcagcatagatgttcagtacctacctgcggctcaattaactggggccagttttcagttgataattattgagcacttctctgccattcagtgggtcaggggctggggaaatgtcagtgacctaaaaacacccctgccctcatgggctgacatgctacagtggagggagagacaactaaaacataaagcaaaaagaaaaaagaaaagaaaagagaagaaaagaaggcctggcatcaggtactgagaagtgctaggagggaaaataaagccaggtaaggtagagggggtacagggctgatgggggcgcttttagatagggaggtgagatcagtcctctctgagaaagacatatgtgaggtgagaactgaatgaaggggtgggtaaaggcagaaggggagccatcctggcagtgaaacaagggttagtgtttaaccactggatctgggtagggcaggtgtggagagaggcccgatttacagcatttgccatttctcatggtgtaagtattcctattatagccgatatatcagcctaccgatgtgacagctggcttgcgactttctgaaagtgacaaataatggtgtcttaaactaggaaggcagtggtggaggaggtgcgaatgattggatgtataatctagcttgaaggtagatgatgctgaagagttgggtcggaggtggggtgtgagggcgcgagagtaagggaagaacttaggatggctcgtaactttttgtcctgcacccttgggtgaagcgtgggggtacttttgctgccaggcaagccgagagcaactcaattgtggggaagggacgatgtctaaggtctaattttggacatgatagatttgagatgtctattagacaactaaggcaagtagacagttggagatattggagtctagaattcaatggagtgctcagaggttgagatgtatatttggaaattgatgactttggataaaatgtaaagtcatgagactttatgcagatgcccagggagagagcagagagagggaagcggtgaggggggaggatggagatcttggcatgtcagtactcaggagaagagccggcaaaaggaagatgtcccagcaggcatgacttgggagtggtgaggaccacagatgtgggggtgggggagagaggagaggcaaggaggaggctgagcagtgatctgggcaaggctagcaggcctgttcaagggtgcgggtatggagggtgggtggcagggagtgatggtgcccagctggtacccttgacttccctggtccccaggaaatggtgttgctggagattgaggtcatgaaccagctgaaccaccgcaatctgatccagctgtatgcagccatcgagactccgcatgagatcgtcctgttcatggagtagtgagtgcccgaagtagtggtaggggctgggtgggggtaccaccaggcacggagcaagccgtggaggggtctgtgcacacagcatcgagggcggagagctcttcgagaggattgtggatgaggactaccatctgaccgaggtggacaccatggtgtttgtcaggcagatctgtgacgggatcctcttcatgcacaagatgagggttttgcacctggacctcaaggtaccagactggggcctcctgggaagggtcaggggcag

SEQ ID NO: 26399 - DNA, 2300 bp, Homo sapien
aatctgagaactggaaagggggactacaaccagaaagttggttaccctgccatgggaataaagtagctgttttccaccccacatatcaggccttttattcttttctgagttctgattttatttataggaatcctcttacagatgccaatattgtaagtctcttttaatgatacattaataagccaccttcatggggggaaaactgtgattcgataaaggacagaaatcaatcaattgctgtttgtttagtcatttagcagacatttcttgaacacctactctgttccaggcctctgttccagtgtccagtgtgtgactctgggggtacagcaaaacagcatgctctttactctcttggagttcacattctgttttctagtggggacccagcgactctccgctacccctgcccctcactgaagaggcagtatttaggaattacagaatcctaggctcatatccagctttgtcactcactagatgtgggacatcagggaatttacttaccttctctgagcctcagagccctcatctattcaaaagaagcaatgaagccctccagagcagggttggttgaagaagtaagtgtagggttggggaggtgagctggcctggtacagagtgggtgagcagtgacttgggagtgggagagcagagaggatgccgtcccctcctccagaaggcctgactgttctgggcctgactctctggacctcccgaccccaggctgcagctggggtagcctcagttcagagtgacaatccgcagccatgttcatatccctactccatactaggctcttgatgagggtgctgcattctgtgtaaggggaacctgttgcctccccaccatggcctggacagctgaggagtcaccagctccatgttagagatggggaaactgaggctcagccaaggtcttgaggtgcctcttgggagggagaatgtctctccccagatagctgtccttcccacaccagtcactagggggcgacagggatgcagcagaactgaatttcatgggctctccttaccatcctaggtgcccctccctgcagacaccccagagctaggaggatggggtaggagtggtgtggccccaaggcctctgcaccgcaggagaaggcagtagaccacaggcctgggagaagagggaaaagcaggagtagaggtagggattagagaagcccctggggcttctctcactctagggggactgggctcaggccctgcctctctctcctctctctctctctctctctctctctctctctctattcattcctttcactccttgtgtttgcacctgtgtctctcagtatctcctttctctctggctttgtggatttccttgtttctgcctgctcagtgattctcactttctccgtatactacgtgtgtgtgtgtgtgtgtgtgtgtgtgtgtctgtgtctgtgtctctgtgtttctgtgtgtgtatgtctctgtgtgtctgtgtatgtgcttgtgtgtgtgtctgtgtgtatgcctatgtgtctgtgtgtgtctgtctctgtgtatatgtgtgtgtgtgcttatgtctgtgtgtgtgtgtctgtgtgtgtgtctgtgtctgtgtgtctctgtgtgtctgtacgtgtatgtctgtgtgtctctgtgtgtctgtacgtgtatgtctgtgtgtctctctgtgagtgtctgagaggctctgggtgtctctgtccgttgtgtctgcctctgtcttatctttgtctctccctctttctccctcttgtgatgtctctacctctctctgtctctatctcttttttccctgtctctgtttcatatgtttctgcctctgtctcattttgtttttgtctctgtcccgctcagtttcacatcctgtccctccccagccaccaccacccagcacacgtgggctgagggtctcagtcccttccttcccaactcctcatccctggcagctgctcggcttcccactactggcctctcctgcccgcctcttttgggccttgtgggagtggggcgagggaggaggggaggatggctcagcagacccacccctttttgcctttccaggctgggaggctgggccagtggaccttttaaccagcctgggcaggctattccggacgccagccctggaagctgagcctgacccagcaggtcccagcagcctggcagcccggccagcatgcagcagcagcctctgcccgggcctggcgcccccacaactgagccaaccaagcctccctacagctacatcgcccttattgctatggccatccagagctcaccggggcagcgggccaccctcag

SEQ ID NO: 26400 - DNA, 2300 bp, Homo sapien
catttacctcatccctccagagcaccagctccagccctgtccccatgctcccacccgctccacctttttctacctctcctgcagccctccctccatctgcagcaccaccaggccattcccttcacctccaccatcttcagtttcattgccctgtctgcagccaccccatcttctccacattcattcctttgtcctccttgggtccatcactccacccccatgcaccccatcgggtccagctccatcacctccggctccctcactgttcccatcagctctgtctccctcattctgtctgtatcacccctattatctccaccccatcacctttccgccatcgtcgacagctcattgctctgtgctcatcacccccacccccgcatcagcatctggctctgtcccgcatacctttcatctccagctccctcacctccgcatttacccccagcacttctctccctatcacagtgacccatctctggccctaatacctacaacatcttcatcaactttctctttacctccatgggggcgggggagtttgagctctgaaacttcaaagttcttttctcaaaagcccagtgccataatattgacttctaatacattggacagccagcccttttactcagaaacactgtcaaccccagctggccttcagtccgcccagacctctctgcactggtgggaacagtctgggaattcctgaggagtcacaggcctcctctcccaccctcacagcctcttctcccaatgctcaggatggctccggatttgccacagaggatgaggacaaggagtggccccacaggctggcccagcagggttccttactaccacccatcctcctccaggccctttggttgaccacagtaaggactgggtctcctcacccagccctgcctcctccctggcctcctccttatctatgggtctggggtcagggtgagatggtgcctgactgcttcctctccttcaccagggtgccagacataggacctcaaaaacctctggtgcccaatgccctccgatgacttcagcaacctggtaaggaatcgaaatcccctcccctccgaccagtgtgctgaactggggacggccgcggggtggggccagcccacctctctctcccacccaaagcacccagcccaggctcccaataatagccacaacagtcaacatttcctgagggcttagtttatgccaggcacccttccaagctccccacagcccccagatgctgctattattcccattttacatatgcccaaaccaggacacagaggttaagaaccttgcctgaggtcacacagctggtaaccctgggaaagctcctaagtggcagtgatagactagaatccgagggcctggctgcagagcccacaaccctaaccactgagcaggattgctggtttctcatgagacgctgctaggttgttgttattgtcgctgttatggttatttctacctgcatcaaaatctttgctgggaggaagctcctagaatcccagaagatttgctgggagggtcatgccctcactgtacagatggccccagcttttaaccgcagagctcgactatcagttcgtttatactggaagctattgtttactactattattactagaattcttatcatcactgatagggagagagcacccaaaatttccgaggtagaggctgggacgacctctgggtccggcagagtttgaaggggagggtaagaaggcgaggggagctagcgccgcccacgtccagcccgtgcaccctctctcgccccacagcctgctggctgcacgtgtggctcttctctccgcagcgctggtgcgcgaagccaccgggcgcacagcccagcgctgtcgtctgagtccgcgggcggccgccgagcgcctgctggggccgccacctcacgttgcagcaggttcgcttccccgacccattgcccagcgcccacgtgttgcagggcctgccgcctcacctggagcgcggtgtgcagctctgggtggctccggagggcgtgttcaccaagcgcctgtgccagggcctgtactggcgcagcccaacaaggtggagcgcaggcgcacctgccacctgctgaacacacgcggcttcctccaggcggtaggacggctggaggagtggaacagagtggcgtgggaacgggggcataaggacgcggtgggcaaaggaacatgaacagaggagagtgggcacattaaatgcaggcccagggggatgggcctaagggtgctgggcatgaagtggacattgacacaaagaatatggcacaaaagcaccag

SEQ ID NO: 26401 - DNA, 2300 bp, Homo sapien
cccaagtagctgggattacaggcgcctgccatcgtgcctggctgatttttgtatttttagtagagacggggtttcactatgttggccaggctggtctcgaactcctgacctcaggtggtctgcccgcctccgcctcccaaagtgctgggattaaaggcgtgagccactgcgcccagcccccttagcatggtttctacccagcatgttttctacccaaggtctatgttcagctctgcctgcctgccaccagcctggaagcccctgaagaacaaggtatctatacatgggtgtcccctcctcctgactgaagattgtggaaggaatggatgagagagtggggaatgcaaagcttgccggctcaccgcccccccaacttccagctctaggctgcccagctgctccagggctctggggtgcgacagtgttggtgctcatgaccctgctcacaagaaggcccagcccatctccagggacctctcctctgacaaggaggaagttatggggggaagagttcccagcttccccgctagaagcagcacccgcaaacagacctcaacccagaacctcagggccagaagagtgctcagcagctggtggaccttttgtgctgaggaggaggctgaggcttagcgcaggtgtagacttgctcaggtccacagcccaggccccgagccctttgctctggccctttggtctggtggtagaacactggggaaggctgaatggcggggagggatgtcagtgtcaggcccccatgctccctccatgtcccttcaagcctggggacactcgcctgcatgtgcaccccttgtcctccatcagccttttccccctcccagcctggggccgcttccctgcccccaaccccattcctgagatgcatgggccagggcatgaatggtggacacaggcctgagacaggcagagtgccatggcctcgggacagagtgggcagtgctcaccaatgaagtttccgaggtagagtccaggaagtacctagaggaaggacaggcaagggtcagtggggcaggggctgcacccccttccacccccagggcagctggggggcccacagcccctctctgtcccatgaagggtatggacctcagggctcagggagcactctcttcccttttgtgggccctgagtcctctgtgagaggggtctggggctctggggagggtaggctagggggccagttaaccaaccgagggaaccaagggaggccagcttgggtatgagaggggagaggaggaaggcaggtcttaggaggagaggagaggagagaggtagacttgcagggtgcagggatggaaattctggggctggggaggcagaaaggcaatgacaggcagaggcgggacaggatggagaaacagccccggagagagccgaggagtcagcgacaagggagagggacacatgcagacggagagcaggactcactgggagacagcctgggagtgacagccacagcaagacagcgagagacacacagagtcacggagagagggcggacacagcggggacagagacgcagggtcagagagggggagacccgacagccgcggtctcgagtcacagggacacggagatgccgccgcacggagaccggcgagaacagaaggtcagaggcgggcggaccgagctggtcagcgccgggccgcggcggccggggcggggaccggggaggctgcgcggggcccgccccctaccttggtcatgccattgcccatgatcccgggggcggcggtccgggtgcacccccagctcgccgcccgggaagcgatccggtcacagctgccctgacggcccaggcccgacgcctgcagcctggcggggaacggggggcctggcgtccgcggccctgcccagccctgcccagccaccgccaccgcccgccgacccccggcccgggagggaaatggtggtggagccgccgctgccaccgccgccgccgcaggctcctcctaccccttcggtcatgtggggcccccgcctcgggtcgcggcggggggccggacaaagccccagtgtgccgggcccacggcccgcgggacaacggcagtttgttggggccgcgtggggccgccacctccggaggtgggggcgggggccttaccccaccctggcaccggcaggcgcgggcggatggggggatgtcgcctagagccccccggccggcccacaaactcccgtcccccttccggctctgcctggacgtccctgcgggccccgggggaaagcacccaacttctcccgcctcggcttctagcagaaacgtgacggggctggacttt

SEQ ID NO: 26402 - DNA, 2300 bp, Homo sapien
agatgtctaatatgtagctactagctgcatatggctagtaagcatttggaatgtgacttgtctgaattgagatgtgctgtaaatgtaaaagacaccagattttgaatagttaatacaatttaaaaaggatataaaatatctcatttatagttttaaaatactgactatatgttgaaatgatattttggatatattgagttaaataaaaatattatcaacaattaacttgtttctactttttaaatgtggctgcacatgtggctggcattatatttcatttggacaatgctggtctataccattagctaatgaaggtaggaacaatctctacccactgctgtgtccctagtctctatcatatactagatgctcagtaagtatttactgaataatttggtatttatgagaactctgggcttttatgagagctgagacgggcagccccatgtatgctatgaacttgagggaggaagaaacagttttatttttctccaatcactgtatttcaaagggctctgtggattctctctgtcctgctctctatccacaatccccagtcacctactactatagattgaggggtgggggtgatggctgaaggaacaaagctggtgcagctgcttctatttcagtcctataggaagtgtcttgattattttacattctccagctttggtcctagaagccaggaagggctcacctcaacatcctcagaaacacagatagggttagctgggggtcacggggactttcccagggtcatctagcaggtcagaggtgaacagggcctcaaaccttggtctccagaccccttccaggaccctgacctctagctattaatacatcctgatgtagtctccttcagactggaaccctccctcaaacccctctcccaacattcacctgtaatttcttggggcacctaatggcagttgtgcctggtcccagcagagcttccctggatggcaccatccctcctaggggccgaaatggatggaaggaaggagtgagaggatggatgaatggatgggaagatggacgagtgaatgagtgaacaggagggtgggagaatggatgggaaaggaggaaggctggttggtagggtgtctctgcacgggtggagaggatgtatcggaaggaattacccacttatcccgttccaagcagactctgaagagcagagagccctcggcgatcaaagtccagccccgtcacgtttctgctagaagccgaggcgggagaagttgggtgctttcccccggggcccgcagggacgtccaggcagagccggaagggggacgggagtttgtgggccggccggggggctctaggcgacatccccccatccgcccgcgcctgccggtgccagggtggggtaaggcccccgcccccacctccggaggtggcggccccacgcggccccaacaaactgccgttgtcccgcgggccgtgggcccggcacactggggctttgtccggccccccgccgcgacccgaggcgggggccccacatgaccgaaggggtaggaggagcctgcggcggcggcggtggcagcggcggctccaccaccatttccctcccgggccgggggtcggcgggcggtggcggtggctgggcagggctgggcagggccgcggacgccaggccccccgttccccgccaggctgcaggcgtcgggcctgggccgtcagggcagctgtgaccggatcgcttcccgggcggcgagctgggggtgcacccggaccgccgcccccgggatcatgggcaatggcatgaccaaggtagggggcgggccccgcgcagcctccccggtccccgccccggccgccgcggcccggcgctgaccagctcggtccgcccgcctctgaccttctgttctcgccggtctccgtgcggcggcatctccgtgtccctgtgactcgagaccgcggctgtcgggtctccccctctctgaccctgcgtctctgtccccgctgtgtccgccctctctccgtgactctgtgtgtctctcgctgtcttgctgtggctgtcactcccaggctgtctcccagtgagtcctgctctccgtctgcatgtgtccctctcccttgtcgctgactcctcggctctctccggggctgtttctccatcctgtcccgcctctgcctgtcattgcctttctgcctccccagccccagaatttccatccctgcaccctgcaagtctacctctctcctctcctctcctcctaagacctgccttcctcctctcccctctcatacccaagctggcctcccttggttccctcggttggttaact

SEQ ID NO: 26403 - DNA, 2300 bp, Homo sapien
tagggcttttgcccatgctgttccttctgctggaaatactctctccactctttttctttttcgtgtgtgttattttttatttttttgagacaaggtctcgctctgtcacccaggcttgagtgcagtggtgcgctcatggctcactgcagcctccaccgcctgggctcaagtgatcctcctccgcctgggctcaagtggtcctcccacttcagcttcctgagtagcttggactacaggtcccggctaattttttttttttttttgtaaaagcagggtctccctatgtttcccaggctggtctcaaactcctgggctcacacagtcctcctgccttggcctcccaaagttctgggattacagacctgagccatcatacccagccaaatttattttagagatggggttttagtatattgcttaagctggtctcaaactcctgggctcaattgatcctcccacctcagcatccccatgtgttgggattacaggcatgagccactgcgcctggctttccactctttaaacagctgggtccttcttatatatcacctctcagctcaaatgccacttattcagagaggttctccctgtctgctttgtttccttcatagaaaactgggaccatttgtaaataatttatttgtttgcctatcttgtttgccttccctcctagatctgagatgtctaatatgtagctactagctgcatatggctagtaagcatttggaatgtgacttgtctgaattgagatgtgctgtaaatgtaaaagacaccagattttgaatagttaatacaatttaaaaaggatataaaatatctcatttatagttttaaaatactgactatatgttgaaatgatattttggatatattgagttaaataaaaatattatcaacaattaacttgtttctactttttaaatgtggctgcacatgtggctggcattatatttcatttggacaatgctggtctataccattagctaatgaaggtaggaacaatctctacccactgctgtgtccctagtctctatcatatactagatgctcagtaagtatttactgaataatttggtatttatgagaactctgggcttttatgagagctgagacgggcagccccatgtatgctatgaacttgagggaggaagaaacagttttatttttctccaatcactgtatttcaaagggctctgtggattctctctgtcctgctctctatccacaatccccagtcacctactactatagattgaggggtgggggtgatggctgaaggaacaaagctggtgcagctgcttctatttcagtcctataggaagtgtcttgattattttacattctccagctttggtcctagaagccaggaagggctcacctcaacatcctcagaaacacagatagggttagctgggggtcacggggactttcccagggtcatctagcaggtcagaggtgaacagggcctcaaaccttggtctccagaccccttccaggaccctgacctctagctattaatacatcctgatgtagtctccttcagactggaaccctccctcaaacccctctcccaacattcacctgtaatttcttggggcacctaatggcagttgtgcctggtcccagcagagcttccctggatggcaccatccctcctaggggccgaaatggatggaaggaaggagtgagaggatggatgaatggatgggaagatggacgagtgaatgagtgaacaggagggtgggagaatggatgggaaaggaggaaggctggttggtagggtgtctctgcacgggtggagaggatgtatcggaaggaattacccacttatcccgttccaagcagactctgaagagcagagagccctcggcgatcaaagtccagccccgtcacgtttctgctagaagccgaggcgggagaagttgggtgctttcccccggggcccgcagggacgtccaggcagagccggaagggggacgggagtttgtgggccggccggggggctctaggcgacatccccccatccgcccgcgcctgccggtgccagggtggggtaaggcccccgcccccacctccggaggtggcggccccacgcggccccaacaaactgccgttgtcccgcgggccgtgggcccggcacactggggctttgtccggccccccgccgcgacccgaggcgggggccccacatgaccgaaggggtaggaggagcctgcggcggcggcggtggcagcggcggctccaccaccatttccctcccgggccgggggtcggcgggcggtggcggtggctgggcaggg

SEQ ID NO: 26404 - DNA, 2300 bp, Homo sapien
cactctctcctgtgtctgttttgaagctctactcctcattggcttggtaggcagagaagtgtctccttgccccaacatatacacattgttcttttgattttgacaagatttctcaaaaatcctgattggattggggaaaatacacatctttctgatattgagccttcccatccatgaacatggtatatcattgcatttatttgatgtcctttaataatattttataattttctctatgagaatataaactctattagggaaaatgctttgtcagttttcctttctgctgtatttttagagtcaagaacagagcaggacacagagtagaagcataagaatttgtggtttaatgtctttcatatactttattagatctgtttctacatatcttatatttctgttgctatatatttttattgtagtttccaatcagctatggttggtatatagaaattcaatatacagtgagtcatttttggattgatttaaaaaacaaaaaacccttttatttgttctaatactctgtagattatcttggatttttaaatgcagacagttctgatggacatctatttcagaagggaagaatggatattgtgtaggcaactagcagcatcttccacactactactgtatgaagctagaagaggcaggtactctagtcctagcagctaaagctgtttgtggactttaaatctgaagcaaatagtacaacaaagcaggtgtctgttgagtattcatttggccaattccagtactagtagtggtatctattgagcagaggtgctagtaccagcaacagcatccagtactatttgcagcagtcttgccagtagtggtgtgggatgtccagtaataatcagaaatggcaccccaatcaaagtttctgcaaactctgattttgaccataattttgatcagatagactccctgaattccttccccattttttaattctgatttccaacaactctgtgactcattcaatatcctaccaatgaattccatttctatttcagttaatcaaagatagttttttgtaaccaaggactctgaacaattaaactctcatgctatctgcaaatgataactttgtctctttcttatatatatctcatatatattatctatagatctaataagatctatgcattcaaataatgaaatgcgtagatcttaagttttcagtttagtcaattttgacaaatgcatatactcatgtaacccacatctttattaagagatggaaatccccatcactccagaaagttccttcatgtccttcccagtcaacccctcagtacttttaaaacttcaatgagctggccgggtgcagtggctcacgcctgtaatcccagcacttttggaggtcgaggcaggtggatcatgaggtcaggagttcgagaccagcctggccaacatggtgaaaccctgtctttactaaaaatacaaaaattactcaggcatggtggcatgcacctgtaatcccagctactcgggaggctgaagcaggaggatcacttgagcccaggaggcagaggctgcagtgagcccagatcgcgccaatgcactccaacctgggcgacacagcgagactccgtctcaaacaaacaaacaaaaaaactacaatgagctatcactgtaatcactaaaaggaaaaagatggacaacatctaatgttggtgaggctatagcccttaagattagaaagcggctgggatagcagaggcgactggccgcgttaccgactgaccaactgaccaggtgacttagtgagtaacttcgttaagtaaggaaactcagtaccattacatttaccgaaagctgacaacttttcagatgcagcgctcccagtttaaggaaagtgcagttggaggcggcgtggggcagagggagccagcctctgaacgaactgccccagggtcgcggagaggcgaggctggaaaagaaaggttgaggaagtcgggggacctaggctgccaggacgcccaatagcctccagaggttctggtggaccagagcctgcgcactccgccgagagcatgcccttggctcatccaatcagagcggcggatccaggcgcctgtctgtcgccttggcaacgggacgcataagcacgcgaggcgcgcggtggcggtttggatctggcccctggggaatcgcgttatgtcgcgaccgaaggtaggagtcgacctgacccagatgcttttatcgtccctagaaaaagggaggaaagcagcagagggattcaaaatcggttggggatgggtgttcctcgcggaatgggtaggggtggggcg

SEQ ID NO: 26405 - DNA, 2300 bp, Homo sapien
ctcaaatatatttcagttccttggtctttatttgtctttcatgcccttgacacttttgaagagtacattttgtagaatgtcccttgaattggatttgtctgatgttttctcaccatgaggttatgcattttggcaagaataccacagaagtgatgctgtgcccttttcagtggaactcatcgggggtttgtgatgctgatgtgtcttatcactggtgacagtaccttgattgaccattagattaaggtggtgtctgccagctttctccagtgtaaattaactttttttaaaaataataagtatcttgtgggcagataatctgagactatgcaaatatcttgttcccaacaaactttcacacaatggttctagcattttttgataattctttttttttttttttttttttttttgagacagggtctcactctgccgcctaggctggagtgcagtggtacaatcatgggtcactgcagccttgaccctctgggctcaagtgatcctgccacctcggccccctgagtagttgggactacaggcccatgccaccatgcctggctaatttttgtattttttgtagagatgaagtttaaccacgttgaccaggctgatctcgaactcctgggctcaagtgattctcttgccttgacctcccaatgtgctgggattactggcttgagccaccgtgcctggccttttttaaggattcttgcctaaatctattattattacaataattgcaaaatggttactctctgtcattccttctacatgtattaggtggcattcttctgtagagaaagtttttctcttcctgtccctcatttaattatttagtatcagtttggctcattgcagtctatcatcttgcctagaggttaccacacctagattttcccaataggaagctgaggcccagagaagagggcaaggtcacgtagtgccagtgcctgtgttgactcctggtctagtgctccttgcactgtgtgacatggcttggtacaaacatcagggtggagaaaaggcaggactgggcatctagatgaagccccagccagccagccgggaatctgtggcactatggtatctgagggtttatagagcacatggccatttctttttttttgagatggagtctcactccgttgcccaggctggagtgcagtggcacaatctcggctcactacaacctctgccttctgcgttcaagtgattctcctgcctcagcctcccaagtaactgggattacaggaaactgccaccacgctgggctagtttttgtgtttttttttagcagagacggggtttcaccatgttggccaggctggtctcaaactcctgacctcaggtgatccacacgcctcggcctcccaaagtgctaggattacacgcataagccaccgtgcccaaccagcacacggccacttctccagtgggtttccatcagttcttgaaaccgttcttccgaaccactgtgcctggggcacagccacaagggaggtttggagaaggaccaggccccagattttcatgagtaacttaggacaaaatttggaaaccgtagatttctggttccagtgtcattccattaccacgtgcttcacgtcaccacatctgtgcacggtgtgtgcacagatgtccatctctggacatctctgagctcagtgaaaggctgggtctgtctgcctgccttaaagcccctctgcacatggtgtgacattcaggagaaacaccaacccagcagccacaaggagaagcaatttaaatctttagttctttgaaaattccaggccgggcgcggtggctcacgcctataatcccagcgctttgggaggccaaggcaggcggatcacctgaggtcaggagtttgagaccagtctgaccaacatggagaaaccctgtctctactaaaaatacaaaattagctaagcgtggtggtgcacgcctctaatctcagctactctggaggctgaaggaggagaatcgcttgaacccgagaggcggaggttgcggtgagtcgagatcgtgccattgcactccagcctgggcaacaagagtgaaatttcatctcaaaaaaaaaaaaaaaaaaaaaaggaaagaaaattccaaagggatctccatttacaacacaaggcccaactgcttggccattgttccagttgctatggctgtgtaacaaatcccaaaacttagctgcttaagacagcattgcattaggcgcggggctcctgagtcagggactcttacaggacacagtgggactggcttgtctctgtgacattgggggcatcagctgggaa

SEQ ID NO: 26406 - DNA, 2300 bp, Homo sapien
tttgctcatggcagaatccctatcacagggcctgggaagtcaatacataattgtgaaataaatggctctgaaattgaaatgctctccgagagtctttctgggtctgaccatttcaaagtcttggaaatgactatgattcccctccccaacatttccagtggccaggggtggcctctaaaggccagttaccgccaagaagctgctaatgtgggagcctccctcagcctctccccatccaggcccatgtggtaggggtcaagggtcaacctggtccagccctctgtgggtcccaaggtggaggagacgcagtgctggggtccaggccgagggatgcctggtgagccccatttctgctttggcaaacatccccctttccttctcagggcctgtgcctgcatttctgaaccagaaggtgtttatacaaaacatcctgggtttggcgacaaattcaccctcagtgaggaatccttaatgaatctccctccttccccacaccaggtggctgaaggaaaaattagctctgcctctggtagttgaaggcagccaatggctaggcaacatagaggtgctgctggggcttctggggccacaatttttggggagggttttttcagggtccggaaatggcatggacaccaggcactcctggcttgctgtgtgatgaggcactgcctttctcctggcctcagtctgcagctgtgaaatggggcagtaataatcccatccatacaaaggttgctttgacactcaagtaaggcaaggggtgtgaaggggcttggttacaagaggtcaaaaggagagaataaaacgctggaatcagggaggcgagacatcagagtgataatatcggttctgctctttagactttcaaagtcctttcccagcgccttttacagccatgtgggctcaatgcctccttccctctgacctcctgcctgcttcccccccgcccattctgttccacatacgctggctgttccctctgcctggaacactcttctcctaggcatccacatggctcacccctcaccttcttttcaaagccttgcctctctctgaggtttgttttttccagctatccaatgaggagtttgggcgtgaagacctcgtgggaaccctctggttctgatggtaaccattttccacctgcctgccttctctgggaagtcctcccaatcctaccacccacacccacctgcttttctgagctagcacttcattgcttactgcccatagttttcaagtcccttccttatgtataggccagctactctggacattgggcccaacacaggggctcaagtgaactctggttaaacggaattaaaagtgattactgcttcctttgttttttgagacagagtctcgttttgtcacccgggctggagtgcagtggtgccatcatagctcagggcagcctcgactccccagatgcaggtgctcctcccgcctcagcctcctgagtagctgggaccaacgggcgcgccccccctcacccagctaattttttttttttgtatttttagtagaaacggaggttttactgtgttgcccaagctggtctcgaactcctgggctcaagtgatccccccgctttggccttccaaagtactgggattacaggcatgagccactgcgcccagctgattcctgcttccttccgatcctgtggagagacactgaggcggatttttattcaccccctttttataaattagaaactgaaagtgtcagagattaaacataagtcacactgccacatgggccttcttggtgtttcttagccaggggaagaataatatttcccagatcctaatcactacctgccacggtatataattgttttgccattaattgtcggtgtttcccactaggatgaagttccatgagggcagggattttgttgtgttcactgctgcatcctaagcacataaaactgcttggcacataataagtgctcaagaagcatgaaccgagggagtaacgggtcagaggcagcccgaggactgagctctctgagcctgcagagggcgctccagccccgcccccaaagctaggccccgcctctcgcagccggctggcgcactagtgttagagcctgcgcaccaccgttcttttaactgcgcaggcgcgccggaagcacctagagagcggcgcgtgcgcagcgggagtcgaagcggagatcccggggtcgcgcgagagccgcaagcggagttggtgggcgctatgctatcacccgaggcagagcgagtgctgcggtaccttgtagaagtggaggagctcgccgaggaggtgctggc

SEQ ID NO: 26407 - DNA, 2300 bp, Homo sapien
gggactacaggtgtgcacaaccatgaccggctaatttttgtatttttagtagagacggggtttcactatgttggccaggctggtctcgaactcctgacctcgtgatccacccgcctcggcctcccaaagtgctgggattacaggtgtgagccaccgtgcctggctgatgcatgggttttaaacccagatttcctggctgtggagtctccgacctaaaaacctgtcttctgctgcctctttgaataggcaaatcctgggatatagagcatcatgggaagtagagaggctgccttcacttggatggggcccagaagtgggactctaactttgccgtatcctatccagacaccagtgaaaaggaagagatccagacacatccaagaactgactgaggaccctcagggtggctggggccagagtttctctcctgcccgctaccatccagggctctgtgcacttcattagtctccctgcctagggttgtgggagagaaagaaaaatcagagatattcctttctaaattacactgggattcagaccttccagcccgacccacaaacacccttgctcactaaacatgcctgtcaataggcaactgtcagccttgaatccatcctggaaaactcccttaatccctaactctttcccctctgttttcagccttgggcaacagctggtaccccaacctcctaagcatgctgagaccaaaacagtccctgggcatgaaaaggatgccaggctgcaggactgcagttggcttctccttcctgacccagggcagctctctcctttcatcctctcttccctgccactctgaggcaggttggttctcccacttcccttcctcagctcctctttcttcaacccctaccctttgcccctcctctctccctccccttgaagggtagcaaagcctattctggagccagatgatgggcatgaatttggctgtagctactaattgtgtcaccctgaacaaattaatttctctgtgacttagtttctgcatctgtaaaatgggaggaaaaaaggagctacctcacaaattgtgagggtagaatgagttagtaattgtagtgttttggacagtgccaggcaaagagacactactatatggatgtttgtataataaatgcctggatacatccaatctgatcaaaggcagagatgggaaatgagcttggggtatccaggatgtgtgggaactccaccccctctcataggttactgctataatctccttctggtctcaccagccccaggctgcttccttgtgatcgcttctctactctggctgctgggtcttctttctaaatcctgatgtgaccacataactcccctgctcaaatactgcagtggttccccattgcctgctggataaaggccaccttctggccccttaggatctcatcctcagaactctgcagccctatcttccccatctttctcctcccctggatctgagatccagacttgcttgaagatatgccctccagtctcaggcctccaggcctttgcacttgctctttcctccacccggtgtttcctcccatccctttcctcttgatgttggatgttgtccccttccctccccctactctactagggctgtagccagatgaaggcagtccccgagagagggaaagcggagagtaaggaagagacagcaactcagagctgcagctttctcagcttcaaaacgaagacaataagaaaaggggacccctcaagatcaaaggaggggatggaacaatatgtgagcactcaggaaactggaaatgagcgttagcatggagtgactgctaaagggttactggggggcccgcccaagtcccccagctcctttcttccaagtcccccacccacccccccgtcagacccaggccactggaggtgaacacaggagaaaaacgaagtggagagaatgggaagggggaggcgataaacaaaaaagaaggaagtgcagtccgaggggagatgagagacagaaagcatggggttggagccccgcgcctccgaggaaggagggagagggtgacctggggtgcgccccgcctcccctgcttccgcattcccgggggctgcccccccttcggccgcagctcaggcgggtgggggcggggcggggcggcgccgaggagaatgaataattgaagtggaggggaggaggaagaagaggagaaggaggaagaggagccgcccgcgcagggtcctccccacgccgcacccccctccgccgcccggaagtcgctccccgcctccctctccgccaacatggccgcgaagtcggatggagcggc

SEQ ID NO: 26408 - DNA, 2300 bp, Homo sapien
gagacgtctcttgttgtgttgtgggctctgtgaaggatgaagttccacacacctcaggtgaaatgtttgaaggagccattttttgttctagatgtgcacctggaacgtggcttctagatacaggtcttcaacacagcagataagatgtctggaaagatctctgggctcaagtgcaggtgaggttttagcacagttatcagaggaactgatccagaagcaggcttagttctagattgagttctagagtgctaggctgataaaatgtcccagggagccactctgatctgtgtattctgttgtgaggaggaggacactggaggcctgctgctctgctgtgggggattctagcacctgtcacagtggtgggggagaagaggttctagagcccagcgtgaatggaattttctaggaatgggtgctctcattctagacttctggggctcatgggagctctaggcccctgttaccttggtccatagccatctttctaaaaggaaattgtcctcagaacccctgagacatttcagctgccaactggttcccagctggaaaaaaaaatagctctggggacgtgacatgaatcctggctctcagccactctgcaaatggggctccctggagcggcatctgggaaactgacttgttttgccttagatctgatgactccccaggacctgtggtctattcccatggcctgaacatcctggagtgcccaggggactcacccagggcccctcctcccacctaggacagccagtgctggattgagggggcgtatgggagaggggaagtaggcagttccatggggtgaggagacagagcctctagcagagctgggaacccaacccaccccccacccccccacacacacactcccacagcaacttaggtgtgattggtgggagaggacagcagcggatgttaaggacagatgccaacctgatcctggagtgaggtgggccatgagaatcctagactatgcaaattagagggatgcttagccctccctggttcagcctctcttgggttacagatgggaaactgaggcccagagtggcagccactctctcaaggtcccagactctgggctgcccatcaaaaggtgatgggtaatgatgaattgctggggatgcagggtaaccccaaaggcagggagggccagactgcccacatacacacaagcacaagcacaaccatgatacgggtcaccctccccaccagcacacaggccgagatggtgtacgcatcatccctcctgccaacacagcaagagtgcttttccttctttctgctgctaagcaccctcaggaacgaggcctcgagggtgacgggaggtgggagaagcccaaggctgacccaggcccactctgttgggttcatccatcctccaaatccatctttggaggctgaattcacacacaaagccgttgtgagatgggagctctgaagatgcggacccagacccagaaacagactgtttctccagggccaactttgtgccaggaattttcaccccatgtcgtttcacttacactctcctctggtcacgacgtccctgcaagagaggtattatcaacccatcttacagacgaggaaactgaggcccagagatgtagcatgagggtcacccttggcaagttattctcctccccagtatcccagaatggcccatctggctgctgccttctagaggaaaagtcctagctggggtcctttacactccaggagactcccaaggggcagggatgtgctggcagggcttggcatggtctgaggctcgcagggaagccatggctacatttttggattttactccacccccactccccacctcttctcaaccccacacacccttccctcagggcttctgcctgcagggacatctgggcacaggaatggccacagtcaaagggcccagggagagggctgcaggcacctcctcctgcttctcaccctcagaagagtctcagcccttaaaggactctccacccaggagctcgggaccaggcctgaggccccctgctccactggcttgtcccttcatttcactgggatagaggagtcagatgagggaggggtccatccccttggagctgttttgtttttctttctgtgacacaatctacctcagccagtctctcccctagcagaactgacccccctggtcctctgcctcctgtcccctgacccccaccccagtctggatgttcagtccttccctgtccttcccaccctgccagggtccttgcagcccagagggtccctgagggttccttaagccacctgccctccacatccat

SEQ ID NO: 26409 - DNA, 2300 bp, Homo sapien
attattcccattggaaagataagaaagctgaccgatctcgtctgatctcggaagctaagcagggtcgggcctggttagtacttggatgggagataagaaagctgacgccaagagaggttacaatgagcaacctggaccaggtcatatacagcaaatcagttccagagcttaggtctccagaacccaggtgtcttggcaaggtgtggatgggccacacagaacctttccatctgtcctgggtggggcatgcagaatgcataggtcctagaggtaaggaacgctaggctcagatccagaccagccagaaatcccaggtcctcctcttactcactgtgtgacctccttgaaccaggctctgaacttcagcctcagtttcaaaaatctgtataataggtactatcatggtactcaacactgtgagtaagttaaaatatgtaaagtgttcagcacagagccacaaaggggaccttgcctccctaatatactcccaagagagcaaaacagctcaagaccctatgaacatggtcagaataaaaatggagtcactaatgttaagaaaaccttgacaaatagagctggggaaggccatagagggttttcatgcttgcataacaaataagactgataacaaaacagataacaacaagactgataacaaaaaagactacaaaaatcacaaccttgcacaaaggccattgaaaccttgcacaaaaaatacttccgcaaggacatctgcccagcaactgcctgtccaactttagactggcatcacccttgctattgatctttgcaatcaagaataattatttcagaaacaataatgtaatccttatttttttcctttaaaaatctttgtcttccccccacctccctgaaaatgcacatcgcttactatggcatatgggtaattcccactgcaatgcttaattcctaagtgaaacatcttttattttagagagcctctgtttgttctttaatttgacaaccactaagcaggtaaacagttaatgtttactgagcacttattttttttcagttttttttttttttttttttttttttgagatggagtctcagccagtcaccaaggctggagtgtaatggctggatctcagctcactgcaacctccaccacccaggttcaagcgcttctcctgcctcagcctccagagtagctgggattacaggcatgtgccaccgcacccggctgatttttgtatttttagtagagacaaggtttcaccatgttggcgaggctggtctcgaactcctcacctcaggtgatctgcctgcctcagcctctcaaagtgctgggattacaggtgtgagccaccacgcccagccttactgagtacttaatatgtgccagaagttcttctaggtgcatttaatccccgcaaggtcactatgaggttaaactagtattatgctcattttaaagacgggaaaactgaggcactggtggttaagggacttcccaaaggtcataaccctagtaagtgccaaagccaggattcgaattcaagcagcctatcttcaaagcccacgcatactgcctcccttaatagtaatgattaattttttaaaatcataacttgcttggctacaatactctctataaggcactttccatccaccttttcatttctcaccacagcagcctagggagggaggcagtgttgactcccaacttatagagaggagggggaaacaggctgtgacagggggaactgacttgccttgccaaggtcacacaacaaggtcagtggcagaagtagggctggaacttggaattttccaaaccaggacttcaaatgtggggggccctttcccagccttggccaattcccaagctcccccaataacccgccttctggctagaggccttgagcctccctcctcaggtcagctctgcctgggcttccacccttcagctgcagggtcccaaggctgtgtcctccacaccccctgccctccccatcagatgggaggggcaggaactccagggctggtggagtttccgaccaggcaggaaaaagaacaaaggaactggatgtgggggtggaagggatggccaggagggtggcaggagtagaggggacatttcaccatggaatatgaagtcaagaaagggaagaaggtaggtgggaggttgggagggacgaagggagaggaatgtccccaaagctggggaagggggcaaactggggcggggtggggggtcggtagcgaggggcataagtggagcctttcttctcatttggaagtaacttccttcccactcttggacagccagacag

SEQ ID NO: 26410 - DNA, 2300 bp, Homo sapien
atttaagtgctaacattaggatataagagtaaaggaaaaatttgttgatttagtgcatcatttttcctgacaaaatggtatactaatttgatccaacattcttccctttccatttgacttctgcaacaagaccataaggaaggcaagtgatttgcaattcctttgacaatgatgcttggggtagagagagccactcaggccagaggaaatttacaggtggtcagttctttcaagctgttataataacttttgcttccctatggaatcttatagctagatgactatgtgttaaggcaatataagccagcagttgagagtgtgggctctggcatgtggatcccagtttgatcctctctagctatctaatcctgggcaagttctttagttagccacaccctgccttggtttttctcatccttaaagcaagggtgaatgagtgaatatatagagagcgctcagaactttgcctagcttctattaagggctcagtaaaagttattatcaggtatattaattcatgtatttctatctcaatctatccgcactgcatcaatgagaaggccagggttcttcaaggtttcagggtgacatctctgtgtccttctctcaccccgatttccatccagttcctgggccaccttacctgggtgacttcctcactgaacccctccagtcgggacgagctcctgcagctgctagacaccgccagggtgagactctggggagggaggagggcaggatctcgctcccttctccctcttctacctgcggacctcgggaactcgagatctgcccctccctgcagcagctgaaggagctgccgctgaagaccacggcggagcaggacagcatcctgagcctgtctgcccgctgcctgctgctcacctggcgcgacaatgaagagctcattctgcgaatccctacgcacgagatcgccgccgcctcctacctgcaggacgacgcgctgcacctgctagtgctcaagaccggtgcggcgggagggggcgggggcgggggaggggcgggggcgggggcgggggaggggcgggggcgggggcggggcaggggcaggggcaggggccggaggtgtgcggatggagaaggagagggacctgcggcgggggcagaggagatggaaaaggtctgaccatactaccctgagactaggggcaggccgaagaggctctgggaaagcagacagggcctgaggttgaggatgaaggtgggtggcctgagccactacactgaggccaggtggtggagcactaagagggtggagaagcccaagacctaggccagggctggatccgcagttaccacccggctctgaggctagagtggacccttgggctgggggcggggcctgattccaggggcggggctgaggagaggcgggaagtcagaatccaagggggcggtccctgaaacccgggactgggtccccagttaaggctcccttgggaggggacagcctgaccaccaccctctgttcagagggcaggtctgaggccaggggcgcaggcgtcgtggggagcgtggaagccacctggccagaccaccgagaggccaggggtggagactgaggccgggggcgggcccgaaagtgtggaagcggagtgggcggggaaccgccgcgctactttaaagccgggggcgaggcggcggtggaaccccagagccgcgaggtcaggtggccagccggcctcggcggggcgggggggtctctgagtcccgatccccgcggctgacggtcccccggactctcctaggtctgggtgtggacccggtgccggccggcgtggatgccagcccaggcggcgcaggacgcgaccccggcccgccaggcggggcgcccgagaagcggcgggtgggcaccgcggagcggcgccacaccatctgcagcctggactggcggatggggtggggtgggggcgccgcggaggcccgggccgggggaggcggcggcggcagcttggagcgccagcgcgccggggcgcgggcgtcgggcagctgggagcgacggcagacgttcagcggcagctgggagcggcggcacggaggcggcggcggcggcggcggcgcgggaaagccgggcggtagctgggagcggaggcaggcgggcagcggcgggggaggcagctgggagcggcgccaccccggccccaacccgctcgacccgcaggaccccagccccgacgcctactgcaacctggtcatcctggctgtagccaacagggtgagcccgagggcagcctgctcccaaagcccggcttcgggaacgctgcttccccgcccccacc

SEQ ID NO: 26411 - DNA, 2300 bp, Homo sapien
ataaccagtaaactcagacaccacagctgtctctctccccttgaaacacttcctcacttggcttccagctctccaccttttccaggcttttctcctaccaagctggttcctcctcttcttcagaagttggagtgccccagactttgtccttgatcttcttctctcctccatctatccttcatctacccatttctaggtgatctgcatctgaagatctaacgactgtttcaaacccaacacatccaaaactgagctccaacctcctcccccaaaacctgccactcccttggtttccctgtcacaattaatagcagctgtgtccttacattggtcaggccaaaaccttgctgtgggccttggctggctctcacgctctctctttctcacacacaccccatatccactctgtcaataaatcctgttggctcttatttttaaaacataaccaagcctgtaatcccagcactttgggaggctgaggcgggtggatcacctgagttgaggagttaagaccagcctggccaacatggtgaaacccgtctctacgaaaaatacaaaaattagccaggcatagcggcgggtgcctgtaatctcagctacttgggaggctgaagcacgagaatcccttgaacccaggaggtagaccgcaccactgcactccagcctgagcaatagagcaagactccgtctcaaaacaaaacaaaaaaacatcaaaatccatttacttctccccaccctccccctgtacccacccaggtccatgccccattttctctcacctgaatcatgtggtcatcctctgactggttcagcccttgctgacagtctctttccccacacagtcagagtggtcccgttaacatgaaagccacatcatgtcactactccacatcttccagtggcttcccatttcactccaagtaaaagctaacatccttacaattgcttacaaggccatttgtactccagccaccatgcccacttcctctgtggctggaaataggattccagacaaagctaacagtcatcccactggactgtgagggctttgcggtactgaacctggcccagtgtcggccacataataggactaagttggaatttgtggagtgagtaaataagtgtaatcccaacactttgggaggctgaggcagggagatcactagagcccaggagttccagaccagcctgggcaacatggcaaaacaccgtctctactaaaaatacaaaaaattatctgggcgtggtggtgtgtgcctgtcatgcagctactcaggaggctgaggtgggaggatcacctgagctcaggaggttgaggctgcagtgagccatgattgtgccactgggcgaccggagtgtgactctatctcaaaaaaaaaaagttgctttccagggttgtctgagcatctggcttcttatctgagtcatcctggtcctaagaaggatataggagttagagtaaaaaacaacctgggtgctggtactaatgccatgaacctgctgtgtgagcctaggcaaggcacttaaccactctaagtctcagcatctttgtctgtccattttgtaggtctatggtaaggatcacctggtttaattattaggacacacctactatccccaaatgcctatcctgggttacgttttaatttattctttgggcttttttatttttattttttgtatccaaccatccattgtcttgggcctttttacagacacaacatagagaaaaggttcatgaagacagtgtcttcatcaattactggttttctgtgtgtcttgcttaaggcataaagaggtaaattcaagaactaaatacctattcacatttgtagtctcaaaaaagttttacccaagaacttaaactccttccttctatcagagattgaattttatttatcctgtttccattttcacactgaatgctaggaagctcatatctaaatatggcttccagtattagtaactatattgagcctaaaattttgatacatttaatcatcccttctcctactaggtgttaggagaactggattctaatcctgactaatcacttcccctcactgggcctccgtttccatatctatacattaaactaaattaggacttatcttagaagggcatcaggaaggctgatgaatcctccacaaatctggggtacatttttcatggcacaagagttagagttgtcactgaattctataaaggggttctaagatccagagagtagccatcgaattttgatggaaaaattcttgaaagccaatttaaagggctctataggtgtgtatctttgtgcg

SEQ ID NO: 26412 - DNA, 2300 bp, Homo sapien
aatttataaactactcttgcaaatcaatgagaaaaagacaggaagcccagtaggaaatgaacaaaagatatgaacaaggaagtcacagaaaggaaagctcaaatggctgactagtatagaaggaagttataaatttcaggattaacagagaaatgcaaattaaaacaacttgccaccttacacccacactgaatgcaaagttacaaaatcagatgatgaaaaatctgatgaagatgtcgggaaacagcatccttcactcaccgttggtgaaagccattctggaagaagttaatgaaattcaaaacctgccctgtgatctagtaattccactcttggatttagagcccaaagaaatgctcacataggcccataagtttcatgtacaaaaatgttcatcaatcacagtgttgtttgtggtaagagggagttggaagcaacctgggtgttcatctctggggagatggataaagaaaacagcggatgctcaactcgaaatattttgcagcagttggatgcaacagtgagatttttcaacagcacatatgtaggtatttaaaacattatagggtggctgggcttggtggttcatgcctttaatcccagcactttgggagggcgaggcaggaggatcacttaagcccaggagttcttgcagtgagctgtcactgcaccattgcagtccagcctgggtgacagagcaaaaacctgtctctaaaaattttcttagttttctttttaaatagaaaaacattacagagtgagagaaggaatagagtgaaattcttatgtaatatcatttatacaaacacacacacaaagcactgtgtagtttaggtccagggacatatatcagcacatagggttaggcgctcatagtaaagagggaaaaggagtgtggggaacatgtggatcaggagagggtaaaataaaacatcagaagggccctacatggaccagtgatgatgggatgatcatttaccacaaaccaagtatgaattatggaactctttggacctggagtcctaataacatttttttgaaaattgctaacagtgcctattttatggtgtgtacaatgtgtctggccatggaagcctttgcaaggttttacaaacacattttggatctcctatgtgagtctctggcctcctctcaggcctcatcccttttagctttccagcctttactcaggctgtgctgaatgctgtccttatcctgacttctctacctctccaacctttccttcccatttctttgactaccccagactcccagatagctgcctgtggagtcttggctatttcttgtttgtgacttgagcacagagctaggctgtaacaaggctgcaagggaacaagtactgtttcttcttcccaaacagtgaactcccctgaggatcttctgaatagctcaccaccacttcagttggggtaggatgcacccagacatcttttgcttattacaaggcaagaaaggtaaactgagtcataaaatgtttgatgtggaaaggaacaacatttattgagctcttatcgggtgctagacccagttctaaggtcttaaccctcagtaatccctgtggccaccctgttaggtggatgggggctgagctcactggacagatggggtaacgggaggcacacagaggttacgacactaaccagatagaggctccagatcctggagctgaaaaaacccttgtttggggtcttaagaccagaatgggacccagatcatccccctgagtcaaccctgggtggaggaaaccgtctactccacactgactgtacaagtcaggcatcaggggatgggagaccctgacatttagagccttaaaaagaccttctacactgtttagtatggtcagtttgaggtcatataaggagaatcaggagattccctcaagccccgtcctctcttcttgaaccatagtttctcaatctgtaaaataggaccgagttctggaaattcttttctcagtcggccagcaggtggagcccactcttcatgccttcctcagcctccagaaagctgcggcgtcccggggaggagggtgtgttctggggctgatccctctggacttctgggacaaagcaggatcgctgctcagccccagcccggcagagcggcccaggagccccgggtgactgccccggacttcagggcccggcttcgctttccccctgcaggacactccaggtactgcatggccccgggccccaagggcagggagcgagaccctggagtgaagaccccccggccccgccaggtgtgatgggggggccctggggatagggtcc

SEQ ID NO: 26413 - DNA, 2300 bp, Homo sapien
caaagcaagtacttaacaaaattctaatgtaggacgataaggggacgtgtatgaggatgtccactgtggcactatttacactagtgggaaattgtgtgcaatctaggtgtccatgactaggagaatggataaataaaatgtgaaggatgtaaacagtgactacacgtacagccgctacctttggcaacatggctggatattaacaacagtgatgggggtggcgggagggaatgtacaaaagtgaataagtaacattaaacatacattcagaacattatctgtttttataaaaagcacatacagactaggtgcaatgactcacacctataatcccagtactttgggaggccaaggcaggaggttcagttgagccccggagttcaagactagcctgggcaatacagcaagaccccatctctatttttttttaagttgtctatgccataccacaccgaacacatctgatcttgtctgatcttggaagctaagcaggatcaagcctggttagtacttggatgggagaccccctcaaaatagttagcactgtaggctaaagagaaggaaaaaaggcccatacaggtacatataccaaaaacataagagtagggtcattgtctttctcattcatggttcttccccccttccccaccaggggacattttacaaatgtctggagacattttgttgtcacaactagggaggaggatgctatagacaactagtgggtagagcccaggaatgctgttaaacatcctatcattcacaggacagtcccccgcaacaaagaattacctggcccaaatgtcaatagtgccaaatttaagaacccctgcattccccagcccccaggacagctttgctgaatgaattatgaatgaatgaatgaagaaatgactgtggtcctgatcagctggtagcaacgggaatagagagacgcggtagaattcttgtagttttggagattttggaggtgtgttacacagcatttagggtgatagcccctgtcttttccaggagagggtgtgttctgcccttgcctggagctgggcacaatcccatccacttggggcctcagtcaccctccagcccgactcctcccctcccccgaccacctcccccagcttgggagtcctctgagctgccaggaagccagggtggttccttcgggcagggaactttgcatggccatggtggttccttcgagagaggaactttgcatggtgtctgaatggagcaggcctgcggaagagaaaccgctgaccacagacctgcctggaagtctcgggccgcggagttggggagggccgggccagaagggaggggtcggagtggtggggaaaagagatcacgatgcttccggggtagggtaaggcctttccagggtgggttggaatctttgaagactgtggcaggaatcccttgataggtggggttaggatctctgaagggcagggttggaatctttggaccggcggtatagacccctgggtattaaaactcttaggcggcgggaggttagatcgcgcaggagcaggagcggtattggaaccctggggtttgtgttctaaatcttagggcagggttagaatccactgaagtgagagttcggatccttccactgggcagattagaatctttgggggcaagttgagtttaaaaatccttcagaggtgggattaaaaatcctttggcggggcggggttagtatcttgggagccttggagcgggtgctggggttcttagacgggcgggttcgaatccctaggagtgggatttgggatcctttggagactggggtaggacgctgggcggtgggatggggaggtgttagggaaagtggagcggaagggatgggggttcgcatccttggtggacgcgttagaagcctcctatggatggtgctaatattttttttctcttcgtggagggtttgggatccttcttgcaggagacggaggttatgaccctcggggagccggttaggatcctggggtggcgtctgaatcttcggggaggtgttaggacacttggggcggagttagcctcgctcagggcgcggctaaggcgcccagatggcctgcgggcgccaccacgtccctggtcccagctcgggagcacatcagaggcttagaggcgagtgggaagggactcagacagtgcaggacgagaaacgcccgcggcaccaaagcccctcagagcgtcgcccccgcctctagttctagaaagtcagtttcccggcactggcaccccggaacctcaggggctgccgagctgggggggcgctcaagctgcgaggatcc

SEQ ID NO: 26414 - DNA, 2300 bp, Homo sapien
ataattgttcgaatccgggagtcagaggttacagtgaactgagattgcgccactgcactccagcctcggcaacagagtgagactccatctcaaaaaaaatttttttcagaaaaaaaagagaaacttgcccatgttatggagctaatgagtggtggaaatgcgttctgaacccaggcagtctagttctaggattctggcatatgtcaccaaaagagattgggatatgaaaggcctttagggaaaaatacaaagcatgagaaaaaaaatggaaatactaaaaaataataggccatttatggagctttgctccttatcagttatctttcttcaggcagctagaaatggtgggaaacactcaggatcgaagctctaggaaaactggttccaagtctggaaactatgagactgcagcaaattccccctagtctctcaagcttcctcctccttggggttaatagccaatctgccaatcttcaggatggttgtgcaggtcacaagagttaatgggtgtgtgtttcaatgatctattactgaaatgatctataataaaccaccccactctaaagctgggcttagctgggcagttcttttggtccacatggtgttcatgaggttattcatgtagctgcattcagctagtagctcagtgggggttggaatgtccaagatgacttcagttacatattatagtgcttagctgtagtttctagaatgtcttgaggagttggctgggcctccctctctctccaggtgcctttccagcagagtagctacacttctttataaccaagaaggtagaatcagacgttttcaatcctcttaaggcctaggctcagtactggcagaatcacttgtagcacatcctattggtcaaagcaaccaacatgaccagccagattcaacaggaggtaaaacagagtctatctcttgaggagagaaaccgtatgctcatcatgcaaggacggacagaactacgtggcagccatctttgcagaaaatccaccacagtggtgcccataggtggggatcagagttcaactgtcccttgccccctagaattagataaaaagagtctaatgaactgttagcataatgctaagtgctgcagcacacaaaatgctcggcaagtgctgatgattattattaatcattattattcttttaatagcttttttaaaacagtctaagatagcactggtactgtattcagtttaaagtgatatacatgggtcaaatgaactttgagttctttcccaaccttaataccatgattctttgagtctctttttcacagatttggaaactgaggcttaggaagattgcgtgacttgtctggagtcacacactaagctagtgcatgacgtccacattcagagatatctccctccactgaatatgctggttttcactcgttcatttaaaaaataatgtattgggcatctaccacaagcccaaaggagtatacataaacatatactgacaattatttattgaatacatcctatgtaatactgtgtcactgaatcctcatcacaagcctatgatgaaccaacccccttcccatttcacagatgggaatgaggaagagcaaggtaaaaaacgaacaaacaaaaaaacagggtccaccctcatggggattacagtctactaaagaggatataggatagtcaaacaaatacttaaaatcaaacaaatacttaaatatataattacaaattattcttggagtcgtactgctcttggagccccagtgcccaccctttccctcaaatcaaggtctcaggtaaccctggcaatgggtcttcctgccagtagtaaagatggcgctgagagcacgagcgcactttcgcacacccccattacccacaatgcagcgggaataagggaggctcagtttctgccaggagctaatatggcttccttagttacaccgttctctctcttcacctaatcagcgaccttactttcccagaccagactgtcgagcaggagctaagactccttttcccctctgctgaccgccactacaggagcggttgaagccagacgaccaccttgtggagttaaactccgtaaccagggagcaccacttccgctgacgtcattacggcgacacgtggatccaagatggcgacggcgatggtgagtgaaggagactccgggagcgggagctggagcggggccctccggggtatcccaggatcttccagcaccccatgcctggccctgagccacctccgggacccctgactcaggcctgagggctacctctgactgggcttgtcttccccgaaatccac

SEQ ID NO: 26415 - DNA, 2300 bp, Homo sapien
gttagcattaggggaaactgggtgaagaatgtatgggaaccctctgtagtgtctgtgtaactcttctgcaaatctaaatttacttaaaaataaaaagttcttttaaaaaaaaatgacagagggaaaaaaatactgtcttcctatccttcctatccaaattgccccatgaggcaatttacctactagtcttgtcatttcttttaaagattttcctgctctcctgattcatctggcctcctgattgccaaatacaatacacctgtcttagccatggcactgtgtttactggagtcaggctttcctaatgaacatcagctggcagatacttgtaaacgttcacaacaaatcggaggaaaaactccatgaaaatattgcttaaaagactttgaccaagctatgtgtctgcaaaaagtgtactgaattcagaaccttttacaaattcagaaacttgtaaagccatttttccctcaacttgtagtccaggtaaaagtacaggtcagtctacatttttggcaagcctcctcagtgatcctgatttcctataaaactgagtttcacagagtcatcagagtgtgtgtgtgtgtgtgtgtgtgtgtgttggttagttggttgcttggttggttggatggggtgtaacttgatggatgggagggctgtggagacaggtgatcaggaggctgtggccaatgtccaggtgggaggaaataagcatctgaaatgcaacagcagtgaaaggttagggagagtagtcagatacagaaactgacttgagttggtgatttaggcgtgtggaagacaaaagttcgttgttcagactgcgtagaaagaagagaatccggcagcttttctagttccttgcaggggtgaagcactattattaagggaaagagatgcaatggacctttcttgcctttgattcccaggtgcctatgctgcatgcagatatttcctgagtccccatgctgtgccaggcactgttcgtggtgctgctttcctagagatcacattcaagggtagggggacatgcaatacgcaaataaacatatacatatagtacatgtcaattagataagtccatgaggagaaatagataagggactagagaaatgggtaatgggagccctgaggttgttttttagatagaatggtcagtgcagacttctctgaggaagtgatatttgagagacctgaatgaaataaggagatgtgccattgggcgtggtagctcacacttgtaatctcggcactttgggaggccgaggtgggcagatcacctgaggtcaggagttgaagaccagcccgggcaatgtggtgaaaccccgtctgatctaaaaatagaaaaattagccaggtgaggtggtggatgcctgtagtcccagctactcggtaggctgaggcaggagactcacttgaacttgggaggcagaggttgcagtgacctgagatcatgccattgtactccaacctgggtaactccgtctcaaaaaaaaaaaagaagagagatgtgccgtgcaggtgcctgtgggaagggcattccaccagaaggcacagtaaagacgaaggccctgaggggtgcagaaaggtttgttgtcaggacaacaaggaggcccgtgtggctgagctgagcgaggaggagagtgggaggtgagagaggccagcacggttttggagaaacttgtaggaacatctcttggtaacataggagcttttgacagcgtgaactagttgctatacagagaaatgggaattaattaaatgtcctggagctttatttcctgccagctatcctgggagttacacactataaatggttaaaagaacattgatccagaagtggggagacatggctcctgtgtgatagtcttcccttttgcccagatgttaattactttgtggctaactcctggaagtgcagaattgtcctgtggcactcttgggagcatttgggagagaacatttatgaggtcttcaggcttcatgggtcagagggtggctacactgggtcaattaaagcaacatgaaggtggtatgacttgatctgcctcagaggatcttcttcacttcttctccccaatccaaccctggcctctcttctgagcaggattggttgccgtggtctttactgcttttctccctgatgtgtgaaacaagcgccttctatgtgcctggggtcgcgcctatcaacttccaccagaacgatcccgtagaaatcaaggtaagtgtgttcctggatttttggagcctctgtgctaggcagtgtgtctggagcaccatggtgagctgttcgtgtccatcctgtg

SEQ ID NO: 26416 - DNA, 2300 bp, Homo sapien
gttcaaatgattctcctgcctcagcctcccaagtaactgggattacaggtgccccccacagtgcccggctaattttttttttgtaattttagtagagactgggttttaccatgttggccaggctgatcttgaactcctgacctcaagtgatctgcccacctcagcctcccaaactgctggtattacaggcatgagccactgctcccggccttcctgaacattttctgtttgcagttgattaaatccacagatgcagaacccatggatacagaggaccgactatgttgtgtttttattaaaatggaatccttctatacacatagtttatagcctcctttttacacttaatagtatatcatgtagttttattctgacaagattgggagcactttgtacagtgttgttttttcccttcttttcttcacataatgtgccacatgtaatctcttcattttgacctcttcatctcttcacgttctcagtccactccttcctgttcctcccctacttcctccctggatggtgagctcctctgggatgctgaggtgccttcttcactgggagtccagatcagggctggggtcagcctcaagagattctggccaggagccctgtggtgggggcagggagtgtgcttctgctgcacaagtcgcctctccttctgtggagcccagaaggtcccctcccccttgcgcagcccccatcccgggcatcagggcctcgtgggggcctcatggtgccatgtctacaggtgccctttcccaccatggtggctctgctgtgcatgtggttcgggatctccctgcccctcgtctacttgggctactacttcggcttccgaaagcagccatatgacaaccctgtgcgcaccaaccagattccccggcagatccccgagcagcggtggtacatgaaccgatttgtggggtgagtcctccagcagaggcaagagcaggggaacgtggaagagggtacgcccccctccgccaccagaagggtgcggcaaccagagttcctgccgcttcagccggctctaatagagtttatgaaagcttaacttcactccaagatcaaggtgaccaggttgtaggcagacttggtgtcatcctaggaaccaggacaaggaaggggaaggatggaagggtatagtgagacaggttaagaccatcacttggaccttgggcaagtcaccccacctctctgcaccccagttgcccatctataaaatgaggagaataatgcccaccctgcctacctctcaagagattataatagtacagaaatatgccagaagaattagcaccaccacactcgtgtaggtgctctctcttcatgccagcttgggaaggagcttggggcttcctggtggcctggtctctaacaatgtcaacctctcgttctgtggcagcatcctcatggctgggatcttgcccttcggcgccatgttcatcgagctcttcttcatcttcagtgtgagtactggtgcctcccccacccctccacccatgctagccgggtcactcccactccactcgggtgctctgctgcctactgcctgagaaagttcagatgggccacttcacctctcggagccccattcttcaccctgaaattggacaacagccttccctctcagggcagcattgaaagtgaaatgaggctgggcgcggtggctcacacctgtaatttcagcactttgggaggccgaggtgggtggatcacaaggtcaggagttcgagaccagcctgtccaatatggtgaaaccctgtctctactagaaaatacaaaaattagccgggcatggtggcacacgcctgtagtcccagctacatgggaggctgaggcaggagaatcacttgaacctgggaggtggaggttgcagtgagccaagatcgcgccactgcactccagcctgggtgacagagagagactccatctaaaaaaaaaaaaaaaaatttaaatgagatatgtggtgtgtggggagcctggtgtgtggaaagggggacttggtaaatagaagctgcctcagtgatacttcagtcattccccaccatgactaatagcatcgttgcacctggtttcatttctgggtccttgcacatctttacctctctgtgttactcacagctcctgggagggtggacagaatgattcctgcttgtcagggtcattgtgaagttggaataagtcattgtaaaaatgcttgacttcaggaaatgctgttgtaatggtgatgatgactcctcccaaagagtgccaagatgaaagttggtaggaaggcccttcagaggcatgtaagt

SEQ ID NO: 26417 - DNA, 2300 bp, Homo sapien
atgatttcaaattgaagggggagtagaatttgactttgaaggtaggggtaattccctccaatctaaacatgcacactcgagcacactctctgctcaattccaaggtgcatagtaattgctggtattacaaacaggtaattccacccttgcaaaggaggaggggacttaaacaatgaaagccagacgtcacaggcctttgaggtttatagtgaagcaggcacatatgccataatgacttgaaggctcaagtgggactagtttttagtgctacctacccctccccagcatgtgattcatgcaaaatgcagccaccttaatgcagatctttctagacaaatctacactcgtgatggggacgtgtttatcatattacatcgcagtgtttcttcaacaagaggaatggttcctgaacaggacgtagctcatgttaatgatgagcaaagctctctggggcatgaacccgctgatcccatcatcttgttcacggccagtctgttggatgaatggtcactgtaagcagcaggtgctaatgagctgagcaagcattctgtggcccacagctagtttgtgcagttggagccctccccagattctcgtggataatccccagacacccccttttctctcttcacatggaaaagcctcatgatcaaattttggcaccatctcttcaaagggaatccccctgttgtagcaggttgcatcgtggttggtaatctgtggtaagcttgggagtatgaatgtgggtctcttgtccccttttgagagtcagtgtggtaactcccatcctcttcctctggattagtatctggaatggagttgtgtcgttcttgcacatctccccttctattcaacaagagaaagaatcagactttaagatttcggctccccacttgggaatggctgcgaacccagtttaaaccagaactacctgggcctaggttggtccctgagaatcaacctgcattcagtgactagtttacctatctgaaataaagttagggttccttttctagatattaggtatatagagatgaaagagagatgatgcaagccctcagacaatcaggctggtggagaggagtaaattccaatgcgagctcgctaccgtcttctaaaggagatgtgcatatgtactctgaggccctgtaggaggggcctctcagcacctaggggtgttggacaggctttgctaaagagggatggtctgggccctgagacacagtgacccagagaagtggtggtggtcaggatgggaccagttctagtcctggtttagggaaaatgctaagaatctgctgttgccttcccatatagaccctcctgatgttgatgcactgctaagaaacacatctggtaccaggactgactaggatgtaaatttcctaagtagaggcttccccttcctcctctcttgccttttgggcattttattgctccttagcacctccatgaggaggacaattgtggaaagtagtggacgaggaggtgccagggtaataagaaggaggaaccgctatctctaggttcaatggaaaggatataaaagtgaggtccagaagaaaaagtttgaagttttggggcttttggttcctcagtttatcttgtttcttattagcctagatggtactagtaatagtagctaccactaagcacttaatggatgcccagccttctgctgaatgctttatattcatgatctcatttaatcctcaaaacatttttataatttaggagattattatgcccattttataaatgaggaaacagctcagggaagtaagtaattggctgaaagtcacacagcttctaagtggaagggctgggattggaacgggatctgtctgcttccagagcccatgttctcatggtattgggctccctaacaccaggtgttctgatgtttcaggtgaagagattgttttctgaaagctgcgttggaggctgtgacagagctgagagcctgtgtggagcggatggggaggctttctcaataacatggccctttgccattagccttgccatgaccacatttttcaccagcgtccccccctggattcaagatgcaaagcaggaggaggaagtgggctggaaactagttcccaggcctcggggccgggaggcggagagtcaagtgaagtgccaatgtgaaatttcgggaacacctttctcaaatggggagaagctgaggcctcacagcctcccgcaaccagagcagagaccatatagctgccctcagctgcactgtggcaaggcttttgcttccaaatacaagctgtataggtaggtgacactctcat

SEQ ID NO: 26418 - DNA, 2300 bp, Homo sapien
tctttgtattgagttgcatgtttccaccttctgctgccacactcaaattctcctcactcccccctaaaaaacagttgagagataacacccctgcacaaggaaagggttaatctttgagtgttcttaactaaagagacccacagaggattaacagctccacttcagtgactaccctaaaatagcttttatcctcctgcccaagagttacttggggatctgaagaactcaattcaacacctgccggaggaaatagacccagaacgttccttgggatagaatcttcccttaagcagaacccaaaatagcaactgggaaattataaatagacttagaggaaagaaaaaacaaaacaaaacaaaacaaaaaacagatcctgatctcagaaccagaaacaaatcctaaaacacactggttggctggaaaacagtgagaagaggggaaatgggaatgctgtcgcccccttcccccccgcccactccagagtggtgggagaattaaattacagggaggctggagagtctcaatgacttgcaccattccaagaaacatcaaacaggattaacaggggttggatttactctcaggctgctaattcttctgtcagtgtagatgggccctctttggagtctctttgattcactatttcctcagattcctgctgcctcccactcctggggaggccttgaacaaatggctgcaactcatcacaaccccattttcatggggagaaaacgtgattcgacacccccgctcccaatctggtggcctcaccttaggagagaaaggttagaaacccaagaccagactctacacacagtcccatggctgacaggtggaaaaacacacaagccaggagacaggctaagcttgcaggtgaaagcaccgattcccccacacaggtgtccccatatcctccacctaacaggcccctttctccccaccaaggtgggccacagcctggtcccaggccaacttttagatcaccccactgtggtgtgggaaaggttcaattccccgagcctgggagagatgggagtggatgagggctggagaagcaaaggaaatccagggagaagtctggagggagtctctgggatgggaaggaagagcgaggatgggaaggaatcatgagcaactttcctgggtctctaagggatccccacaagaatgaaatgggggattataagggctggaaggctggggggatggggatagtcagaagtgtatcctctgaatttcaagagggtctcaaaatgggtaacgggatggaagatgtcgaaagcctgggagtatggccactgaggagggaactacaggtggggcttattcgacttctccagacccagatatttgagggaagcctcaaagggagttatgtaagtctggaaaatgaaacagggtacagagcgggctatctggagcaggaaagggggttatgtgggtctgggtaggcgtgtcggagggagggagcaggtgcagcttatctgcgtcccccagacccgggtccctggtaaggtcagcagcgccttatctgggtctccagggagcctaggggtcgggaatgggggaccctcaggactgcgtctccaggtctcggaagggaggggaccggtggcttcctcgggtcccccagacacaggtatggggtccagggagagttttcgtcaccccagggcctatctggggccgggttggcgcagaccgggccccgggtcgggggtgtgggcgaccgcgctgaggggcccgagatgaggcgcgccgccgctccgggtacagggcgcgcggacgcagcgagacggcctcccgcccctctccccgccgtcccctggggccctcgccggcactcaccgcgctcggggccccacgctgcgggccgggccgcgctcgggctccgccaggccccctcaggccccggtagtggcggcggtcgggccattgtgcggtgcattgtgggagccgcgcgagcgggcgctcgggtcgtggagggggcggtgccgcgggatctctatggtcccgcccgcccgcgggctagagcggccggggcggtgcgcgggcggcgcgcagggaccgctgggagcggggcgggcgctcgcgtccctccttccctccccgactgtgcgccgcggctggctcgggttcccgggccgacatgggcgccgccgcgtgggcacggccgctgagcgtgtctttcctgctgctgcttctgccgctcccggggatgcctgcgggctcctgggacccggccggttacctgctctactgcccctgcatgggtaaggcctcccaagccctctgctcag

SEQ ID NO: 26419 - DNA, 2300 bp, Homo sapien
tcccatccccacccaatgcctctgatcttgctgtccctcagccagaagagcttctacctctatctccattcacctgcacatggacgggcaactcgaatgcctcattcactgggctcctttcaccaatcccctgccatactcactctccctcctttacctcccaccttggctctgagctacttcagttcttcaattttcctcaagtatctttgctcacttcctggccttcgtactggctgattcctcagcctgtgaatgcctcagaagcaaggaccctgtgtgattccttttcttaatcccagcatggcacctgttcattcatttcacaaatatgattgagaggccacaatgtgccagactctgtgctaggtgctgggatacaggaatgaacaagaaggacaaggcctctgcccctaaggcactcacagttcactgcagagacactaaacatgtaaacaaatacatgaaaaatgttgataattgccagaaagagatgaaaaaagtttggtgatagggtaatgaggagattacttgggtagaggtcagtgaaatcctttctggtgacatttaggctgagatctaaaggatgggaaacagctggtcaggcagaaatggaggagaggattccaggcatagggaccgccacctgcagcagtgcagactggaagacctgagcatgtgtgaggaacgcaaaggagttaagtgtggctgcagctggaggatcagcagagaagggagttgtggagatggccagtggaggccacatcattcagggccctgaaagtcatggtcaggagtctggaagccactgggggccttaagatcatccacttccacaatgatgatccaccatacccatttcaactgtgcacctggcatggtctttagattctcccctaccctgctctctttattttcccttagtattcatcatcctctatgaaactatgtatttattgttttatgtttacccctttttgggtttgcttgtttcgagacagggtctcactctgtcacccaggctggcagtgcggtggcacgatcagagctcactgcagcctcgaattcctcggctcaagagatcctcccacctcagcctcccaagtagccgcccagataactcccaagggactacaagcacacgataccacgctctgctttttttttttttttttttttttgagattggattttcactatgttgcctaggctgatctcgagctcctggcttcaagtgatcctgcctcggtctctcaaagtggtgggattacagaagtgagccaccgcgcctggcctacttattctcaattgtttgtcttccccaactaaaatgaaggctctacaaggacacggagtttatcttattcactgcggtattcccagtacagagaacagggcccggcacagaataggtgccccataaatatttgctgaatcaatgaaaaatcaccaggagccagcgtgggtcagtgacatcaagtcctgccccactaactccatttactggaccctggactggcttagacctcaagcaagtcacgtaacctctcccagcctcagttttctcatctgtcaaatggaaagttggacacgttggcccctctgtgcccttgcaactaaggcagagaggagaagagcatgccccgtcccgctctgaggttctctcctggacctgtgaaggtgtctctgggcgcatctgaggagtggcttttcctctcccggcctcagtttctccatctgagcagagggcttgggaggccttacccatgcaggggcagtagagcaggtaaccggccgggtcccaggagcccgcaggcatccccgggagcggcagaagcagcagcaggaaagacacgctcagcggccgtgcccacgcggcggcgcccatgtcggcccgggaacccgagccagccgcggcgcacagtcggggagggaaggagggacgcgagcgcccgccccgctcccagcggtccctgcgcgccgcccgcgcaccgccccggccgctctagcccgcgggcgggcgggaccatagagatcccgcggcaccgccccctccacgacccgagcgcccgctcgcgcggctcccacaatgcaccgcacaatggcccgaccgccgccactaccggggcctgagggggcctggcggagcccgagcgcggcccggcccgcagcgtggggccccgagcgcggtgagtgccggcgagggccccaggggacggcggggagaggggcgggaggccgtctcgctgcgtccgcgcgccctgtacccggagcggcggcgcgcctcatctcgggcccct

SEQ ID NO: 26420 - DNA, 2300 bp, Homo sapien
aggtgtaggatataggaaagttcagtatgacagctgtgcagtaggcctggagagcactggtccagatcagagctgaagccttcaggagaaaaaaacaaaagagaactcatgaactttttttttttttttaagttgttgttgtttttgtgagatggagttttgctcttgtcacccaagctagagtgcaatagggttatttcgggtcactgcaacctccacctcctaggttcaagcaattctcctgcctcagcctccaaagtagtggggattacaggtgcctgccaccactcctggctgatttttgtatttttagtagagacgtggtttctccatgttggccaggctggtcttgaactcctgacctcagggtgatctgcctgcctcagcctcccaaggtgctgggattatgggcatgagccaccatgcctagccgaattgttatgttacacatctggaaaaatcactgctgattattttgtctaatttattaaccacataggaaaaaattaacaatatctgcaaagaaagctaatgaaaggggggaaaaaatgaggcaattattagcttcaggaaataccaaaagaggctgggtgcagtctcttttggtatttcctttattattttatttaaaaataaacttcttcactgtagagaaagtgtaaatcaaattatgtgggagttttaatgggccaggcctgagaatagcacacatcacatttaattggccagaacttggtctgaactgtaaggaaggctgggaaatactgtctagttgtgtgtccaggagcaggaagaaataacgtttttgagaggaagtagcaatatctgccacaacaggcaaaaagtagttgtaggcagatgaagaagaccatctcaggtattcatttattcaaggagcaaaacatatttgttcagcaactactattgactaagcttggttccaggcatggtggatacaagagtgaacaaataaaagactgctcttatgcagtttctatttagtggggaacagcaggtgtaagttccatgggggttggaacctgcccttctaggccagtgtggttggaatagagttttaacgaattttgcaggaagtaataaggacttcatatttgattctaagagcaatgagactccattaaatcgagtattaatcagaaagtggcatgatctgttttatttatttatttatttatttatttattttaatctttatatctgagacggagtttcgctgttgtcgcccaggctggagtgcagtggtgccatctctctcactgcaacccctgcctcccgggttcaagcgattctcctgcctcagcctcccgagtagctgggactacaggcatgcgccaccacgcccggctaattttttgtatttttattagagacggggtttcgccatgttggccaagctggtctcgaactcctgacctcaggtgattcacctgcctcagcctcccaaagtgctgggattacagcgggagccaccgcacctggccgcatgatctgttttaaataattactctggccaccttatggaaaatggattgttcggacagagctggacaaaagaatggaaacagaccagatatttcaggcaggctagagatgagcgtggcctggccttgcctggggcggttgtgactgactggattgggtgaaggacaggaaagctacaacaagggtgcctataggtgttcgtattgagtcactgggggcaccctaaatgggagttacctcagtagcagtttgagacaccagtcagataatggatgtgaaagcttttagaaaggttgaacggcggctgaaatcgcgtgtgttccatttacagatgggaaactgaggcacgagataccagaggatggagtcaggccacgttgtgcgccactctccccgcttaggtgggtgaggagaccgaggtgtgttgggcccccgctaaacaccagcaccgacctgagccccgcccagacccctccagccggctttccctgtcctctgctcgtgtgccaataaagttattgaaattgacaccggttgctaaggaagtgggtcgccgagccaggttgctaaggaagtgagcggccactgtctctccccatccggggcagcggggaatggctgagccaggggttcgccgcccccgccgccgccgccgccgccgccgccgccgccgccgcccgctttcggctcgggcctcaggtgagtcggaggggccgggcgcccaccgagcagggctaatcctgtggccgcctggggttttccctgcgacctgcgcccgcgcctctgcctggctttgc

SEQ ID NO: 26421 - DNA, 2300 bp, Homo sapien
ctgacctcgtgatccacccgcctcggcctcccaaagtgctgggattacaggcatgagccaccgcgcccagccgcttattttactttatttttaagatagagtctcactctgtcatccaggctgaagggcagtggcgtgattgcggcttactgtaccctcaacctcctgggctcaagcagtcctcccatctcagcttcccgagtagctaagactacaggcatgagccaccgtgtgcagctaattgttgttggtattttttttttttttttttggagagatgggggctccctatgttgcccaggctgatctcaaacacctgtactcaagtgatcctctggcttcagcctcctaaaatgctgggattacagatgtgagctactgtgtacagcctaattcacaaattttttggagacaggatcttgctgtgttgcccaagctggtctcaaactcctggtctcaaggaatttccctgcctcggcctcccagagtgagacccagacttaaaagatttccagctgcctcagcctatagcataagatcagatattgattgagaggaggatgggctagccaacaacactggtggactgcagttttttatttttaccactgaagctggttaagatcctgtgaggaaatatacagtgtagtaaagttatcagatatggctgtcaggttagcaagatgaagactatttaggtgtgtcagcttctgtcaggcaggctgcaatgacaacggtactgtgcttatttacttttgctttttctctaggaccgtagcatcctgagacattttgaattgacacttctcaagatttgactggatcagagttcatcatgtcaaagttgaaaagctcagagtcagtcagggtggtggttcgctgtcggcccatgaatggcaaggaaaaggctgcttcgtatgacaaagtggtggatgtggatgttaagctggggcaggtgtctgtgaagaaccccaaagggacggcccatgaaatgcccaagaccttcacctttgatgccgtctatgactggaatgccaagcagtttgaactgtacgatgagacgttccgaccacttgttgactctgtcctgcaaggtttcaatggaaccatttttgcctatggacaaactgggacaggaaaaacctacaccatggaaggaatccgtggtgaccctgaaaaaagaggagtcattcctaactcatttgaccatatcttcacccacatctctcgatcccagaatcaacaatacctggtcagggcttcttacttagagatctaccaggaggagatccgagatttgctctcaaaggatcagaccaaaaggcttgagctcaaagagaggcctgacacaggagtgtatgtgaaagacctgtcttcctttgtcaccaagagtgtgaaggagatagagcatgtgatgaatgtggggaaccagaaccgttctgtcggtgctaccaacatgaacgagcacagctcgcgttctcatgcaattttcgttatcactattgagtgcagcgaggtgggcctcgatggtgaaaaccacatccgtgtaggaaaattgaaccttgtagatcttgctggcagcgaacggcaagccaagaccggcgcacaaggggagagattaaaagaagctaccaagatcaacctctccctttccgctttgggtaatgtcatctctgctctagtggacggcaaaagcactcacattccatatcgggactcaaagcttaccaggctcctccaagattcccttggtggcaatgccaagactgtgatggtggccaacgtggggcctgcctcttacaacgtagaagagactctgaccactctgcgatatgccaaccgtgccaaaaacattaagaacaaaccaagggtcaatgaggaccccaaggatgccctccttcgagaattccaggaagagattgctcggctcaaggcccagctggaaaaacggtccattggtaggaggaagaggcgagagaagcggagggaaggtggtggcagtggtgggggtggggaagaggaggaggaggagggagaagagggtgaggaggaaggggatgataaggatgattactggcgggaacagcaagaaaaactggagattgagaagcgggccattgtagaggatcacagcttggttgcagaggagaagatgaggctgctgaaggagaaagagaaaaagatggaggacctgcggcgggagaaggatgctgccgagatgctgggcgccaagatcaaggtaccatacccgtacccttccttaggcccttgccctgtcactgcttttgctttcatcaaac

SEQ ID NO: 26422 - DNA, 2300 bp, Homo sapien
tatcttttgccaaagaatgctggctggtaatcccagcactttgggaggccgagatgggtggatcacctgaggtcaggagttcaagaccagcctggccaacatggagaaacccagtcactactaaagatacaaaaattagctgggcatggtagcgcatgcctgtaatctcagctacttgggaggctgaggcaggaggatcgcatgaacccaggaggcggaggttgcagttagccaagatcacgccactgcactccagcctgggtaacacagcgagactctgtctcaaaaaataaataaataaataaataaaaaagcaacatattcacaggttccagggactaggacttggacagttttgggcaagcggggaagacattattctgtctaccacagtacctgtattaaacatgtaaatttcagttattccctgtaggtcagagggcagtaaagctacttcagaagacatcggaaagaagccaaatgacttgccaaagagtactgtatcagccgtagattgaaaaaaaagaagttaaaaatcctttgtaaaaaatcaaggcaaacagttttttgagggacagtagttcctcctttctctcagggtaaagctagagagatttttaagaggtgtcttattctaacttgcagtcttttccctttgtaggattttgcttaccggactcacaagttttctgtgaccagtattagaagcagaaaacactgaaccccttggcgttagagtttgggctacaccataatggtctcctatcaatactggctctcgctacgtgttaacattagggagtggagagtgtgtttcctcacccagggaaaccgtttaaatgtggccactgatcctgccttcatagtttttaagagctggcatcaatccaactccggacggactctagaaatgtttctggacaacgactgaacctatagttacagaaaacctatgtgctgggcgctctgaatttcatttcaggttctaaaactaaggctcagagaggctaagtatattgcctattgtttctcagctggtaataacagctaccatttattaaacatttgctctatgccaggcgccatatcatacggacctgataatgtcaagatctcccttcacatcctcttccaatctgtcaagaattgtatgttaattttaattccaataatgccatgaaatacaagacaaatgcagatcagaaaactgaggctcagagaggttgagtggacagccagggagtgactcagccaagattccagtctaggtccgctggactccagggcctgaattctctccagggtactgcctctaaaaacgccctcaggtgcattctggtcagtatggccccagagtccaagttctttacacgacccgtcaacatatcaccaagttcctaagaacgctctaggctgctggtgcaggctctgcaaatacacagcggcctgaaagcacaggaagaaatgaagaaccgtctaagtccatcagccgtggaataaccgttttactggtatgagggtctttttgtctcattattatgtggcagtgagtcatttagaggtgaccaaaagggaaagtcctgcctctcgtcccctacgagaagtgtaggtaagaaccgtttaggcgaggagaagcacgaagtgggaactgcgagtcgagctccccatcctcactccccacccgcacccgccaggaggtcctgaagcaaaaagcaccgaaggggttaagggtggccgggggagcccagccaccgccccttcccagcatcgcctcccagaatcccgcaggcccccagccagttctcgcacctcgcgagactccacccagccccttccccgaacagcgacccgtccccgttcctagctgaggtcggtgctaggcggaggacgcgagagggagagcggaagggggccgccgggcacgccgggaagtgtggtccacgcgcttcacgcggccatattcttccggagcgggggaggccagagaggccgttgggactacgactcccaggcgccctttcggtttgtttttgttcaaaaaaaaaaaaccccacactccccctcctcactcttcacacacactcacacacacccacggcagacacgcacgcacccgggcgccgaagggaaagccgcgtctcgccctcccgccccgccgtcggtcctgtctcagtccctcagcagagcgggaaagcggaggccggagccgtgacctctgaccccgtggttatgcggagccgccgcattccttagcgatcgcggggcagccgccgctgccgccgtgggcgactgacgcagcg

SEQ ID NO: 26423 - DNA, 2300 bp, Homo sapien
cagaaaacactgaaccccttggcgttagagtttgggctacaccataatggtctcctatcaatactggctctcgctacgtgttaacattagggagtggagagtgtgtttcctcacccagggaaaccgtttaaatgtggccactgatcctgccttcatagtttttaagagctggcatcaatccaactccggacggactctagaaatgtttctggacaacgactgaacctatagttacagaaaacctatgtgctgggcgctctgaatttcatttcaggttctaaaactaaggctcagagaggctaagtatattgcctattgtttctcagctggtaataacagctaccatttattaaacatttgctctatgccaggcgccatatcatacggacctgataatgtcaagatctcccttcacatcctcttccaatctgtcaagaattgtatgttaattttaattccaataatgccatgaaatacaagacaaatgcagatcagaaaactgaggctcagagaggttgagtggacagccagggagtgactcagccaagattccagtctaggtccgctggactccagggcctgaattctctccagggtactgcctctaaaaacgccctcaggtgcattctggtcagtatggccccagagtccaagttctttacacgacccgtcaacatatcaccaagttcctaagaacgctctaggctgctggtgcaggctctgcaaatacacagcggcctgaaagcacaggaagaaatgaagaaccgtctaagtccatcagccgtggaataaccgttttactggtatgagggtctttttgtctcattattatgtggcagtgagtcatttagaggtgaccaaaagggaaagtcctgcctctcgtcccctacgagaagtgtaggtaagaaccgtttaggcgaggagaagcacgaagtgggaactgcgagtcgagctccccatcctcactccccacccgcacccgccaggaggtcctgaagcaaaaagcaccgaaggggttaagggtggccgggggagcccagccaccgccccttcccagcatcgcctcccagaatcccgcaggcccccagccagttctcgcacctcgcgagactccacccagccccttccccgaacagcgacccgtccccgttcctagctgaggtcggtgctaggcggaggacgcgagagggagagcggaagggggccgccgggcacgccgggaagtgtggtccacgcgcttcacgcggccatattcttccggagcgggggaggccagagaggccgttgggactacgactcccaggcgccctttcggtttgtttttgttcaaaaaaaaaaaaccccacactccccctcctcactcttcacacacactcacacacacccacggcagacacgcacgcacccgggcgccgaagggaaagccgcgtctcgccctcccgccccgccgtcggtcctgtctcagtccctcagcagagcgggaaagcggaggccggagccgtgacctctgaccccgtggttatgcggagccgccgcattccttagcgatcgcggggcagccgccgctgccgccgtgggcgactgacgcagcgcgggcgcgtggagccgccgccgcccctcccccaccgccgctctcgcgccagccggtccccgcgtgcccgccccttctccccggccgcacccgagacctcgcgcgccgccgctgccacgcgccccccccaccgccgccgccgccccagccccgcgccaccgccccagcccgcccagcccggaggtcccgcgtggagctgccgccgccgccggggagaaggatgaaggacaaacagaagaagaagaaggagcgcacgtgggccgaggccgcgcgcctggtgaggcggacagccgaggggggctccgtggggcccggggtggggggggctcgccgcgcacccccccactggggggggaggggcaaggccctgcccaccgcgggagggggcggggccatcttcctttaagaacgggacagccccgcaaggcgaggggtggggagcgctccgccgggatgggatgtggcgcctttttccgctcgccctcgcgccccccccgccccgcgcagctaaattccggcggaggggcgagctggcaggccggctcctcccactctgggcagcggggtcccgcgtcccctcccccactatttggcagcgtctgggggtctggggcagcttcgttcattcacccgggggagttgggtttccgggaagggtcggaagctcctccctcgcttcctggtgggtaatggggtggtgcctttgact

SEQ ID NO: 26424 - DNA, 2300 bp, Homo sapien
caagttcctaagaacgctctaggctgctggtgcaggctctgcaaatacacagcggcctgaaagcacaggaagaaatgaagaaccgtctaagtccatcagccgtggaataaccgttttactggtatgagggtctttttgtctcattattatgtggcagtgagtcatttagaggtgaccaaaagggaaagtcctgcctctcgtcccctacgagaagtgtaggtaagaaccgtttaggcgaggagaagcacgaagtgggaactgcgagtcgagctccccatcctcactccccacccgcacccgccaggaggtcctgaagcaaaaagcaccgaaggggttaagggtggccgggggagcccagccaccgccccttcccagcatcgcctcccagaatcccgcaggcccccagccagttctcgcacctcgcgagactccacccagccccttccccgaacagcgacccgtccccgttcctagctgaggtcggtgctaggcggaggacgcgagagggagagcggaagggggccgccgggcacgccgggaagtgtggtccacgcgcttcacgcggccatattcttccggagcgggggaggccagagaggccgttgggactacgactcccaggcgccctttcggtttgtttttgttcaaaaaaaaaaaaccccacactccccctcctcactcttcacacacactcacacacacccacggcagacacgcacgcacccgggcgccgaagggaaagccgcgtctcgccctcccgccccgccgtcggtcctgtctcagtccctcagcagagcgggaaagcggaggccggagccgtgacctctgaccccgtggttatgcggagccgccgcattccttagcgatcgcggggcagccgccgctgccgccgtgggcgactgacgcagcgcgggcgcgtggagccgccgccgcccctcccccaccgccgctctcgcgccagccggtccccgcgtgcccgccccttctccccggccgcacccgagacctcgcgcgccgccgctgccacgcgccccccccaccgccgccgccgccccagccccgcgccaccgccccagcccgcccagcccggaggtcccgcgtggagctgccgccgccgccggggagaaggatgaaggacaaacagaagaagaagaaggagcgcacgtgggccgaggccgcgcgcctggtgaggcggacagccgaggggggctccgtggggcccggggtggggggggctcgccgcgcacccccccactggggggggaggggcaaggccctgcccaccgcgggagggggcggggccatcttcctttaagaacgggacagccccgcaaggcgaggggtggggagcgctccgccgggatgggatgtggcgcctttttccgctcgccctcgcgccccccccgccccgcgcagctaaattccggcggaggggcgagctggcaggccggctcctcccactctgggcagcggggtcccgcgtcccctcccccactatttggcagcgtctgggggtctggggcagcttcgttcattcacccgggggagttgggtttccgggaagggtcggaagctcctccctcgcttcctggtgggtaatggggtggtgcctttgactccgggggtggaaaagcgaccccacattcaaggacgccaatggcatgttgagctttcccaatctaaaccaggtgcgtggagggaagcaagtgcttactcccagcttgaaccctgagcagcggttctctaactttagtgtcctgtgggcgacacctgggaggcggttaggaacgctactcctagggcccttcgtaagacctgctgagcctcagggtctgggatagagcctgggaatctgcgctttcaccagcttcccaggtgattcaaacgcagtggctcacggaccccactttgagaaacgcagactgggctgtttgccttcagaagctggactggaaattggtattttgaggagaactgaatccactttgcaaagaatgtatgttggacaaagacaaagtatctctgttgggagacgttgttcactgaggatttagcaagggagagcgtaacttgagtgtttgaagccgtctcgttcaaccgatgggggttgtgaattttgtgttcagagcgtcagaggacttgcaggtgaaatagcttccttttggattactcccacaaagctcagacactttgagacatattcgggtaattatctgctgataccagtagtaacaggttatactaagatgtcagttcctaagatctgtcacacagcgaggttgtggtgcggatagcataag

SEQ ID NO: 26425 - DNA, 2300 bp, Homo sapien
aactgaagcacaaaacttcagcatacaaacaattgctatttttgttccctgggcaacaaatgactagggaagaggatagcaagcaccaatgaaaattctgtagcccaaattccttcagtttttataaatctgtaacttttacagacttcgagaaagaaaaaggtgtacttcaggtttgtgtcaacccccccaatacagtctattttttttttttttgcacaacacctttgaagcagaaaactcacttcaaaataagagagaaaattaagtctgagcttcactcatcattaaaactgaattacaaccattacatataaactacagtgtcaagagacacttatgctatccgcaccacaacctcgctgtgtgacagatcttaggaactgacatcttagtataacctgttactactggtatcagcagataattacccgaatatgtctcaaagtgtctgagctttgtgggagtaatccaaaaggaagctatttcacctgcaagtcctctgacgctctgaacacaaaattcacaacccccatcggttgaacgagacggcttcaaacactcaagttacgctctcccttgctaaatcctcagtgaacaacgtctcccaacagagatactttgtctttgtccaacatacattctttgcaaagtggattcagttctcctcaaaataccaatttccagtccagcttctgaaggcaaacagcccagtctgcgtttctcaaagtggggtccgtgagccactgcgtttgaatcacctgggaagctggtgaaagcgcagattcccaggctctatcccagaccctgaggctcagcaggtcttacgaagggccctaggagtagcgttcctaaccgcctcccaggtgtcgcccacaggacactaaagttagagaaccgctgctcagggttcaagctgggagtaagcacttgcttccctccacgcacctggtttagattgggaaagctcaacatgccattggcgtccttgaatgtggggtcgcttttccacccccggagtcaaaggcaccaccccattacccaccaggaagcgagggaggagcttccgacccttcccggaaacccaactcccccgggtgaatgaacgaagctgccccagacccccagacgctgccaaatagtgggggaggggacgcgggaccccgctgcccagagtgggaggagccggcctgccagctcgcccctccgccggaatttagctgcgcggggcggggggggcgcgagggcgagcggaaaaaggcgccacatcccatcccggcggagcgctccccacccctcgccttgcggggctgtcccgttcttaaaggaagatggccccgccccctcccgcggtgggcagggccttgcccctccccccccagtgggggggtgcgcggcgagccccccccaccccgggccccacggagcccccctcggctgtccgcctcaccaggcgcgcggcctcggcccacgtgcgctccttcttcttcttctgtttgtccttcatccttctccccggcggcggcggcagctccacgcgggacctccgggctgggcgggctggggcggtggcgcggggctggggcggcggcggcggtggggggggcgcgtggcagcggcggcgcgcgaggtctcgggtgcggccggggagaaggggcgggcacgcggggaccggctggcgcgagagcggcggtgggggaggggcggcggcggctccacgcgcccgcgctgcgtcagtcgcccacggcggcagcggcggctgccccgcgatcgctaaggaatgcggcggctccgcataaccacggggtcagaggtcacggctccggcctccgctttcccgctctgctgagggactgagacaggaccgacggcggggcgggagggcgagacgcggctttcccttcggcgcccgggtgcgtgcgtgtctgccgtgggtgtgtgtgagtgtgtgtgaagagtgaggagggggagtgtggggttttttttttttgaacaaaaacaaaccgaaagggcgcctgggagtcgtagtcccaacggcctctctggcctcccccgctccggaagaatatggccgcgtgaagcgcgtggaccacacttcccggcgtgcccggcggcccccttccgctctccctctcgcgtcctccgcctagcaccgacctcagctaggaacggggacgggtcgctgttcggggaaggggctgggtggagtctcgcgaggtgcgagaactggctgggggcctgcgggattctgggaggcgatgctgggaaggggcggtggctgggctcccccggccaccctt

SEQ ID NO: 26426 - DNA, 2300 bp, Homo sapien
cagactcccggtagcccgcgatgagctgccgcacggcgctgatctccgtggggctgagctgagcggtgggcacgggcctgctggtgctggtgctggagggggtgggcgtgggggtggtggaggtggtagaggccccgcctttcatgctgaggtccgtgggccctgtggagagggaagtagggtgagaagggagcagccaccctgcctggcatctgggaggtgtaccttccttggcactgtcataacctatggcctagtgcccactgtgagttgggcactgaagtccgtggctctggtccatctccctgatggctctatccctagtgcttagaatgggcctgcgggcgacagggttctcagagaatcctcagggtgatcttgcaaggatccggttttaggtgaggaagaggcggccttggggcaaaggaactcctaagatctgcctctcctcagtgtggtgagcagagcttgggaatgggaaatactacttccattgaggaactgtgggacaagtgctaaaagaaagcctctgccagtgtgcctaaaggagcagcacccatctgtgtgctcttccccagcccagacaccgaggctggaaggggagatggtgtgcaggagactctgcaggtaggcaggggcccaacacacctgagagatgcgtgtggggaaagcccaggaggagctgagagtcgagccacaaaaggccaggagaagaaacatctgtgtgcccagacaagaaaggggcttctgtccagctggagagaggccagctgccctggttgtctggggggagaggtacaggccagactggccaggccataactgcacccccaggagggaccatggcagccagtggatggaggaaggggctgggtgtgtgaagcctctttctgctaagcctcaagcacctcgaatcccccctcctgggaggagtcctgtgcctgagtgaggtggagggttcatgctgctaggatacgagggagtgtgggccggaaccatcaggacaagactcagactcgcttctggagaaactgcccgccctttgtcctcggatgatggcaaagagggagcctgccatctttcaaaacacactaggggtgtgcgtgttggggaggggaccgccaggccctgtcctctcttggcctttcccaagaagctcctggctttggagtcaggcaagtgtggattcaagtcctgctctgctacttcattggcaaattctttaacttctctgggcctcagagccctcatctgccaaaactaggcggctcctgcgagcagaagctgagatgccggctgtgaaacactcagcacaggctgaggctccttctcagcccacaggaggcctgactgcctagactggcccaatagggaagggcttccaaagaggtttcagggctttctgaatgggctcccaggagacctggaagctcctggaatttgaaaagcattctacaaggtgttcggcaagaaacagccaaagaagagagaatctgggcaggtgcaggcagagctgccgcttccctgggaagccttctctgatgcagccaggtcagcttctctgttgtctgccctccccctggagtcccttccccacagctttatcttccacgggggtgtgaggctcccccagctaccctgaaagttctgatggtcacattctctcatgattgcatctccatggcagtttttatgctgctatgaagagagatggacaagctcttgtcacgggaggtatccagactggaagtaacatcttgggataaactatggaaacctgactgctgctaaaaggaagctggtgcagcccccaaatggggaaggaagctggagtctaagatgggacagtttgtcacatggggttatttcctctccggccagagaatgtggacaccaaggaggaggtcctaggaactattttctaaatagcgtccttggaattgagagttaaggaaacagttgagtctgttaaaatcaaacacagggggaaggggttggggctgtgtctggaaacagcagccaaacaggtgactgactcccagggtgttgtcacaatgcgggactgagaagcttggaacaggagtgcctctgctaacttctggatattgcaggggatggacccagagggatgcgggggaagagggtctggttctctctagggtggttctggtcccctctgcgtcatgcttgggagtggccagagcctcctggcatagtcaacatgagcagtggtcccggttcctttcttttctcctctccccaagtgctatcctgttcatgcctgtgctcagagcttcctc

SEQ ID NO: 26427 - DNA, 2300 bp, Homo sapien
ggctgccctggcaaacaggtccctctgccctcttgccctgcttccatgtgctttgcagccgtcatcaatgtttttctgctcattgtccatctccctcgtggatcgaggggtgccaggcaggccaggagtgtgtctggtccacagctgagtttcccagcacctagagcggagcttggcccatagcaggtgctcagtaaatacctgtcgaatggatggatggggagtttggagtaggtggcactttcaactgttactagaatactctgtcttttaagtcgtgagcatttgaacaatacccaagagtcttcctccttcagctgtgacttcaggtcaaacccagagcatggcaccccctgggcatccaggaagtagcaaggggcccatgcaagatgccccgttcctggttcccggagcccgcatggcacgaccagctgggaagatggggagccggctgcaccttgcagccttgctcaaggctccaaggaaccttcccccacctgccagcctctcttccccctccccttcgtctccctccatccagttagcacaggggagagttttgttgtccctttgtaccctttgtgcagagccttttgaacgtgtgtgtgtgtgtgtgtgtgtgtgtgtgtgtgtgtgtccctccgggtgtgtgagcgagttttcacgaaggagggctgtgggtggaggtgcttgtgtttatggagcaggcagcctgtgggagggaggcagagtgagtgcgtgtgcctgtgtgtggggagaggacactagaggacacgtgggctctgtccatcccccgaggccctgggtgtgccgcgtggggactacaggcgtcacagcccagctcctgtcctctggattcagcagagggtccacactgcacagaagctataaattccaggaaactccctaccagcccagccggtgggggagggagtggaggcgaatccacactggttccctagcacttggagcagatgtgtctgcctcagggacagcagtctaagaaagttccaaccaaagtgtgtttgctcactataaaagaggtgtctgtgaggggggccccggaggggaggcttggggggtgctctgtcagaggtcctcactgggggcccacagaggccattgtgtcttgctggggggaggccagaactccgggtgtgggagctgctgggtcatctttcttggttttacagccagctcccaggcacagttgcttgctgctcctgaaaggctgggcctggaggaggtgggggcccttccccctggagggctgggttgaaggggccccgccccgggggttcccggatgactggccaagggccggcccgaagccggcagcgaggagagaggaggcaggcgtggtcctctctagcaggccatccggctgtttggaacgccctggcggccccccaggcccttgagctgaaccccctttgcggtctggtccgaaccctggcctgccccgcccccttccttctctgcacttctggggctggccctttcagccctggaagctgcccaagagcgtatctttgaagcacagcaaaggttaggaaggaggaagacagaaacgtcctctgggctgggggagtgggagaaaggaattccatgcatgcttcatgggagtcagggcgccaggcctgctgggggcactcagctcagcctcagtgcctggtggcgggcatgtgctgctgcccgcttcttgccgccgggtcctgtgcagagtgagccccggtccctgggctgagagcagggagcggcagcccttgtttacagcgcttgtttcaaccttggctcacaagggtaagagccaggccctgccatccgcccctgcaggatgcgagacctcataattgtcttcaattacagacagtgccggcccttagccttggcttccgacaggaaccagagccggggccacttccaccgggcaagggggagcaccacccagccctcacttcaaggtttgagggctcctgccgccttcagggcactcccaaacgcccactggccctggggtccacccacaaggctgcctcaggctgatgagagcccgtccctgctgaatgcccaccttctttgtccctgctcaggatgagacttctgtgagcagcgaggattttgatatgagcgactccacatggatgtcagctgacccgcacctggcctccagcctgagccccagccaggacgagaggatgcggagcccgcagaacctccacagtcaagaggacggtgagtgccccttggtggcagttgaggaggggctgtgcccggccccctgctcccagttgtcctca

SEQ ID NO: 26428 - DNA, 2300 bp, Homo sapien
tcattattgggcaccagcatgtgtggataaataaagcctcccacctgccccacatcaccaaggatgagaagatccagtaaactggggagagtgaattggtttgaaaacacatttgatttcaggaataaaaggtgcaaatgagtaaatgtgcctaaaccctcttttaaaaagaaagtgtgagttttctattgacagcagagtcttgagcatgtgcggaaggaagcctgcgtggcgctaatgtgatgtcttgtcatcattttatttttctgacgggtaaacgctgggctctgaacctgtggggttgtacttcgcactcgcggctgtagagggagccttgtttaccatggattgttcacaatgcaaagctttcagaggaagaaagaaaaaaggctttttacagaaaaaaagttggagggttaaaggcagtctgtttcaaaattgcaaacaatcgctgtggctgtctcgttttctcttctctgctggttccaccgtgaatgaatggtagcgtaaagagtcagtagaaattgcccttcctcttcggatgcgaccagaggaatcaggaggtgggatccttatcagggtttttttttagttgtttttttttttttttttttttttttttttggcaatttccccacagaattccacgagggcagttccccatccttgttgaagcacaagcttttttcgaggctgatctgtggtagcggagggtctggatttggaggggtggggtgggaatggatcccctgacccattttctccatcggggtctaattctgcggtttggtgatgagagtgttgcttttcgggccgagtccgaggttgctcggaggtccagggctcccaccccgcgatgccagtcctgcctcctcctgcgccccgggcaagggtctgtccgcctgggggaccgcatctggaatccgcgtggctcccctccccggcggtgccgtctccacggacagtgcgtgcccgggtctgggctggagcgacgtccccgagattatcctattactttacaactgtggctcgcgcgccgtcaggacccggcccggtgtgggctggcggagcacaatgaccggcggcggggcgggggcgggcacgcgggcggcgggcgctgggggtcgcgtagatgtttgggtcgaacaggtgagcgcctcccggacactcgggtgcccgcggggggcggggaggagggcggagggggtgtaaactaagtggtgggaaagagacaaaggaagagtgaagagcgagacggtgcggatggggaagggggaggggcgcggaggggcagccggtgggcagcgcgccgaggagctcgagcttgaacttgatcaagcactgggggccctgccgtgggggtggggcgggggtacggccgagagccggccacgtgcctggctttcccagcccggggtctcgctccggccgcccgggggagccgaaccccgaggcccggcagccccgccccacaagtacccgcgtccctggggacccgaaagacgcatgggggtcgaaggctgcccgaaggggccccgggcgccgagagttcctgagggtgcctgagtcactttatttgggccaagtctccctctcctggcctgaccgcagacagcccgccgggtgccctctccccccagcccccaccggacccagagaccgcagcctccgggagcgatgggtaggcacagatcccagcgccttctttccgggctcagccccgtgcaaggatcttcctcgaagcgcttcccccttaagagcgcgctccccaccgaagcgcacggcggcgcgtccagcgcgcccttatccccccctacctggcccagctccccctccttcctcctcttctccccccgcgcctctctccctcctttctcctctcccctctccctgggtgcctccttttcctctctccccttccccccgtgcccactcctccctctcacccgcccctccgccacctcctcctgctgctcctcctactccccctgcctgcgccctccctgcgctcccctcccccccgcccccgccccgtgcccggtcccgccccctctcccgcctccccgtgcccggtgccccctcccccttcctccgggccgcggcgccgccgccgctgccgccgctgctcgcctgggccctcctcctggccacccccgcccccgggccgggcagtgacgcgccgcggtggtgccagcccctctccccgggcagccgcggcggcagcagcagcagcagcagctggagctgtggggctgtcaccgccgcccgccccgctcactcgcggatcccgaccgcccatc

SEQ ID NO: 26429 - DNA, 2300 bp, Homo sapien
aaagtagccaggcctagtggcggcctcctgtaatcccagctactcgggaggtagaggcaggagaaatgctcgaacctgggaagtggaggttgcagtgagccgagatcgcaccactgcattccagccagggtgacggtgtgagactacatctcaaaataaataaataaaataaaataaaacaaaatatttatcctggttaccggttactttagaattggatttattttccatgtaacctgcattagaaatttgcaaacactacagatgtcctcttttggcattttgtggtcagagtgatgaaatgaaaccactctcaaagccttgtcttgggacatcggatttgacagcagccgaacctgtcctgcggctgtgtttggatggtggggagtcattcgcccaccctggcctgcctttgctgcacaggaaataagctagtaattcaagtatatgtatttttagttctaactcaagctgaagaatcaaagactgctgggtccttggcccttccttgatgctgcagataaataatctggtgagccatgtgatttcatcttgcgccacgtgcccagccataaaacagggataacggcactgcctaagaggctgaggccttgagagctcattgctttgcatggagtgctgaagactgacagatgaagggctctaggcatgaggcgggaggctgcttcacctgccaggtggtgaaaggcaggcctgaacttccatctcctgccgcactcagaagaagctggctacattcagaggcccccacctggaaactactaatgaagctgaggaagtcacatccagccccactgtaagcagaggccacctcgatcttggccctgccccagctggactcccagaacaccctggagacaaatgccctccacagtcctttcttcctttgggagctaccagagcctcaccagggcaattcctgcatctcaggtcatgaacttcggttcatcccctgatactcatcaggtgcttatgcacacaacactgtgctttcccccttttgcttcggcaacagaactcctcacattctctgctgcagccacaccagcccctcaaatctcttgaaggcttggtcctcccttgagccacaaggcctttgcataagctgttcccttggcctggaactctcttcccctcagattccactctcagctgaagctccctttctgaggcacagcttccctgacccctgcctcagtccaccctccaagcccaccctaagtacccccagtgccacgtgtccttctgcaccatggcaatgccccactgatcacttcctccattgtttatcactgcctgctgtgagctgggcatttgtgtgggatcctctggctggtgtctgtctcccctagatcagaagaaaatacagggatgccagccggaatctcagcactttgggaggcctaggcaggcagattgcttgagcccaggagttcgagaccagcctggccaacatgaggaaaccctgtctctacaaaaaatacaaaaaattagcaggtgtggtggcaggtgcctgtaaccccagctactcgggaggctgaggcaggagaatcacttgaacccaggaggcagaagctacagtgagccgagattgggccactgcactccagcctgggtggcagagtgagactctgcctcaaaaaaaaaaaaaaaaaaaaaaagaaaagaaagaaaatctaggggtactgctgtttctgtaaatcctcagagcctggctcacagaacagagctccataaatatttgtggaatgactgaatcctcgttaaagcacctaacccatagtcttaactcccctccttccattgacgcaagtgaagatacagttaggatttttaaccagatcaaatatctgatttgttagtgagagatcgcaacttgcacgacactgaccactactggttctagtggtgacctggatttagtgccattctgtatgaaacaaaaccagggggctgtgcttccggctgtttgtgcggttttgtgcttcattcttcatgggcacagatgagcacggtgataacagtgtttacgaagccaggtgccggagacagtgaggatggctacaggaaagaaaggccacagattgctcttcagtggcagtgagaggagacctaatgcagaggctgcacagtggtgctgggattctataaccaacaacaaaagcaacaccctcattaccgacactcctgcagctcaaactactttgcctttgtgcgttggaaacccaacccaagcccattttccccactggaattatttgtgatgatgtgaagttttt

SEQ ID NO: 26430 - DNA, 2300 bp, Homo sapien
gagggagggagggagggagggagggagggagggagcgagggagggagggaggaggtcatggccggggcagtggggaagggatcagatagcctcctcctgccccagacacccgccgccactggggacacagagccggttctgcttcttggacacttcctgcccctccttggtgtgcaccccccaaccctgggcctgattgtgggtggggggcaggggacacagccaggcctgaggggactgaaccctccctgccccccaaaggctctcccaggccatctctgactcaggccagcctcgcacctgaatggtcttggttcacctacctgggaaatggaaggggtggcctagaatgacttccaagcagctgcctgcactgacagtaggagcttttgggaggcctgacagaaatgagggttgtgggctgggtgtggtggctcatgcctgtcatcccagcacttttggaggccgaggcagtgggatcacttgaggccaggagttcgagaccagcctggccaacatagggaaaccctgtctctattaaaactgcaaaaattagccaggcatggtggtgtgtgtctgtaatcccagctactcgggaggctgtagcaggagaatcgcttgaacccaggagccggaggttgcagtgagccgagatggtgccattgcactccctcctgggctacagagcaagattccgtctccaaaaaaaaaaaaaaagaaacgcgggttgtggcagtggctttaggcctagaaacttcttcgatttctcaggtatggctaggagaggcagctactcacgatgctgggacagaacctgcgtgggctgaactgaggaaaggaagaagaggtgtgtgctggatttcagccaccacgaatccaggggtgggactaatggagcccagtagttggtatcctggggtctgactccctggatttgaaccccagctctgtcactctgtaccttgtgactgtgggcaaatcgcttcagctcttctgtgcctttgcttcctcaccctgggacaacagatctctcgttgctgttgcgaaagtgaaacgaggccgtgagtgcttggcacacagtaggtgcaccgcgacgccagccaccagtgtgactgttttgtctcccaggacggttaggaggccccggagccacagcagatgtggatgtggacgcggtgggaggcgcagtatcttggttgttaaatgggcacggggatggggggttcaagtctgcgtgaccctgggcaaatggccacaccccgctgcgccttgggcggggagcagcagaggcactgaccgcggagggtctgtgaggactacgggagatcaggcttggcacggcgcctggcacatagcgggcgctccctgaaggagagctggcaagatcgaatggtaccgccctgcacaaaggacaggtgggcagcgtcccgggggggcggggcagggcaggtgcgccgggagccggttggcggggccggaagggggacgcgaggccggcgggcgcgcgcgcagcaggtgcgcgtggggtgggcggggcccgcgcgggcgcggtctccaggtgagcgggcgcgcgcctagaggctggagacagggggaggccagccgccctggcccgccgcagccgagcgtccctgtgtctttaacgcccccgttcctgcgtgtcccccccccgccccgttggtgcgcccccccccccccactcccagccgggctgcagccgcggagccgtcccccctgcactgacagctggtatctaattactgtgtgagaatggaaagtcaggctgtcccagctccggggagaggggattaacgtctcctgcagaatacacttcctctggtgggttgccatggttactctcattacctgcctgcccgcgaggagcccgcgcgagccgctccagcaggccctccgaacccagcccggcgcgcgcgcgccttcccgcccctccccgccggggcgcacgcgcctgcgccgtgaagagagcgcggccgcctcgcccccgcccctgccccccgcccgagcagctgtcagcggcgcgcgcggccagctcggccccagcgcgcgctgtcaacagtcattagcgcggcccactcccctccccctccagccccacctcttcccccggccctgggtggggcccgcacctggggctctccgctcgttagcgcgcccagggcgcctcctcggcccgagagggacccgcccgcggggcctggctggctcagggctacctccttccgcctaggacccccccttcggtgactcccgattccctgtcctaggctgcggtgccccgg

SEQ ID NO: 26431 - DNA, 2300 bp, Homo sapien
ggaactggacagagagaccagggctcacacaaggaccccaccacccaggcacagggcatatttgccacagttatcattaccattgccaggctagagcatctctgctctcaggaagagtgtgctggaaggataaccgtcaagggacacatggaaaaagtcagggtctgagcttcttaatcacagaagcccctgcgcccctggggctggcctttgggtagtgccttccccgctctgagtggtcacctcttaaaaacgggcatgcataccagcatagatccaaaaagagctcttgagaagataaagaggaaaaatgactgtggagttgttggtgtatataaagtaacatgaaatgtaaattatctaaaaataatctcccatgtgaaatgcagagagaggttggggcttgggagacctctagggttctttcagcatttactggcacctactgtgtgccaggtgttgtgctagggcctgtgcatatgaggatgggtcagatatggccctgagcatctggagctccctgtctactgggggaagtgagccaggtatacacagcgtggggctctctccgagcgcggtgaaaggggaagagtttgtgtgtgatatggcagcagcagccagatgcacatgagctgaaacccacccctccttcctgcatgaccttgagcaggtcaggccacctctccaagccccaggtcttcgtctgtaaaatggagccattccctctgcctctcagagttgccaggacatggcacgtagtaggtcctggggtgggggactttgggatgggagtagacagtagttcctacgcaggaaacggtcctgcactagacaaagtctgggcctcaggacttggatggtgacttgcctgcaggagtgtcatggggacatggggtggacccccggggacagctgggagagaagtgcagcaattcctcatgacctgttaaggaagtggggggtaggggcacagaaatcctggggaattggcctgtgcctttatttatgttggtaatttcattaagggggaggggaccagctagctctacccaaggtcagatctgcccaggtaggaggggggcggtggggctacctgagtttactcagcaagagattctaggtcaaggcgcactcaggaaggcagggtgtctcaggatgagtttgtggatgtgttgagagttttctgaagcggaggtgggattgggctgaggccacaggcgacttcccagggggcctgggcctgtcccagagcagtggggcaggcaagcagaggcaaagctggccaaacttcggggaattcagggtgaggcaaaaggagaggaagtttgggggccccgaagggcggcgatgtggggttcccccaggggaacactgctcttctggcttcggctcacgggagaggtcaagtcacttgcgggagcgagggagggggagcctgccctacaccttcccggcctggctaagtggggcggggcggccgggaggtcggcgtctgggctggggtctgcgccctactccccgcgggaccgccgcgtccgggaggagcggggcctgcgaagctccgggcccggcccggccagacggaacgcggttcctgggctgggcactgcgcgcctgtggttcctgccctcccggcggctgcgggcgcggctgcccccgcgcccccaggggccgggccgggcgggggctgggcccggcgggcgggcgcaggaggaaggggggggcgggcggcggcgaaggctgcgccgctctaacaggtgggatcccgcggcgtggtggaggcgggcgcgggaggaggaggaggaggaggaggaagagccgcggcagcgggagcctgagcaagagcaggatgagccgcgcaagctgacagccactgctgccgcccgcgcccaggctcggtctcgctcccagcgctcggggccgctccccgcctcccgcctcccccggccgcccgcggggcggcccgccccctctgcacctccgggcccggagctgcctccatcgctcctgcatcccggccggggggaggaggaggcggagcaggaggcgagccggagccgccgccgccaacgccgccgccgccgcccgagcaggacagagcgcgccgcagccccgcgcgtccggccgccgcccgcgcccatccagcagcctcgccggagccacaccgcgggacagacgcggccgcggcgcgtcccggcccggtccagcccagcccagcccagtcccggcaccgggcggcccggcggccggcccgcccccgagggcgccgggcgcggcgggaggatgccgaagccgacgct

SEQ ID NO: 26432 - DNA, 2300 bp, Homo sapien
cctcccgcgcccgcctccaccacgccgcgggatcccacctgttagagcggcgcagccttcgccgccgcccgccccccccttcctcctgcgcccgcccgccgggcccagcccccgcccggcccggcccctgggggcgcgggggcagccgcgcccgcagccgccgggagggcaggaaccacaggcgcgcagtgcccagcccaggaaccgcgttccgtctggccgggccgggcccggagcttcgcaggccccgctcctcccggacgcggcggtcccgcggggagtagggcgcagaccccagcccagacgccgacctcccggccgccccgccccacttagccaggccgggaaggtgtagggcaggctccccctccctcgctcccgcaagtgacttgacctctcccgtgagccgaagccagaagagcagtgttcccctgggggaaccccacatcgccgcccttcggggcccccaaacttcctctccttttgcctcaccctgaattccccgaagtttggccagctttgcctctgcttgcctgccccactgctctgggacaggcccaggccccctgggaagtcgcctgtggcctcagcccaatcccacctccgcttcagaaaactctcaacacatccacaaactcatcctgagacaccctgccttcctgagtgcgccttgacctagaatctcttgctgagtaaactcaggtagccccaccgcccccctcctacctgggcagatctgaccttgggtagagctagctggtcccctcccccttaatgaaattaccaacataaataaaggcacaggccaattccccaggatttctgtgcccctaccccccacttccttaacaggtcatgaggaattgctgcacttctctcccagctgtccccgggggtccaccccatgtccccatgacactcctgcaggcaagtcaccatccaagtcctgaggcccagactttgtctagtgcaggaccgtttcctgcgtaggaactactgtctactcccatcccaaagtcccccaccccaggacctactacgtgccatgtcctggcaactctgagaggcagagggaatggctccattttacagacgaagacctggggcttggagaggtggcctgacctgctcaaggtcatgcaggaaggaggggtgggtttcagctcatgtgcatctggctgctgctgccatatcacacacaaactcttcccctttcaccgcgctcggagagagccccacgctgtgtatacctggctcacttcccccagtagacagggagctccagatgctcagggccatatctgacccatcctcatatgcacaggccctagcacaacacctggcacacagtaggtgccagtaaatgctgaaagaaccctagaggtctcccaagccccaacctctctctgcatttcacatgggagattatttttagataatttacatttcatgttactttatatacaccaacaactccacagtcatttttcctctttatcttctcaagagctctttttggatctatgctggtatgcatgcccgtttttaagaggtgaccactcagagcggggaaggcactacccaaaggccagccccaggggcgcaggggcttctgtgattaagaagctcagaccctgactttttccatgtgtcccttgacggttatccttccagcacactcttcctgagagcagagatgctctagcctggcaatggtaatgataactgtggcaaatatgccctgtgcctgggtggtggggtccttgtgtgagccctggtctctctgtccagttccaggacccacttcaataaccactaagccggaccacctctccacccaggctgggtctttgcctgcctttcagaagctaaaaacctggttgtcaatcttgggctgagttctggcacagcagaatgtatagtataatgaaaagaacatgggcttcgggtggagtcagatttggaagtgaatcctgatgattatttggcgtggcattcttcatgctcacaggtcccacttggctacttcacaatggaatgaagccatcattccaccctttgctgggtaacctcaggcaggtcactgagcccctacttcatcatctgtatagcgggacaggatgtcacagatgtagagattcaacaggatgagagtgcctgagctgtgacgggtgcccagtaagtgccattttctccctcatggggcctcgaagtattcaaggaggaagacaggcattgttggcactttttgtgcttcattcattcaacaaacatttgtttagcagccattgtgcagcagg

SEQ ID NO: 26433 - DNA, 2300 bp, Homo sapien
acctcctttatggggttgttgtcagggtttaagtgaagtggtccacataaaagcacttagcacaggctggggacggcagctcatttctgtaatcccagcactttgggaggccgatgtgggaagatcacttgaggccaggagttcgaaaccagcctggccaacatggtgaacccccatctctactaaaaatacaaaaattagccaggcatggtggtgggcacctgtaatcccagctacttgggaggctaaggcaggagaatcgcttgaacccaggaggcgcagggtgcagtgagccaagagccactgtactccagcctgggcaacagagcgagactccgtctcaaaaaaaaaaaaaagcacttagcacagtgcccggcacatagtaggcccccggtaaattgccaccagcatctctataaccttagatttctcaggaaatagcagacacactgagccttgacatcttggagagctgtggttctctctggagaaagatgccaattaaataccaggtccaggctgggctgacctcccacatggggcctgctcctgtggaagcccagatgttgggccttcctcctccctgacttgaaaaaaaggtggtttttgtttagaggaattttccctgcattttcatattggctctataagttggattttgttgagtggtttctgacaagcaagttgtacaggcatgtatgtggaggagacgcaaggctgcctgtagccatgggggtggatctgaggccttgagttctgccagccactggccatgagctcagcccctggacagctgcatcccagggagagtgtctgtccttggggtgatccagaagggcttcacccctggggaattcttctagaggtttcccagaaccttccctcagaggaaaggctcactggcaaatggcctgccaccttccccaccccaccccagcaaactcacaccctgggttcaggtttgtggtgttgtggtgggggaagtccctgagtctcctacccccagctcagtccccttcaagatggatagtcagggaccaagaggtggaacacggagcttctccatatcttcagcaagccaaataagaagctaacatatgaaagcaagagagatttcagttagacagcaggagagacttctgccctgccagatggctaaaacctgggctgtgcttggcctaggaaagagcactaagctaggagtcaagacagctttgactgacagatcccttgggactttgggtcactgcctcattttttccctccctcggtttgctcgtccacaaaatggggattataattcctatttgctacagagcatttcaaaggcaacaatggggtgaggccttgagtcagtggcagggggctgcatcagatcacctctgcaggttccctgtcctctctttttagaagggattctagggccaaggccttagtctcaggtgcaggggcccagcggtgaagtgtgtgcatgtgcaggtacacgcagcactccagccacactgcaggcactaagtcatgttggttttctccccctcttctcaggccactacccagatgcaaaaaatggcctgggcagaagttaggaagcctgggtcctagccctgggtctgcccccgactttctctgactttggccatgtcccttacccaacggggcctcggtttccccatctgtgccatgaggagtttggatggttttgagattcttctctcttggctctgtgaaatccacaaccggcccagtgaggtctgacccctgctcgcctccctggccatcactgggcagttcagatacactgaccttcctttgcttcctggaattttccagctccctcccaccccaggacctttgcacaagcccttgccccgcttaccacaaattcacctatttttttttagatggagtcttgctctgttgcccaggctggagtgcagtggtgtaatcttgactcactgcaacctccacctcctgggttcaaccgattctcctgcctcagcctcccaggtagctgggactacaggcgcccaccaccacctcgcctggctaatttttgtatttttagtagaaacggggtttcacatgttggccagtctggtgtcgaattcctgagctcaagtgatccacccgcttcaacctcccaaattgctgggatcacaggtgtgagccactgcgcccggccaaattcacctgattagctccaactcatccttaacagcactcagctccatcatcacctcctgaacacccccagacccctcctccaggacgcactctcacagagtcctatgcccctcctt

SEQ ID NO: 26434 - DNA, 2300 bp, Homo sapien
tggggttacaggcacacaccaccacgcctggctaatttttgtatttttagtggagacatggttttgccttgctggccaggctggtcttaaactcctgaccttaggtgatccacctgccttggcctcccaaagtgctgagattacaggcatgagccactgctcccaaccaagattttctatatataagatcatgtcatctgcaagtagggatagttttacttcttcttttgcaatctggatgactttattttcttgccattgtacccagtacagtgttgaatacaagtcgtgaattcaactttgccgtaagagtggacatccttgtcttgttcctggtcttggggaaagcacccaatctctcaccatgaagtatgataccagctgtaggaacactcttcttagaactccccgaaagattggctggtttacaccctcagttctagcagtgtgcaagcaggaggcctagtcccccatcccttgccaacacagtaaccccaggctttagaggcaaagaaccaagcctgggagggaagtgctgcatgctatgtcacacagatactcagcgacctacagttcagctgtccatatgcactgggagtgagccctggacactcagccttccctcccctagggtgggatgtcttgagaccccctaaaaaaaagcattggtacagaggaacttctgggttctgttcttgtattagtcactggctgtgcaactgtaggcaggtcacttccctctgggccttggttttcccatctgtgtagtggaaagagtggtccaccttgaaatcttccaactctgaccatctctgccccacccacccttaaattcacagtggcttcagcatccaccactgcccagaggagccaccagagggcgccccagaccatcatttggcccagcttgggtgcagggtgccctggggaggctgagagcagcgcctattttccaggagctgctggctgtgcttgcacagacttcctgtggctagaccagcccgctcctctggctgagctctgatctccaggaagggagtgacggaggcaccatccccaaggccagtgacctagcactcaccctgcccgctttgggttgccgcctgaggctcaggctttgcaacatcggggccagcagccttgcatctctcagccttgagaggcttccaccatctctgagagggcctctcactggtgctgcatcctctccccaccaaattgcccagcagcaggaagccccccaaactggtgcgtgtctggctacctggaagggggccctcactgttttttgtggacgtgaatgtattcatgctgggggtctggacagtgtagtctccaaaaaccacagcatccgggactcctagatacctccaggatagatcccagaaccttcgaagcaggaatcacagaggtcagggaccacccagaacttcccaaaaaagccagaggaggctccatcagcacccccatgacccccagggctgattttatcgttcaaataaaatcaaaacctttgccttgcaaattgagctccaagacacagcagcatctccccgccatcccaagagtctcaccccagcccctttgcatggagggctgctgggccccctctgatgccaggggtatttgcttttttttttttttttttttttttttgagatggagtcttgctctgtcgcccaggctgaagtgcatgatctcagctcactggcacgatctcagttcactgtaacctctgccccaccaggttcaagtgattctcgtgcctcagtctcccaagtagttggtactacaggcgtgcaccaccacacccagctaatttttgtatttttagtagagacgaggttttgttgtgttggccaggctggtctcgaactcctgatctcaagtgatcctcctgcctaagcctcccaaagtgacaggtgtgagccactgcatccagccacatttgctttgcattctagttatttgtatgtgtgttttctctctccttccagactggggtccccttaaaggcagagtgaatctcagattcatcttagtcccttcctggggtcttgttcaggaccctgcatccagtagatgctcaacaaatgtcaacataggaatccaggtcccatcctctcctcactcaagggatccaaggctgcctcttcctcttccgtagtggtgtggctttgcagaagtcacttaagctctctaatcctcctcctcagagtgccagactgcagctgccacatgaagaggtaagactcggacaggctaggtgccaggtcaccccccagttccccagacctttc

SEQ ID NO: 26435 - DNA, 2300 bp, Homo sapien
tcagcactttcctatatcttagtgaaggttctttcctttgccctgtattgtgctcctgaggttctgggggcttgaaccagaatattccagagattttcaactgaaattttctgagcctcgtgtttttgtgattcttgccttctttgctgtcatgacttgataagaatttgagggtttttttgttttgttttgcttttgagacagagtttcaatctttttgcccaggctggagtgcaatggcgtggtcttggctcaccgcaacctccacttcctgggttcaagtgattctcctgcctcagcctcccaagtaactgggattacaagtgcccgccaccacacccagctaattttttgtatttttagtagagacagggtttcaccatgttggacaggctggtctcaaactcctgaccttaggtgatccacccacctcagtctcccaaagtgttaggattacaggagtgagtccctgtgcctgggcttgaagtcttttgtttgtttttttgagacggagtctcgctctgtcacctaggctggagtgcagtgcagaatcttggctcactgcaacctctgcctcccaggttcaagtgattctcctgcctcagcctcccgagtagctgggattacaggcacaggcaagcgccaccatgcccagctaatttttgaatttttagtagagatggggtttcactgttttggccaggctggtggtcttgaactcctgacctcgtgatccacccgccttggctccccaaagtgctggattacagacatgagccactgtactcagccaaagtctttttatataggaatactttttttttttttttttttttttgagacaggcttttgctctgttgcccacactggagtgcagtggcatgatctcagcttactgcaacctccgcctcccgggcttaagtgatcctcccgtatcagcctccggagtagctgggactacagacatgcaccaccatgcctggctattttttgtattattattattattatttgtagagatggggttttgccatgctggccaggctggtttcaaattcccgagctcaagcgatctgcccgcctcagcctcccagagtgttaggattacaggtgtgagccatttcaccagcaggaataaattttcattttaaactttcaaaaacagtacagagcggccaggtgtggtggctcacgcctgtaatcccagcactttgggaggccaagatgggcggatcacgaggtcaggagatcgagaccatcctggctaacacggtgaaaccctgtctctactaaaaatacaaaaaattagccgggtgtggtggctggcacctgtagtctcagctactcaggaggctgaggcaggagaatggcgtgatcccgggaggcggagtttgcagtgagctgagaccgtgccactgcactccagcctgggcgacggagcaacactccgtctcaaaaaaaaaaaaaaacaaaacacagtatagagctatagagagtcaaaagtaaaaatcctcttttactctcctcctacttttgtccctagagataatcacaatataattttggactatggccttttatatttttatgtacactaatgaacatattcatgtagctttgtttttcataaatggtagcaaaccataaaaagtgtcctggaactcacattttttcatcatacctggtatatcatggagctctttccacatcaccttcattctttagatggatataatatcccatagactgaatatatctccttttagttaatctatatcctgttgttggatatttctgttgttcccatatctcacccttacaaacaatgccacagtgaacatccttacaacctcttcttactcacaaatgtgagtattttgagaccagcctgaccaacatggtgcctaaagtgcagaaccacaagtctttttttttttttttttttttttaaatttatttttttattgataattcttgggtgtttctcacagagggggatttggcagggtcatgggacaatagtggagggaaggtcagcagataaacaagtgaacaaaggtctctggttttcctaggcagaggaccctgcggccttccgcagtgtttgtgtccctgattacttgagattagggattggtgatgactcttaacgagcatgctgccttcaagcatctgtttaacaaagcacatcttgcaccgcccttaatccatttaaccctgagtggacacagcacatgtttcagagagcacagggttgggggtaaggtcacagatcaacaggatcccaaggcagaggaatt

SEQ ID NO: 26436 - DNA, 2300 bp, Homo sapien
agagcaaaactccgtttccaaaaaaaaaaaaaaaagacaaaagttagctgggtttggtggtggccacctgcattcccagctattcgggaggctgaggctggagaatcactagaacccgggaagcagaaattgcagtgagccgagattgtgccactgcactccagcctgggtgacagagccagaatctgtctcaaaaaaaaaaaaaaaaaaaattcttgcacggtgagtagggcctctgagttcctgtctgtttgtcacccgaaggtttattctcttccaggtactccaaactcggactgtgtcctgtacacattctcaaagcacctcctactttttggcatcccttaatactttcacacacacttgcgtctgccccctgggtcaattctgacttctcagaggccaggcactgcatctggttcatctggttgtgtcactgtggaatccccaccccctatcatgtcatggtatctgcctcacagcagaccttcttttttttttatggagatgtggtcttgctctgtcgcccaggctggagtgcagtggcgccatctgggttcactgcagtctcgatctcaagatctcaagtgatcctcttgcctcagcctccgagtagctgggaccacaggcatgtgccactcaatatttgttgaatgaatgtatgaatgatataatgactgaaggggatgggcttggcctttgggtagaagacttttttgttttttctttgagacggagtttcgctcttgttgcccaggctggagtgcaatggcgcgatctcggcttaccgcaacctatgcctcccgggttcagggaattctcctgcctcagcctcccgagtagctgagattacagacatgcaccactacgcccggctaattttgtatttttagtagagacggagtttctccatgttgaggctggtctcaaactcctgacctcaagtgatccgcccgcctcagcctcccaaagtgctgggattacaggagtgagccaccgcgccgggccgggtagaagacattttgtttatacttttacagaagggattttcaggaaagggtagaggagaggaggagggctggtgaggaaggccagccaaaccccccacatttccctgctccaggtttctcggcattacctctttaccctcaaggctggacttaggggctaggtgaagcccttaggcttggcgttcagttcctagattctgggtagcatgtctctattttctcatgtttccagtggggattagggtaatattcacctgggaactgtgaggagcccctgggaagagagggcatgggggttagagtgtttgaggggctgcagtgatgatcacggtctcagtaacctcccctcacccacctcaccaccaccctccctgccccgcacagtcaaagccctcgcactattttgaggaaactttggtaagtcagtttcttccactccagaaggtctcaaagtgtagtccctgggtgcttattggaaatgcaaattctcaggctccaccctggcctttcgaatcagatcctctgggggcggggcccggcaataccaggtgatgctggggtgatgctgatgcccttccaaggttgagacctagtctctactctgatgtcagctctccgagagacactctggcctgctttgttcccttccctgtccccagtgtctggcatcgagtaggctgccataaatatctctggagtgcatagtaacagtgatgatgataatagcagctagccattgattgaagacctcttgtgtgccggtctctgcgttaaacatttctggaggcttaactcatttaaggagctaccccagccatcattttctcagatggtgaaactgaggttcagagaggccaagcgccgtacccaaaggtcactcagcgggagagctggcaggaaacctcgcgtctgccggtgccggcgccgcccctgcccctccccggagcccggcggccgcgcgtgtccgcggccctgcgagggctccccggctccggacagcccagggcggccgggggaggagtgcgctgcgacggccgtggcgaaagtgcggttgtggatgcgcggagaggccggcagcggtggcagcggcagcggaggaggaagctgagcagggcggcggcggcggtggaacctgcggggctggggcgcgcgccatgggccgcctgcactgcactgaggacccggtgccggaggccgtgggcggcgacatgcagcagctgaaccagctgggcgcgcaggtgggcccggcggcggggcgtggggcgcggggcccaggtgattccaggatcc

SEQ ID NO: 26437 - DNA, 2300 bp, Homo sapien
gctaggctggtcttgaactccggacctcaggtgatccaccggcctcagcctcccagagtgctaggattacaggcatgcgtcactgcgcccagcccagatcttcttttttaacaaggttaaaaatatttaaaaataaaaattccgggccaggtgcagtggctcacgcctgtaatgccagcactttgggaggctgacgcaggtggatcacttgaggtcaggagtatgagaccagcctggccaatgcggtgaaaacccatctctagtaagaagacaaaagttgggccaggtgcggtggctcgcgcctgtaaacccagcactttgggaggccgaggcaggcggatcacctgaggtggggagttcaagaccagcctgaccaacatggagaaacccgtctctactaaaagtacaaaattagccggggtggtggcacatgcctgtaatcccagctacttgggaggctgagacaggagaatcacttgaacccgggaggcggaggttgcagtgagccgagatctcgccattgcactccagcctggacaaaaagagcaaaactccgtttccaaaaaaaaaaaaaaaagacaaaagttagctgggtttggtggtggccacctgcattcccagctattcgggaggctgaggctggagaatcactagaacccgggaagcagaaattgcagtgagccgagattgtgccactgcactccagcctgggtgacagagccagaatctgtctcaaaaaaaaaaaaaaaaaaaattcttgcacggtgagtagggcctctgagttcctgtctgtttgtcacccgaaggtttattctcttccaggtactccaaactcggactgtgtcctgtacacattctcaaagcacctcctactttttggcatcccttaatactttcacacacacttgcgtctgccccctgggtcaattctgacttctcagaggccaggcactgcatctggttcatctggttgtgtcactgtggaatccccaccccctatcatgtcatggtatctgcctcacagcagaccttcttttttttttatggagatgtggtcttgctctgtcgcccaggctggagtgcagtggcgccatctgggttcactgcagtctcgatctcaagatctcaagtgatcctcttgcctcagcctccgagtagctgggaccacaggcatgtgccactcaatatttgttgaatgaatgtatgaatgatataatgactgaaggggatgggcttggcctttgggtagaagacttttttgttttttctttgagacggagtttcgctcttgttgcccaggctggagtgcaatggcgcgatctcggcttaccgcaacctatgcctcccgggttcagggaattctcctgcctcagcctcccgagtagctgagattacagacatgcaccactacgcccggctaattttgtatttttagtagagacggagtttctccatgttgaggctggtctcaaactcctgacctcaagtgatccgcccgcctcagcctcccaaagtgctgggattacaggagtgagccaccgcgccgggccgggtagaagacattttgtttatacttttacagaagggattttcaggaaagggtagaggagaggaggagggctggtgaggaaggccagccaaaccccccacatttccctgctccaggtttctcggcattacctctttaccctcaaggctggacttaggggctaggtgaagcccttaggcttggcgttcagttcctagattctgggtagcatgtctctattttctcatgtttccagtggggattagggtaatattcacctgggaactgtgaggagcccctgggaagagagggcatgggggttagagtgtttgaggggctgcagtgatgatcacggtctcagtaacctcccctcacccacctcaccaccaccctccctgccccgcacagtcaaagccctcgcactattttgaggaaactttggtaagtcagtttcttccactccagaaggtctcaaagtgtagtccctgggtgcttattggaaatgcaaattctcaggctccaccctggcctttcgaatcagatcctctgggggcggggcccggcaataccaggtgatgctggggtgatgctgatgcccttccaaggttgagacctagtctctactctgatgtcagctctccgagagacactctggcctgctttgttcccttccctgtccccagtgtctggcatcgagtaggctgccataaatatctctggagtgcatagtaacagtgatgatgataatagcagctagccattgattgaagac

SEQ ID NO: 26438 - DNA, 2300 bp, Homo sapien
ccaaagtgctgggattacaggcgtgggccaccacgcccagcttcaggcctgtttatatatgctgttttctttccaacaacaatatgccccaggctgggcatggtggctcatgcttgtaatcccagcactttgggaggctgaggtgggtagatcacctgaggtcaggagttccacaccagcctggccaacatggcgaaaccccgtctctactaaaaatacaaaaaattagccgggcatggtggcaggcgcttgtaatccgagctacttgggaggctgaggcaggagactgaacccaggaggcagaggttgcagtgagccgagatcgcgccattgcactcagcctgggtgacagattgagactctgtctcaaaacaaaacaaaacaaaacaaaacaaaacaaaacaaaagatgtgccccagatggtggagacaagctacaggccctctccagagagacccccttcttcctgcaccaatggactggacaccaatttgtatgtttgtgccagaaagccaaggagtcctgctgttcattcacaagaggccctgctgggcgccaggcagggcgctgagctgagcccatttctctctggtatctccctagcctctccccaagctcttaggtagaataagatccagtaagtatagacacttttgcggcatccaaagaattaacccttcactcatttactcacctggtaagagatacagggagaaagctgtggagtaactcagggagctggagcccataaggcaggaaacccatgcccattcattcaacaaacttgtattgagctcctttttgatgcatcccccatccactataagcacttggagacccacacagatgtggtttctgctcccatagtgtgtgtgtgtgtgtgtgtgtgtgtgtgtgtgtgtgtgtgtgtgtgtgtaggggaatgtaaacaggaaaacagatatgcaaaacaatttcagatcgcggtaagtgctaggaacagaatgaaataggataggagtgatggacaggggagacttcaggtggagtcatcgggaaaagcctctccataaagtgaccttctgggagaaaaccgaggggtaagaatctggtcctgcaaagatctgggcaagaaatgtccaggtgtagggaacagcgaggtcaaagtcaccatcacaaggaaacgcttggtgtattgaggagcagcagagaagttggagtgaaggcagagaggggttaaggtagcatataccttgaaaggggaggctcctataggggcttacaggcgatataaatcattcattcattcaacacatatttattgagcatctactgagatcctgtccttagtttactgcgtggagacagaccacaagcaggtaaacaagcaaatatgtaagtcccaggtcagataaattttaggaagtgctgttttccagtggttcaatggtcatcccagggcagaggtggggagacctgctgagggcggcttctccctcagtcagtccatgcctgcagggtctggaacccaggtagccagagacccgctggtcttctttcccctcccctgccctcccctcccttcaagatggctgacaaaggccgggctgggtggaaggaagggaggaagggcgaggcagagggtccaaagcaggatgacaggcaggggcaccgcggcgccccggtggcactgcggctggaggtgggggttaaagcggagactctggtgctgtgtgactacagtgggggccctgccctctctgagcccccgcctccaggcctgtgtgtgtgtctccgttcgggttgaaaggagcccgggaaaaaggccccagaaggagtctggttttggacgtctgaccccacccctcccgcttagggcttctgatcccccagggtgatttcactggcccggggttgggagggcagggggccagggggcggagcccgcggagaggggcggaggggaggctccgagcgatttcaaatttccctcgtccccgcccccccgttccccccgcgcccgggcggggatctgagtggctgcggcgggggcacccccgggcgggggcggggcaagagccgggccggggctacaaggggagtcggcaccgccccctccccacccactcccgctgccccgtccggcccgcgccgcttcctcgcagcagctgctcccggctccgcggccgcagcccgcgtggacgctccgagcgccccccgacggacgggaccggctccctggcggtcgggcgagcgggcggcaacgctgcccggccggcagcgctggggttaagtggcccaagtaaacctagctcggcgat

SEQ ID NO: 26439 - DNA, 2300 bp, Homo sapien
tctgactgctttgtctcataggaactggccataggtcagccagcctgttcttccgggtcagggcttgggagaaaaagggctgagaagcagctgattggtctgattcaggcacgtcccttgtccttggtaggggaaattccttaacaggtgctgatacacactctggatcatgtgaagcacagaaagcctatgtgttatgtatcagcgcacatgtttataatctgaacaatgctgctttaacatgcatattaatcacctaggcatgacttgtgtgtgttaaaatgtcttgtgaaaatcccgcttcaggccgggtgtggtggctcacgcctgtaatcccagcactttggtaggctgaggtgggcagatcacgaggacaagacatcgagaccatcctggccaacatggtgaaacctgtctctactaaaaatacaaaaatcagctgggcgtggtggcgcatgcctgtaatcccagctactcaggaggctgaggcaggagaatcgcttgaacctgggaggcagaggttgcggtgagctgagatcgtgccattgcattccagcctggcggaggtcgcaccactgcactgcagcctggcgacagagggagactctgtctcaaaaaaaaaaaaaatgaaaaccctgcttcaggacatctagcttagtggtggagatttctccagccagctcccacttccaacagttcttccaagcagctctcagttcatggtactgtagcctgcgtggctcctgggccacacagggagtagcagcagaggtccagttgccccatgccatgggcaggtgcagggtctggaattgggagctctcaccacagattgcacctctgcctgggggcgccactgggctcatcagactgagctcacggtgccccctggtgggcgatgccagtggcgccagtgcagcttggagcccgcaatacaaggtgtggcttctagaaggtaccctggtttgagatgctgaggtgggaggatcccttgaggccaggagtttgaggccagcctgggcaacatagccagactctgtttctacaaaaaattagccacacctggtggcacacacctgtgggcccagctggaggatcactgaagccctgggagttgaagcctacagggagccgtgatcacgccactgcactccagcctgggtgaccaagtgagaccctgtctctaagatagatggatggatggatggatggatggatggatggatggacagatagaagataaactgcgaggctagcacgggttgtctggcaggggctggtatgtctccacgatggagcccgaggcagggaggcccggtgcatatggcagcagcttattggggaagcttttcccaggcacggttccaggacacaagggtgtggtgtgagtgacctggagctgtttgtggttcagggatgggggcctggaggtctcattatgcctaggcttttataatatttttgccaaccaaaggtggaacaaaaagcaaaggcaagtgacttggaaaactcggtttcagcggggatttatgccctgaagttttttactcgttctctatctaatcctggccctacctcttagatgggctatatgaccttggagaataacctagtctggatgtcagttttctttttctagaaggtgagctccccagtctccctagggggagatacaggttgttgcatccaacaaaatctgtgtgcccataatgttgcaggcaatgggccagcccagaggttatagcctgccaacccatccgtatggccctggccctgtgtgttagctgatttacctgaccaggaggggcagcagtggggaggccaagtcccagaggtgagggtgaggctacaatggatctggggagtccccctcctggtaactgcccccaggctttctgcctgtgcctccatccttccctccttgggaacttgggactctgagccccagctggtgagggaggaggggagtgagcgacaggccagcagaccaatgggccctggaggatggggtgaggcggggcttgtgctgccatggagaggagagaagcggttctgtgggggaggagggggtgggtgggaagaggacctggagattgaggggaagggagagagcaaacaaaggggtcaggagggaaaataatgcactggcttcctgagcccctgcagaggctgagcagggagagggggccagggccagaggggacagaggctggcggcagacgggccgggacaggcaggtcctaaatggcattgtttgaaggggccggctaattgcacagagcagtctgagcctgagaccc

SEQ ID NO: 26440 - DNA, 2300 bp, Homo sapien
ccttttaaaatctttcttggtaatgacatttagctggggaagagctgtgttgggcataactaggctgttttgattcttacactctttcaacaaagatttttttgggggcggtgagaatggagtctcactctgttgcccagactggagtgcagtggtgcgatcttggctcactgcaacctccgcctcccaggttcaaacaattctcctgcctcagcctcctgagtggctggggttacaggcacctgccaccgcaccctgctaatatttgcatttttagtacagactgggtttcaccatgttggccaggctggtctccaactcctgacctcagatgatccacccgcctcggcctcccagtgctgggattacaggcgggagccaccacgcctggcctcaacaaagattttaatcagacagacctatcctgtgatggtctcttagaagtaaatgttagtcctaccctcagagccctgagagaggctaagttaggtgcctaaggtcattgggcaagttgcagcagaagcaagccaggcaggattgaaggaaggactgtacattcctgggattcagctcaagcagagattctgtttttcccaggaattgagctaccatggggccatttgccatgagctaattgaagtttcccaagggctacaataatatattgggtgtggagtctcctttgtaggagagcccctgcatgcagttgcctgctgtgaccagcagagggaggacaagtcctgggcccatgctggcagtgaggcagctgcttccagggatgggagagcagtaactcaagtgaaggaagatggattgtttgcaattgctttgccccatcgagacataaaatgcactttgcaagatagagtctgaggctaatacaatgcagtgtggggctgtcagcattaggggatgagatgacaatatgggacctgggtctggcctgggcaagtgcctgctcagcatgtgtacgctgtttgggttgtattggagctattgggcgctggaaccagcacttgtgttggagcggtttccccccaccagagccacagtgttttctccccagtggtggtcacacccccatataggaaatcaggcattccgtgataaaatggaggtttgcatgagtgtgagcactctttacggagactagaacattccctgtgtctttcagttcctttttttttttaagagatgaggtcctcactgtcacccaggctggagtgcagtggcactgtcttggctcactgcagcctcaatcacctgggctcaagcaatccttctgccttaacagagcagctgagactgcaggtgcacaccactgtgtttggctcttaaaagtttttgtagagatggggtcttgctgtgttgtccaggctagtcgaactcctgggctcaagcgatcctctcaactcccactcccaaagtgctgggaatataggcctgagccactacgtctggcctttcagttctgattagcatccctgaatggccattttctctctcactggcaactcagtcagttcatgcttggtccagggacttggtacatcaggagacttgtggaatatggattaaatcacaagaactaaagttaaataatcacaacaagtgaaaggtgctgtgtcgagcactgttttctaaacacattcattaggtgaactcattttaataaaagggtaaagagtaaacaattatcatgcttaggaaagaaggaatatgtgcaaaccctcaatgctggagcagccacagagaatattaggactgagcctcaggggtccacaccagggacacctgcttggaaaatgtatacaaacacagggttcgcctaattgccttcattcagagtatcctccttttccacagtggaagtgtcgtacctaacaaggttctggatatctgtgtgttgagactctgccatttctatttttctgcttttttctttccttcctttcaaatagatgtctgtggactttatccccaggaatggtctcttggttaaagtgtgtgaaaatcttctgcatctgatggacaacattgtgatagacatggcacctgggacacacctgtaggtggatgttgatgatgtctttctcttttaggtctctgcagacaaactggtggcactggggctgttcagccagcactttaatttggccaccttcaataagctcgtctcctatcgaaaagccatgtaccatgctctggaggtaacatgggatgagggaatgagggctaagccctgagagcagggatgaagcaagagacccacagaaacctagctcagtgttgccaagggt

SEQ ID NO: 26441 - DNA, 2300 bp, Homo sapien
ctcttgtggtgtgctcttggagcagtactcgagaccgaagtattgaaatgcctctagacctgctgataaacagctcctgccccagcttccccacccattcttccctgaacgtcttactgggtttcagcaactaactgggtgagatttggcctagagggacctctaggcccctgctccacacagtggaagtaccatcagcccaccacataatgtccctgcctagcattgagcctgatttgtaatttaacaaggatttgtgtcattagttgtgtcccctttgcctcccctgccagtctggaaactttaagaggtcagaagctgtgtctagttttcgtttttatctcttagagatggagtttcactctgtttcccaggcctggagtgcagtggcgtgatctttgctcactgcagcctcgaactcctgggctcaagcgatcctcctgccccagccttcccagtagctggaactaaaggcacgtaccaccatgatcagattgtgtctttttttcaccagggcctgattggtcagggaaaatatttgttgaatacttgaataaatgatacccagacaaaaaaagtcagcttgaaatctggatctacctctgacactgagtgagtcaattggcctctttgtccctcagtttctttctgctgtaaagtggtgcagttcctctttttttcttttttagacgaagtctgactgcaacctctgcctcccaggttcaagtgattctcctgcctcagcctcccaagtagctgggattacaggcgcccaccaccatgcccggctaagttttgcatttttagtagagatggggtttcgccatgttggacaggctggtttccaactcctgacctcaggtaattcatccgccttggcctcccaaagtgttgggattacaggtgtgagccaccacgcccagcccagttcctccttcagccaaggctctcttgagaatgtaagggccaggtgtggtggctcacgcctgtaatcccagcactttgggaggccgatgcgggtggatctctcgagcccaggagaccagcccagcctgggcaacatggcaagaccccatctcttaaaaaaaaaaaaaaaaaaaagagggagtgggcaagagagaatgtatgtacagccattgggaaacaacccggaacaggactcaggaggtccttgctcctgtggactttacaggagacagacagtaaaggcacaagatgccttcttatggtactaagaagaaaatatgccgcatgatattgcagatgggggggcgggggcgtcacagaacgtgactttttttttttttttttgagacagagtcttgctctgtcgcccagactggagtgcagtggtgcagtctcgcctcactgccacctccgtctcctgggttcaagtgattctcctgcctcagcttcccaagtagctggaattacaggcgcccaccaccacgccaggctaatttttgtatttttagtagagatggggtttcactatgttggccaggctggtctcaaactcctgacctcaggtgatcctcccacctgggcctcccaaagtgctgggattaaaggcgtgagccactgcacccggcccagaaagttgacttctaagcgtttccccaaagtgtctattaggtatctttatgattcaataacccattcttacagaaattaattgtaagcctgggagcggtggctcacgcctgttatcccagcgctttgggaggctaaggcgggaggatcgcttgaggccaagagttcgagaccaccctgggcaacacagcgagacctccatacatctctaagcaaaaaaaaaaaaaaattcattgtaaaagcaattttctttttggttactgccatagggattttgtaactgagtcacaccgggccgaggcgggacctcattggctgcgaccgaccacgtgccgcagtcgccccggcggtcggggccccgcccctcggctaccgttctgtggatcaggggccgagctccgcccccggcgcgcggctgagaccctctctataaaaggagccggcggaggatggcgagcctttacgtcggcgcgtaacgagggggtgcgtgtgaggtcatcgcgcgggcgggcgggcggggtctggcggtttgaacgagacgaagacggaaccggagccggttgcgggcagtggacgcggttctgccgagagccggtgagccggctagcgggcccggggggtgcggctgggggggcggccgcgtgggccaaggccgggcgtgcgcgggcaggccctacgggcagcgccagggccgttccacacggcgg

SEQ ID NO: 26442 - DNA, 2300 bp, Homo sapien
aagaaggtgaaaagcctgggaagcttggggcaggaagggatctaggaaacaaggaaaagcatggttgggttactggagcttcagctctcgcccctgtccagcttctgagaccccagcatggcccttcctgtcttgatgcctcaatttccccatcttaagaaaggaaagtgggtcacaatggcttcctctgggggaggttctagggccaagctggagactagccccatcccctgcccctccacccacctgctctgtgaggtcacaatgccaactgctccactgatcctggcagattccacttggcacttttcaggggacattcagaggcatcagccccttcctcctcaccagctcccagagttcccatctccatccccaatcctaaagaaggaaatcgatgccacggtcctcaaggagccctggggacccaggcgccctactcgaagatgtggcccacaatcccagaccccggaggtgaggatggcagcccctccctttgcccagccctttacagtttacaaaatgctgcccctccaccctgtccttggagatgagtggcattgtcaactgtactgtacagagacagccaccaagaccagagaggtttggcagtggtattcccaaagtctcccagccaggaagtggtgaagcagccatccttccagcacgcatttattgagcatctactgtgtgccgggaaatgcacagaggacggggaacacggtgtggcaccagtctgatgtgctccgttccctcatggagctcacggtctagtgcaggagactggtatgaaagaaggaaacaagtatttcgccatctttatctgtcagaaagcctctgaatgcaggtgacagaaattccaacttaaaatgatgcctatctctgggcacccaaatctgggtgtatatcccaagagagtataccaaacaatccccaagggtgagaaaagaaataaccaggctagaatgtatgtctttcatcctcttttaatttatattattcaggaatgttaccataaatctgtacatttgggaagggtaaacaatgtattagtacaattgggtgtatatataatttattaataaaccaatataaatactctgaggtggtataaacaaaaatgtttaaagacctttgacttaagaaataagggaaaattttaaatctcacatatcaagaggtcccaaggtgcagggggctccggagtgtgttaattcctcagttctgccacccaagacccaggttcctgtcatcattctgctcttttagccccctctcatggtcacaagatggccaccacagtttcaggtgtcacgcagaaatgtggcgtctaggggaaggagaataagcatcgttttctgtgggtctcatttagctaatcctaaacctaacttttcccccaagtcccttacctcgtaaccacccccctacctcaccctacctcacccctgcagacttcctcacccttgaaccaatcacagcacagggaatgggagcacgacagcaggcttcgaccaatcaaaatggcctaaaatcacattgggtaggagcagacaaaggaacaaaaccaagcttctgccaacctcggggacatggcgacaaccgcctgtgactgccacagcaacctgggtcttttccttgatggatacctggatttggggtcagccagacctgggtctgtccctgaatcacaggctggtggtgttgggaaaccttctctgtacctcagtttcccaatctggaacgtggtatgcacattccaaggacactatgttcctcataattgtaaaatgcgactatgaatcttatcatccccaggattgcccagcgaggccggaacaccagcaggatggcagaggacacctccccaaacatgagtgagcaaggacaggtgccctggtattttcatgggcagctgaggggctgaggctcagggatgtcaaacgggcaacctggggctacccagcaaggggcaggggcagggatgttcgcaccaagctctgggtgctccctaggtctctgcaagcaccaaatcaagaggctggcagtgacatgacagtcctgtgctctctgcagatgacaacatcctgttgcctgtccgcaacaatgaccaagccctaggcctgactcagtgcatgctgggatgtgtgtgtacgtatatactgaataatcaccttcgtcatcaatatgggtctggggagagggtccagcctcggcccaggctgacctgggggtggcaatgcctgccctggactgcaggggtggtggggagctgcaggttgaactctggagttctaccc

SEQ ID NO: 26443 - DNA, 2300 bp, Homo sapien
ttgactcccactgaccccacaccagcccaaatatcaggcccagctcccaggcccaccctgtgctaggcctccaccagtgtctacaaagctgaccacagacaccatcaagccctcccctgagcagctggagctcacttgaaccagccctgcctcccaaccagtgctcccttgcccctattctagacgcaaagaggaatgagaagagcctgctgtgagctccctgacaccctgctcctggccttggtctgtccaccaatgcccaagaccggcccctcctgcgccctcaccatagctgatgcaaacagcagactcagtggacagaggcgcaaatattgaccaaacccactcttggtgtttgctgttggcctggacacttccttttcttaaatatttccagcacaagagccatttgggtgacagccagtagacataaaagagggagattctcaccagcccatcccagatctcaaccggctcctgacagcaatggcaagcaccgtttggtgagcacctgctatatgcagaatgttctgccagccactttgcctgcatccgcagggatgggagctggttctgctcagccctgtttccagcacctggaccatactaggtgcataaatatttgttgaatgaataaatgaatgagtatacatttgaaagacccttgtaacaattgtagtggtggcatttcagagtttccccttcactgaatattctcaggggttttgcattggtgtcctgttgctgcaataatgtattatcacaaacttagtgacttaagacacaatttatcatgttaccattctggaggtctgaagtcccagatgggtctccctgggctaaaatcaaggaagtattggcagggctgtgttccttgctggaggctgtaggagaggaattgtccacctgccttttccagcttctagaagctgcccttattccttggctcctggtcccttcctccatcttcaaagccagcatgttgggctgagtgcttcttgtgctgccatctccctgcctccctcttccatttttaaggacccttgtcattacattgcacccacatgggtaatctagggtattcttcccatctcaagatcgactgattagcaacttaaattgctcttctagttttaactcccttttgccttgtgacttaacatatttacatgttcaggttttagtgtgtgggcctctttgagggaccatcgtaccacttcccattggtaattagcctgcaattttaagcaactgccaccagggggcaaaagtgaattcattttagctttgctatccaaatagtcaagctccctacaggcagggtgaacagaaaaaacttagcccgacatttccactcggttatgcttttattttccccagtaaaaaagtagaactttatttttggacatagagtctcactctgttgcccaggctgggtgcaatggcgcgatttctgctcacggcaacctctgccgcctcccgagtcaagcaattctcaagcctcggcctcccgagtagctgggattacaggcacacaccaccacacccagccaattttttgtatttttagtagagaaggggttttgccatgttgcccagacaggtctcaaactcctgagctcaggcaatccacccgcttctgcctctcaaagtactaggattacaggcatcaaccaccgggcccaacaaaaagtagaactttattaaagcaacaacacatgcaatgttattttgtgttatgcacaatgtccaccagtgagaagctcagcattacaaaatgcattcaggtgcaacctaagaaggtgaaaagcctgggaagcttggggcaggaagggatctaggaaacaaggaaaagcatggttgggttactggagcttcagctctcgcccctgtccagcttctgagaccccagcatggcccttcctgtcttgatgcctcaatttccccatcttaagaaaggaaagtgggtcacaatggcttcctctgggggaggttctagggccaagctggagactagccccatcccctgcccctccacccacctgctctgtgaggtcacaatgccaactgctccactgatcctggcagattccacttggcacttttcaggggacattcagaggcatcagccccttcctcctcaccagctcccagagttcccatctccatccccaatcctaaagaaggaaatcgatgccacggtcctcaaggagccctggggacccaggcgccctactcgaagatgtggcccacaatcccagaccccggaggtgaggatggcagcccctccctttgcccag

SEQ ID NO: 26444 - DNA, 2300 bp, Homo sapien
aaaatggaagagggaggcagggagatggcagcacaagaagcactcagcccaacatgctggctttgaagatggaggaagggaccaggagccaaggaataagggcagcttctagaagctggaaaaggcaggtggacaattcctctcctacagcctccagcaaggaacacagccctgccaatacttccttgattttagcccagggagacccatctgggacttcagacctccagaatggtaacatgataaattgtgtcttaagtcactaagtttgtgataatacattattgcagcaacaggacaccaatgcaaaacccctgagaatattcagtgaaggggaaactctgaaatgccaccactacaattgttacaagggtctttcaaatgtatactcattcatttattcattcaacaaatatttatgcacctagtatggtccaggtgctggaaacagggctgagcagaaccagctcccatccctgcggatgcaggcaaagtggctggcagaacattctgcatatagcaggtgctcaccaaacggtgcttgccattgctgtcaggagccggttgagatctgggatgggctggtgagaatctccctcttttatgtctactggctgtcacccaaatggctcttgtgctggaaatatttaagaaaaggaagtgtccaggccaacagcaaacaccaagagtgggtttggtcaatatttgcgcctctgtccactgagtctgctgtttgcatcagctatggtgagggcgcaggaggggccggtcttgggcattggtggacagaccaaggccaggagcagggtgtcagggagctcacagcaggctcttctcattcctctttgcgtctagaataggggcaagggagcactggttgggaggcagggctggttcaagtgagctccagctgctcaggggagggcttgatggtgtctgtggtcagctttgtagacactggtggaggcctagcacagggtgggcctgggagctgggcctgatatttgggctggtgtggggtcagtgggagtcaaagagtgccctggagttggggaaaggccccaagtcatcctgtgccaatgaagaaaaatggaaaggccatcgcctgctgtgcacacatatatgcacacacacaagaacatatatacatgtacctccccatcccaggaaacagtccacttgcatacacacatgcacctaacaccacacactcacagacccacaaacactcagtaggccaagcccacacatgcatacatgtacacaaaactccccacctctgtggtcctgttggattgtgtgaatagacacacaacaccataaaccaagatgccaacgtgcccatttcatgtccacactcacacataagagcacacattttccccgtacatgtgactatgcacacacactcacatgcatgtatcaacacaaccctcatccacacatgtgcatatgcaaattccttcatgcgcacacacagttccttgggtcccatccagccaaggcggaggctgacgtttgtaatgtggaaagagaccgtggactaatccattgtgagtggaatgtgcatttggagagaggctgggatgttaagctgtggggacaggtcacgcacactttctcttctgttcccttctgagttagggctcagtttgtgactgggatcagggctcagcatgtgatcagggtcagagctcagtaactggggtcaggactcagtgtgtgaatatgtgacagggtcagggctcagtcaatgactgaggatggtgctcaggtagccttctgcccctcctaaaagggtcatgtttccgagagagcttggaggtaccaggcttgaggggtcattgcagccatccccttgcctatgggaggggggatggggtcctcatgggccccatcctcccaggccttggctgggcatgataagataccctcctagaagcagctttccttccagagatctcctggccctcactaaggccatagctgcctagccccaggggcttgtagtggttgggagctgggcctggctactggctacgtggcagccccagcgcacatgtgggatgagacactttggcaaaggccatgtttgcagggaaaacacttgcaaccacaagcaaactcgccgctccctgggtcccttcccagtggactctgcacattgggagccttataaagtagcctctgcatctgcctgcctcgggcagaggagggctaccctggggctgagagttcacctgtctcaggaaccacctgaggtaggcatggggctgggctggtacaccacttccaaggag

SEQ ID NO: 26445 - DNA, 2300 bp, Homo sapien
agatgcctgcgaggactcagtgctgtgatgcacatgagggcttcagcacaggctggctccaggggacgatcctttcttctttctcgcctgcagctctcttggccatgggaattgccctccctggtgtggtcaacctccactatgtcgcccctgagatctttgtctatgaggtgagagcctttgggtgtgaccagaggggcctccttcactcagagggactgattgaggtgggggtcacctctctccctccccctctgtggctgccaaaaccatgccatgaatccttaactgcaatgaaatgaaaagtccaggatgccaagagatgctgggtcaaaggtttcacccttcctttagtcctcataaaatatcacaccagaccacactcggacaattggggccttcacttgtcccgtgatcctgtgccctggaatgggcacaacccctttgatatctggagcagatgacagtgggactccttccactttgtagacaaactgtgcaggctggatgggagtagggaacttcctgaactttctaaaattgctttccctggacctgaaattgtgggcccagggtgagcttcagtcacaacactgcccagggtgagatgcgacagctgctttcttctgtacctgggatataaaaggaaattcagtcagcaagacatgcctaggacagaaagctgaacccaggtctctcaagcccaatgtctcacgtgctgttcatacccgatgagtgtgacctgctgatgtaattccagggaggatgcccttgttccttaagaactactctctcaaggcacttgggtgattatccgcccccatgagaaggaacgattggtacacagaggagcagggctctgtggggatttccctaggacttcccaaaacaggcagttagtggctgacccaccttggcacttgacccagccactgggtcagaggtgaaaagtccctagtccagtactgttaccaatggaactttctgcaaggatggaaatttatactgtccaaagcagcagccatgataagccacaggtacatgtggctactgagcactgaaatgtggctagtgcaactgtggacctgaattttttattttgtttcattttaatgaatttccatgtaattagccataggactaattaattagccatagccactaattgtggctgccttattggaccacagagccctaggctacgagctacactggggcaggaactgggtctggcttgttctctgctggctccccagcacctgccacagggcttggcttatagtagaggcttgatgaagatttactgaatgaatgaatgaatgatcggcagccctccagaatgctcctgcagtggagtgtagcataggggagctatggggggtgcctgagtctgctggagagagttggacttggagaagatgctccatggttctgggctcccattcataaagcatcagtggtatccaccatcggagcagcaaccagtgccttccatgggggtctcactgcatcctcacagtgaccttgtgaggtggaggctgttactacccccaaagtgacagactggtaaactgaggcccagagaggcaaaggactctcctcacaacccacagcaagaatggcagagcagaactcagagccaggctgagggggcggctggggtcctgcctgtgcctcctctgacctggtccatggtttcctttgcccttcagggctacgtggtgatatccagtggactcttctaccagagctgaggcaagaccactgggaggcctgagagtgggccagctcgctgctcaggcgaatttctcatttcaagccactggggaaactgaggcaaaaccatacttagtcatcaccaacaagctggactgcttagctgggctgttttatcttccctgagtgcctgggtctccctccctcacttctgccctttcccttcctcctcctcttctcctccctcttccctcatctcccccctccttcctctgccccaccccagcggggagcagactgctcctccaggctgtatagacctgccctcttgcattaaacaacttctcttgagctgcaactttcagccaagcccagcaacctctttgcatacctaaggccagttccctacatgcagtctccaggttctgtctgtccctggagccaccaacgctgcctgggagaagaagaagacataaccacatctctgttgatgacatctctgttgatgacatccattgactgtgtcacctctttgcctgggggagctcctgttttgaaagaggaccctggagagccgcatggat

SEQ ID NO: 26446 - DNA, 2300 bp, Homo sapien
gtaaatgggtggcagggccagggcttggatctatgtcctgacccccatccagtgcttcccacctcacaggtgatcactaggcattgcaattttccgatgctgtaggagtaaggaaagatcaaggagacagcagatccaatgggtctccttggtctccatctgaggttgaagggagactagggagggaaaccccaggctctgctttgtaagagctcagagccaagctggggcacccaggagtgggagtatgtgccaggcagaaagagggaggaagggacttctggtgggggaaaccatgagcaaaggatgggggtggttgggggtagcaggaaacactcatcacaggtagggtggattatttgcacggtcaggttcaatttgtgatttttgaggctcagggcagtcgggggttgaggaaggcttcctggtagatgaggcaagtgctgaaattaggacttgagggttgagtcagtgatagatggatggagggaaggcattctaaaagggaggggcagcttaggacaagcacattcagaaacaaaaccctagcattagccatttgtcccagagacacccgcatgaccacgttacctgaagccacttattattctgaaagggcaaaaaaagaccctgccctgagtgaccctaacacctggcatcagttctggcctggggacgggagactggggtgaggctcagtcaccccgtctgtgagatggggctggggctggaggagaccttcaccaagcccctcccagctctgttgcctggctcagaatttcacagcccctttggggatgatttttaaagagatttgacatggggtgtgccgggacatgagcacacgtcatggcacgcacctgtgcattcacagtggtcgagaagcgctactgtggattattttaagcccagatatatcttccatttagtgaatattgactattggcttgaacacttctcgatacttaagctccttttcatccctcaggtctcagcctaaatgtttcctccataaggagtccgtccctgacccctttatcccatatcccaccctattgcttctcgttccctgccagactttaggatttaggaggagcagggctgtctctgccaccgagataaaagagacaagcccggtctgcttggcacagagaagacacccaatagatgtgagccgaatgaatgaatgagtgaatgagtgaatgaatgcaggcattggcttggactgggaaggcaggcccatggtaagggcccatcttagtttgtgcattaggtgagccctcagtgacttagcccgctgagagcaagagagagtctggtgggaacctcctctctctgggtggacataggccctgctcccatgggccctgccttcattcttttcagccaaagctcaaaactgaaatatacacttggcccttggttggaagagtttcagatcttggtaagtaagagggaaggatttctatgggcccggggtggggtagggctttcctgggaacctgaaaaggtctggggtgggaggtccttatgctaggagacctaatgtctgtgcctcagtttctctatcggagaggcgatgtctcaagaggcctttcagggctcagagttgagctttctgagttccacatggaagtgagctgagctggaagaggtggggagggaccctggctgtagggtcaaggtggggacacagggctccccactcccacaatgccgtgtggggctcaaggaaagtctggaactctctctgtggctccagcattcagccgtccttgaacccatgaaaaactgcagttgaaccttcctccaaccccatcttgcaggctggtcagaacacaccatgtccatggggaaactgaggcttacagagggaaatgagctagctgggggtggctggaggccctgtgtttaatctgggggttcctcaatcccttggaagagggcagtgctcatgtttgctgaactggctggagtctaaaggctcttggaccccagaaacacccagggggctcaatctgctctgagacagaaggtccccaaggggaccagggtctggtgggctgcgcccaattcaggccccttggcacaggtggtgccatgctgcggatcctgtgcctggcactctgcagcctgctgactggcacgcgagctgaccctggggcactgctgcggttgggcatggacatcatgaaccgtggtgagcttgtgggcccgggcgtgcagctgggaggcggtgcttggggtaggtggtaggtagtcactgctcttggttgcacatcctggagcatcccgtgagc

SEQ ID NO: 26447 - DNA, 2300 bp, Homo sapien
gtcgctgtcatctgcaccagcctcggaaaggggacaaagctctggaactctggggatactgagccttgggaggtgggggtggagttgatgcccctcccccaagtgtgcccagagtccctgtctccaggcccatagccctctccatgtgaggcctggtgcggggggagggtggcggaaggtagaagacccagcagctttaagtcccttctttccctccgtaggccttcgctggggaaggggtggggtaggcagggtagattctgtgccattggaatggctcttggggagccttggagggagcccaataggtggctgaatgggtaggtggcagggccccacacctcacccctggctctgagggaggtggctgcctgtgcagcccccacgccttcactcccactcctgggcaccgaccccagtccccttactcgcctccaaggaggaaggcttagcccaggccctcggggaaaaccgcaatttgcttctgacatgacatattgacgggattctggcggccgtggcccctttgtgtcctcagagccgcgtgggcatataagggccacccctcagctcgcgtgggtggaggaaccgacaggaggccgggagcccccacctaccccttgtggagctgcaggagcaagggtaagacagcctgaggcagccctgctcttgtcctgacgcccagccgttgaccccactgccttctgccctcccatatgaatgatgggcacggaaagaactcaccctaggaggagactgggggtaccaagagggtggatgaagagaaaaaccatgttacagatctggggcccagagagaggcaaagacttgtatatattcacagccggaggggtgggcaggggatccctgtccataggatgatcctatggagagagttccaggagtgcccatttttctcctggccagtgacatgctgctgaatttctatcccctgccccctcagcagggaccccttctgacacacaaccacgcacagaggccttagacatggtccctgccttcatggagtttacagggaagagaaataaggacacaaacagatgcataattgcaaatggagatcagcaccttaaagtaaatattctgcgtgatgtttagtgacagacggatttctttagacaaagtgaaggacggaggcctctccagggaggcaatgtttatccggaatctcaatgataaggagtcagccatgcaaagaagcagggaggagccttcctaacaaggaaccgcatgtgcaaaggccctggggtgggaaggggcctggcatgtttaagctcaaggaggtcaaaaaggcaggcagggattttgtgggtaatggcaagaagcctgggtttcaacccagggcagcggggagccactgaagggtttaagcaggagtgatgggtgggcatagatggatatgtgattgggtgggcaaatacggaactgcttaaagaaaaatcccactctgtgaacttagcagattagccatgcccccacctgccaccccattccctttttcaacaagatttggggtggaggtgggggaaggagaaagataagacatgttaagtctaagtgttgggtgtccccagtcagctagaccttctgaaacagcctcatgagccagtgggaagcagctgctggaaacaaagctctcatcctgctgtcctggagggggaagcccctctgtctgcagctgtcactccagacacccggccaggctcactgggcctctgaggatgaagatttttatgtcagatggactcaggcttgaattctgactgtctctgattagttctgtggccttggtctagtcccctacccctttcggtctcagttttcccagctgagaaatggaacccaatgagggagaggcttggaaagtgccttggagacttgagtgcattggcagctgcaccgtgccacctgcgtgttagctctgcttacatttgggaggagaaggctttcctgggagtgaagctcaatttgggctgtgccaggtgggcaggaagggggaaggctgataatgggaacagagaggggaaaggcttgagcaggagaagggtctcagagttcctccttctgctccttataggcatgcagccagtcatgctggccctgtggtccctgcttctgctctggggcctggcgactccatgccaggagctgctagagacggtgggcacgctcgctcggattgacaaggatgaactcggcaaaggtgagccccaggtgggcagtctgtgagggggctgctgcaatgtcaacgactcaatctatatgcttagagcatctgc

SEQ ID NO: 26448 - DNA, 2300 bp, Homo sapien
gacagatggatgatagatatatgggaagatggatggatggtgggatgggtggacagattaataaatagagggaggagaatgagttgatgagtggatggatggttggttggatggatggttggttggatggatagatatatggcttgctgggtgtttccatgacagatgggtaatagatagatggaaagatagtaggttgaatgtatgggtgaataggagaataaatacgaaggggagaatgagtagatgagtagatgggtgagtgatgtagaggaatgagtagatgagtagatgggtagatgctggagagagttccttagaacctgcgagctcccagtttggtgtttttgttggaatccctattacccatctccctgatgctcaatttgtcaattccatcttgggagataattagacatccattctctgaaacagtgtgtttaatgggtctgctttgtgtcaccagattcatttcaatttgaaaaactcaaaaggtagtatctggaattctggaccctgccttagtatgtgaccttggctggtttcccctctctctgggtcccagggtcctgagatgactcttggctggggctgcctagtgctacctgctggccagggtggtggcgcccagccacatctgcatctgcactttctcctccacagggaagcagtgccagcatgtggatggcctggtgtgtggctgcgctgtctgtggtggctgtgtgtggcaccagccacgagacaaacacggtcctcagggtgacgaaagatgtgttgagcaatggtgagtccagccccaaaggggtgagggttggcatggggtgagcagggcagctctgccaactctgaagtacccaggaacctcctcctgctagcagagttcacatcgggaggctgggtgaattctactctctgggccttagtttctcctttttcttttgactaccatttcctgagcacctactatgtgccaagcaccatactggtgactttatgctcattctttagaggcaatagagaacaatgattaagagccctggatcagccttcgtggggttcaaatcctgactgtgtgaccttaagttcatgacttgagttccctgagcctcagtttctttatctgtaaaatgggtgtaattatagtctctatctcagagaactgatatgagaatgaaatgaaatgaccttttgaaaacttagcacagctcctgggacttagaaggccctcaaaagtgggagctataattattcttgcctccaattcttaggaccttgcttttgtcatctagcatgtgaggacatactttctccctcaacacccatcccaggctatcatgagcataaaaaaatgagattatttcctatttaagtgatctctgagtacctcacaggcctcaatctttctatccatcagacgggtacacttctggccttgactatttcccaagaatcagttgcgataatacataagaaagtttattttattttattttattttatttgagacggagtttcgctcttgttgcccaggctggagtgcaatggtgcgatctcggcttactgcaacctcctcctccccgtttcaagcgattctcctgcctcagcctcctgagtagctgggattacaggtgcccaccaccacacctggctaatttttgtatttttagtagagacggggtttcaccatcttggccaggctggtctctaactcctgacctcataatccaccctcctcagcctctcaaagtgctgggattacaggcatgagccaccacgcccgtcctgaagtcaattttttaaagctgtaaagtgcagagcacttagaagggagggcgatgaagaaaatccatgaagggctggctgatgtccaaatctagttaaagtaagaccagacaaaacccagcagaaaatgagctggccaggatgccagggctagatcagcctggagaagtcatcccgttcagcctctgctcttcgctggtgggaaaagtgaggcccagggagctgagcaacactgcgaggtgctgcctgggggctggaggtggaaaaaagggaggaaccctggactgatgcccttgcctctctgcagccatttcaggcatgctgcagcaaagtgatgctctccactcggccctgagagaggtgcccttgggtaaagcccgtggtgatggtggtgggcctctcctgggcggtctgcttggtggaagtggaagtggaggtggtgggggaggtggtctcctggggggcctgcttggtggtgggggtggagggggtggcagtgatctgttgggtggaggctt

SEQ ID NO: 26449 - DNA, 2300 bp, Homo sapien
tcattctgcagatgaggaaactgaggcccagtgaggttagctgctgcctggcccacttctacacagctggaaggaggcagagctgggcttcacacctagatcctctggcagcgagcaggagctgcaggaggtggtgggtgtctggggcctggagcaggggggaccctactgtgtcttggctgagtctcccatgccctctggcctcagtttcaccactgataccacagggattgggatgtttgaagtggagtgccttcacggtcccctggttctctggagaaaaatgcagtgcaacagccaagaagccatatccaggaggctcctggagttgcgggggtggaccctgcagcaagaagagggccctcagctcctgggtgtctccccatgccccagccaaagccacccagagctcagtccacactgggcctccctagtgtcacttgggtgcatggctgatgacacatatgaccatgtttgttttctcaaccttttcgtcaggaccgcctttgtgaacaacctgagggccctgcaggctgcggggagagtcacgtggagcctgagggtggcacaaggaaggcagagaagaagcaagtggagctggccttcagggttcctgagtctccacaggcccagggcacctgttcttggtccagcaataaatgctcagatggatggcgaggacttgggtcaccacaggatccactatgggaggctcctgggaaatatcaccatcacgacattcattctttcaggcagtaagcatagccaggtcccatttgatatgaatctgacctgcaaatctgcaacagtgtcctgcaacatattaagttttacatggtgaccagaaagttaaataaaacatcccctccccccaccttttccattgttaagaacacacacctaacttgctcaagtccctcccttctcaggaagaataaaggtcccttctgtaattccacactccctccaccaacctccttccctctctcgtcccttcgcagccaaagttccttagagctgtgcttctccaccttgaacacacaaatgagccacctgggctcttgttaagatgcaggttctagagcagttggtctgaactagggagaggccagcggtccatgggccaccctttgagcagcatgcttattttggatacatccaccccaccacccatcttgtttccactggttgccccaccaaactcggccttaccaggtcctccgtgatcaccaggtagaggaagtcaatggatcatagatgaggtcagcctcatcttgaccatagcacacataccacttcctcctccatgaatccagttcttcccttggccttactcccctggctctcctcctcctcctcctctgaccattctacctctgcctctttgcagatgtaatattttcaaatcggccaaccagtggcttccttcaccctggccactttggttggttcattgctccgcatgtaaccccagcaggaccaatgggaatcagtcctagaacttgtgaagagatattaggaaagacatactttcttctgctagactattaagagagaatgtggacctgaatctgttggtggccatctctgccacctctttggggaagtcagtttgaggagaaaccccaagccaagtcatggaaagaaacaaaggcctggagatttcttttgagcacctagattcagccatgcctgaaacccgttggcctgctagttacatgagccaatgactttctttcacatctaagtcactttgggttgtgttttcaattacaaatataacccaaagaatcctgacaaatgcaactgacaaacatttcagtttattggcaagccatggtgggaaaccagagatgaaccccagagagaacttggcctcctggagttgacaatggagaagagacagctgtgggtgtgtaggcaaggaagacacctgttcaaaaatgacaaggcagaacgtgagaaaaggtcagctgggtggctcaatgaaggctttatataagaggtgcttgcaggatggggagaatttgcaggggggtgacatcctcagacctggcccttggcactgggaagagttgatgcaaagaaattctgcgaggccagagaggaggctttgggaattgtccagcagaaacagagaagtctgaggtggtaagccaagaccccacagaaacaagtccttcgagggtcccggacgaaaagacaaggagctatggtacttctcccatggttttgatttttttgtttttttgagatggggtctcgctccgtcgccgaggttggagtacaatggtgagatc

SEQ ID NO: 26450 - DNA, 2300 bp, Homo sapien
ttgcccaggctatagtgaagtggcacaatcttggctcactgcaacatccaccccctgggttcaagtaattcttctgcttcagcctccagagtagctgggattacagatgcctgcccccacacccggctagattttgtatttttagtagagacagggtttcaccatgttggccaggctggtctcgaactcctgacctcaggtgatctgcccgcctcggcctcccaaagtgctgggattacaggtgtgaaccaccatgcctggccagatggtcctcattttataatgggttgtgtcccagtaaacccatagtaaagttgaaatattgaagtcaaaccatcgtaagccgggaccatatgcgcacatattcatcagcatcttcttcgccatctttgctgttgccgtgcatcatgggcctaccctatgctaagccttcatgggtattacactaatttgacctcacagcatgcccttgaggtgagcactgttcttagtcccatttcacagataaagagcctgaggctcagcaaggtgcggtctctggcccaggtcacatggccagcaaccagcagagagagagtattcatgcccaggacagcccaagcccagtgccaggctctgagcactgccctcaaagcccctcaccatcgttttgatttcctaggtccttgcctgtccaccatgcctctgagatccaggaacagcgtgtttacccattttacagatgaggcaactgaggcctgggccaacaccaggtctcgaggtcactgcatcatgctcagcaccctgggctatgttcctgggctgggacaaactgccttcacaagatttcagcacagcccttggctctgtgcttcacaactgggggaagagcggggctcagacgtttggagaacccggtgtcaggcagccagggaaggaggtgtgacaaccattcaagaccacaggcaagactgcagcaggggtctaatggtctgggctcttggggcctggccatcaccttcctgcagccgcccagctctgtgctgtaacagtggagccatggtcagtgtaggaacagccagctcctggagccactggtcttgtcccaccgtttgcttggttgcatcattttgaggacaggccccccaggtccttgctgaattgcaggtgggtgagcagaagggcagagacctatggtgaccctgagctctgtgccagtccttcccagcctgaggccaagtgggcacccacccgagtttcctgtgctgttccgggttgacacaggcccaatgcagcaggcgttacaaccaacccaaacatcagtggccgaagcaaaaacaggatactcaggcccagggactctccctctctgctaactgacctcagcctgatatgggtggaagggtcttccctggtggcccaaatgcctggttcctgtccttgcaagtatggacaagccacctccctctctgaacttcagctttctcaactggaaaatggagctctgaaaacctgccttacagagttttcataaagactaacagaaaagtgcatctaaagtgccctttagggacaccaagcccagtgtcagcacaagcagctgccaggcatctgctgcacctgccgggtgcagacccctgggggcaggacccctgggaggctgtctgactccttgtgggccacaattctagacccatctcggtccctgtcttgctgaatgaccccaggctggtggcttcccctctctgagcctcagtttccaaatgatgacggagttagaccggatggtcattatgggtcctcctgccaggacattctccaattcattcattctcagtcttctcccagtcctcacccacaaggaccaaggaccaccccctcggtagctgcaggctccatgaggacctggtcttagtcttggcggaaagccctctccatagccatccgtttcaattcaagcatcctgggtgacctttgagttggaaatctctctctctgctcatcctggagaggggttattttccttggagtgtccttggatgatcccagaaccaaggcttgcttctgtgggcagccttccatcccatctccaccatataatagccgccaccattcagcagaatcccagcagactgtgcagtggggcaaggatttcatgagcatcctcctctaaacgcgtgagtggcgtgctccccccagtggcaccacacgtggtggtctttggaaggctttgggggcaagaggcagaggggtgggattgcttgggttagctaatattttgaatacagcagagataatcaatatatctctaaatgtgctct

SEQ ID NO: 26451 - DNA, 2300 bp, Homo sapien
cactcaactctagtacaggctcttttgaagcctttattcagttaaatcaatgctgtccattaatatggatctttccaatgtttgcctgatttacacaggataacatttcaggatccaaattgttaactctatgccttggaacattttgtgaccccaggaacacatcacgaaatatttaccaaactggatctttctgtttacattacaatgatagcgtgtacatatttcactacatctttgccagcagatggaaacctttattgtaaatatttgctctgtgaatgggaatagaataaatttcataacactggaaaagccaaagttctcaaattaggggagttaattgttacaccaactcgacagactgctttctgagcatttttaaaaatggaaaaatagctgtagtttccagctgggtgggaatacagatctaagaatttgcttagctggaatcacaatgatgcaaaaaagtggaactgagaaaaaactgaaaagggatgccaaaatttgacagaagtttatttgttagacatgactcttatttctgtgttagtgcatgcaagaaaaaaaaatgcattttcaaaaaaaaaataggaagattgttgagtatctagctgagccaagcctgtgctgagcaattcagaggtgacctaagcagtgcctctccaacctcagcatgcaaggaatatgttcctgctacacctgctgcaggggctggaggaactgagaggggaaaagggctagacttgttctcaccatcaagaaagtacagcctgttcctgctgcaataacaaaatatcttagactgagtaatttataaataatagaaatttacgtctcacacttctggaggctggaagtccaagatcaaagtgccagcagacttggtgtctggtaaaggctttctctctgcttccaagatgacaccttctcactgcaatcacaagagagaaaggatggaagggcaaacagggacaactgctgtgtcctcatatggcagaagagaagtggaagggccaggcagctatctgaggccatctttataaggacactgtcctattcatgagtacagaactcttatgacttaattgggcccaacaggccccacctcttaataccactactttggggtttaagttccaacatatgaattttggagggacacatgcattcaaaccatgcacgtgttttaagacatctttgcaattaaggctttagtggggtcccaacttttcaaatggttgagcacatctgttctgaagtcttcaaggaacaaacatcttcagtgagatagagaacagttgcccctaccctacaaggaaaccacagctctgctttaaaaggaggaaattgtgatgtagtgtgaaggttacaagctttcatagaatgtagaactagattcaaatcctgattctattatacactagctctaggaccttgggcaagatttgtcttctcttgagtcttagtttcctcatctgtaaaatcaggcaaattagttcttagatgataaggatgcatttgtgaaaattgcctgtcaatgtgagctactattattatagatggagagacggagaccatgaaagggcttgggagctgtccagcatcaaacagcaagaaatgggcagcgccatgctagaattcaagggtctgggaccacaaaccagtaaactgaagctaggacaccctctgcctccccactcacagaagaccgagtggcttccttcctcggagtcaccaggcccatctcgcttattgtacagatgagaaaagcatctcagagtggagcagggatgtgaatgtgactcctgcacaccatcttcccacttgcagcccctctcggtgctctccacactctctgcacctctccatttgatggcattcatgatgtacagattcaaatatgttgttgacattcccccgggccttccaagcaggaatgtttgctttggaggtattggatagacgtggtaaaatcaagggctttccatcagcttcctagctgtccatcacccagtgccacgtctcccccagcaatgggatcacttgccatttatacagtctgcccccctacaaagtcatcgggaatcaacctacagaggccagagtgtcttgacagcacaccagagaaatccaggtaagcacaaggcaatggcactctccaacctgcctcttcatcagatgctgaaccagactaaagcttttgatacatgttaccagttattaccaattgtgtttggttctagcacagaacatgaaaaatcgtggcttcaatcatgatgagaagcccagagttaggc

SEQ ID NO: 26452 - DNA, 2300 bp, Homo sapien
ttcacgaccagcctgggcaacacggtgaaaccccgtctctactaaaattaaaaaaaaaaaattagtcgggtgtggtggcttgcgcagaggttgcagtgagctgagattgcgccactgcactccagccttggtgacagagcgaaactccatctcaaaaacaaaacaaaacaagacaccacacacacacacataaacacacaaacaaacaaacacacaaaacaaacaaacaaataaaacacacacacaaacaaacaaaaagaacttcagggttggttattcctagaaaatgcttcgtgggttataatgtggcaggtaaatgcagaaaaacacctaaggatattcctgccggtgccatctggggtaaaaacatgaaaatagcccaaaagaggagacattccatgaacatcagtcaatacataccttagaaaattctgcagacaaggaggtagacagtcctgatgtactgctacttgaataaatgcttctgtagaagcatgacaggccaatccttgtttctcatcatgttacatgaatgcacgcctatggaaagaaaaacttccaaaaaaagatacaacagaagttatctctgtgaactgatttttatttacttttttctctttgtgcatatcttcactttctaatttttctacttgcctaaaaacagatcacccaaattaaaatgttaagccaggccagttgcggtggctcacgcctgtaatcctagcactttgggaggccaagtcggatggatcacctgaggtcaggagttcgaaaccagcctggccaacatggtgaaaccccgtctctaccaaaaatatgaaaaaattagctgagcgtggtggtggatgcctgtgatcccagctacttgggaggcgaggcaggagaattgcttgataccaagaggcggaggttgcagtgagccgagatcacaccacaccgcactccagcctgggaaacagagtgaaactctgtctcaaaataaataaataaataaataaaataaaataaaatgctaaaccaaatgggttatgaatttacatgagaatagtgaccagggactgggctgagagtctgcttggaatctgtcaagtgtcgaaggagagaatcggtccctaccagcctttacctgttagtctcaggtcctaatgggaccatttgcactggcatttggttgaagtcccaggaagccacacgaacatcttcatgcacctcctttccaggaggtgtggagggtgtgtcaagatcccgagggccactcctagcccagggagtgtgccattcaagcgggcacagtaaatggtcctacagtgtccacatactccagccctggtccctcagcctgggcccttcttgtctgtgctgtggagcctactctctcccatcagctcagggaggtaagcccttgaaaatgtcaagtgaaaatcatgatcataatgatgcattagtacagtggtgaccatttgtgaagcacttacaatgtgcaaggtactgtgctaagtgcttacgacaagagcaagaggaaggtatgagtttggatcctctgcatcttccagatgaggaaagcctaaggtatccagcaagtaggtggcagagctgggattccatcccaggtctgtctgtctctgaagccagggcatatcaccaccaccattttgctgtaaaatgaggatagtgtgtcctgcataacatcgtgtggtgaagcaacttgcactaaatcccacaatcccacagctgctaacaggtgggggtcttcagagaccattgtcataactctaacattatgcagcctctcgcagcagccatgagcagccctgctggggaaggcagtgtccctgcgggaaaaaccgtatgtccagcttttgggcataaatacaggttgtgtggccttgggcaagtgacttcatctcttggaccctccctttcttgctctaaactatgaggaaaagcaggtccctccctgagcctcagtagacccatctgtaaaatggacataggtgaatgggtccatatgagttctgtggccacttcagatctgagctctgggaagaccctctgagaaagtgtccttgcaaatgacctctttgccctgatcctccacagggacctgaccgaagatgctgaatgtctccggcctctttgttctcctctgtgggctgcttgtctcatcctctgcacaggaggtcctggctggagtttcttcccagctccttaatggtgagactgtcctgctttgggtcatgcagaaccctgagccaatgccagttaagttctcattagcaaagtacctgggacacaatgaa

SEQ ID NO: 26453 - DNA, 2300 bp, Homo sapien
actggcccaagcatgattcgctttaatcctcactatagctctgaggtctgcactgtgatccttttacagacctgggagctgagtctgccaagagacagagtcagcagttgaaccccggtctgcgtgaccctaaagcacatactctggactgcatgtgatcctgcaccgagttggcttcaaatccagtccccagcccctgagcagggccctctcatccctccaaatctgctctctcttgtcatgcatcaagctctgaaaatctataccctccatgctgtcctttcattaggctctgtggccctgagaaccacagcctgtgatgaggtaggaccaacagctcctgccccatgttaagatgtccaaagagccaaggacaacagatttgttcctcccgacaatgcccactcttctctgttttcttgacaataaataacaaaattccaaccacttacataagaccaggaaggctagaaaaatacattttgaagtaagtgatattctacaaacatccccaaggggagcatgaactctgagaaaggacctcaaacagggaaagccaacaccctgaaccaaggctttctcagtacaatctcttacaaaaccagagtgaattgcccaagaatagccccaaggcttctgtgaaatttgcaaaggacgttcccatccctcatccacatgggaccctctatgtcgcccgtagtatggggaaacagcacagggacagtgacaaacgcctttgtctcagagctcacagcaatggcaaggtggggcccagacatccgagacctgtgctgctgcagtggagtggggaagagagagctgcaggcagtgcggtccaagaggatgcagggaccctcctgggcctgggaggtgttgcatggaatgtggcttttgctctgtgtgcagtaggaaatgctggagggttttgagcagaggagtggcatggtggtctaccttacatctttttttttttttttttttgagttggagtcttgctctgttgccaggctagagtgcagtgtagtgtgatctcagctcactgcaacctctgcctcctgggttcaagtgattctgctgcctcagcctcacaagtagctgggactacaggcatgtgccaccacacccagctaattttttgtatttttagtagagacggggtttcaccatgttggccaggctggtcttgaactcctgacctcatgatacgcctgcttcggcctcccaaagtgctgggattacaggcatgagccaccgcacccggcctaccttacatcttaaaatgactgttcaggctgctgtgtggaagagattgtgggtgggcacagttaaaagctgggaaaccagccgggacccactggcaataattcagatcaagctgatggtggctgaggagtagttgttatatgtggtcatgttctggaagtgtcagcaggatctcctgacagatgggttgtgggagatgggaaaaggggaggaaagggcagctccaccggctgggagtagaacaactagatggacttggcaccatttcctaagagtgaggacaggggacttaaactgaattctctctgaatcccaaccccagggctccaaggtcaacctgatgctttggcttcaagagtctgtaattcttatccagaaagataagatccatccatccagttattcattcatttgtagcattaacaaacattcaccagtacttaccatgtggcaaacatgggaggcactgtagacatgaggattaattagactcataccctgccctcaagaaactcataattcagaggagattcagagatcaaccatctccactcatcaattcagtcgtttggtcactcaacaaacattcattaacactcaatttctgacaagcaagtatcgtggtagggattgaagtggttggtcatgcccttaagaaagtcctaacccaattggagagcctggggttagccatcctcactcaaatgtattcattcattggttcactaaagagtcactaacatccagcctgtgccagggtctgggagaggactcctgttggatgacccaacaatagactctggtgagtgtctccaagcaacaaggcctccctctggagccctggcctcctcccagggttccacatgttgctctcccaatgtgagcaagccctggtggcagcgccagggtccagtgcagcccctccccacagcatgctgggggctaattctgatgtcatctttctgcagaaaaccattagaccatccctccagactgccaccctcaaagccgtctgcccaggccccatctgacactct

SEQ ID NO: 26454 - DNA, 2300 bp, Homo sapien
gctgtttgagcccaaattcacccactttctgctgcaatacagacacagcctcccggcctcaaaccagagggtgtaagctttcattaactggctgcacaaactctactaattccttgccttatctgcctcagtttccccacaaggatagtagcaacctgacccaacccacaagagttatacgatgggaccactgtgaggatgattgccatgtacaagatgtgggcagagtccagcaagtaccttgaatggataattaagttcaaagccatggccccaaacccttgggggcaccacccagactctggagagcagtggagcaggccagtgaaggcctagtgtgagggaggcagtgtggcccactgattagcagggactcagacagacacagagggtggcagggtcaattgactccaacactcactcgctgtgtgtccccaggaagcagtcaccctttctgatcctcagcctcctcatccaatgtatgagagacaacaataccaaccactcctgaagaagatgaggttcaaatatggagagcacctggcatgcagtcagtgcttaataaaagcacatttattccttctctctccacttttgcttataaggtgttaggttttgcagggtaagagctgcgctcactggtccaggaccttggccttcctgtgtcttcactttttcatctgctgaacagactccaagggccccagtggtggggataaataaatgcctgattactccatttagggaaaggtagaagaaagggtaggatagagaccaggatgccaaaggatccctcaggcctgggaacctggaaagacttttccaggacctaaaagagaagcggcggggcactgtggctcacgcctgtaatcccagcactttgggaggctgagataggtggatcacctgaggtcaggagttcgaggacagcctggccaacatggtgaaaccccatctctactaaaaatacaaaaactttgccaggcatggtggcgctcgcctgtagtcccagctgctcaggaggctgaggcaggagaatcacttgaacccgggaggtggaggttgtcatgagctgagatcacaccactgcactctagcctgggcgacagagtaagactgtctcaaaaaataaaataaaataaaaattaagtgaaaatttaaaaaataaaaagggacgcatgaaagtgtaaagttcacaggtggggaaatcaaaatggccagcaagtgttgggaggcaccttcatctctcagtgcagtgattcggggaaaggacctgaatgtggatgtctcaccccaggcaagcactgcatctctggacaacttgcctcacactcagcctcagtttcccccttatagaataggagtacagggttgtgaggattttgtgagatgctgcctgtgaacaccatggcaggccaggcatacagcaggagctcggccagtgtctgctgttggcgttgtttttgttgttttcattctccagtcagttgcattctaactctgctgcatcctctctgggtctttcagcacttgtccccactggatctcagtttcctcctctataaaagaggaggagtcacctctccctctcagggttcttgtgaggacagagagctcctgacgtgcaataggggctctgaaaacaggagacccttgccctggaatggagacgcaccccagatgtaggatgcagtgtgactcttttgacattttaggagaaagaatcctccaactggagcaaaaaaattagagcaggagaggaaaggggccaagagatgagactgaggtcccttcctgggctctgtctggctgctcctttcaatgctccaagctaccttgggagcgtgggtccccaaccttggctccgctcaggaaaccataaagtcttgagtaacatcccatctcaggtttttctctgtttatcttgttgaccaaatagcttaactgtctcacctgctaatgtgattggcaattatttactttggagagccctgaaagacactgtcagattgcagaattctcaattatctagaaacccatcacccaacacatgcttcctcgtccccatactataaaagaggctgactcctcggcagaagtgagtgggggagagagaggagaccaggacagctgctgagacctctaagaagtccaggtaagagccatccattctgtggcccctctgctacccttaacggcagggatctcaggctcctgccctgtggggcagtgagtgatcttgatcactcactgggggctgtgcaagagaaacagacctggccaatgtcagggatgtgggg

SEQ ID NO: 26455 - DNA, 2300 bp, Homo sapien
gcagatgttgcgttcttttttgtgtgtgtgagacagagtcttgctctgtagcccgggcgggagtgcagtggtgcgatcttggctcactgcaacctctgcctcctgggttcaagtggttcccctgcctcagccttctgagtaactgggtctacaggcacgtgccacctaaaaaccatgcccgtctaatttttttttttttttttttttagagacagggtttcaccatgttgaccaggctgatctcaaactcctgacctcaggtaatccaccagtatttgcctcccaaaatgctggtattacaggtgtgaatttaccacttgctgaattctctgatgtttcaagcatttctcatgaccttacgagaccctcaaaatagtcccatttcacaatggaggaaacagtctcatagagaagaagcaattttcccaaggctgacagctgtcagtataggagcaggaatctgagccgtgtctgtcggcctccacaggcttcctcctgcactcctgcgcttcttcccagacagggcacaattaggttttcaggagggtgaaggaggtactccagaaagaggacacggcacaaaaaggcctgggagctgaagagaggtggagccaaggccaagagacgccagcaacctgaggaggggccacgcggtactgagggcaggtgtggagtctggggaccatgggcctgcagagatgcagccagctttgctgtcccagcacgtggcaggaagcaggagctgatgcggccccaggtcttggcattgggcccgagcaccgcacagagggtcattgtccatgggcagtgggcatggccagctgggaagccaagcaggggcatttgcctctctggagatgtgcccaagggatcggcagggtcctcccaagagctctctcaaaacacctcacctttaggtattcagggcttttggtgtgtttgcaaacatggcaggacagcaaacgctcttcaccttgttcttcttgtcaaaaagcaggaggaagagaccagccagggcctggccacgtactttgtgacctcagaacacttactgcccctgacttgtctgctgcagatggagacaggattcaacaatggccatcccagctctaaaccacaattccattcttctagacaaaaactgggtagcaaggataattccccagatgacatcaaaaggccatgttggtgtcaccaccacctccagtgctaaattgaagtctcaggggaaggacagtgtggcggttaagagggtccggtctggactgatgatcgggttcaggtcccaaagctggaatccctggtcatgtgaccttgagcaagtcactcgcctctctgagcctcaggtgccctctgtaacattaacgctgctgatgcccacctctgggtgactgtgcaggctgcgtgagccaagacctgggcccaggtggtggatgacagcgtcctgctgggctctgacatttgtcctttaggttcatggtcatccctccttattcttttggtccacaagtgctcatggagattcctaaagatgcagacaaggtagagcagattttaattgctgcggaatgaatgaatgaatgaaatgaaagcccatgctaagcactgtgtaggcatgcacttcaactcatgctcttaacaacctatgaggaggagctactattatccccatgctatagatgaggtcattggggcccagagaggtgaagtaccttgcccaagggcacacagcaaagcagtggcaaaaataggattcaaatctattctcctgggtgaattaattgatggagatgtgtatctttgatgtatttaggaataaggggtgggtaaggctactccttccttttcccaaattgattatctggattaaacaattgttgtaatccctctacaaaggctcatcctattataagcaataataatattaatggcaacggccactcacatttatggagtgcttattctgctatatgcactgtgcttctctcagcctggaccttcctttctccaaacctcaggaagctggagtcccaaggctgcctccgggcggggctgtggttcagcagaagccacaaatatttaccttggagacctcggcctggtctgaggcctctgcctaaagacaaagcctgtgctggggtgtgcaggatataaggttggacttccagacccactgcccgggagaggagaggagcgggccgaggactccagcgtgcccaggtaaaagtagggaaggggctgaaagccaaggttgccaggaaggttctgagctagagatacctgttggggtcaggtcagga

SEQ ID NO: 26456 - DNA, 2300 bp, Homo sapien
gtttagctgcatccctggcctctacccactagttgtcatcccctccaagttgtgacaactaaaaatgtctctagaaatttccaaatgtctccttggggacaaaatctccccctgttgaggactgctggcaattttaggaagagaagtgcccagtgagcaaagggatgtgttgggctagaaagccacaaagggcacaaagagattgcccaggagtctggttgggtctgccttgctggcctctgttccagagtctgacatgtgaaaagaactcagtagcaacttgctgtatgaataaacaaattctccatttaactcttgttttttcttttaaagtagagtcttgctctgtcacccaggctggagtgcagtagcacgattccagctcactgcaacctccacctcccaggttcaagcaatccttgtgcttcagccaaccaagtagcttggattacaggagtgcaccaccatgcctggctttttgtatctttagtagagatgaggtttcaccatgctggccaggctggtctcaaactcctggcctcaagcgatccacccaccttggcttcccaaagtgctgggattacaggcatgagccattgcgcccagcctccatttcactctcatggaaaacatagacacctgtgagcaagacaaggagtcagagagggagggctgctggcaggccaagcacaccctgggcacagggaaagggacaaaccactgcaaaaggtcccaggtggccctgcaggctgggttcaacacacgaatgaatcctcaacccatggatggaacctggctggccatgggcacagcagtaggacacaggccaggtgggctgggcacagcccggggctgctgtggggctgcattctggcccctccctgatggagccccttgcttatgctgttgcagctgtgtcccgtgatcgaggcttccttcaatggcatgtatgcagacctcctgcagctggtgaagggtaggtgctctgctctctctcccactttttcctttactacggagctggcctccagaccctgactccaccaagggaaggcctccccaagtcaggcctgagctgcaactcaggcccagaagcaggtgagacaagcatcagttgatccctgccccagacgcgcagacagaaattcgccacgactaggacttcatgagctcttactatttgtgcagttgtcaggtcagtggatgccccaagttcaaatcccagctctgcccctgacttgctccatgactttgggaaagctaatttacctcctcatcctcggtttcctcatccataaaatggggcttaaccatccctacaacataggattgttagtgaggaataaaagtctacaggaaagttctgggcacatagcaggtgtccctcttggcacagagaagcacttacaaatgcatgctaaatggatggatggatagatggatggatggatggatggacagacagaagatgctaagattacaagcatgagccatcacacgcagcccccggactagtttttatggatactttagaaaactgcagcatcaaatagttctatccatctcgttgcagtttcaaattttccctccatccaaagggtttgaggtatctgagaaattaaagcatgggttaaaaactgagatatctggtttaaaaaataaaaatcagagatgattcgaagggcaaagacggaaggaagtcatttctccctcccccagcatagcagatacgggagggcacaggctcctgcccccacatcagaactctgccatgctcaggcccccagagtggaaactggcggagaagaagaaaagtctaccaactgcactttgggatcagaagaggctcattccaagggcgaccagagaggagaagggagagcagcatgcactgagcgccacagggcatctgccatgggccacgccctcccgctgggtgttttgtataggcacatctcactgactcctcagacaactccatgaggtggcagtcatgaccccccttcactgtgatgaaagaggctccgagcaatgaagtcactgtccaagttcacagaggcagttggtgatagaggaagacttgagttctgagcgagtgtcattcggattgagccgttactaggtgccagttgtatacatgaagcaggaattactattctaccgccgtttctttccttttttcttttttttttttttaattcccaaagagttcttccaatcgtcagatatttggtcagtattcagagtaggatccagagttcacacattacattttgttgacaagtctgtagatttctctt

SEQ ID NO: 26457 - DNA, 2300 bp, Homo sapien
ctggaatgtgttctctttatgttttcttttcttttctttttcttttttttttttttttgagatggagtctcgctctgtcacccaggctagagcgcagtggtgtgatctggcctcactgcaacctctgcctcccgggttcaagtgattctcctgcctcaacctcctgagtagctgggattacaggtgcacaccaccatgtccagctaatttttgtatttttagtagagacggggttttaccatgttggccaagctggtctcgaactgctgacctcaaatgatttgcccacctcagcctcccaaagtgctgggattacaagcatgagccactgcgcccagcctctttatgtattcttggttcaaatcctttgtcaatatgttttcaaatattttcccctagtatcagttttttgatggtatctttttttttcttttttcttcttttaaaaattaaaaaaaatagacccaaggtctcactatgttgtccaggctggtcttgaagtcttggcctcaagcaatcctcctgccttggcctcccaaagtgctgggattacagaggtgagccatgacacctgacctgatggtatctttaaaaatgactagtttgggctgggcgtggtggctcacgcctgtaatcccagcactttgggaggctgaggcaggcggatcacttgaggtcagtatttctagtccagcctgggcaacatcatctctactaaaaatacaaaagttagccaggtgtggtggtttgtgcctgtaatccctgctactggggaggctgaggcaggagaatcgcttgaacccaggagacagaggttgcagtgagtggagatggcaccactgtactccagcctgggcaatggagtgatactctgtctcaaaaaaaaaaaaaatagaaagtgactgctttgtaagctagctgaaagaagtgccatttttttcctgctttgcctgctgaccctagtgtcagcactacctgtattcagctcccatggctttaatctgacctctgcttactttcttctctctactctttgaaagcagagatgccatcaggtgaagtgtctgagacaaatagaatggggcttgaacaaaagttagggaataggtgattttgtgtgtctggtttaattagcctcttaattatgtgaaaattgaccttggaggatacatagtaagagcggtattgctttctgtaaggttctttggtgagattgtgattacctataatgtgttctgtttcatcaggttctgcagctgattcatgagagagataacatctgtaaacagatccacctgccagcccagagtggaagcagccgtgtgttggaggccatgcggagggggtcaggcttgcttggagagggggcatccctcacttttccatgtttccttaatgaccaaacagtgtccttgttgccaagaacctagcatagtgtgtggcacaaagtagctgctcagtaaatatttattgtatgactaagccactgggcactggagtttgcttctgctcacttcataagcaaaggctaaggactggtcacccattttcactgtttagtttaaaaagcataaatatttactgagcagccactgtgtgacagtaagtatttattgtatgactaagccacagggcactggagcttgcttcgctaactccataacataggctaaggactgggtcatccattttcactgtttagtatgtttttttttaattaagcacctatggtgtggcacactctgagattttaattttttaatgttaacattaaggttttgttacatcttggaatttaaatgtcgctctatgtgttcactttctttgagaataataagtattacacagatgagactgaagggagaatctgtcccaaggcaagctgtatggaattagtgctttgtcttgttttccacagggcatagtattttagaggtcctctaaaatgtttaatctgtctagatttattagttaaataaaaaaagctatttagaatagtttatgctggccaggcactgtggcttctgcctgtaatccaagcactttgggagactgtggtgggcagattgcctgagctcagtagtttgagaatagaccagcttgtgcaacatggggaaacccagtctttacacacacacacacctgggcaacatggcgaaacccagtctctacacacacaaacacacacctgggcaacatggtgaaacccagtccctacacacacacacacacacacatgcacacacctgggcaacatggtgaaacccagtccctacacacacagacacacacacacacac

SEQ ID NO: 26458 - DNA, 2300 bp, Homo sapien
aaaattagtttgacgtggtggtgcacgcctgtaatcccagctactcgggaggctgaggcaggagagtcgctttaacctgggaggcggatgttgcagtgagccgagattgcactactgcactccagcctgggcgacagagtgagtgagacgtcgtctcaaaaaaaaaaagcaggggccacatcatgcaggcccctaggatacagtaggaaatctggattttattgcacgggcaatggaaagctcttaagctttttgtttttgtttttttcttttcttttctttttttttttttttttgagatggagtcttgctctgtcgcccaggctggagtgcagtggctcgatcttggctcactgcaatctccgcttcctgggttcaagcaattgtcctgcctcagcctcccgagtagctgggactacaggcacgcggcaccatgcccagctattttttattttttatttttagtagagacggggttttaccatattggccaggctggtctcgaattcctgacctcatgatccacccacctcagcctcccaaagtgctgggattacaggcataagccaccgtgcccggctgtttttgtttttttctttttcaagacatggtctcattctggtacccaggctggagtgcagtgttgaggtcatggttcactgccgcctcaacttccctggctcaagcaatcctccctgcctcagccttctgagtagctgggaccacaggtacccaccaccatgccggggtaatttttgtgttttttgtagagatggggttttatcatgttgctcaggctagtctagaactcctgggctcaagcaatctgcccatcttggcctcccaaagtgctgggattacagatgtgagccaccacgcccggcctgccacggagagttttcaggagaggggtgatataatttgatttaataaaacaaacacaaattcccttaggctatgtgtgggaaactgttctcaggagacaaggtgaccattagcaggctactgtgattgtttctgatgagacaatggtggcctgggtagttgtagctaccgagtagacagatttgacattttggagttagagttgacagggcttactgacagatagaatgtggggatccagggaggtgaagaaaatgaccattcagttcctcctagtgcacctggaaggatggttgggccatttactgagatgggccagaatgacaggtacaggtttttggtgaaggtgcatgtgtggaaatgaagagttctgtataagttagagatggtcatcagacactcaagaaggggtgtcaagtaggcagctgagctatggctctggtactgcagggagggtccagctggagatgtgaatcaggaagtcattaacctacagggcagcaccctccaatagaaatagagcgtgaacctcttaggtgacttaaaatttcccagtaaggaccggacacggtggctcatgcctacaatcccagcactttgggaggccaaggtgggaggatggcttgcgcctaggtaggagtttgagaccagcctgggcaacatggggagaccggtctctacaaaaaaattaaaaaaattttagctgggcgtggtggcgcctgcctgtagtcccagccacttgggagtgtgaggtgggaggattgctttagcatgggaggcggaagctgcagtgagccatgatcacaccatattatttttccccctgctagccacattgaaaaagtaaaaagaaacaacaggtgaacttaattcaaatatttctaccaccatagctacaaataaaaaaaactaattcaacaaatgtacttatttaatccaatatatcccaacaattattgcagcacataatcaatataaacattatatatatgaactatttgacactatttgacatttcttcttccacatccagtgtatctgacatttagcgcacatttgatttgcactcacccactttgaggagctcaattgccgcttaagtccgtggctagtggctgccctaaagttcagcaccgccacggagctttgggtccacccggactgtaaaaaggaagcacttccgttagcatgacccggcctgaagtagcggcggaacggaagtcgcttgtgtatgaacgcagcggcggacctgtgaggggatccgacttgccggcagaacttacgctgcgggaccccgggcactgttgctgctgcgggaggtgagcagcgcggccgccggggtgggctgcgcacccgcttttgactggcgcctggggcaggaggggccgcggatcccgggaagcgcacggtgttca

SEQ ID NO: 26459 - DNA, 2300 bp, Homo sapien
taggaatggaggatagagacaaggagcaggtatgaaggccagttgagctgtgtgatgtggtggatttttcagattacaatcatgctttacctctgtatttgtcagctgtctagcagagtggttcagtgcccaggcactggtgtcaaacaggcctgggtttgaatcgcagctcttcctcactcataaatgtgtgacctaggccaattagactaaatccaagttttcccttctgtataataggggtgctcttttttcttgctctgtcaccaaggctggagtgtgatggtgcaatcacagctcactgcagcctggacctccaaggctcaagcgatcctgccacctcagctgtgattacaggtgtgagccactgtgcccagctgggggtgctcttagctactccaggaggctaatgtaaagataacacttggaaaatattctgccagccctaggtaagagtaagcattcactaaatgaaagtgattatttctatagaatagggagtcacagtttaccacgtgttttcacattgatttaatcctcacaccagcccagtgaagtaggtattattatgatccacattttacagatgaggaaattgaggcctagagcagtgacgtgaggggaccaaagtcgacttggagctaacagaggcagcaaagattagaaaccatgtctccagtcgcccagacccagagccccaccttgcaaccctcttcccacacaccagttctgttttttttctgccaggcctcaaagtgtgggacttcaggcttttctatactcgactgtgaacacagccaggggttaatctcttaaacttccctccagttttgaagtggggatcctgcccacacctcccccaagccctaagcggtgtcggtagcggtctcctccagggggcggggcctgtcatctttagaagccacgccagcgataagccacgcccacagaccaaagcctcgacccccaccccccatcccccgccctccccgataggaaaccaacttcttcctcagctccccaactagcaactgtgcccgcaaggtctctcgcggctcagcatctaccttttttttttttttttttttttgacacagggtttcgctctgtcacccaggctggagtgcagtggcgcgatcgcggcttactgcagcctcgagcttctgggctgtcatctaggcctcccaaagtgttgggattacaggcgtgagcctccacgcccagacggtgtctacctcttaaactcaagccttggagtccaacgctctaccatacgcagcccagccctccgccatatgcagcccagcccgatgcccagtgcttcgcaccaggatacgtggttctgtctctttttcatgcgctcccacgtccgggagttacagtcccggccctcgatgggcattccgagcgccgagccccctgcgcgggctcactgggttccgcccccgacgcgaagccccgccccctgacgccccgcccagcaccacgcctcccgggctttcgccttacttagtggcccgccccgccgcccttctgacccaccccgctaggtagtcccacacggcggccctcggctcccgggccccgccccggcctcctgcatttgcccgaggccccctccccagcactggccacaccccagggtagccccgcccccagagctcctcccccagcggccggggtagggtggcggctggcccagccgggcccccgctgccctctgccctgggcgcttggtcggagcgggctgggcaaagcgggacagggcgagcgcggcggcccgggggctcggaggcgaagatggcgtccggcaggcgcgccccgcgcaccgggctgctggagctgcgcgccggggcgggctcgggggccggcggcgagcgatggcagcgggtgctgctgagtctggcggaggacgtgctgaccgtgagccccgccgacggcgaccctggtcccgagcccggcgctccgcgggagcaggagcccgcgcagctcaacggcgccgcggagccgggcgccgggcccccgcagctgccagaggcgctactgctccagcggcgccgcgtgacggtgcgcaaggccgacgccggtgggctgggcatcagcatcaaaggtgggcgcgggacaccgagggcgcggggtcgtggtgtctgggggcagccgagggcgcagggggctggcagcgcgcccaggacatggagctggaggcttcctgtctgggggtaaggggggtctgaggaaacaggtaacggagggcactgggcacaccaaggttggagggggtttcagtagttggtggcctt

SEQ ID NO: 26460 - DNA, 2300 bp, Homo sapien
gcccaagtggtctcaaactcctagcctcaagtgatcattcctcctcggcatcccatatatatatgtataaaagaccctgggttctttttttaaaacctgtgtctctcctgttttgacacctaccactctaacttaaaacaattccttttttttgttgttggttttttttttttttttttttgagacggagtctcaccctatcacccaggctggagtgcagtggtgcaatctctgcttgctgcaatctccgcctcccgggttcaagtgattctcctgcctcagcctcctgagtagctgggattataggtgtctgccaccacgcccggctaatttttttatatttttagtagagatggggtttcaccatgttggccaggctgagtctcaaactcctgacctcgtgatctacctgcctcggcctcctaaagtgctgggattacaggcatgagccaccatacctggccccctcttttttttcttgatggtatcttatgtggaggattttacccaaaagttcagggaggctaaacactggtgtagtcctacttatttattgctcaacatatcccagctaggaatggaggatagagacaaggagcaggtatgaaggccagttgagctgtgtgatgtggtggatttttcagattacaatcatgctttacctctgtatttgtcagctgtctagcagagtggttcagtgcccaggcactggtgtcaaacaggcctgggtttgaatcgcagctcttcctcactcataaatgtgtgacctaggccaattagactaaatccaagttttcccttctgtataataggggtgctcttttttcttgctctgtcaccaaggctggagtgtgatggtgcaatcacagctcactgcagcctggacctccaaggctcaagcgatcctgccacctcagctgtgattacaggtgtgagccactgtgcccagctgggggtgctcttagctactccaggaggctaatgtaaagataacacttggaaaatattctgccagccctaggtaagagtaagcattcactaaatgaaagtgattatttctatagaatagggagtcacagtttaccacgtgttttcacattgatttaatcctcacaccagcccagtgaagtaggtattattatgatccacattttacagatgaggaaattgaggcctagagcagtgacgtgaggggaccaaagtcgacttggagctaacagaggcagcaaagattagaaaccatgtctccagtcgcccagacccagagccccaccttgcaaccctcttcccacacaccagttctgttttttttctgccaggcctcaaagtgtgggacttcaggcttttctatactcgactgtgaacacagccaggggttaatctcttaaacttccctccagttttgaagtggggatcctgcccacacctcccccaagccctaagcggtgtcggtagcggtctcctccagggggcggggcctgtcatctttagaagccacgccagcgataagccacgcccacagaccaaagcctcgacccccaccccccatcccccgccctccccgataggaaaccaacttcttcctcagctccccaactagcaactgtgcccgcaaggtctctcgcggctcagcatctaccttttttttttttttttttttttgacacagggtttcgctctgtcacccaggctggagtgcagtggcgcgatcgcggcttactgcagcctcgagcttctgggctgtcatctaggcctcccaaagtgttgggattacaggcgtgagcctccacgcccagacggtgtctacctcttaaactcaagccttggagtccaacgctctaccatacgcagcccagccctccgccatatgcagcccagcccgatgcccagtgcttcgcaccaggatacgtggttctgtctctttttcatgcgctcccacgtccgggagttacagtcccggccctcgatgggcattccgagcgccgagccccctgcgcgggctcactgggttccgcccccgacgcgaagccccgccccctgacgccccgcccagcaccacgcctcccgggctttcgccttacttagtggcccgccccgccgcccttctgacccaccccgctaggtagtcccacacggcggccctcggctcccgggccccgccccggcctcctgcatttgcccgaggccccctccccagcactggccacaccccagggtagccccgcccccagagctcctcccccagcggccggggtagggtggcggctggcccagccgggcccccgctgccctctgccctg

SEQ ID NO: 26461 - DNA, 2300 bp, Homo sapien
tgcttgagtgtcttcacaacatggtagctggcttccttgagaacaagtgatccaagacagccagcagcatctttggattcattttcttgtcagcagtggggtgtagtgctctagctgtgaattcagacaacctgatgctgacactagctatgtggcattaacttgtttgaacattactttccttagctataactttgagacaataatacctaccttataggccctttaacataggacctttgtagcaatgcagggaactagaatagtctctgacacttagtgagtacacatgacaaacactgaacctgctggtgttactattattaccaccatcactggtatgaaatgaagccctaaaacctagtaattaagttgcccttgacagaaatagccttccttcctatttgtcaaaaattgccatgacagaaatattgtttacagattgcagatatatcccaagtatggtagaaggttaagggttagagaattataaccacacctgtttgactatatatatatatatgcaggggatctttcatgccgaatctgtattcatgtagattttagtataggatatgtgtcatgtaatgtgacccaggaagaagccaagacccccgccttcccctggccatctttttttgcttttgcttttgctttttttttgagacggagtctcgctctgtcaccaggctggagtgcagtggcatgatctcagctcactgcaacctccacctcccgggttcaagcaattctcctgcctcagcctcccgagtagctgggattacaggtgcgtaccaacacgcccagctaatttttgtgtttttagtagagacagggtttcaccatgttggccaggatggtcttgatctcttgagcttgtgatccgcttgcctcggcctccaaaagtgctgggattactggtgtgagccacagtgcctggcctttctttttcttttcttttttaaagatggggtctcactgtgttgcccaggctgatctcaaacgcctgagctcaagcgacctgaccaccttggcctcccaaaattgcccaggctgatctcaaacgcctgagctcaagcgacctgaccaccttggcctcccaaagtgttgggattacaggtgtgagtcactgcacctggctaccaccacccacaatcttttaactttttattttaaaatgtagattcacaggaagttataatgaaaaatgtacagggaggtccgttggacccttcactcaatttgccccagtggtaccattttgtgtaactatagtatggtatcagttgtcaaccttcgatttttatttagcagaaattgactgagcagctattatatgctagctctttgaggtataaaggattaaactctgaccttatgggtttctgtcatctctctggattttcattgttattgttcttaaaatattttttattttggcgactcattgttgacacttatattagcagttattttaatgttaaatattatgttatttctgacatttatatttgctctgttttaaaacaattttgcattgtgtccccatcttccatttataatctttacagcatcagaaccatgttgcctgcattgtcttattttaatcacgtgccagttttgcagtgctaccaagtctggatctgagaggcagcttgtgtgaatcatttacatacatttctgtttatattccccaaattaatttgcaactttatatttttcatccaattatatgttcaaaacatatttttaataattgattttaagaaggaatttgttatattaggatttaaaaactggctcaaaaaacagaagctattaaacaatagcagaaaccagacagtatataggactttaaatggtaattgctaaacatttgaatgttcccaaaaatgtgagtctgtgtgtctctgtgtgtctctacgtgttattccactagggatttgcacagataggttttgcacaatatccttgctgttattgtcagccataaacaaattacacgtatttaacaagttaatgtcagattggccaggagccactgggaggtgtgtacttagtgacatcagctggcaaagagccctggtaacagggagggttggaagggtagtggagagagaggaagcaggagggagggagaaaaagagagagactgactgtatctggggattctggcaaggtgaagagctggtctgtttggcaggaccttcccatctgggatccatctgtgtttccctggaatgggacaggcagctctagtcagtgagaaatcgcagatgtgagagagctgacacatgtcc

SEQ ID NO: 26462 - DNA, 2300 bp, Homo sapien
aaccggtctgaccaaaatttattaggcgggaatttcctcttcctaataagcctgggagcactatgggagactggggtctatttcacccctgcagtctcgaccataagagacaggcgcacctaggggggccgtttataagcctatacatccaggcgcgtattctctttcccagggatgttccatgctgagaaaaagaattcagtgatatttctcccatttgcttttgaaaggagagaaatatggctctgttctgcctggctcatcagcggtcagagtttaaggttatctctcttattccctgaacaattgctgttatcctgttcttttttcaaggtgcccacatttcgtattgctcaaacacacctgctgtacaatttgtgcagttaatgcaattattacagagtcctgaggcgatatacatcctcctcagctgacaggattaagagattaaagtaaagacaggcataggaaatcacaagagtattgattggggaagtgataagtgtccataaaatctttacaatttatgtttagagattgcagtaaagacaggcataagaaataaaagtattaatttggggaactaataaatgtccatgaaatcttcacaatccaccttcttctgccatggcttcagccggtccctccgtttggggtccctgacttcccgcagcagtctcacttcattgcccaggctggttttccagctttttaatcagttatagcagaagtcagtaaactgtggcccactgtcggccaggcatggtggcttacgcctgtaatcccagcactttgggaggccgaggcaggtggattgcctgagctcaggagttcgagaccagcctgggcagcagggtgaaactccatctctactaaaatacaaaaaaattagctgggctcagtggcatgtgcctgtagtcccagctacttgggaagctgaggcaggagaattgcttgaacccaggaggcggaggttgcagtgaacagagatggcgccactgcaatacagcctgggcgacagtgagactctgtctcaagagaaaaaaaaaacctgtggcccactgtccatttttgtgaataaagattgattacaacacagccaagcccatttatttgtatattgtctatagtgtgctacaatagagcaaaaaaatatttactgtcttgcctttggcaggaaaagtttcctgattcctgagctataataatgataaattaattttccagtatatgtataaacatggaatgtaaaaaatttattttttctatcagtgttggtacatgttaaagtattgattttgttttaattgtgctccatcttctatcttcaaaggtccttgtaaaatactttctggtaatttcccttttttttttttttgagacggagccttactctgttgcccaggctgtagtgcaatgaatggcatgatcttggctcaccgcaacctccacctcccaggttcaagtgattcttctgccagccatagcctcctgagtagctgggtttacaggtgcccaccaccatgcctggctaattttttgtatttttagtagaaacggggtttcaccatgttggccaggctggtcttgaactcctgacctcaggtgatccacccacctcaacctcccaaagtgctgggattacaggcgtgagccactgtgcccagcctctggtaatttctttgagtccttatgtctccatttttgttgaatgataaattgtttgtcattataaacagttgtttctggccatctcggcatatgaagcctgcgtgttattaggaagttggatgtgttgtcagatttgtggcagagttacaaagatggtaaatgctcatccttaagcatgtactatgtccataatcagtttagccaactttataaggctataaatgtaacagtaattttgatgtttcttcctccatctttagcaagttagaattatcacttttggaaagtttttttttttttttttttttttttttttgtgatggagtcttgctgttttccaggctggagtgcagtggcaccatctcaactaactgcaacctccacctcctgggttcaagcagttcttctgcctcagcctcctgagcagctgggattacagacgcctgccaccatgcccagctaatttttgtttagtagagatggggtttcaccatgttggccaggctcgtcttgaactcctgacctcaggtgatctgcctgcattggcctcccaacgtgctgggattacaggtatgagccactgcacccggcctggaaattcttaccatatgacaattacacattcagaa

SEQ ID NO: 26463 - DNA, 2300 bp, Homo sapien
ttgtgtattgtattattaataagtgaacatctattaaggcaacacaaatatagaaataaacaagcataggccaggcgcagtggctcacacctataatcctaacactttgggaggccgaggaggacagatcacttgaggtcaggagttcgagaccagcctggccaacatggtgaaaccctgtctctactaaaaatacaaaaaattagctggatgtggtggtgcgtgcctgtaatcccagctactcgggaggctgaggaaggagaattccttgaactcaggagacggaggttgcagtaagctgagattaaaccactgcactccagcctgggaaacagagcaagactcggtctctaaaaaaaaaagtgaaatagtggaagcatgcacataggcagcacagagatgtagtgaatccactaaggttaccttcaagcggagcaacagcagtatgtgtcaaagaatgctccttaacagagatgatacctgaaccgtatgggatgaagaagagcttgccaggtcaaatttgagtaaggttcagtgtaagaagagggaacagagatggttaactgactgtgactggcttagaggaagtagaagggaagtggaagattttttatgattaataagttggtttttggcaaaatatgactaaatgtcttttttctaagctaggtaaagattaaatgattggctctttaaacattgcttatgtcttaaattgtttcttatgtttttagataaagtttcacttttttagttttttaaggctggatatgattaagtgaaaacagaatgatacttaggtactagataatttagatttttacttgatgccaacaagaacgtagctcagtgccaggcacggtggctcatgcctgtaatcccagcctttgggaggccaaggcaggaggatcacttgagcccaggagtttgagaccagcctgggcaatatagtgagactccctgatctacaaaaaattttaaaaaaagaaattagctgtgcatggtggcatgtgcctgtagtcccagctactcaggaggctgaggtgggaggacacctgagtccaggaggtcgaggctgcaccaggaggtcaaggctgcaatgggccaagatggtgctgctgcactccagcttggatgacagaatgagaccctgcctcaaaaaaacaaacaagcaaaaccatagctctagggttgttttcgaaattaaaattttcaagaaatgactattaagaactaaataggaaaactgtaattaatcacatgtattataatttgagcaaaaatgtaggatgggagtgtcctgcatggaatcaggaagatgctttattgaatgaccaagggtttggcagtattaatctagcactgttaaggcagagagtaactggctctaatggacatgagtattctggatggccaaagagataggtaccttattgtaggaataagtcattaaatcagtaggcctaaaaaatatccctcatattatcataactcttttttctggtgtcttgctcacatgctaccttctgattgactgcctagtgttttggggaccttgaaattgggaaggagatgcaatgtaaaagatgggcatgagtatcccatcactggaaagatctattggcccagacccatctcaagcactacctgttgcaggaagtctttcttaaaactacccacccctgcccatggcacctgtagagttagatttcccttcttattgctctgggagcactctgctttctttttaacgctccagtgttactctgttaccatttttatctgacagcagtctcactgaggacagaaccagttttgcatacctttataacatgtgctttacaaaattcaaatgaacaaacgaaaatacaaacaagaaaaaatgaacaaaggttcccttgttttacacgtaacctgagtctttcattttggctttcttttagtaagcaatggcatcaaccattctcctcctaccctgaatggtgccccatcaccgccacagagattcagcaatggtcctgcctcctccacatcatctgcactcacaaatcagcaattgccagccacttgtggtgctcgacaactcagcaagttgaaacgctttcttaccactctgcaacagtttggcaatgacatctcccctgagattggggagaaggtgcggactcttgttcttgcactggtggtaagtacagcctcactgttgttctcagctgcctgagtatgtggctcaggtccaaagcgagcaaagttctagatatttctgctcattttcaaacccatggtcatatggcaaatgc

SEQ ID NO: 26464 - DNA, 2300 bp, Homo sapien
ttctcagagagagttcaacagcaggccaggtacaggatacgtacctgtggagttttggaaaaaaacaggtatgtgtctgactgcttgtaggtcatacatactcactaatttgtgggagcagagaacagataactgggtgaatggttggtaactgggtcctttggttgtataataacttgctcctcatagagctctaggctcctgcctctcctgctctggcttgtcctgcatgtctcctgatacctgtcttgttaatttgcaggtcaggagtttggaatagctccctccagtccctttcacactcttccactgggtcacgctgaggcaataagtacctgttgacatgtcctgtttctgggcttgcaacagagttcattttgcctgatctcttcactggtggctacagtatactgtgttcacactactgccacatttgtgcccaaattctgctctgggcacagctctgtaatccccctgtgctttctttcaccttctctgtgcctaccatagtgaagactgttcttggtaggcctcctcttttacaagaataaaggagggtggggactgcctattttgtaagttcaaggatgaacctcacatcactaatgtcagccttatccaaatattggcattctttcacttcttgcctccccatcccagtttcattttttaagtccaatacaacttttggttttcttactaagataaaatttatttctacaaaaatgtaatacctacattcataaagactcttttaagagcatctagacagtagtaaacaaataaaagatatgaacagacacattatgctatgagaaatacaaataaacatattgcaaaatatttttccttactagtagtcaggataatgtaagataaagcatatctgataaattaaccccttgtctttaaccgtccgttattgacaattttaaaagaccttgttgatgacactcaataattgatcagaggcttatataagaaattaagtgagtacctgcagattcttggaatcattcctcacttttccttttttttttttttgagatggagtttcgcgcttgttgcccaggctggagtgcaacggtgtgatctcggctcactgcaacttccgcctccccggttcaagctattctcctgcctcagcctcccaagtagctgggattacaggcatgcaccaccacgcctggctaattttgtatttgtagtagagatgaggtttctccatgttggtcaggctggtctcgaactcctgatctcaggtgatctgcctgccttggcctcccaaagtgctgggattacagacgtgagccactgcacccggccttttttttttttttttttttttttttgagatggattcttgctctgttgctcaggctggagtgcagtggcacaatctcagctcactgcaacctccacctcccaggttcaagcaactcttctgccttagccttccaagtacctgggattacaggcacccccgaccatgcccggctaatttttgtatttttagtagagatggggtttcaccatattggccaggctggtttcgaactcttgacttcaggtgatccacccgccttggcctcccaaagtgctaggattaggattacaggcatgagcctgtaatgtgcccagccacaagatctcttttaaactagtgagtttgattatttgggagatacctttggttaactatggttaagagcccaactttggtgttgggccagctaggtttgagtccttgctctgctacagtgccatctgtgaccttagacgacctccagtaagatagctagccaaaccgagatgattattaattcatgcttaagctgaggggataaaatgtacctaagagcattgttacactggctcaataagaggcatctgataagagacttatgaaaagttcttggcctctggggtgaagattttcttaaggccagagccataagatggaaagttgtttcatggtagcctagaactctgtgtttgaacctcccttgagcctgtgccatgtgcaagaggtaaaccgtgagggagtgtccttaggcttctggattgtctagtcctgtggacttacgtagggagctacgtattttgggacttcacattcacattctcattgggctgaggctcaaacatatggaatgtgttattttgcagcgtctacattagggaaatcaagcagggcattggtgatgggaggaagtgaacaggaaccaggtaggatgatggtaagtggacagggtttaaaaacccagggcttttggcagtctgcccaaatctatgtcttt

SEQ ID NO: 26465 - DNA, 2300 bp, Homo sapien
tgtggggatttggaatgggggtacaatgggcgcttgtgcactagccccacaggttgacagcacccttacataccgccagccatgggcctgggcctccagggtatctgacgccccctccagcgagctctgaagggcttgcagctggctcaccgtctcccgcagcaggaagcgcgtcacaaactggtccactttggaggccctctcgtactcctgtgggccaaggagggacggtcagcatctcccagcccgggcactgatctcttgagtgggtcccctgcctcttgcccatcagagcagcggtggcagtgccaagagcaggggcacgcaaacctggcacaggcaggagggtactgagacctgatgggcagggagggtctggatccctccttgtccgggactggcctccctccccggaggtgtgaggccaactcacagggggcatctgcccagcgaagtgcctggcctctctggacctcatggccccttccctgatggggctaccaccttcagcactgtcatagccagtgagtcccagccacagctaggctgggtgggggctatcacgaggtatccaagggccaatgttgacacaaggcaaaataatggcgtggtgtggccccagactcacaatctacgtattcactcattcattcattcactcatacacacaacactgggtgctttttactaggagctgctgataaaagacaatcaggttgccattctcactcagacacacacgccggcactgaccccaaccgacactgccagcctcctcccagcccctctcagggtggcagagaggcagggaggctgcccaaatgctaggccctgcatggcccagcatgggattctgaggctcctcaacaaccgtcagttcctggagcttccatttcctcatctatcaaacaggaaagatgaaactcagcacatggagctgcaagaacgtcccaggagttaattcctgcataggactcagcccagggtctggcacgtaagctctcgatgccagacctaccagccatctatcgtcaagtgtaatacaataaagggcctgcccacttgtacacccaggagtcacagatgtcctgagaattgcctaacccctaccacacacacacacacgcatcagggtgggagtcctggggagctgcagtccaggtgcctgccctctccgaggagactccagaagccccatccatcagagacttcatctcctgccatgacctgcctcagctcagccatcggatgggacctcctgggccaggcttatgagctaggagacagggacagagaagaggctgggtcttttcattctcagacaggccagggtttctatctccatgaaatcttcccaaaaaattcctttttgggtatttgagatgattagtttctgttgctttcaaccagagaacagacagaagcacccactcagagccaagcactactgcaagaagaatttcatttagtcttttgtttttctgagacagagtctcactgtatcacccaggctggagtgaagcggcatgatcttggctcaccgcaacctctgcctcccagcttcaagcaattctcctgcctcagcctcttgaatagctaggtttacaggcctgtgccaccacacctggctaatgtttgtatttttagtagagacggggtttcactatgttgcccaggctggactcgaactcctgacctcaggtgatccacccgcctcggcctcccaaagtactgagactacaggcattagccaccatgccaggcctcatttaacctttgtaacaatttacaggaaccataattgaccccattttgcagatgagaaaacaggtccagagaggttgattacctgggctaaggtcacatagcaagttagtagcagggccaaaattcatacccaaaccacagaaatccccctctattcaccactaagcaccttacatgcattgcctcatttatgatcattagcccagttttacagctgagaaaccaaggctagaagtgactgagtggagcccagattcacctgtgggccctggaaggcggtgctcagagcctgcaattggtgaggtcagcccgtgaggtcacaatgttgccagggcccagggggcagagcagacggagtgtgggccatcgtccccagtggtgaccagccctgccatgggaaactatagttcccacaaaaggaccaaagcacccaagcaggcccgcaaggagaggccggctgacatggacaaggcctggtggaaatcgttcctcaaccacctcactcggaagaagccggctgtgagggcggggga

SEQ ID NO: 26466 - DNA, 2300 bp, Homo sapien
cagaagctgggctgatggctgtagtgagctgggacttcagtcctgctgcatctgcccccaaaagagggcatcctgaggttggtcaccagagtgtggcaggaaggcgggctgcaggtttggcaggccaggggtggcattgggtgtggagctggatttgggacccgggagagtgaggagaagcagcagcaggatcccgcccacagaaagtgtggcagggcttcttctaagtgatttggggagtgagactgaagctgtgggctttttccctgttggtaatggagacctgttgaaagcttatgagcaggggagtgagctgccctagacaggtaagtggtttggaattagtctttgtcacgtggggaaggagatgggacagggtaggttgggagacaggtgccttggggaagactggggggcctgaatgctttggggttaccaagcacaatgtgtaggagtgaggggccagagagaggcccagggcttccagcttctcctgggtgcgtccccaggcagaatccacgtctcaggccttgccccagctgactgccatcctggctgttcttacccaggatggtgcctgttggccgggaaccctccctcatgcctaagagggatttctggatgctggggggatgtcaggctttaccggaagcaggtccctctcactagcgtggccaagcctgggtttgcccaagcccacctcccttgagcctgcagactgggcaggatgtgacctggatttggagtgttgggggaaggaaactgcctcccgccactgtagcaaggtttggggttctgttctgacccttggcacaaggaaggagaaagcaaaagacagccctggctccagaccgtggcgatggctctgccttcatcacgccccgttcacccctctgcggctcctaggctgagctttgcccaccccgactccgcgcccagacgcctccgacagggttcgcaggcgccagggttgccacgcactctttattgggcggggtccgggccaagcgtttaaagctgcgggcgagggcagcggcaccgtttgcgcggctgctcctcggcggggccggcttcgcggggagccttccccggggaccggaagcgcgagagcagccgcggccagctcagagctgccctggccccgccctcttccggccgccgcgcctcttgccgccgcagcagcagcagtaccggcatcctcggctcgcgctcgctaccttcgcccgctccgcgcaatctgggtgccgccggggagcccagcccagcgccggacgcgtagtcaatccgttgcccagcgttggccagcggctgccgcttgtccagggggagaatcagcacgatcctggtctgggggtggaacaggggcgtgaggcgggagagcgcgctagggccgagcccacgacccggggccgctccgcgcttctcctgggaccctcgtccacccgggtcctgtcgtccacccgggtcctgtcatcctctcgtgcacagggctggaggggacccctgtccaattcaggccgcggggaagcccgcccttccctgcgtggcgccccggactccgcctcctttctggaaaccctcatccatcccaggctgacttcctgagaccagctccgtctaagtttatgagatcccttccaggccctatgtcaggggctttcagcacctcccacccccgcctggtccagggcttctgctcatttgagagggagacagggaagttctgagcctaggagctgaagagaggacactagggaattccccctgcctctagctccagtagtaccaactagaactgattctccgtgttgggatctccacccgttcgtccagggttgggagagaatcccactcatgctcaccccccggggctctcaagtctcatccactttctggttctggaatctctgccctcccttctgggctttttttgtttaagactgagtcaaacagggtcttgctgtgtcctacaggctggagcagtggtgctgtcaacggctcactgcatccctgacctcctgggctcacgtagtccacctcagtcttctgagtagctgggactgcgggcattcaccaccacaaccagctaagttttaatttttgtagagatggggcctccctatgttgcccaggccaatctcaaactcctgggctgaagttatccacccaccttggcctaccaacgtgttgggattacaggcgtgagccaccttgaaaggacccccatccacacccatatgggctcctgggatcctcatccttgggagagattttcgaattcctccctcaccccctaggac

SEQ ID NO: 26467 - DNA, 2300 bp, Homo sapien
gccaggaagggaaggagtctgtgtggtgtgtatgtgcatgcagcctacacccacacgtgtgtaccgggggtgaatgtgtgtgagcatgtgtgtgtgcatgtaccggggaatgaaggtgaacatacacctctgtgtgtgcactgcagacacgccccagtgtgtccacatgtgtgtgcatgagtccatgtgtgcgcgtgggggggctctaactgcactttcggcccttttgctctgggggtcccacaaggcccagggcagtgcctgctcccagaatctggtgctctgaccaggccaggtggggaggctttggctggctgggcgtgtaggacggtgagagcacttctgtcttaaaggttttttctgattgaagctttaatggagcgttatttatttatcgaggcctctttggtgagcctggggaatcagcaaaggggaggaggggtgtggggttgataccccaactccctctacccttgagcaagggcaggggtccctgagctgttcttctgccccatactgaaggaactgaggcctgggtgatttatttattgggaaagtgagggagggagacagactgactgacagccatgggtggtcagatggtggggtgggccctctccagggggccagttcagggccccagctgccccccaggatggatatgagatgggagaggtgagtgggggaccttcactgatgtgggcaggaggggtggtgaaggcctcccccagcccagaccctgtggtccctcctgcagtgtctgaagcgcctgcctccccactgctctgccccaccctccaatctgcactttgatttgcttcctaacagctctgttccctcctgctttggttttaataaatattttgatgacgtttgggccgggttttgggactctgttgggaacatttcggggcgggagaggccaaggttgctggggaaatgcccattctccacttcccttctccctgtccgtgcccgatttgatttgagcctcataactcgaagaaaggtcagcttcctcgctgttttggtcctaactcaaaagcagatccagtaaaggtttttgttgtagaaagccaagaatgctattcagtgctgcccgaagtgcagagtaatgagtggcctctcctttccccagccccagaggccactctgctcagtttgctgtcttccttccagacgtttctggacattagtaaacatgtaacaaatacagtgggctggttctgtgtcaggtatttaacagttctggggacacgggtgttacctcctttcatggtgctctcagggtctgaaagaggagatctgcataaatgagaaaatcgggaaaggcgttctggaatgggtggtgcttaagctgagcgctgtaaaataagtaggagttaaccagaggaagaaaacaccaagcagaggacacgatgggcaaaggccttgggcaggagggagcgggatagaggaccggagagaaagcagtgtggctgcggtcctgaggtgagggtcagagtggtgctcctggagtggggcgttcagtcttaagctttattcaggggccaaggagtcactggagaccgaagtgacacctcctctttcgcatcttaaaagctccccccggctgctgtgtggagaacgggttgaagggagggccagagtcacggaggggaggggaaagggctgcgcttagtgccagagagggcgggcgtcgggatgcctgggattcggccgcacggacctgtgggcttcctctgcgccagcccccgttgtaagcacttgacattgaatgagtcccaacaattgcatagggtgtctgccagtaccatttttgtagatgaggatacagacgccccaaaaggtgaagtcctggtgggttttacccacttgtgtcaccctgacctcggcactggcttggtcatcctgtccctctgggtaggcccgcagcccctaggttctgctcccgacaggccgtcgcgggaccggagccctcgggcgcctccccctccgccgtggccgcggaagcgcggaggcccgcggcgctggagttggaccttgaggcgagggaacccggcgtccgcgggggcggggcgggggcggggcctgagcccgcgcgtcggcgccggcgccaaggggcggcctctagccacaccgagtccgccgcggcgtccagggtcggcagcaaccgcagccgagcccgagcgggtggcggcgccatggcgtgcgcggggctgctcaccgtgtgcctgctccggccgcccgcgccccagccccagccccagaccccgcggcacccccagctcgcgcccgac

SEQ ID NO: 26468 - DNA, 2300 bp, Homo sapien
agggggacaggcagacctcagggctgggaatgcagtgtaggcccaatttggtcactggttggcttcacagttactttctcctgaaagggcctcagttttcctatccatacagcaagaggcttatgtggtctctgtggtcccttctagctatgatacattctaggatttgcaatgagtaatttcagaaactactcattggaggggaaaacaactcctgatttcctaaaccacctcatagtttgtaaaacactttccaattccttatgcttttcattctcctggcaaccctggaaggggccagggcaaggtctgtgtgcccatttgaaactaagggtgagaagcatcctcaggagctgtgatttgaggctgcaccactcattttgattatgctggtacaccagtttgctttcaaatgtgagtatgcataaaaataacctggaagcttggtgaggtggcagtcacctggagtaccagctatgctggaggctgaggcgggaggatctcttgagcccaggggtttgagactaccctgggcaacatagtgagacctcgtctatataaaataaataggaaaaaaaaaataagatactggcttttctaattccctaagtgtcaaaaaaaaaaaaagaaaaagaataacaaatatcacctggaaaggggacatggcattgttaaaatgcagattcttgggcacctagagattttaaattggcagggccagggtgggcccaaaattagcaagtgaccacgtggttctgaagccagtggcctaaggaccacccttgcagaaccgtggtctccttgtcacagtctaggcagcctctggcttagcctctgtttctttcataacctttctcagcgcctgctctgggccagaccagtgttgggaggagtcgctactgagctcctagattggcaggggaggcagatggagaaaaggagtgtgtgtggtcagcattggagcagaggcagcagtgggcaatagaggaagtgagtaaatccttgggagggctccctagaagtgatgtgttttctttttttgttttagagacaggatctcgctctgtcgcccaggctggtgtgcagtggcatgatcatagctcactgcagcctcgacttctcgggctcaagcaatcctcccacctcagcctcccaagtagctgggactacgggcacacgccaccatgcctggctaatttttgtattttttgtagagatgggtcttcaccatgttgatcaggctggtctcgaactcctgggctcatgcgatccaccccgccagctgattacagggattccggtggtgagccaccgcgcccagacgccacttcatcgtattgtaaacgtctgttacctttctgttcccctgtctactggactgtgagctccttagggccacgaattgaggatggggcacagagcaagctctccaaacgtttgttgaatgagtgagggaatgaatgagttcaagcagatgctatacgttggctgttggagattttggctaaaatgggacttgcaggaaagcccgacgtccccctcgccatttccaggcaccgctcttcagcttgggctctgggtgagcgggatagggctgggtgcaggattaggataatgtcatgggtgaggcaagttgaggatggaagaggtggctgatggctgggctgtggaactgatgatcctgaaaagaagaggggacagtctctggaaatctaagctgaggctgttgggggctacaggttgagggtcacgtgcagaagagaggctctgttctgaacctgcactatagaaaggtcagtgggatgcgggagcgtcggggcggggcggggcctatgttccggtgtccccacgcctccagcaggggacgcccgggctgggggcggggagtcacaccgcgcctggtaccatccggacaaagcctgcgcgcgccccgccccgccattggccgtaccgccccgcgccgccgccccatcccgcccctcgccgccgggtccggcgcgttaaagccaataggaaccgccgccgttgttcccgtcacggccggggcagccaattgtggcggcgctcggcggctcgtggctctttcgcggcaaaaaggatttggcgcgtaaaagtggccgggactttgcaggcagcggcggccgggggcggagcgggatcgagccctcgccgaggcctgccgccatgggcccgcgccgccgccgccgcctgtcacccgggccgcgcgggccgtgagcgtcatggccttggccggggcccctgcgggcggcccatgcgcgccggcgctggaggccctgctc

SEQ ID NO: 26469 - DNA, 2300 bp, Homo sapien
tgagctacctaccgcacctggcagagcttcagtgtttttttgtttttgtttttgttttttaattttttagagacggggtttcaccatgttggtcaggggtggtctcgaactcctggcttcaagtgatccgcccgcctcggcttcccaaagtgctgggattacaggcatgagccactgtgcccagccaaggaacttcagtgtttttaagaggatattttaatatattatctaacatagtcattatcttcagaggaaggatgaactgaataaagtagcctaccatcacaaaagaaaaatcccggacaacccagtttcagtgacaaaataggcccagcacaactccctccttcattgacctctgaaattgtcccctgacactgagcaaataacatcactggtaaataccatatggcccaagtaccaggggacaccctcacaagtcacagccaccactcagtgtgtagctgttattcagtgacaactccacatagtgacatcatatgttaatgtcacccatcaatgctctcagagatgacaacccaaaactatgtgttgcttaaacaagcaagtgttgagtacccaccatgtgcctagtgttggggttacagcagaaaacaagacaaataagatttcttccttcatagaatttacagtttgataagggcaatggacaatgaacacatagtaaacaagtctaaagtgtcaaaagttctataaaaaaaaaaaacacataagaaccagggtggccgggcacgatggctcacatttgtaattccagcactttgggaggccgaggcgggcggatcacaaggtcgggagtttggactagcctggccaatatggtgaaaccccgtctttactaaaaatacaaaaattagccgggcgtggtggcatgcacctgtagtcctagctcctcaggaggctgaggcagaagaatcccttgaacctgggaggcagaagttgaagtgagctgagatcacactactgcgctccagcctgggtgatagatccgagactcagtctaaaaaaaaaaaaaaaaaaaaaagagccagggtaatgagtcagagtggacagtgctacttcaaattggatgtctcagaaagtctctctgatgaagtggcatttgagctgaaacctgaaggatgagaagaagcccatcatgggaagagcccaggatggcgaatatcaagcagggaaccagcaagtgcaaaggccctgaggtagaagggttcttggcccaaggaacagaaaggaggctgtttggctgggaagcagtgaggtggcaagtgctggaacgtggggtcagagggagaggcacggaccagatcacaggaggtcttctctcttgggccttggggaggagtttggattctaagaataagtggacgccggctgggttcacgcctgtaatcccagcactttggaaggccgaggcaggtggatcacctgaggtcaggagagcagcctggccaacatggtgaaaccccgtctctactaaaaatacaaaaaaatttgccaggcatggtggtgggtgcctgtagtcccagctactcaggaggctgaggcaggagaactgcttgaaccctggggggtggaggttgcagtgagccgagatcgcgccactgcactccagcctgggtgacagagcgaggctgcatctcaaaacatacatacgtacatggaagccattgaggggccatgtgactgacactctgggaagatcgctatggtaaaggatatcccagtcagaactatctcgcataaagatggggccctgctcctccctgtatcatcacctgtcgcccatcccatctctaagcagggccactcctcattcaggagccctccttccaagtacacgcctccttccaaacccactcgtgaacccaacatggcccaagggaaagtgccttctgattggacaaatcgtgtgtgaccttgggcggagcccactgtgattggctacaagctttcctttctcttccagtcagacaactatttcgatgagtgctattgtcccatgagacaagtacgctctctgattggtcttccatgcatgagtgacgcagaaacagcctatagacgccacgagtcggcggcgctaccgaggggctgtgggcgcgcagctggaacctccggctgtcagtgcgcttacagttcctaaccccgaccctgcgcgcagcccgcactatggcagccccgccgcagctaagggctctgctcgtagtcgtcaacgcactgctgcgcaagcgccgctaccacgctgcgttggccgtgcttaagggcttccggaacggggc

SEQ ID NO: 26470 - DNA, 2300 bp, Homo sapien
aacaattttttttctttttttttttttttttttgagacagggtctcattctgtcacccgggctggcatgcagtgacatgatcatggctcactgcagctttgacttctctggctcaagaaatcctctcacctcagcatccctacctagtagctgggattataggtatgtgccacatacctggctaatatttttaaaaatcatttgtggagatgctggtctgactatgttacctgggctggtctccaatttctgggctcaagcaatcctcccgccacctcagcctcccaaagtgctgggattacagaggagccaccacacccaggtaaataattttttctttttctttttttttttaaatttgagatggagttttgcttttgttgtccaggctggagtgcagtggcgtgatctcggctcaccgcaaccttcgcctcccgggttcaagcaattatcctgcctcagcctcccgagtagctgggattataggcatgtgccaccatggccacctaattttatttatttattgtttttaagtagagacggggtttctccatgttggtcaggctggtctcaaactcccgacttcaggtgatctgcccaccttggcctcccaaagtgctgggattacaggcgtgagccactgtgcccggcctaattttttctttaacaatagccccttccttagtttccccctcccctctatgcactccctaaactcttgcttgtttcccaagggtactttgaaaccactatcacacattgattattgagaaagggtctcactctgttgcctaggcttgagtgcagtggtgagatcatagcccactgcagcctctacttcctaggcttaagcaattctcctgcctcagcctcctgagtagctggtactcaagtgcaaaccaccatgcccagctacttttgttgttgttgttgagacggggtctcactatgttgctcagacaggtctcaaactcctggatacaaatgatcctccagcctcagcctcccaaagtgctgggattacaggtgtgaaccactgtggccggcatacacattgtaattaaataacctttaagatttaatgtcggtctttttttttttttttgagacagagtcttgctctgtcgctaggctggagtctgtggcacgatctcggctcactgcaacctctgactccctggttcaagcaattctcctgcctcagcctcccaagtaactgggattacaggcacgtgccaccatgcccagataatttttatatttttagtagagacggggtttcactaggttggccaggatggtctcgaactcctgacctcgtgatccgcctgcctcggcctcccaaagtgctgggattacaggcatgagccgccgcgcctggcctaatgtcggtctttcttcccacctctaactccatgggaaaggaccaccatgtctctagagctattacgggacttggtgcatagcaggccgttaataagcagttgatggaggatgaatgaagatgagaggggtctgtgtgtgtaggggaagtcccagtgaggagcacctctcattctgtgagacctggataggacccctcggaggctgggctaggagtggctggggtgggtgttgggggtttatgtgacagaaatggggtcccaacaagcagggatggagggtgaagagatggagttacttaagagataatgggatccccagcacggagacccacgcctgtaatcccagtgctttgggaggccgagacgtgaggatcgctggaggccagaagttgacaccagcctggacaaaatagtgagaccctgatctctacaaaaaaataaaaataaaaattagtaggacatggtggcgtgtgccggtagtccccgctactctggaggctgaggcgggctcccaacaggcagagttgagcagggtagtaggggcgggaagtctctaataggggatgagggatgggaatctatgttgtacagcctggagatccctgtgacagttgggtggtctgggtgagatgggataggggtcatggtttgttgcagagtcggggtatactgtgctcagcggaaatggggtccgtgcagcagacctggaggactcacgtgctgtgggaatgggggattctgtgtcagagctggggggtcgggtccggtgagatggggatgcggatttagataatagggatgggaagttccgcgtgtgcggcggatataaggtcggtgtagacttggtcgttcaagtgaggcggggtccacactcggtggcccggtgactgggttatcgagtggagccagggcagc

SEQ ID NO: 26471 - DNA, 2300 bp, Homo sapien
cctgggttcaagtgattctcctgcttcagcctcctgagtagctgggactacaggcacctgccaccacacccggctaatttttgtatttttggtagagacggggtttcgccatgttggccaggctggtctcgaactcgtgaccctcaggtgatccgcctgcctcagcctcacaaactgctgggattacaggcgtgagccaccgcaccctgcccaatttttttttttttttttttttttgagacagagtcttgctctgttgcccaggctggagtgcagtggtgtgatctcgctcactgcaacctccacctcctgggtttaagcaattctcctgcctcagcctcctgagtagctgagattacaggcatgcaccatcatgcccagctaattttgtatttttaggagagctggggtttcaccatgttggccaggctggtcatgaattcctgacctcaagtgatccacccaccttggcctcccaaagtgctaggattacaggtgtgagtgagccacctcgcctggcaacccgtctcttaaaaaaataaataaataaaaaaggatacaattagaattgaataacaattagacatttctgctaccacatgttgggtgcttgacacagtgagcgcatagctgtggtaggccctcagcaatggatggtgttaactgtagttaatcattcatttagtttttcattcattcaacaaacgtccattgagaacctcctctgtgtccaggagatattgtagttatggtgataaataagacacatgtccttcccttaggggactcacagtctggtgttgataagaaaactgttatatgataggtgtgccagaggaaggaactatagccgctggctttagaaaaacttcctggagaggtcggtgcagtggctcacgcctgtaatcccagcactttgggaggctgaggtgagtggatcccttgaggtcaggaagttcgagaccagcctggtcaacgtggtgaaaccccgtctctactaaaaatacaaaaattagccgggcgtggtggcgcatgcctgtaatcccagctactggggtggctgaggcaggagaatcgcatgaatatgggaggcagaggttgcagagagctgagattgtgccactgcaccccagcctgggcagcaagagtgaaactctctctcagaaagaaaaaaaaaaaaagaaaagaaaaggaaagaaaaagaaaaaaagacttcttggaagaggtgacagtcaagctgaggcttgcagaacaagttgtcctcagagaggcagcctggcagggcgaacggtggatgcaaaggcatgggaggagtatgatcaggtggctcatttggggactgatgaataaattcagacaggataaaggttctggagttctcaactttgtagtgaacatactttactgttttttgatttctaattaattggtacctggccacatatggctatccctgcaggaaactgtgtggttttttttcttttttttgagatggagtctcgctctgttgcccaggctggagtgcagtggcacgatctgggctcactgcaacctctgcctcctgggttcaagcaattctcctgcctcagcctcccgagtagctgggactataggcgcgcaccaccatgcccagctaatttttgtatttttagtggagatggggtttcgccatgttgtccaggctgatcttgaactcctgacctcaggtgatccaccctccaaggcctcgcaaagtgctgggattacaggcatgagccactgtgcctggccacctgtgtggcttcgaaaactcccaggaagcacatagttgatggctgacacctgcatgtcaagtcgcagcatgccccccagattgctgcttgtggtcagctgcagttctcctgtctcatactgtgatgccccttgacatagtcttgcttttttttcattactttaccttcatctgtggcctcttcccactactctgcgggtatgaccccagatgacgaggatgtatttctctgcgggaagtgtaagaagcaattcaactcgctgccagcgtttatgacccacaagcgggaacagtgccaggggaatgcccccgccctggccacagtctcactggccaccaacagcatctacccaccttcggcagcacccacagcggtccagcaggccccaactcctgccaatcgccaggtatttgttcatttattcattcaacatgtcttttttgagggcctaacatgctcaggcactgtgctgggcactggggctatagcaatggataagacagaccaagtccctgcccttgtggagtg

SEQ ID NO: 26472 - DNA, 2300 bp, Homo sapien
acaggtgtgagccaccaggctcagccacctagttctcttaatgctagcaaagtaccactgataagaatagacagggcaaataataacagctaatgtgtattgcatgctcactctatgccagtcactgttctaagccctttatatgttgcttcatttaatcttcacagtaaccgcatgagaggggtactatgatgagtcccattttacagatgtggaaactgagacagagaaattaaaaagatgcctaaggtcacttcggtgctaagtggaagagtcaagatttgaatccaggcagcctggctccatagctgttctggcctcctggcttcatgaagttctaagggagcttgggagtggcttgggtgaccgggccaggtggaggggctgtgatggtgatgtaggggagagcggctgaggtcaatcagggaggcagggagagtgcccctggctgggagctcttccccttccctggcagggctttttccctgactgtgttgtcctcctaggtgccaaaccagtgtgtggagcctccagtatatcccacccccacagtgtacagccctggcaaacagggattcaaacccaaaggaccaaaccccgccgcccccatgaccagcgccaccgggggcacggtggccacctttgactctccagcaacgctgaagacccgacgagctaaaggtgccaggggactcccggaaggtgggcccccagcctgccatgggcatctttcctcaacattggccaatccacaagctacttggttctggtcttcccttttatggttgttcaagtttggttgcatgtaatagaaaattcaaaatatcaatgacttcaaaatgatagaattttgtttctctcctgtgtaagtcaaggccagaagccagacaatctggggatcatgtgactgcatgggcaccaggcaccctcgtttcttctgtctttctgtttccaccacctccagaacatggtatcagttatcctggtgcctcattgtctaagatggctgctggagctccagtcatcactttaatattccaggcagtaagaagaagggaaagagaaggataaaaggggcttctcccagcttctagaagttctgtttgatatttttgctcatatctcattgatgaaaacttagtcacatggccatacctagctgcaagagaagctgggaagtgtctattttggctagggacattgatattcccattatgggatttgtgaggagtgaagaaggagagagtggatattaggcaagcagtagtatctgccatcctaatgcagatgctaagtatggggtgggaggtggtgtcagagcaggcagcagatggagaggatagaaattgagaatttttcagtggctttccagtcaactactcctccccttccttccttccacaatgatgtattgagcatctgtgtgccaggccccatgtcaggcactggaatctagtctcttggtctatgattccttctgccttcagtttaatggaagagacagacagggaataaataaataaatatttctgggttgctccaggaaggaggttaatgggtcttatgattgagaataactagggagaggctggaaaatgattctacctattcatgtgggaggagaaggaagcagccttgtgggtatctgtgggacaagcattccaggcaagggggaacagcaggtgcaaaggcccggaggcaggaacatgcttgaagtcttttaaggttagcaaggttagctaggagtccactgcagctggatggagagaatgatgaggttgtcaggagtaaggggatacagagtgctgtgggccatggcaaagagcgtggatttgattgtagggcagaggggagcctttgaaggattcatcttgctttcccagctggagcatgtcctgggctttcctctccaggccctgtgaagctctcccatgtctcctccctggcctgtgtatgggcatagacttccctggggtatggattgtctggctcagatacagtagtcagaggctgcccttggtgccctgagctgcacccccagcctcattgtcccctccttccacttgtctttcagctgcagggaagccaaaggctcagaaactcaagtgctcatactgtgacaagtcattcaccaaaaactttgacctgcagcagcacatccgaaggtacacatgcgtggtgaggcaggtggctcctgggcaggtgtggctgggaccatctgtgctggaagcgagactcccttctcagcccctagcctgtggggtgacccaggctgcacttgcatgttcaggctgtagtcc

SEQ ID NO: 26473 - DNA, 2300 bp, Homo sapien
gaacaaaacgccatctccttggttccccagttgaaacacactgacattttcttttctattaatctttagatttttttattagttaaattttttaattgctttttaattgaaaaggatctaaagattgagaaaacttgagggaaaatccttgacgggacaaaagcatatataaaaaaataaactccctctcacttcagatggacaatccaatgtttttccttttttttctttcctacgacctatggtaaaaaatacatttcatattgcaacccaggaagcacacataggatgtattgcaacaaaagttttacaaaacagtgttttctattttgtccttttcaattttagtttttttattttttatttttattttgagacagggtctcactctgtcacccaggctggagtgcaatggtatgatctcactacaacctccgcctcccaggttcaagccattctcgtgcctcagcctcccgagtagctgggattacaggcgcccaccacatgcctggctaatttctgtattttcagtagagacggggtttcaccatgttggccaagatggtctcaaactcctggcctcaggttacccacccaccttggcctctcaaagtgctgggattacagatgcaagccaccacacccagcctatttttaattcttaaaataaccaccaacagggtgtaacttgtggtttgcagtttgcaaaatactcctaattctcttccccaaaggtaactgttagcggtctagtctgcattcttctagttttattttacacatatataaaacgcttgcttacgtttgcaaaaatgagcacatactataacttatgtgcctttttttccttatcatataccttggcgatgttccccaaggaatgtgtgcttacagttcccctggaggctaaattctgtgggtccccctcccccgggccccccccagaagttgttaccaacagcaccttctttttcacatctgagtagtcttcctcaatgaatttttcatcttgtatttagccagttctctatgtatgaaccttttttttttttttttttttttttgagactgaatggcacgatcttggttcactgcaacctctgccgcctgagttcaagcaattctcctgccttagccttccaagtagctgggattacaggtgtgcaccatcacgcccagctaatttttgtatttttagtagatatgtggtttcaccatgttggccaggctggtctcgaactcctgacctcaagtgatccccccgccccagcctcccaaagtgctgggattacaggcatgagccatcacgcccagcctatgtatgaaccgttaaattacatttcagctattagtttgtacacacaatgctgtgtgggtcccttggcaagcttttggaagtgtatctgtagtgtatattcttaggagtggaaatgctaggttaaaatgcatgtgtaatactgagtttcagtttgggatgatgaaaaaattctagagacagatgatggtgatggttgcatgatggtgcaaatgtacttatgccactgaactatacacttaaaagaagcttaagatggtcaattttctgttatgtatatttctccacaataaagaagggaaaagaagtaatgcattgtaagtttgatattaccaaattgctctttatggcttttaaaaattattattcaaaagtaatacatgctgccaggcgcggtggctcatgcctgtaatctcagcactttggaaggtgaaggtgggtggagcacctaggtcaagagtttgagaccagcctggccaacgtgatgaaaccccgtctctactaaaaatacaaaaattagccgggtgtggtggtacgcacctgtgatcccagctactcaggaggctgaggcaggagaattgcctgaacccaggagatggaggttgcagtgagccaagatcaaaccactgcactccagcctgggcaacagagcaagactctgtttcaaaaaaaaaaaaaaaaatacaaaaaacgaaacaaaacaaaacaaaaaaaaccacacaaataatacatggttattataaaaatggaaacaatataggagtacataaagtaaaatgttaaatttccccttcaagttgtagttgccactgacactttggtctgtcctttccctacacctccccatctttcttcctgcatcttcagtttatttacagagacacatggccagggcttttttggggtgtgcaggttgtattttttctttcttttttttttgttggagcttacatatccagtagggattatatttttttctaagaaa

SEQ ID NO: 26474 - DNA, 2300 bp, Homo sapien
tgcctcagcctcctgagtagctgggactacaggcgcgtgccaccatgcctggctaatttttttgtatttttagtagagatggagtttcaccgtgttagccaggatgatcttgatctcctgacctcgtgatccgcccgcctcggcctcccaaagtcctgggattacaggcatgagccaccgcgcccggccttttttttttttttttttttgacacggagtctctctctgtcgcccaggctggagtgcagtggcgcaatctcggctcactgcaagctctgcctcctgggttcacgccattctcctgcctcagcctccagagtagctgggactacaggcacccgccgccaccatgccaggctaattttttgtatttttagtagagacggggtttcaccttgttagccaggatggtctcgatctcctgacctcgtgatccgcccgccttggcctcccaaagtgctgggattacaggcgtgagccaccgcgcccggctccagtaattttttttttctttttgagacagaattttgctcttttcgcccaggctggagtgcaatagcacgatttcagtttactgcaacctctgcctctcaggttcaagtgattctcctgcctcagcctcccaagtagctgggattacaggcgtgcgccaccacgcccagctaatttttttatttttattttttatttttagtagagatggggtttcaccacgttggccaggctggtctcaaactcctgacctcaggtgatccatccgcctaggcctgccagagtgctgagattacaggtgtgagccactgtgcccagcccatccagtaatttttatattttgcagtctaaacctattcctaagtcagtgcaaccatccattactttcagtaagtggcttggtgccactggttttaggagattccttgctgaagcctttatacaggctcaatgctttctggggggtaacaggttgctgtcagttggaacacattttttgttcgtgtcttccacgtataagcttaatgctttttcttttcttttgtaaaaaaatttattttctttttttcccctgtaagtaaggatacaacttaatgccttttctatcttaactaagcacttatcacacactgtggctgtaacttttgcagtttgaggtacgacagcaaaaccagcatgaatttctttttcctctttcacaattctagggctagaagattcgttcttactgcagacctcagtaagctcagcatacgattttttttcttaagctcagaacttccacatttacatttaaaggaagcactttacagcttcattttggcatatccaaactgccagcattactactcttgcactttggggccattatatagtaaaatgagggttactcgaaccaaagcactgcaacaccgtggcagtccatctgataactcctaagctggtaagtaactaacagatggtagaggtatgttggacaaagggatgattcacattgcaggtaggatggaacaggatagcacgagatttcattaggccaatggaaattaaaaacttatgaactgtttatttctggaattttctatttaatactgtcagaccttagctggccaagtgaaactactcaaagtaaaatctcagataagggggacactaccgtacttaactggagaagatactgctttgcttctgtgaccacagaattgacaggttgaaattggaaacaactgttgccttcacgcttttaagacaacttcacatgaatatacatgtgaagttcaagcatggcagtatcccatactagcaataaatttttgagcagtgttgcacacttactgtcatttctcttactgttctgccactcctacagagcgcaggccaaggagactacatttcccagaatgccacacgccctttgaccccagctacagcaaaagacgcgccggggagcgcctgaagccggaagactatagcttcccggcatgcagcacgcttccccctattagatttgaggcgcggccggcgcgttgcccactgggagttgtagtcagtggcgcgttgccctgacgcctgccgggccgggcgtgggggcctgtgggaggtggcgcggccgggcccagctgcggggcggaggcggaggcggaggagaggcctgcggcggcagggagcggcgggactgggagcgggcgccggagccgacccgagccgagccgagccgagccgagccggagcgggcggcgaaggccggcgcggcgagcagcaaccatgtcggtgttcgggaagctgttcggggctggagggggtaaggc

SEQ ID NO: 26475 - DNA, 2300 bp, Homo sapien
ccccagagcatgaactccatcttttgggaaatgcatctttctctgaccatatggttccgatggggctgccatctccctgtacgtcccacttccttattcacagtattggttagagaatggcacctggcttaagttgggccagtcacagcacctggttttccacccatagatgattggtctagggacggggacttacctatgttggaccaatcaaagtttttccctaaaattttgtccttcagaccagaagcagaaatcctcagtctctctccggtggaacgggtgagagttgtgagtggtgagcgctgctgcagccaggtgcctagccttgaggagaaaagctcgcatacagagagaagagataaaggactgggaggagagtcctggcaacattcaagcctctgcgctcaccacttcagtgcattttctgagcctggttctccagccttcccatcagttctgggagctccccattccttcctgataaattcctttgctgcatctgttagtctgagtttatttatgtttcgtaatttgcaaccgagaacactggtgataaccgggggctttgaggcaattccaggagggctacttctcacccccgtcagggaggagccaagacagggtttatcctcaaatgcagatcccctgaggtcaggagttagagcccagcttggccaacatgatgaaaccccgtatccactgaaaatacaaaaattagccgggcatggtggtacacgcctgtaatcccagctacttgggaggctgaggtacaagaatcgctttgaacccaggaggcagaggttgcagagagccgagatcgtgccactgcactccagcctaggcgacagagctagactccgcctcaaaaaacacacaaacaatgaacagacaaataaatgacagaacaagaagacaaactagagaacatcttgagacaaggtgttcagggaagagttcttttgagaaggtgatattaaagcgagtttggggaagaacgtcccaggccttgcgctcagggtcgtcaactctttgatttctcttccttttgaagcagggcagggaggtcatcaaacaacagaaggacaattataactgctggtatggcaaagccaggactctgaattcaaactctgctccattctcaggaatcccgtctgttaagcaggttctggggaagcgatgtgagtcatgaaatcacaggtcggaggaggcatcgagaatatggtcagttctcaactttcagggaaatccatagctgaggaatgaaggacaacgggcttctcgtgctctcactaggaagactggttcaccggaggctggaacactgaaagtgagaaatcccgacaggagaaatgtgtaggagagaggactagcacctggatcaagttataaaacatctcctgcatctttttcggagatcacccttagcgcggcctctccgcccagtcccagattaggcagcgaagagcgaccctcaccttgtctaggtggcacgttccttaaaagcgaaaggaccaggagtttcttcctgcctcgtctcttccggatccctcctgcaccgcccacagcctgcagatttgagcgccatctccaggccccgcccacctcaagcaccacccctcagtccttccttggggcacgcctccttccggcacccgcccagagtagccacccccggggcccctcctcccctccctgcttccgggcccgcctccttcaggcccgcttccatcttcctcccactctaagcttctcttcagccccgcctccctccacccgtggctccgccctctgggcgattctccatttagccccgcccacagcatctcctttcaagcgctgtcctggttcccggctctccatctcctgcacggccttccccactggtccggcgaccctcttcccagggcctcatcaccatcttagctccgcccctacttcggctccaaacctgtgcaagctgccctcttcccgccccagccccgcctccccaagccgcgtctcagtccctcctccctttcaggccccaccctggccccgccttcctcccgtccccgccgaagctctggacctttccaaagccaggctgagagggtggggagagcccatgcgcctgggaagccgggctgtttctgggcggggctgcagactcctcgtgctcgtgtcaccgtgtccttcccaggagacagagaaggaggagagcccggaaccagggccggagcggcgggcggagccgagctgcggggagccgctccgggtgcccccacccccgcgcgcctcagtggtgccggccgagg

SEQ ID NO: 26476 - DNA, 2300 bp, Homo sapien
tgctaatatttatcgagtacttacgtaccaggcactatggcaagtgttttacatttacatacttctttaaccctcccagtaaccttgtgtggtttgttgtcattctgctacttgtctccattttacacatgagccgtggaataacacaggtacaagccagagtcagaatttaaatctagtcagatgggctccagacttgtgcttttaaacactttactattaacgctgtccacagcagatcactgggcaaaatgctgaatttaagcatggtattaatagaatatggagagagattggtaaggggttcaggaaaaaaatacttgggatttgaatcaggttctatttgacttcaaagaccctgcactttctttttttttttcgagaccgagtcttgctctgtcacccaggctggagggcagtggcacgatctcggctcactgcaagctccactgcccatgttcacaccattctcctgcctcagcctcccgagtagctaggactacaggcacccgccaccttctgctaattttttgtatttttagtagagacggggttttaccatgttagccaggatggtcttgatctcctgacctcatgatccgcccgcctcggcctcccaaagtactgggattacaggcgtgagccaccgcacccagcctcctgcgctttctactctatcaggtgtctgccctgtatgttgtttaaactattatgtctagataacttttctttcttcaagtgatcagtgcaagcagatagtctacaaattataaattagtttttcacctactctatagtggacatttagataagaataagagaattttggggcaaggcatggtcctcacacctgtaatcctaacactgggaggctgaagctggtggatcatttgagcccaggagttcaagaccagcttggggagcatggtgaaaccccatcaatactaaaaatacaaaaaatagctgggtgtggtggtgcactcctgtaattccagctactcaggaaattgaggtgggaggatggtgtgagtctgggaggtcaaggttggattcagctgagatcatgccactgcactccaacctgggcagcagagccagaccctgtttcatttaaaaaaaaaaaaaaaaaagaacctttaatgttaaacaaaaagcagagtgaaatgttgtatagaggtttctcttactcagagatttgctatatgaagagttgctgatggatttccttgaagatttgtagttaaaaaaaattttgtttttttaatcaggtcaaaagtctctcaagtctctgtgtaacagccccaagttaccagccttgaataaaacattgatacccctggccaggtgcggtggcttacacctgtaattccattgctttgtgtggccgaggtgggaggattgtttgtgcctggcagtttgtgaccacctgggacaacagagggagaccccgtctctacaaaataaaaaaattagctgggcatggtagcacatgcttgtggtcccagctacttggggagctaagatggtaggatcacttgagtccaggaggttgaggttgcagtgagctgtgatcatgccactgcactccatcctgggcaacagtgagaccctgtttcaaagaaaaaacaatacaaaaaaatttacaccccgcttaggtattgttttcctatatctgtaaagtgaggggcatagcataggttgttgccaaagtcccttccctaaattccatgattcattcaaatgtccaaatttgctcatgaaagtgaaagtgaagtatctgtgatactttacaaattgaaagatgtgtacatgtttcagttcacctgatgtttaatagtaacaagaaggttgggtggacaatttattttattttttggtaaactcccctttggtgttttaatgtatcacatactcttttaagagtatgccttttgaggataaagcatatttggaatgtgagcatcattaaaaacaatcatttggtccctttttgttttttgtcttttaaacagatgatttttgatcctactatgagcaagaagaaaaagaagaagaagaagccttttatgttagatgaggaaggggatacccaaacagaggaaacccagccttcagaaacaaaagaagtggagccagagccaactgaggacaaggatttggaagctgatgaagaggacactaggaaaaaaggtgcgtggttgatgtgagagagttactgttgtcatagaagccctggttctatgagcgttttggcttttggatatgcagcgacctctcagcctgacaaggctgttccagtg

SEQ ID NO: 26477 - DNA, 2300 bp, Homo sapien
tgtctcagccacctgagtagctgggattacaggagcacgccaccatgccccgctaatttttgtatttttagtacagatggggtttcaccatgttggtcaggctggtctcgaactcctgatctcgtgatccgcccacctcgcctcccaaagtgctgggattacaggtgtgagccaccgtgcctggccttttttattactaccattattttgagatggagtctagctctgtcgccaggctggagtgcagtggcttgatcttggctcactgccacctccgcctcccgggttcaagcaactctgctgcctcagcctcctgagtagctgggactacaggcgcgcaccaccacgcctagctaatttttgtatttttagtagagatgggcgttcgccatgttggcgaggatggtctcgatctcttgacctagtgattcgcccgccttggcttctcaaagtgctgggattacaggcgtgagccaccgcgcccagccagttctactttcctattatgtaacaattataggctgggaacagtggctcacgcctgtaattccagctactcgggaggctgaggcaggagaatcgcttgaattcgggaggcagagctttttttttttttttttttttttaaccaattgcagctttagcctcacttggttctaccttccctccttccttccttccctccctccctcctgctttctttctttctttctcttctttttgagacggagtctcactctgtcacccaggctggagtgcagtggcgcaaactcggttcactgaaacctctgcctcccgaattcaagcgattctctgcctcagtctccagagtagctgggattatgggcgcctaccaccacacgcggcaaatttctgtatttttagtcgggacaatgtttcgccatgttggccaggttggtcttgaactcctgacctcaggtgattcgcccgccttggcctcccaaagtgctgggattacaggcgtgagccaccacgcccggccagttctactttcttatcatgtaagaattataggccaggcgagctggctcacgcctgtaattccggctactcgggaggctgaggcaggagaatcgcttgaattcaggaggcagagcctgcagtgaaccgagatcgcgccactgcactccagcctgggcaacagagcgagtctcaaaaaaaaaaaaaaaaaaaaaaaagaattattaaattacccaatcatagaattacccccacctcctgactgcatctaatccagagagaagctctgcttccttaaaccctgcccaaaccctgtaaattctttccaacaccctcttccaaagacgtcccggtgtttcccacggcgtactgccctacttgcaagaccataaactccactttgtccagctacaggagtgttctcgatggtctttggctggagagcacagccgcagtgagagctccctaaagggtcgctgctgttgttaggtctcaagggaaattgcgtggcgcacccattcaatcagatttcataaacaagtattctgaggctccccgacagctgcctcttgcgtggttgtttctcctcaggagatgttatctctcccgggggaagaccgggaagatactttggtttctgacctcccaagcagaaaaccagccgtcaaatttcttacgaagtaaaaacccttagggaggtgggcgcctctagctccaactcagaatttctcaaacaccatgacgcccgggggtcatgtgggaaactaaagctccagcgggttcatatgactcagtgtctaacccactaccctaacccaggaggaagggaccccaattcactctacaagcagcgcaaaagaatgctccaaaaggctgaggcaatatcaacaaccgaatgttcttccggctgcagctcgctcagacgccgcgcacaggtcgctgggcggctacagcgcaagcgcaaccctcttataaatggactacaagtcccggcatgcctggcgacgcggcgtcgcctggtaactcgcgccacacgaagcgcgctaggttggctcttctgcgcgcctgcgccttggcgagctctgcgcaggcgcatttccaacgcttggaggagagggcggggtgtcgtttcctttcgctgatgcaagagcctagtgcggtggtgggagaggtatcggcaggggcagcgctgccgccggggcctggggctgacccgtctgacttcccgtccgtgccgagcccactcgagccgcagccatgtctggggacgaggtgaggatctgagcccggcgtaagggctaaggattgaggcgagaagc

SEQ ID NO: 26478 - DNA, 2300 bp, Homo sapien
ttttccctccctccctcctttctcctttcctctcctttcctttccactcctttcctttcctttctttctccttccttccttccttctctttctctttctttctctctctccttccttccttttctgtttctttctctttcttcttctctctctctttctctctttctccttccttccttctttccttcttccctccctccctccttccttccttccttccttcttccctccctcccgcttccttccttccttccttccttccttcctttccttccttccttccttccttccttccttcctttccttccttccttccttccttccttctttctttctttctttctttctttctttctttctttctttctttctttctttcttctttctcagagtctcactctgtcacacaggctggagtgcagtggcattatcatgagcccacttcagccacgacttcctgggctctagcaatcctcccacccctgcctcctgagtagtaggggccacaggcatgcgctaccatgcccagccagacttttctttcaacatcacaaacaaactttttgttttggccatgattgttatcgtgctaagaaagatatacttctgttgcctggtcttcaatctaggtcattagaagtttctccatatcccatatagaaccttcgtgaacttttgttagtctcattgccttcagtgaagcagattcttcttttttctttgtttttgagatggagtctcactgtgtcacccaggctggagtgcaatggcatgatctcggctcactgcaacctccgcctccccgcttcaagcgattgtcctgcctcagcctcccaagtagctgggattacaggtgcctgccacctcgcctggctaatttttgtatttttagtagagacggggtttcacaatgttgatcaggctggtctcaaactcctgacttcatgatctgcccacctcggcctctcaaagtgctgggattacaggcgtgagccactgcgcccggctgaagcagattatttaacagcttcggtcactttgctcttgctcttcaagatggtagctatggtggaatgggatatgcctgactggtgagcaataatcatcactgacttttactttaaatttcatttccaggtcaatcacttgatgtggcctcttactggcaacattagccatggattttgtacccttaggagctatgatgaaaaaaacaacacaagattaaatcaaatgcgagagaaaataatgtgcaaacaagagatgcggtaaacatgaaatatatgaggatactgtgggtataacatgacatactgttttacagtaaactgtttgttgttgtttttgttgttgtttttctgagtctcgctctgtcacccaggctggagtacagtggcgcaatctcggctcactgcaacctctgcctcctgggttcaaatgattctcctggctcagcctcagcctcagcctcccgagtagctgggattataggcgcctgccaccacgcccggcgaatttttgtatttttagtagagatggggtttcgccatgttggtcaggctggtttataggaccactgtcatatatgcagtccgtcatatacacttgggcaacagagtgaggaagaaagaaaggaaagaaaggaaggaaggaaggaaggaaggagaaaagaaaagaaaagagaaaaggaaaaagaaagaaagaaagctgatagcgcccactggatgcctggcctcaaccacaactctggaagacctactgcattaagggtcaattagcacaatggtctaaaacaaaagctatcacctttcccttaggactgactagttatgctatatttttactgattcttaggcactagtggtcttgtctgctacttagaagattacagactggcagattaaaggcacttcactttgggtcatgagccctggaaacaaattgtagccaccaaacagtctggatcactgttgtggtgtgcatggtaagggctcattctctgatgagaccaactagaatcaagcttttgatcaagcttgtgccactcagatggccacagttgccacttagatccatcataacattggacatggtgacaccatcatcaactgggcacaaagtaagggactctgtgtttctgaatcagaagctaccactacatgccagatttgtgacctctgccaaaagttagcctatttgtctcatggtgaaagaggccatattgcactgagtgttgactggctgcagagtgttgactggctcctggtaaattggtgacatcagacctttgacctcttcca

SEQ ID NO: 26479 - DNA, 2300 bp, Homo sapien
agttggcaaactttttctgtaaaaggccagataataaatattttatgctttgtggaacacatagggtctccgttggatattctttttttttttttaatagaatcatttaaaaatgtaaaaaccattcttatctccagactggataaatgccatatgaaatgtgagaagggcaaataagtactgtagtcactcatttgggctttgatgaccattaacaaatgataagtaaataaatgtttgtatagcaagctaagcactgcgatcagtgggaaaggacaagcatcatatggggaccaggaagtagccaagcttggatggaatttattacttcctgtgagaaaatataaagctggaaatcatggtggagagcccctgtcattgaggagttaatatcttagaagggggatgccatatatatatatatatacatactatatatatatattatatatattataaaatatatatagtatatatatactatatataatatatgatatatataatatatatagtatatatatagtgtatatataatatatgatatatataatactatatatagtattatatatatagtgtatatataatatatgatatatataatactatatatatagtattatatatatagtgtatatatatatacacacatacacacaaatgaacaaatatggctgagtggtggctcactttgggaggcttaggtgggaggatcacttgagcccaggagttcaagaccaacctgggtaatagagtgagccttcatccctacaaaaaaaaatttttttttaaattagccaggtgtgtttgcacatgcctgtagtgccagctactcaggaggatgaggtgggaggatggcttgagcctgggaggttgagactgcagtggcccaagattgtgccactgcactccagcctgggtgacagtgagactctgtctcaaaacaaacaatgacaacagaaaaaaactatatgagcttgagttagaaaatataggccaggtgcagtggcagtggctggcggatcacttgaggacaagagttcgagaccagcctggccaacatggtgaaatcccgtctttactaaaaatacaaaaattagccaggtgtggtggtgggcacctgtaatcccagctactctggaggctgaggcacgagaatctcttgaacctgggaggaggaggttgcagtgagccaagatcgtgccactgcactccagcctagctgacagagcaagactctgtctcaaaaaaaataaaaagagttagaaaatataaaatgcttagtctggccaatgtggtaaaatcctgtctctacaaaaaatacaaaaattagcctggcatagtgatgggcacctgtagccctagctactggggcaggagactgaggcaggagaatcacttgtacctgggaggtggaggttgcagtgagccgagattatgccactgcactctagcctgggcaacaagagagagactccatctaaaaaaaaaaaaatccagctagcaaataaataaatacataaatccagggggcctatgtcaacagctccatcctcctgacacaaactatacctgcattcgttctctctgggtttgggaatctaggatatgagccaacatatatgcttgtctgaaggggccacttacctcttcatctttctcactgagacttaatttattagccttattctgtacatcttaataaaatctctgctactgtgaggccctactgggggcctttcaacaactctgcccaggcctggggtctcctggggccacagacattaaaaaaacacacagaagcagccaacacaccaccctctggacagcagagaccagtgcaatgcattgctttttctctttgctccaatctccttctgttccttgtctttctctcttcctcttcccatctctcttctctcttcttccctcatcaattccccttccccatcctaagccttgctaatcctccagctccaccaggacacttgcctaacagggtcacaacaccagcccaaagaagcacaaagaaagcaggaaggcctcttaccattacccctgacccacccacctgaccaccttctctgtcccactcaggcctcctgggatggatgtcacccgcttactcctggccaccctgctggtcttcctctgcttcttcactgccaacagccacctgccacctgaggagaagctccgagatgacaggagcctgagaagcaactcctctgtgaacctactggatgtcccttctgtctctattgtgggtaagtcacctagcctctgggctctggccc

SEQ ID NO: 26480 - DNA, 2300 bp, Homo sapien
aataaataggtggaactcagatatggcaaagttataaatgtggttctgaaatgactgaggtttgggaaacaccacattcatccaaaagtatgagtgatggtgaaatttcaggcaggggctaactagtagaggaagctgcttttcgtaacctattttgctcagtggacttcagctccctgggcttctgtgggtgtctggctcagagctcaagccaggaagtctttagtagctttcagtttcttttgttaatataggcctgaaaaatctttcatttagttcctagccagaggttgggggtcctccttctttaagtccagtctcaccccaacaatgagaactcccagaacttccctgcccttaccttagaagatcttttcttttctgctgcttttctgccgatctgtttggatttcttgttcagcgcttcaaagagagacaaaaggagcaaagtcagatgtttctggggacgttgagctgcagtgaagtgagaggggcagagggggcttgggaagtcacaaggtcagggagaggagaagaagcgtgctggatgagtcacactgtaggactcaagccagtaggttcttgttagcccggctactgacctggagccaggcactgatagcaacgtgtcctctgagggaaggcaaatgggaaatccaagcaggcactgggatctgcctgtgacactcttgtggggcctggtccctcgacctaagtgagcttgggccactcagagccaccccaggtgccccttccttcatctccattgtggcaggcacaggaacattgtgatacccagaaaatggactcctgtcttgtacacagatgcacctgtgtttcctattttccattcctgagagctctggagccaggaggacctgatttgaatcctgactctgccaatataatgactatgtggctgtgggtaacttacttatcctccatgagactcagttttttcatctgcaaaaaaggttccataatatctgccttgcagtattgtcttgaggataaatgaagtctgtttataaagtgaaaagtctgttacactgaagatcaataaatgttgatgttcctcccttccctgtctgatatgtgtagaatatcctctttctttcttcttcttcttttttttttcttttgagacagagtctcactctgttgcccaggctggagtacagtggtgcgatctcggctcactgtgacttctgcctcctgggttcaagtgattttcctgtctcagcctcccaagtagctgggattacaggcatgtaccaccacacctggctaatttttgtatttttagtagagatggggttttgccatgttggccaggctggtctcaaactcttgacctcaggtgatctgcccaccttggcctcccaaagcgctgggattagaggtgtgagccaccgcgcctggccgattatttatttattaaaaaatttcttttttgagtcagggtctgtctgtcacccaggctggagtgcaatggtgtgatcatagctcactgcagcgtcgacctcctgggctcaagcaatcctcctgcctcagcctcccaaatagctggaaccataggcatgcaccaccattcccggctagtttttgtttgtttgtttttgagacaggatctcactctgtcactcaggctggagtgcagtggcacaatcatggctcattgtaggctcaaactcctgggctcaagtgatcctcctgcctcagcctcccaagtagctaggactacaggcgcatgctaccatgcctggttaatttttgtatttttaatagggacggggtttcaccctgttgaccaggctggtcttgaacacctgagctcaagagatctgcccgcctcagcctacgaaagtgctgggattacaggtgcatgccacgtgccttgctagtttttaaatttttctgtagagacggggtctccctatgtcgctcagtctggtcttgaactcctaggctcaaacaatcctcatgcctccagcttcccaaagtgctgggattacaggtgtgagccacctcacccagcctcaaatatcctcgtttcctagcaaaagccgaggtagtaagagatattagttttgagcttaggttctggagttaagtacctgattttgaattctggctttgccagttaaaaactgtgtgatccgtgctagttacttaattctcctaagcctcaagttcctcaactgtgaaatatgaataaagaccatactcacctcacagtgcctaccacacagtatgtctatgattattatcaggtgaagtcaaaccagatctccaatgcc

SEQ ID NO: 26481 - DNA, 2300 bp, Homo sapien
agaatgatggaggtgatgtaacttaaatttttaagagcctccctcttctggctgctgtggggagaatggcatgttagagcatgggaccagtgaagagagtgtggcagtgtccaactgagaagtggcagtgtatttatttctttattgttttttttggagacagagtctccctctcacccaggttggagtgcagtggtgctattttagctcactgccacctccgcctcccaggttcaagcaattctcctgcctcagcctcctgagtaggtgggattataagtgcccaccaccacgcccaactaatttttgtatttttagtagagatgggatttcaccatgttggccaggctgctctcgaacttctgacctcgggtgatccgcccaccttggcctcccaaagtgctgggattacaggctgtgagccaccgcgcccagcctgagaagtgacagtttagatgaaggtggtgagatgcagttggattgcttatatatttcacttgttgagccaaaaacgtgctgattgaggtgaaagaggaaaagaggaatcaaatcttaagtttttgggcagagtagctggttgaatggtggtttcatttcctaaaatgggaagattgggagagtaaccggtagtgggggcaaaggagccatgaggactccaacatgacacataatagatccaactggacatccaagtggaggtgctgtggaggcagttggatcacatcgagtctcaagttcaggggagtagtttgggctggatataaatacgtgggagtcatccccgtagagaaggtatgtaaagccataagactggatgagcttaattggtaaacataagagaactgggagatgatggagccctgagggcccccaaaccctaaagtctgttagctaaagaggaaccaggaaggtaggtggaaaagcacaggacagtcacagaagccaagtaaagaaagggtttcaggaaggagggcaagtcattcatgcaatctgtgctgctggtagaaacatggtcttaggtaattttgcatcaggtatggagatcaggctggtctttggacggaagagcagttttagtggagtatggaagtccttaaggaggagaggggatatggaatcaggccccatggagcagggatagtgtagtgaccagccccatagggtcggtgggtctctccctgtgtgcggcgacgagagagtgtagaaataaagatacaagacaaagagacaagagaaaaggcagctgggcccgggggaccactaccatcaatgcgcggagaccggtagtggccccgaatgttgggctgcgctgttatttattgcatataaggcagaaggggcagggtaaagaatgtgagtcacctccaaggataggtaaggtcatgtgggtcacgtgtccactggacagggggcccttccctgcctggcagccgaggcagggagggagaggagacagagagaaagacagcttacgcaattatttctgcatatcagggactattagtatttttactaatttactactgctatctagaaggcatagccaggtgtacaggatggaacatgaaggcagactaggagtgtgaccactgaagcacagcatcacagggagatggttaggcctctggataactgtgggcgagcctggctgatgtcaggccctctacaagaggtggaggagcagagtcttttctaaactcccctggggaaagggagacacccccccccctcccgccgccgccacttcccagtctgctaagtagcgggtgttgttccttgacaccttttgctaccgctggaccacgatccgcctggtaacgggcgtcttcccagacgctggcgtcaccgctagaccaaggagccctctggtggccctgtccgggcataacagaaggctcgcactcttgtcttctggtcacacctcactatgtcccctcagctcctatctctgtatggcctggtttttcctaggctatgattatagagcaaggattatcataatattggaataaaaagtaattgctacaaactaatgattaatgatattcatatataatcatatataagatctatatctagtataactattcttgttttatattttattatactggaacagctcgtgtcctctgtctcttgcctcggtgcctgggtggcttgccgcccacaggacagctcatctattttattttatttttttgagaccgagtctcactctgtcacccaggctggagtgcagtggcatgatctcagctcattgcagcctctgcctcccaggttcaagtgattctcctgcctca

SEQ ID NO: 26482 - DNA, 2300 bp, Homo sapien
aagtctctgcttgacatcggccctcatgactctcagacagaggtcagatgtacagatcaagtgagaccaatacatttactatgtcatagaagaccttaattcttatttttattttttattttttgagacaagagtctccctccgtcgcccaggccggagtgcagtggtgcgatctcggctcactgcaagctcggcctcccgggttcacgccattctcctgcctcagccttgcgagtagctgggactacaggctcccgacaccacgcccagctaatttttttttttttttgtatttttagtagagatggggttttaccctgttagccaggatggtctcgatttcctgaccccgtgatccgcccgcctcggcctcccaatgtgctgggattacaggcgtgagccacgcgcccggccagaagagtttaattcttttctcatttttaggttaaaaaatgagtagaggccgggcacggtggctcacgccagtaatcccagcactttgggaggcagaggctggcggatcacctgaggtcgggagttcgagattagcctgaccaatatggagaaaccccgtctctactaaaaatacaaaattagccaggcgtggtggctcatgcctgtaatcccagctactcgggaggctgaggcaagagaatcgcttgaatccgggaggcagaggttggtgtgagccaagatcatgccattgcactccagcctgggcaacaagcgccaaactctatctcaaaaaaagaaaaaacaaaattagccaggtgtggtggtgcgtgcctgtaatccaagccactcgggaggctgaggcaggagaattgcttgaacccgggaggtggaggttgcagcgagcctagatggtgccactgcactccagtgtgggcgacagagtgagactccataaaaaaaaaaaaaaattcaggggaaaaaaagcaattaaaaaaacataactataaaaataatacaaattacaaaacaaccatttgcatagcatttacattatattagttataagtaatctagagatgattaaagtgtacggaggaatgtgcataggttatatgccaatactgcctcattttatatgagggacttgaacatagaagggttttggagtccacagaggtcctgaaaccaatttccccttcccatgcctgggatgactgaattatacagcagcaaaaatgaatatactcaagctatatgcatgagtctcataaatataatgctcacagaaaaaagcaagttgcagaagggtaaatacggttgatatataaaggtgctaaacacagaactatttaatgatatacggatgcagtaaaagtataagaaatgtatgcaaacttacttaaattcagggtgttggttacttggagtaaggcgaatgtttgggatgtcagtaggtacctgacaaatggcaacttaactttgttttggtttttttgagatagggtcttgccctttcgcccaggctcaagtgctgtggtgggatgatagctcactgcagcctcgatctccaggctcaaaagatcctccctcccgcctccgcgtcccaagtagctgggaccacaagcgcgcgccaccacgcccggctaatttttaatttttttttgtagagttcaggtctcactgtgttgcccaggatggtcttgaactcctgggctcaagcgatcctcccgccttggcctcccaaagtgctgggattacaggtgtgagccaccgcgcctggcctgcaactttacttataataatctgtgtggcagatgtcatttggcccattttacagatgaggaaattgaggcacagggaagtgaactggcggaatttcagttccgctgggttttgacactgaatcaactggctgaaccagcgagaggacggcccggctggctctcaggcctctcccggcgctcccttccggaccggtgagtgagactcctggggccacgccttgtgaaattctgaggcttcttttcagggatcgaaatcccctccggctccgccctgcgcgttgggccccgccccagcgggtcatgaatatgcaagtgcgaggaagatatttaaaggcgtcggcgccacgcgcatatccctgctcggcgctgcccgcccagttcctgttcccagactgaggcccagcccccttcgcccgtttccatcacgagtgccgccagcatgtctgacaaactgccctacaaagtcggtgagtcccaggacctgcagccggttgcggccgcccggcacccgcccggggcttgttcgtggcgggggctgcagggccgactcggggctctctg

SEQ ID NO: 26483 - DNA, 2300 bp, Homo sapien
cgcacctggccttatttctgtagtatgtatgtacataggtgcatgagcatgagtattcgtgtgtgatggtgggatgtgtgaatgagtatgtgtttgaaggtttgtatggatgtatctgtaggtgtaaacatgttcactgaatggaactccatgggagcagggactttgtcttgtcctgtttttttgtccttgcctctagcacactcaaatgaacatgtctggcatgggggttgcagcagggagcatgattgcaggaagggtagcccagtggttaccagcagcgactctggagtcagacagcattggtgcttcctaactgtgggcaaatcaaccactaggagcctcagtttttccatgtgttaaatgggtacctaccttatagggtagcatctataaagtagggcaacatctaccttacagggaagttcaaagagcttagaattgtgtgtggagcattggatataataaatttggactagtatcattatcctgggtgtcactgtcaacacccagcagtcccaacaatgtggcttatgcctgtagtcccagcacttgggaggccgaggtggaaggattgcttgaccccaggagtttgagaccagcctgagcaacatagtgagactttgtctcaaaaaaaaaaaaaaaaaaaaaaaaaaaaagctggatgtggtgatgcatgcttgtagtcccagctactggggaggctgaagcaggaggattgcttgagctcaggagtttgaggctacagtgatctctgatggtgccatagcattccggcctgaacaagagtgacaccctggctcaacaaaacagaacagaacaaaaacatcccgacaaatgcttccaagggctaaagccccttcaaaacaagtccaaagaccacttactagcaacattcattgctcttctctgaacctcagtttcttcctatgggagggagcgataagctgtactttgctttctcccagggcagctgggaggttatcatcacagcgctccaaatcctgcccctggagggaagagtttgcactgcagcagtctgaagccaaagctgggagcagggtgccctctcctggcacagtggagtcaagggcgactccagctgcagggcacaggctgacctcggaggtccaggggtgctatccgcaaaggaaggtgggcaaaatggagccgtctggggagggcaccttacagctccctactcttgcagcgtggagcccgtgctccctttctgtggactgagctcctctgcctcagatctcgctccaaggacgtctcccaccctgcccccgccccgtcagactggaccaaccccccactcctccccattacaagttctcagagtgttccttttgcttttctatcatctgagaaatgaagggcaggggcagaacccctggctgtgtgactcctaaggtccctggacgaggctcttagcaaatattaggataaaaggggcgtggaagctcagacaaggctgggaagtgaacccagaggccatccagccccactggggaacgatccagcctcagcgggggacgtcagagacctggattaggggactccctggctccaccctgaggagagccaggactgtgggctgaagccaaggggcaccacagcgtgggttccggggcagacatctgggaacattaattcattcccaaatattgtgtgcagtctgtgtgccaggcactgagctggaccctggggacacagcagctggcaaagccatacaggtttctgtccctcctggaagtaatgggacaggcacataatcagatgatttcgatataatgatatagaaccacaccacctcacatccccctttcggggtgcctcttaaagcctgtcgcttagagatggcccgcggctagggaggggcgctctcttatattctacgagtctggagggctcccccaacggaagaaacccgcggatgggtgggccggcagctcctgggacgcccgactcacagcggagccgcgtgggatgagaaggattgagggagagaggggggccctgtcccagggtctctaagaagtcccccacctctgtactccccagcccagcggtgacttcgaggtgggcccagggggcctggagggaggggcgtggatacagcgggaaaggagagacccctagcggggtggacaagaagggaggaactccacagaactgcttaatccggctccatccccatcagcgggctttctcagcgcctgcacccctctctatcccatctcgaagcctccagttaatccagagtgagacgcaggaccgccgggaggcgagcgggg

SEQ ID NO: 26484 - DNA, 2300 bp, Homo sapien
cttttgttgtttgttttttgagacagagtctcgctgagtcgcccaggctggagtgcaatggcgtgatcttgggtcactgcaacctccccctcctgggttcaatcaattatcgtgcttcagcctcccaagtagctgggattacaggcacccgccaccacacctggctaatttttgtgtttttagtagggaaggggtttcacaaggctaggcgtggtggctcacccaactctactaaaaatacaaaaattagccaggcgtgatggcatgcgcttgtagtcccagctacttaggaggctgagacaggagaatcacttgaacccaggaggcgagcggaggttgcagtgagccaagattgcgccactgcactccagcctgggcgacagagcaatactctgtctcaaaaaaaaaaaaaaaaaaaaaaagagacggggtttcaccatgttggccagactggtctcaaactcctgacctcaagtgatttgcctgccttggcctccctaactcctgggattacaggtgtaagccactgaccctagccaagcctaggagtctgagaacagcctgggcaacacagggagtccacgtctctacaaaaataaaaacaattaggatagtgtggtggcttgagcctggagtcccagctactcaggaagctgaggtgagaggatcacttgagcccaggaggttggctgcagtgagctatgattgcaccgctgcactccaggttgggtgacagagcaagactctgtctcaaaaaaaaaaaaaaaaaaaaagtcactttgaaaaatgtgactttccagatggcaaaatactattttcattaggaggaaacaggctaaacagtaatagcaaaggtcactaagtattgagcacttagtcatacctctgagtctctgcctgcatagcctattatttctcacaagcaatccatgaagaaggttaagacaacggactttcacgccagactgcctgggttcttatcaagtatgtgacttagtttatatatttgtaaaatggggataataatggtatttctgtaataggtttgttgtgagaataaagggagcttggtatcagctcttagaataccggacaggccacgttggctccactaagctgttgtcatcatccctaagggcacccagttaaaaggtagaaaagggaggatttgaatccggtcagtgtaactctcaagtgtacattttttttcttttattttctttttaaccacgccctttaatgtacattgttaaaggctaagccaggccaggtgcagtggctcacatctgtaatctcagcgattgggaggcccgaggagggagtatcgcttgagcccaggagctggagaccagcctgggcaacatggcgacaccgtggccctattcccgccccatcccatccgcactccaccccatccccatctctacaaagaatagaacaaaattagtcgggtgtggtggtgctcaactgctgtcccagctactcaggaagcccaggtgggaggctcgcttgagcccaggagtgtgaggctgtagtgagctatgactgcaccactgcactccagcctgggtgaagggtgagaccttatctcaaaaagaagaaaaaaaaagaaaaggaaaagaaaaagaaaaaagaacaactaagttataaactaagctatatagcccattggttctcaaattatgatttcactcactagcagtatcactagacagcttgttggacatgcaaattatcagaccctatcctcctatgccagatcttctgatcagaaactctgggggtgggggtcagcagtgtaagttttaataagctctctaggtgattctgatgcacaccatagtttgagaatcacagtccttataggctctggtgggcggggtgttaaaaaaaaaaaaaagcctggaggtgctgggagccgctcgcgcccatctcacctggagctgaggaaaactgggatttaactgatttaccaccgcagccagctcttcaagccaggggcgggccggacggctggcgcgcaaggcctgctggggcttgtagtctagaccacttccgcgctcaggcgcctgcgctttagctgctaactcgctctagtagctgtggtcggggctcgggaccggctgccatcttagtctagggactgaggagtcgccgccgccccgagtcccggtaaacccccgtgggcgaactcggggcagttctcgggagagggagggagtccggatgagaatgttcggggagaacaagggtagaggagtgggacgcgcggttcgggaccccagagccgcggctgctcc

SEQ ID NO: 26485 - DNA, 2300 bp, Homo sapien
gaccagcctggccaacatgatgaaaccccgtctctactaaaaatacaaaaatcaactaggcatggtggcaggcacctgtaatcccagctacttgggaggctgaggcatgagaatcgcttgaacccaggtggcggaggttgcagtaagtcgagatcacgccattgcgcttcagcctaggggacaagagcgagacttcgtctcaaaaaaaaagaaaagaagctcataataatataattccatttacctcactccagctctttgtggtgttgttgtcatatattatttctacgtgtcacaaatataatactttgttactgttattcttgctttaatttttaactattttcaaaaataatcttatatttactcacattactatttctggttctccttatttctttcctcagattcatttttttttttaaatctaagataatttccctttggctttaaaaaaaaaaacctttctttaccatttcacttagtgtgcatctcttggtgatgcattttctcagcttttatatgaaaacatctttatttcaccttcattttttgaaggatattgtcactagatttagaattctaggtttataaaataatgatgcggtcatgtttttatgatttatgttttaaaaaataatcctcatgtcgtagagacaaatactgaagtatttgttcaaaatgaaattatctgggctgggcgtggtggttcgtgcctgtaatcccagcactttgggagaaggcaggcagaacacttaaggtcaggagttcaagaccagcctggccaacatgatgaaacccccgtctctactaaaaacacaaaaatcagttgggtgtggtggcgcacgcctgtaatgccagctactcgggaggctgatgcacaagaactgactgaacctggaaggtggaggctgcagtgagcccagattgtatcattgcactccagcctgagtgacagagcgcgaccctgtctcaaaaaacaaaaacaaaataaaagaaaaaaaaagaaattatatggcttggcaatggtggcacacgcttgtaatcgtagcactttggatggcggaggcaggaagatcacttgaggccagatatttaaaaccagccttggcatcacagagagacaccatctctacatacaaaaccaaaaatcagccaggcgtggtgttgcacacctatattcccagctactcgggaggccgaggtaggaggattgcttgagcccaggaggtcgagactgcagtgagccaagattgtgccactgtgcttcagctcaggtgacagagtgagacctcatctcaaataaataaagaaatgaaattatatgatatctagggtatgagtaggggcatagatgaaatagatgggcattgtgatgaagcttggacatgtgtacagggggttcattatgttctatttttgaatatattttaagttttttataattttttaaaatttatttttatactcagaatttaaagataagatctaaacttcctgataggttttttcatatttgtttgccagaatggtagctgagtggaggttgtctcgaggtgttgaagaacagacacaagctttctttgaaggctttaatgaaattcttccccagcaatatttgcaatactttgatgcaaaggaattagaggtaatgaattttccttcattcccctgtaccatgctagtaaataatgccttaagttgtctgcttttaactcactttcccatctttcctgttactgtaatatttttatactggggcaaaatgttttgaaacatccccaatggttaaagaaaatcataatttatccaaagataaaacaatagtattaccccctccaaagtacaaatattagagcttctctacaattgagtgacttacttccctgaatatgtatatgtatgacaccgtgcatggaaccttgccttcatgagcaatgtagatataattcttgatgtatagttgataagtcaaagcctactgattgttattctaaagctttgcttaatcttagtctttcctatgtccagctgtttttgtacagttaccttaggaaacaatttgtctttttcatccctaaaggtccttttatgtggaatgcaagagattgatttgaatgactggcaaagacatgccatctaccgtcattatgcaaggaccagcaaacaaatcatgtggttttggcaggtttgtttttaaatttatttctattagttgacacagcataattttttagaatttgcttaccacatatggaaatgagtcacaggtcaaaatgtaccagtgtatatagacccct

SEQ ID NO: 26486 - DNA, 2300 bp, Homo sapien
ccttggcctcccaaagtgctgagattacaggtgtgagccactgcgccgggccaaaactctaagcctgccactccgggacattcttggtcctattccagctcctccttcattctcattttggctcctgtcacatgaactattggccattctcttttttgcttctgggattgtaatctgttaaaatcctttcactcctctcagtctggttctccatgggcaagacagtggtgattcttccagtgcttatcttccaggatgttttagggtccagtctctgcagcacttcttccccttgctaaatgctttcctaatgtttccagcattcaatagaaattcctttggatccagtccttttaaaaatttattttgaaataattttacatttacagagctgttgcaaaaatggttaagagttcctgcacagtcttcacccagctttctccaatgttatgatcccatataaccatgctagaattaccaaaactaataaattaacactggtaaaaataacactaaactacagcccttactcagatttcaccaattttcccacccatgttatttttctttctccttactcctctaatctgtgacagttccgcattcattccttgctttcatgactttgagattttggggggcgggggcggggtacaggtatcttgtagaacatccctcacactggatttagtgaaattttctcatggtttaaggctgggagtttttgtggaaaatgactcggaggtgatgtgcccttaacgcatttttatcggggcacacggcatcaatatctccccttgccagtaatactaactttgatctggttacggtggtgtctgctaggtttcttcgcagtaaagtcaatcctcttaacatgcagacactcctggaaggagaaccaaatccttcctcactgaagagcagctactgtggaatgaaactttggagttagatcatcgttgaatccagcaagctacagtgcctgggagaaacagcatttataaagtatcgaggttaccgatacttccctgaagctaccggagataacgttatgtgcgtgttcagcacagtaatgtggcacagggttcactaaacggcagcatgttttaacagaagttatttactcctagaggacccagaaacgtttgcggcctgccggaacaggacaacatagggctctgggaagagtccccctttcagaggtgagaacaagacagaacacacagatgtgaagtgccttctgctaggtaacgcgaggcggggctgagctcggattctaaagactcccaggccagccctaaccaattcatctccgagcttgcacggcatcttacccggagactcgaggtacctgactccagccccaccccaggcctgcccgatcccgaagcgcattttggccctgggcctctctctggctcagtctgggcgcaaagcgggtctcagcaaccgtcccacttgccttcataccctcccaccacgctccactcagggactccagaaccagcttagacctccattgagagctgaaagcctcttccgataccgagaaccagcactgaaagcctcttccgataccgagaaccagcatggtttttgttttgttttgttttagtcagggtctcttgctctgtcgcccaggctggggtgcagtggcgcaatctcggctcactgcagcctcgaactcctggtcaggcgatcctcctacctcagcctctggagtaactggaactacacgagcgcgccaccacgcccggctaattttgtttattttttagtagagaaggggtctctccatgttgcccaggctggtctcgaactcttgggctcaagcaatccttccgactcggcctcccaaagtgctggaattacaggcgtaagccaccgcgtccagccagaaccagcatcttttctgcacggctggagttgggaattttccacagcttagcgcactgctccttagcttttcgctttgccacagtggaaagcagattttccaagaatcctggcggagccaagatcggctcgcccgcccccgcctcacgctggctcctgataggcagctagagctgtccgttttgacagaaacctttgcgcaggcgcagaaaggcacaggactcgctaagtgttcgctacgcggggctaccggatcggtcggaaatggtgagcgtgcgccggggtcttgtggctggcggccgcccaccaccccacgccaggccttcagtcttccgaggatgaggggatctcagagctccggacagggaatcggtggtggctgggcgtggccgggcccgggcccc

SEQ ID NO: 26487 - DNA, 2300 bp, Homo sapien
aagaaaataaaacctttctataattccttgcccttaatgtggctcttttttcataatctcctgtaaccttttgttttcatgtgattgcagtcaccaaagcactttatttttgcattttgctgttttcacttaacattatagcacacaccttttgtgatggtataacatggtctaatcaccatggttaatatgtgtattcctattagtggatgttccataatctacttggccttttccctaattgttaggcatttttagttctttctgcattctgctattgcaaatgtcactgtactttggtccatgatgaatttccaggagggcgagcagggtagaatgagtactgtccagtgagtactgtccagcagtgaccactattgtgccccactcctccctttcagaatagccgttggcatacagtaggagctcagtgagtgtgttgactgacattcgatctcatacacgcatgacccactgcattgtactctcacgtccacagagccctgtcattgtacccaggctccagatcttagaggcataagtccattttccacttttttttttgttttttttttttggaaatggagtcccagtcgcccatgctggagtgcagtggtgcgatctcggcttactgcaagctccaccccgcgggttcacgccattcttctgcctcagcctccccagtagctgggactacaggcgcccgccactacgcccggctaattttttttgtattttcaggagagacggagtttcaccgtgttagccaggatggtttctatctcctgacctcatgatccgcccatctcggcctcccaaagtgctgggattacaggcatgagccgccgcaccggccccatttgccactttataggaggagcttgtttacccttccctccagtgttcgagagtattctgtcacaggggagtgggtggcagtgactggattgtcagccttgtgccttccagaaaaacaagaattcattgtgctgtctccacccagtgttgaggatccccccccccatttcttttggtgaatggagcctctgtttctaacaactctcagcctttgaggggcttctgactggattctagaccagtctggaaggggccgcctgagaacaggtatacctcagggctagtttccatccacaggaagaattaagtctagttcagttaagcggtgtttatcacacttctactccacagacctttttagagtctctaagaaatggacatagtacctaatgcatgtcccagagaggcacacccagggatttggggagtcacacgtaggcagactccatcaactgggggatcagtaaaggcttcgcggaggagatgatgtcttagatggtcaagaggagtttgttggatttcagcagagaagaggccttgtgggataaaaagatgtagagatagggaggtgtgtcacggagctggagagtggagggaagggtaggacaggagtgacaggaggcctggcatggcagaatgaggacccgaactgcgactgcccctccacttacagatgccatatgcaagagtagcccaccagagcagtttctgggtaatcaagattaatgagccccttcccaaggcacacttcttacagctgagtgctgtgcatcacactatctcagatgcctgccgcagtcactgagtctatcctcatgtgctgtttgggccacaaatgacaaagtgttgtcttcctgttagatactactctctgagttttcttaaatcaacagagtcccatcccccagctatgccaaatatgtgagtcatggacatgtatatacatgggaatggtgtttatattctgctccccaacagctgaggagggtgggataatagtgcctggtgggcagagcgccaggagcagccctgtcctgcgtgggggtgtgagcggatgctctgggcactggtggtggccggaggagcacgtcagatcagcctggggaactttgagggtgtgccaggtgcctgagtattacttgtttgttgttggaagacaaacgtatgattcatctgcctggggtatgaggaagttaatcctgcctatcggcctctcctaaccttggtcttgttttctggcaggcagaggtggaggagacactgaagcgactgcagagccagaagggagtgcagggaatcatcgtcgtgaacacagaaggtacgccctccctcccgccatgacccgcacccaggcaggcccagaagcagccataacacagcatagcacttgctgttcactaagcccttcatgaatctgatctaattttaggcctttttaattt

SEQ ID NO: 26488 - DNA, 2300 bp, Homo sapien
ctggctgtcggggtctcccctctacacactctcttctgttgagtcgtggtgaagcagaaaccccaccgccttcctccatgggttacgataagattcatagcctctcggtggcctctaaaaatcttcctcgaacttccagctcctttatagaccacattcccagcagaagtgtgagctcgcttgggaccacctggtgtcacagtccaggctgctgctggtcctgctcctctacgtggcaatcggcccagagaatatgccttggggggtctcagcagaaactaagatgaaggtaattcaacttcaactccctagttcacaagaaatacgttagctgttttccctaaaaaaggctaggtgaaatagggaatttcatgattttttgtggggggcagggggggtacacaatctccctcttttcacccaggctggagtgcagtgagtggcctgatctcagctcactgcaacctctgcctcccaggttcaagcaattctgcctcagcctcccaaggagctgggattgcaggtgtgcgccaccacacctgggtaatttttctgtatttttagtagagacagggtttcaccatgttgctaaagctgggatccaactcctgggctcaagcaattctcccacctcagcctcccaaactgctgggattacaggtgcaagccaccacgcctggcatatttgatttttaaatactacaagtatttgggtaaaaattaaatttaaaaagtttgcaataacctaacaacaggctataatatgataagccaggggcttcccagcccttttctaatgaagtaactgaagaatgaggagcgttatctagaagtcagggcgaatctgccagagtcaaccaaagacagccccctgcaaacatgaacctgctctctagaaatgtacacaggtttgcgtcccggtggctccggggagaatgtggagccgagtggagtcaggagcgcaggcagccaggggagaactgatggtggcttgggcaagggcggtttcatggggtcggaaggggggattctgaagggagaacgccaggacttgctggggagggttggaaagtaaggaaatgagacatcaaaggagactcctccatgcctgcttgggcaaccaggtgctgccatttactgagaggaggctgactggggacctttgtggggaaagagcaccagcaatttggaaatggcttaatctgagcctgtgagatacccatgtgtttagaaagaatgtcggatggactgttgaatacccaactctgccaggccttgctagacataaggatatggagctatcagcctgttactggtatttaaagccaagaaggttaggtgcagtggctcatgcctgtaatcccagcactttgagaggccaaggcgggagattctcttgagcccaggagttcgagaccagcctgggtaacgtggtgaaaccccatttctactaaaaatacaaaagacagccgggtgcgatggtgagtacctgtagtcccagctacttgggaggctgagatgagaggattgcttgagcctggcaggtcaaggctgcattgcgccactgcactccagcctggccaacagagtgagaccgtgtctccaaaaaaaaaggttgtggaggctgggcatggtggctcacgcctgtaatcccagcattttgggaggccgaggcgggcagatcacctgaggtcaggagttcgagatcagcctgaccaacatggagaaaccccatgtctactaaaaatacaaaagtagccaggcgtggtgcacatgcctgtaatcccaactactcgggaagctgaggcaggagaatcgcttgaacctgggagatggaggttgctgtgagtcaagatcgtgccattgcactccagcctgggcaacaagagcgaaactccgtctcaaaacaaaacaaaaaaagcttctggagccccagttatcacgttcaagttccagatggcagctgatggaggatggggatggcaaaggatgtaccttttccctttaaggcaatttcccaggagtcccatagggcacttcctacttaggcctaattaactgaagttcagccacctgccactcctgactgcatggaagccaggtgcaaggagaaaggattttgaggaggggtgagtcaccagaacacatttgtttgctgcggagagatcgtaaggggcctcggagcaagtccatggggcgtgaggagggctggcgtcctgcgcacagtggaaggactggccttaggaacagggacagtgattccactcagcatagccagggagcggcccagatggcagggc

SEQ ID NO: 26489 - DNA, 2300 bp, Homo sapien
aattttttgtatttttagtagagacggggtttcaccatgttagccaggatggtctcgatctcctgacctcgtgatccgcctgccttggcctcccaaagtgctgggattacaggcgtgagccactgcgcccggccaccaagttttcttagcatatgtatcctcattttttgtttgaactaaataatttttatttatatatgacttcatatttagaataggtttaaatttccacacagctggagcttacgcggcttttgtctgtggccaaagaatatggttgaaactgatttgatatctgttgagatttgtcgtgcaccctagtagttgggtcatttttgtaaatgttccttgtgtgattgaaaataatgtgttggtctcacacaggtctgaaatttaaattttaaaagttaaaaaactaactgtcaggttttctattggggttcattgatcttgattagtaactgtattaacatcctctatgtccttttttttttggttgtttggtttattagttactcaaagaggtcttatgtctccctatgatggaggacctggcaatttctccttgtgttcttaatatattttcagcctcttttttttttttttcgagacagagtctcactctgttgcccaggctggagggcagtggcgcaatctcagctcactgcaacctccgcctagcaggttcaagcaattcttgtgcctcagccacctgagtagttgggatgacaggcgtgcaccaccacgcccagctagctaatctttgtatttttagtagagacagagttttgccatgttggccaggctggtcttgaattcccagcctctagtgatccacccacctcggcctcccaaagtgctgggattactggcatgagccactgcgcctggcctattttcagccttaaaaacaaaaaccctggaacatagaagttcagaactttcctctcttcacagagttcctcctcgcatcatttcatgttgatcctcttatccccagtgtcttctgcctgaaggcctattttgtctgagttttctataggtacatcttttggttagtttttctctagtacaccttttcccatcgttttactttttggtgcccttaggttttaaatttcctcttgtaaatagcatagagctgcatcttattttttcttggccaatctggtcatctgtgttttaagaggtgaatgtaaaccacattttctacctctggttttgtactatatatttaccatcccttttactttgcttcctttttctccctttctgccttccattatagttttaatacccatcactacccttttctctgcattggcagttatagttccgtttgtattcttttggtgatcctcttaaatatctgaaatacacacctgactttacaaagccagacaatgctcagtctctttaaccccctctcaaattgccctctcagtcttccatgttcttgtgtctcatgcatcttgtttctgtggcccacaaattaatcattattattcatattgcatattaaatgcttgtttagattcacatgtttaccaatttgctcaccatttttccatctaatttcttccttttgggttccatgtccttgttactaaactacattctttaaaaattatttcggcggccaggcgtggtggctcacacctgtaatcccagcactttgggaggccgaggcgagtggatcacgaggtcaggagatcgagaccatcctggccaacatggtgaaactccatctctactaaaaatacaataattagctgggggtggtggcaggcgcctgtaatcccagctactgaggaggctgactgaggcaggagaatcgcttgaacccgggaggcagaggttgcagtgagctgagatcgcaccactgcaccccagcctggcgacagaacgagacttcgtccccctcccccctcccccaaaaaaatgttgatcttcagtctgcgcattctgctctggattttaagcatcatttctggcagctctttttcaggaactgtctctgcaggtctttcagtgttcgcctctggagctctgctcgggcccgcgagttctcctggcgttgccatctgtgcccttttccttattccccatcacctgtctctctggtgagctgcttccgatcagcctccaggtccacgatttctcttctgttgtccttttctgccttctcacctcatcctctgagacctgaatttcgatggctctacttttcaattatattattctttttcaaacctgggcgttcatttctagcatcctgttctatcctgtgtctgactgtg

SEQ ID NO: 26490 - DNA, 2300 bp, Homo sapien
gagacagagtctcactctgttgcccaggctggagggcagtggcgcaatctcagctcactgcaacctccgcctagcaggttcaagcaattcttgtgcctcagccacctgagtagttgggatgacaggcgtgcaccaccacgcccagctagctaatctttgtatttttagtagagacagagttttgccatgttggccaggctggtcttgaattcccagcctctagtgatccacccacctcggcctcccaaagtgctgggattactggcatgagccactgcgcctggcctattttcagccttaaaaacaaaaaccctggaacatagaagttcagaactttcctctcttcacagagttcctcctcgcatcatttcatgttgatcctcttatccccagtgtcttctgcctgaaggcctattttgtctgagttttctataggtacatcttttggttagtttttctctagtacaccttttcccatcgttttactttttggtgcccttaggttttaaatttcctcttgtaaatagcatagagctgcatcttattttttcttggccaatctggtcatctgtgttttaagaggtgaatgtaaaccacattttctacctctggttttgtactatatatttaccatcccttttactttgcttcctttttctccctttctgccttccattatagttttaatacccatcactacccttttctctgcattggcagttatagttccgtttgtattcttttggtgatcctcttaaatatctgaaatacacacctgactttacaaagccagacaatgctcagtctctttaaccccctctcaaattgccctctcagtcttccatgttcttgtgtctcatgcatcttgtttctgtggcccacaaattaatcattattattcatattgcatattaaatgcttgtttagattcacatgtttaccaatttgctcaccatttttccatctaatttcttccttttgggttccatgtccttgttactaaactacattctttaaaaattatttcggcggccaggcgtggtggctcacacctgtaatcccagcactttgggaggccgaggcgagtggatcacgaggtcaggagatcgagaccatcctggccaacatggtgaaactccatctctactaaaaatacaataattagctgggggtggtggcaggcgcctgtaatcccagctactgaggaggctgactgaggcaggagaatcgcttgaacccgggaggcagaggttgcagtgagctgagatcgcaccactgcaccccagcctggcgacagaacgagacttcgtccccctcccccctcccccaaaaaaatgttgatcttcagtctgcgcattctgctctggattttaagcatcatttctggcagctctttttcaggaactgtctctgcaggtctttcagtgttcgcctctggagctctgctcgggcccgcgagttctcctggcgttgccatctgtgcccttttccttattccccatcacctgtctctctggtgagctgcttccgatcagcctccaggtccacgatttctcttctgttgtccttttctgccttctcacctcatcctctgagacctgaatttcgatggctctacttttcaattatattattctttttcaaacctgggcgttcatttctagcatcctgttctatcctgtgtctgactgtgcctcccgcaccttctcccttctctcgccctaagccccgtgaaggcgccgggcctttggctccggctgtttcccacggcgcccagaaccgcgtcagtcctgacacagactcggtgagggcgggaagtggtgccgtggggctgcagcctggcccgcccgctccatcggcctagggcggccccaccgccctccgggccttaccttgagttcgggctgcgggagaagctcccgcgctgcccatgacgtcacgggactgtgacgcgcccagaagccccgcccctcgcgtcccggtccgcggacccaggctctctgcgccgtgacgtcacgggtccgggcgggcgggttgtgcgtcggcccaatgggagcggcgcactggcctcccctttaaggaatgttgtgacctgacgtcaccgggcgagttacctcccgcagccgcagccgccgtgctcagcgcgagccccggagcccttgagcgcgaggcgcggagcccccggagcccccaaaccgcagacacatccccgcgccccagagccccggcctgcgcgcccagccgggcccgcgcgatgccctcagaccggcctttcaagcagcggcggagcttcggtgagg

SEQ ID NO: 26491 - DNA, 2300 bp, Homo sapien
ttgaggaaactgaggccaccaccacctcccccagatttcaacctcccctagcctcgtccctggtgccctggatgccaggctcacacctcttacctctgctcttcccagcagtgaggttttcagagcatggatctgatcacatttatcctcagctcttaaagccaaaggtgcagtctggacctctgcataagaggcccttgaaggcctgtggtctgaccactgctgtctgaattgccctcattccctctcaagtggtacagccagtcccactgagctcccagcagcacggtgttcctcctttgctccctccttcctcctctctctctctctctctctctctctccctccttcacccccacccaggtcttgctacctaaaatcatagaacccagttagatcctacccatccctcaggaccccacttagaggccaccttccccaggaagcctccttaacagcccagctctgggctcccagctcgtcaggctgccctgtcctgcccatgtcttttcctttctctccacagaccgagggctccttggaagtacacctctgtctcattcacccctcgcagagtgcctggtgaatagtaggaacctaattaacatttgcaaataaataaattagcttcccaggagttacgggatgtgcctgaggccagcgagccaggacagacagggctggagtcgctatagagtttgggcttccagagccctggccttctgtggcctttgtcctgctgtatgtagcctgggctcttcctgtcactctggttgttggggaggagaataggctgggaagggcctgtgagggacaagcttgggatgctcagtgctggaaggacaaaggaatgaactaagaccttgacagaattacactagttgggaaaagcaaagtaaacacgcacatccagcaggatgaggacaagggctccaggttggccacaggcaccgcatatcgggagcaacgagccttcccacacacagacctgggatcttgcacagcccaggccacacacaaccggcaggaagaaacctgaaatgggtctcgagccaaccccaaatgggggctacacaccactcagccactaatgacccacccaacacgtctccaagcatttcctcataggtcccatttcccagaatgacacaccaggccaactgagaggcaactccgggagacaggattgtggtttcacctgtgttgcagtgaacagtgagtcccaggcaggggacaggcagcatgcaggaggttggtgtcagacctcgggcttcaggcctcactcaaaacagaaaggagaatggccaatgcaaggccagcccagtatctgagggtctgcagtacagggaggggtcagggctggcccctcatggcaaataggcagtggcttgaggagtagggttccagatgatccagatcctgcttggaagggtgggtggttggccaggtgcggcagctgacacctgtaatcccagcactttgggaggctgaggcaggagtttggcttgagctcaggagttcgagctcgtaacaacatagcaagaccctgtctctaccaaaaatttaaaaagtagccaggtgtgggggtgtgcctgtagttctagctacttgggaggctgaggtgggaggacctcttgagcctaagaggttgaggctgcagtgagctgtgactgtgccactgcaccccagcctgggcaacagagcaagaccctgtctcaaaaagaaaaaaaaatgaaataaaattaaaaaaaatttttttgagatagcattttcactcctgtcacccaggatggagtgtagtggcgtgatctcggctcactgcaaccttcgcctaccgggcttaagcgattctcctgcctcagcctcctgagtagctgggattacaggtagcttgccactgcacccggttagttttgtatttttttgtagagatggggttttgccatgttgcccaggctgttctcgaactcctaagctcaagcgatctgcccgcctcagcctcccaaagtgttgggattacaggcacgagctactgcaaccggcctactaaaataaaatttaaaaaaggaagggcaggcagacgagaagtctgctttagatgtagacacagggcaggagtggggctctcaggccagctactgggatacaagggtaagggggctctggctctgaccccctagtaatccagtagactagccagaggcccaaatcagaccaaaacagggattggcacggggaggtcagggtgtacagaaatgtgttagagcattggtcataaaatgtggtttctgatgccagct

SEQ ID NO: 26492 - DNA, 2300 bp, Homo sapien
tctgattaatttctcatcctttaggtctcagctcaaatatcacctctttctagagtcttccctgatcaccttgtctagtgttaccacccttattattacaccagcagttattctcagtcatacactgtttcgttttctttcttctctctctttctttttttgagacagagtctggctctgtcgcccaggctggagtgcaatggcgctatcttggctcgctgtagcctccgcctcccaggttcaagtgattctcttgcctcagcctcctgagtagctgggactgcaggcacaggccaccatgcctggctaatttttgtaattttaatagagacgaggtttcaccatgttgggcaggctggtttcaaactcctgacctcaagtgatccggctgcttcggccttccaaagtgctgggattacaggcgtgagccactgcgtccagcctgtttccttttcttcacaaatatgaaatttccttgcacatttaatattattattgctaatatttaagcacttactatacattaattaatgaagtgtgctgcttaatgcttatcaatgggctctccaaaccccaaacccctgatttgtagtgtttgctgattcctgtggtgtaaacactcgcattgggagggattttcaatctatcaacctgaggaaactgaacaccaccatttgggaagagaaagagatagtatttgctgtactgatacagcggtggtaaataatctcaaaagcacatataaaaaaaagtgtagtaaaataattagaaagtgacgtgttgaatatgtattccgttgttttcaatataagttatttaactgtaggtttatatgtcttaattttcaaaaatgcctgtgtttaaaagcgactggcaaaatttctaagccttccggccaggcacgatgacacaagcctgtaatcccagcactttgggaggccgaggcaggcaggtggatcgcctgaagtctggagttcgagaccagcctgaccaacatagagaaaccctgtctctactaaaattacaaaaaattagccgggcgtgatggcgcatgcatgtaatcccagctactcgggaggctgaggcaggagaatcgcttgaacctgggagtcggaggttgcagtgagctgagatcgcgccattgcactccaacccgggcaataagagcgaaactccgtttccaaaacaaaaaaaaaatttctaagccttcctcaactgtccctagttagcctataatcagcacatttttcagcacacaagggttaagcgacttgttgaactagctaataaatcagtctactactccaaaacgcatctgtagaacctaacatagtgcctggaaaatagttggcgtttaacaaacaactgccagaataaattttttaaaaaatacacatttaacactctttaaaaacataaaaggtaccagcctgggcaacatggcgaaaccccgtctctactaaaagtacaaaaacttagccgggtgtggtggcgcgcacctgtggtcccagctactctggagcccgggaggtccaggctgcagtgagctgagattgcgccactgcactccagcctgggcgacggcactgagaccctgtctcaaaaacaaaaaacataaacattttgggcagggtgcggtggctcacgcctgtaatcccagcattttgggaagccgaggcgggcggatcacctgaggtcaggagttcgagaccaacctggccaacatggtgaaaccccatctctactaaaaatacaaaaaaaaaaaaaaaaaaaaaatagccgcgcgtggtggtgggcgcctgtcatcccagctacccaggaggcggaagttgcagtgagccaagatcgcgccactgcactccagccggacgacagagcgagactccgtctcaaaaaaaataaaaataaaaataaaaataaacattttggcattgaaaacatacacgcaagagtgaatttaacatctgtttaaaagtctctcacaatcccaggaaggcgactacttccgcttctactttcagcagcgtttcagccccgctatagcggcgcggcttcacaaaacacctgcgatcgtagaaggtttcgccccaccttctgcatacgcagcttgaggcgcccgctttccgtcgctccggcccgcctcgccgcaaggctttctgggagccgtagtccccacgtctggcctctccggcgccagcggcagcgcgcgcccacccgcggaactacagagcgtggcgcacagcgcgcgaggctcctccgcctcgccttccctccccgcccgcgcgcccgccccagttatc

SEQ ID NO: 26493 - DNA, 2300 bp, Homo sapien
gaacaaacaagtggcttgacaggagagacgtgttagggattatttaattaaagtcagcaagtaggtctgaaagggtatgaggttagcaggaagtggctgtgatgggcagaggctcagagttgcatggaatgaggacactttgggtataacactccaagggccacaatgccactcccctctccacccctcagccttgggttatttttttctggcttcttcccctgtcgctagggttaaggagtcccttgggggtttcagatgaggctgggatagagttttatcactagagtgccgggcacggtggctcacgcctgtaatcccagcactttgggaggccgaggcaggcagatcacaaggtcaggagaccgagaccatcctggctaacactaaacatacaaaaatacaaaaaatacaaaaaattagccgggcgtggtagcgggcgcctgtagtcccagctactcgggaggctgaggcaggagaatggcgtgaacccggaaggcggagcttgcagtgagccgagatcgtgccactgcactgcagcctgggcaacaagagcgagactccgtctcaaaaaaaaaaaaaaagttttatcactagatcattaacctctggcctaggtcacctccggcctccttttgggctaggtgggcagttctcggaccctcccccaccagccctgctctgctgacctagaacctctggccctggagattctgatatgtgtatttgtggtctcttctcgggcatctcccaggccactgggagagctggggcctagagcgtggggtgggtggaatcctgagggcagagagtgtggaagaatcttacaatggcagctctagagggaagcctggatatgtttgtttgacaaactgagacccagagaggtaacatgacttgaggtcacacagcaagtctagggcacagtcaggactgaaagccaggactctggggaggctaaagcgccctgaggtttagaccatctggttcatgtagagaatggagagggtcagggctgggagctatgggttcaaatcctggctctgccattgactgtacttttgtgacctaagaaagtcacttgagctctctgagtctgtttcctcaactgttaaacgggacaatatctaccttttgggttgttgtgaagataaaaaaacacacccatagcacaggtcgtggcacacagtaagtgtgccaatacatgtcagctagtggtatggtggtgcaatagtaggtgcctaataaatgttgaatgcattgttgaacatgagttcacacgctaacagtgagattgtgagactcagctttcccacgtgtaaatcaggactcataatcagtccctgtcctgccacttctttacagccccggtagcaacatagattaaataaggtatgtaaacgttcaagcgcggagccgtctcaggtcaatgtttactcagcccagggcaattcctctccaagtcctactctgcgaaatttcacgtcagcttcactaacttctctacattcccagatgctccccgggaaccgggggttggggatgtccctcttttctcaagcccgccgagctgaggaaaaacggggtgggaaagcagagtgtgtaaggctgaggaggtgagccagaggggggagggagagcaggaataagggcagtggggagaatgcaggtgcacggacgtggtgtgggtcgagaacagggtccgcatcgggggacttggatataggatgcagtgaaaggatttggggagcagtgggagaggtgagggcgctgcgatccgggaagaatcaggaaaataaggagccggtaggagggagtggagatcctcctcgcggagagctcgccgcggcgcagggctcccagctccccgcagctgcctccccgaacactcaccctcccggttccgagaacgtttcccggcccgagcgcccggcccgcaaaccgggaggggaggggaggggaggggcagggggggatccgcagcccgggattggccgccgccccgccagccggtgacgcgaggcgggcgggcccctttgtgacgtcacaatcagctgtttgaacgttccaatttgtgccgtgagccccgccgcagcggccgcacagactcaaagccccgcgggcgagctcagcagcccggagcgaccgcggccccgccgcctcccccgcgagtcccggcgatgcggcccggcctgtgagcggccggcgaccctgggacgccccgccgcacaactacctcaacgccgtgccgcccccctcccgcccccaggtgagtcccgacccgggtgggcctgggggct

SEQ ID NO: 26494 - DNA, 2300 bp, Homo sapien
ggattctacacattgtattcattgataccatggaaatctttggccagaagacattaattgagtgctgagtctgacccacaaaatttggtagctgctctatgaaaatgttgagtcagcatttcttttgactgccagagccagttgttcttattcctacaccttcttaaaacctccctaatgtactcttcatgcaacaatggaataaatctagtttgtggaactggaattgtatcccatatatgcccagctgtatgcccactttttcccacagaaccaccgttattcttggtttgcgtatctttttatcttttctgattgtaaggttttggttctaaaatgccaagtaaaatcttcacaaaaaaagagaataatttgagatgttgccctctgcatatctagaagacattgtccttcagagttcttttcccaaaattattttttattcctgagggctatgcttctgccttacttattctccagctgtggattcatggaaaatatttctccaaatagagatttgcatgtaagaaagtaagtgcaaattaatatccataaaaacttcaatgccctaattttattttcaatgtgtatatcagcttccattagctcctactgtttattaaactgatttacacctgaagggcaattttaattcagtcggtttcccccaaaggattaagcctgaaggatgcggcgtagtgtatggagccaatgaattggaataattttaaattcctctttcttaaggaactgaatcctagaattttatattttacttctgttgaaagaataaaaaggctgtcttcagtgctgttattttcaacaaaaccacatcttaaaaaaattattcctgtgctaacagaagaagtgaatcctaaatgctttacttcattcacaagtacattgaaatattgattatgactacatgagacctgaatcttgggtggccaggcacttgatgttgatggagtttttctcatttcatctgaatgtttggctggtatagacacagccattttcagtgcatagcacagaaaatcaggctcttagtacagtcatggctcattcagatcctacacaccgaggagctccaggttttttgatgctttgctttttgcttccttaagcactgtgccccttttgcttatgtcaagtaatgaggggctgccccctgccccaggagtgggcatgcctgagctgtttgtgcatagtctgtgccacctagatgagtattgcttggctatactctaaaggtagcaacattttcttgctgaaaaatctaacttccctaatttggggggcttgttttaggttatccttctcaaccagttgaacagaggccacttcagcagatgcctcctcaactcatgcagcatgtggcacccccaccacagccaccacagcagcagccacagccacaactgcctcagcagcagcagccaccacctcccagtcagccacagtctcagcagcagcagcagcagcagcaacaaatgatgatgatgctcatgatgcagcaggatcccaaatcagttaggcttccagtctctcaaaatgtccatcctccaaggggccccctgaaccccgactcccagagaatgcccatgcaacagagtggcagtgtgcctgtcatggtcagtctgcaaggacctgcctccgtgccaccatcacctgataaacaaagaatgccaatgcctgtgaatactcccttgggaagcaattcaaggaaaatggtctatcaggagagcccgcagaatccttccagctcgccactggcggagatggcctcactccctgaagcaagtggcagtgaagcaccatctgtcccaggaggcccaaacaacatgccttcacatgtagtacttccccagaatcagttaatgatgacagggccaaaacctggaccatcgcccctttcagcaactcaaggtgcaactccccagcaaccccctgtaaattccctgcccagctctcacggccaccacttcccaaatgtggctgcgccaacccagacatctaggcccaaaacaccaaacagagccagccccagaccctattatcctcagacacccaacaaccgccctcccagcacagaaccttcagaaatcagtctgtcaccagaaagactcaatgcctccatagcaggactcttccctccacagattaatattcctttacctcctaggccaaatttaaacaggggctttgatcaacaaggcctaaatccaacaactttgaaggccatcgggcaagcaccttcaaatcttaccatgaatccttccaattttgctaccccacaa

SEQ ID NO: 26495 - DNA, 2300 bp, Homo sapien
ggcgacagagcaagacactgtctaaagaaaaaaaaaaaagagagatgctccttctcttctaggtgtttaccacaaaggaacacaaaatcctaaaaaagaaaagtgaaaaattgtagacacccagagtctctattttattaattgaagttggatcatgttagagaagaattcaaagttcgcatgggctatgggagagttctgaaggaaatatgcaaattagtcatggaaaataggtccagggccccatataatcaaagagaattagcgaacaaaaatattatgcgggcatatataaaataaaactgtcaataccatatgtatatacagcaacacaattcatttgttctgggtttttcttttcttttcttttcttttttttctgtttgtagagttggggtttcaacatgttgcccaggctggtcttgaaatcctgagctcaagtgatctgcccacctgagcctcccaaagtgctgggattacaggcgtgagccaccgcgcccagcctattctgggtttttctaatgcaggaagacctgaccttatctgtgccatggacccctttcagaataatattttttaattgtataaaataaagtacattgaattataaggaacaccaattatattaaaatacagtttccaaaatatacaaatctaatatgcatatacttgtttatcagcacgttaagaaatcagatttagtgatggatccgataattataatttcaaagacatgatgcgcataaaggctacttcaagattatatgcaacaattgtagtatgatataaagatatttgagatttctgttgttacagagtcacagaactgctaatactagaatggtatgttacctacactcatatttgaatagaatggtaattttcagttaaaagttagtaaaagagatttttttctccctgtccaagttcacaagccccactgaagtcctatctatagactcctgtctatgaaccccaggttaagaaaccctactcctactgccaggcatgtcttccattcagcaaacgtttactgtgcctcaaggcatctactgcatatcaagcattatactgggctctgtagcttcagaagtttttaaggcagagtcacttcactttgggtatgcagccccatgagtgaagtagacatgtgaacaatcatagttcaggatggtcgatgccaaagaagagttattaaacgctataaggacacggagatgggtgtgtctgctcaaagaatcagggaaggtgttgcgaaggggtgacatttgagatgtgtcctaaaagatacaggaatttgccagtgaaatggagagaagggcctttcaggtaaagacacgttttcagggaatgtattaataactgaatgtggctggagcatagaatgtgtgtgaaagcatggccagagatgagactaggaagaccatgttaggaacctggttgtgaaggaccttgctaaggagtttggactgaatccttagctgagagaggcattcaagatcttcgagaaggggagtatgtggtggaggtttaatttctaggagataaatggatgttctttggaaggagggtagactgaagaccagagaggtaatgaggatctgaactaaggcagagactgtgggcactgagcagagttagaagtaatgaggatctgaactaaggcagagactgtgggcactgagcagagttagaagtaatgaggatctgaactaaggcagaggctgtgggcattgagtggagttagaatttgcaggtgttgattattgacattgtgagtggcttagggggagttttttaaatttctggtttggggtggtgtctgtcaaagaggtttaaaaaagtgaaaggaagtctgggcgtgttggctcacgcctgtaatcccagcactttgggaggccgaggcgggcggatcacgaggtcaggagatcgagaccatcctggctaacatggtgaaaccccatctctactaaaaatacaaaaaattagccgggcgtggtggcgggcgcctgtagtcgcagctactcgggaggctgaggcaggagaatggtgtgaacccgggaggcggagcttgcagtgagccgagatcgcaccactgcactccagcccaggcaacagagcgtgactccgtctcaaaaaaaaaaaaaaaagtgaaaggaaaatgaggggagaattctcattgataataagggcgaaaaggtttttttggcagagtaatagagttttggaaaccattgcaaagctgtcaagtgtggtgtagtttttggttaaggaaatcagaggtgtcagcagacataaaa

SEQ ID NO: 26496 - DNA, 2300 bp, Homo sapien
gatgctcagaacagaccccaactcccattttacagatgaagatgctcaagttcagagaggcaaggacagctatcaagagcgaaagccaaagagagctgccatacaatccagcaatcccattcttaggtatacaccggaaagaaaggaaatcagtgtatggaagagatctgcactctcatgtttactgcatccctgttcacaacagccaagatttggaagcaacctaagtgtccatcaacagatgaatggataaataaaatgtacatatacacaatggaatactattccgccattaaaaaagagtgagatcgtgtcatttgcaacaatatggatggaactggaggtcattatgttatgtgaaagaagccgggcacagaaagacaaacttcacatgttctcacttatttgtgggagcaaaaaattaactattttttatttttttttgagacggagtctcactcagccacctaggctggagtgcagtggcgcgagctaggctcaccgcaaccaccatctcccaggttcaagagattctcccgtctcagcctcctgagtagctgggattacaggcacccgccatcatgcccacctagcttttgtattttagtagagacagggtttcaccatgttggccaggctggtcttgaactcctgacctcaggtgatccgcccatcttggcctcccaaagtgctaggattacaggcgtgagccaccatgccgggccaggagcgaaaaattaaaacaattgaactcatggagatagagaatagaaggagggttaccagaggctggtaagattaatggggaggtaggtgggaagtgggaatgattaacgggtacaaaagaatagttagaaagaataagacctagtatttgctagcacaagaaggtgactacagtaaaaaacaattggccgggcgcggtggctcacgcctataatcccagcactttgaggggcagaggcgggcggatcatgaggtcaggagttcctgaccagcccggccaatatggtgaaaccccatctctacttaaaaaatatacaaaaattagctgggcgtggtggcatgcgcctgtagtaccagctactcaggaggctgaggcaggcgaatcccttgaaccagggaggcggaagttgcagtgagctgagatcgcgccactgcactccagcctgggcgacggagtgagactccgtctcaaaaaaacaaaaataaaacaaaaaacaaaaaaaaaaccacacacacacaaaatttacttgtacattttaaaataactagagtataattgggttatttgtaacacaaaggataaatgcttgagttgctagataccccatttaccatgatgtgattacacatcgcatgcctgtatcaaaatctcatgtaccccataaatatattcacctactacgtacttacgaaaatttaaaaaatacatcagtgtagtgtgggaaaaaacagaaaatttttaaaaaagagtgaaagccagatatgaatccaggcctgtatgacagacatgaagtccagtgctgaggaggcctttctacgtttgggaagaggggaggggccacactcgttcgatcaataattctatttactgagcattttagcttgctagggaggtaatgatgggaaaaagaagagagggatttagaggcaaataataatgaaagcttttatctatatcccattaagcttattattagacagtatgtgtcaggcacggtgacaagtgctttccaagcccacctccatttgctcttcacaagcactatgattttccccatatttcagatgggtaaactgaggcttggagttgccatgtccaaggatactcagagcgctcgcaaaagactgtgcaatgtgtgcttccgaagtgggactcactggcgagagaatagccctggaaagccgacagagacccacgagatcccagcactaagcactcagcaccgaagggagctggcgcgcgctccacctcgcgctcccggggacgtctggtcacgtgggcaatgccccgcccctcgagtccgccccgccccctctcgcgctccctccctctctccctccctccccctccctccccggcccggtccggcccatccccctccccgccggctccgtgaggccctgccgggtcgggctgcgggcggccgggcgcgggcggcgggacagacgggcgcacgcgaggactgacggacggacgcaccgagggcggcgggcacgcacggcccgggccggcgctccaaggcccgcccgggagggccggggccgcgctcaggtgaggggacggcggcgcgggc

SEQ ID NO: 26497 - DNA, 2300 bp, Homo sapien
tagagacagggtttcactgtgttagccaggatggtctcgatctcctgacctcgtgatccgcccgcctcgtgcctcccaaagtgctgggattacaggcgtgaaggggtctgttttcagaaaataaagttctggcggggcgcggtggctcacgcctgtagtcccagcattttgggaggccgaggtgggcggatcacgaggtcagaatatgaagaccatcctggctacacggtgaaaccctgtctctattaaaaaaaaatacaaaaaaaaaaattagctgggcgtggtgggctcctgtagtcccagctactcgggaggctgaggcaggagaatggcgtgaacctgggaggcggagcttgcagtgagctccacttgcaggcagagcttgcagatcgcgccactgcactccagcctgggcaacagagcgagactctgtctcaaaaaaaaaaaaaaaaaaaaaaagaaaagaaagttctattggaacacatccacagccatcaggatgttgtcttacacattgtctatggctgcttttgcacttcagcaacaaagttgagtaattactacaggaaccatatgacctacaaaatctgaaatatttactctctggtcctttgtaggaaaactctgccaacccctgctctaggaagaatatataggccttctttcacctcctaaaacatgacacattccttctcaccacaatacctttgaacatactgttccctttgcctagaatgacattcccacatcccatatctaatcctttcctgtcaatcctattcattctcatgaccttctcagggaagcttttgcggatcctcaaactagattaactttcttgatatacattctcttagtatccctcatagagtttattgtgatggcaattacccgaattatctgtgctcttatttctttaacatttgactgccccgatagactgcaaacccattaaaaagtctgtcttggctaggcgcggtggctcatgcctgtaatcccagcactttgggaggctgaggtgggcggatcacctgaggtcgggagttcaagaccagcctgaccaatatggagaaaccctgtctctactaaaaatacaaaattagccaggtgtggtggtgcacgcctgtaatcccagctactcaggaagctgaggcaggagaatcgcttgaactggggaggtggaggttgcggtgagctgagatcacgtcattgcactccagcctgggtgacaagagcaaaactgtctcaaaaaaaaaaaaaaaagaaaagaaaagcctgtcttgttcagtgctgaatctctagtgcctaacaaagtacctggaatgtaatggatagaagaatgtatgcatgaatgatattatctataaaaggtatttattgtctgatatatactatatgacgtatactttataacaaagagttcaactaataggtgtggaattggttaagagcacaaattccagagttggacatgctgagatgaaccccagttcttccatttaatagatgaagaaccttagacaagtcccttaacctcttttggcctgtttcccatctgtaaaatggcaataatattagtacctacttcatgaggcttgtaataaagattagatgctatatattatagttattggtgttatgaattattattattggtgcatgtcttagctggacagatattattatgagtccttcaacgttgactccaggttactcttgaatcggttactgggacagggtgagccgaggtctcctctcccactcccactctcaacccagttaaatataaattaaaccagagccatggttaagcaacattctttctttaatttccctttgcaaatggaagcccctgagctggtgcccacccccacccctaccccataccctggggacccccgatgcaaggcccccacctcaacctggtgggaaaagaggagcaccccctccctatgatggtccattaaaaaattcctagtcatttaagaaatgaggctgggaatgggagaaaggaactggaagacaaggcccaggtcaggccagtctgaagatgttggggttgtgagacccttgagaagggtttgcaagcacatccctaagctcggggccagcatggctgaaggaggagaggtgacacacagacagatagtctgattcctcaaggtcctgcctgcctggctgtactgtagatgctgacactcaccaccaccaccaccaccaccaccaccaccaccaccaccacaggcctcctgatggagaattttccagttactctgggattgggtttgctaagcatcccc

SEQ ID NO: 26498 - DNA, 2300 bp, Homo sapien
caccaaatttcacccccttctccctggatggagtcagaagagcaaagctaccttatggaaaacctgaaagtgttttcagaagctttttttttttttttttaactagaaaaagaaatttgtaaaccataaattaagatgcacaggtggaggtatactgtcatcaattaaggcagagatatttcaacttctaggatcataaatccctatgggtctgatgaaaagccttgcaccctctgtcctccaaaaatacaccctgcactaagaactcttagaagttacaagctggccacccatgggcaacacccagcacacagactggtttggtttagacactgaactgtcttaaaattttgtttgcttttgttaaaaagttgagaattttcataaaaatccagatttccaacatctcttgaacaatcgggaaatccgataacaacttgggcccgcattctcacatggctgaagttacctggcgtggaatagaagctgcttcccatgatgggcatgcactgtccagtttgccgtagtttctaccacttcctcttctctgtcctgcttgccttagtttgtcatttggctgtgggcatttaagtttgcagcccccatcttagacgtaaataagctacagaaaaggaacaagctgacaaagttcctatcttggctcctgtaagaccagctctccaagccgtaccaaagaaattcctcttttggttttgcatgttctatccttacataatccagtcctgggggaggggcaagggacataccaagtagacaggtgcaggaagctggcaggggtccagctctggtccagggtgggggcatggggcagaacatcctgttctgccagtctctgggcttttcctaatcagggattaaagtctccagtgacaggatagaagaggtccatggaccctgggtctccaaccctcttggttttgctcccatcctcttagggtggctgagtctgtgaatccatgctggggagggagctcagacacctgaccccaaatgaaaaactgagcctacagctctcaccactgggggtggaggggcagcagattcattgtacagaggggtagcatgttatcatcacacttccccttctgtgtctctcccagtgggggcgtgatgctggtacatgacatccgacgaaatgagagccacctaattgatttccgggagtccgcaccaggggccctcagggaagagaccctgcaaagatcctgggagaccaaggtggggaccctggtgagaagagagagttcaggggagtctctcttcattgcccttctgctaacccaagcattaatttgctaagtatttaccaggggagtgggaaaaagagttgagcaggattctcttaggctatgagagagtcaggcagcccccaagataaaataatgaactagaaaatctggaaccttacttctctgggaatcttacctatctggcacgtgggaaggaagaaaaaaggctactgagtaccctgaaatgtcacgaagttgatgcaatgaaactcacacatctcactctgagccagttgactataactttcccagcccttgatatattggaagattagaggggaattgccagaagtaaaccaactgtctgctgaaagaaaaagaagatatcgaataacttggaaaaatgggtacttagtgcggtggcaaaagccaaacacacccctgagtcttcagagctcagagtaatggtggggtgaaactgaataggttaaatgaaggtcctttgtccaccgttttaaaaggtagggttgcctgggcacagtggctcacacctgtaatcccaacactctgggaagccaaggcaggaggattgcttgaggccaggagtttgagaccagcctgagtgacatagtgagactttgtctctacaaaaaatgctttgaaattagccaggcacagtagcatgcaccaaggatcgcttgacttgagcccaggagttggaggccacagtgagctatgactatgccactgtactccagcctgggtaacaggaaaaaaaaaaaaaaaaaaaaaaaaaggcaggggttggtgaaatccaatgtagacaggtgtctttctacactggttatgtcctggctcttaaaagagttttgcttaatttataaatcccccaactacggcagctaaaagaggcctttctgcatttgctgataggaagtcagggagatgggaggggtgcctgcttgggaaagcttgtccctcccctgggatacttggcctgtgtctctcccctgtgccagccatccctggcttggggctctgcggagttca

SEQ ID NO: 26499 - DNA, 2300 bp, Homo sapien
cctacagtgcactgggtgcacatcacctcatggaatccttgtacccctatcccaccagttagggattagttccattactagaatgaggaaggtgaggtgcatgacttgactgacttgtccatagccaccagcaaatagtgagctttcagttctctcctacctccactcttatcgtcctccagtttgtctccagacagtagccagagggatcattttaaaacacaaaacaggccgggcgcagtggctcatgcctgtaatcccagcgctttgggaggctgaggtgagtggatcacttgaggtcaggagtttgagaccagcctgggcaacatggcgaaatcccatctctacaaaaaatacaaaaattagccaggtgtagtggggcatgcctgtagtctcaactactcaggaagctgagctgaggtgggaggatggcttgagcctgggaggcagaggttgcagggaggcagaggtttcagtgagctgagatggtgccactgcactccagctggggtgacagagccagaccctgtctcaaacaacaacaataacacacagaacagatggtttcacattcttgcttaaaactctctagtagtgggctgggtgcggtggctcacacctgtaatcccagcactttgggaggctgaggcaggtagatcacctggggtcaggagttcgagaccagcctggccaatatgctgaaaccctgtttctactaaaaatacaaaattactcaggcatggtggcatgtgcctgtaatcacagctactggagaggctgaggcaagagagtcgcttgaacccaggaagcggagggtgcagtgagccaggattgtgccattgcactccagcctgggcaacaagagcgaaactccatctcaaaaacaaacaaaaatagcctctcgagtagtgacctcccatagtccttagggtaaaacccaagcttctccccaggctagtagagccccacatatcttcctttttttttttttttcttttgagacagagtctcactctgtcacccaggctggagtgctgtggcgcgatctcggctcactgcaacctccaccttgtgggttcaagtgactgtcatgcctcagcctcccaagtagctggaattagaggcacacatcaccatgcccagctaatttttgtatttttagtggagccggggtttcaccatgttggccaggctggtctcaaactcctgacctcaagtgatccacccgcctcggccccccagagtgctgggattacaagattgagccactgcgctcagtatgtatctggcctagcttccacccttactactctttccccatgcctgctacaccagagccgcccaggccttggttatttttttttctaatgtgccaagctcattcccactttagggcctttgcatccactgttccctctttccagaacattccacacacatactctttgctctacattatagctggctccttctcatcccttagttttcagcttaaaagtcacttcctgagaggccttccctgatttctgcagctaaggaatcctccctcccctaccaccattattctgtcatttcctcctttttcttcatagcacctgccacaacttgtaattatagactcctttgcttattggctttttcttccagggctctatgaaccacatgagggcaggaactatctgttcccgtcccctggcacctagcatagggctctccatatttaaggaatgagtgagctgataactgaagtgaggttggaaggcagggtccctccactctgtttatgtagctgcctccttgcatggaaggctgggccccaactggggcaggatccgatttccactgagggctggaacccccaccccaccccccaggaagtgttctcagccctgggccctgggtgccaggaaatttggcctaggtatcagggaggggcgggaatccagcctccctgctgcccagctggggaggtccctgtctcttcctagccgggcaccgttgccccgcctgtcctggggtgcacgcgaaaatgaggaaaggtgagtagtgctagccagtgcggggattgtgtggcaggggcggggcagggaaagcgctgaatagtcccacctggagggtgggcagggccagataggagatgcccagaccgaccccggctgcctgcccgcagacccggactccttcctgaagtctgcacggctgcagcggctgccatcgtcgtcgtcggagatgggcagccaagacgggtcgccgctacgcgagacgcgcaaagacccgttctccgccgcagcggccgagtg

SEQ ID NO: 26500 - DNA, 2300 bp, Homo sapien
ctacttccctgcactttgcccagctgactgtaaaccttgcacaccctaagctgaaaaaaaatctctctatgggagaccgagagtctgcccaatcccaaggagggcgggaatctgagggcccactgaaggagtacagacctcttggggtggacatagaccccaccaaggggtcagatactttcataaaggagatattcactgcaccgaagggacacacacttcactgacagtacatggactccactaagggagcacagatgttgctgggggttctcagatctgactgaagggccctgggccctgctaataggacatgaatggctttgaagggcacttaccctagtgaggagacatggatttcccctaagagatacagaggatatagactttactaaggagacgtggaccctaccagaggactcaaactccagtgaggagctgccaactacactgtgggagtggacatcactgagaaggtgcagacctcatcaagtggggaagggtcccaccagagggattagacctcagggtagtgtaatagaccctacaaacatcactgaggagataagaactctctggggtggggaaaggcacagacaatgggtacactttttggtgatagactgttaccctccctgggcactcttaccacacagctctgagtagccctctccttcctatcctctctcccaagtcctacacccaaaccccagagctgttcccgacacactgcttccccctcctgtctatagttgctactgcagctgctgtgtatatagtagatttttcaagcacttcaggccatccctgagactggtctggggttgggaagagaaaggatgtgtgtatagaggcttcaccagcccccctctcttcctgtggacttcacaatgaaagtttggaacagagacctcgtaaaagaaggaacctccctcatccttggatatggagaagtagtacaagctgtagtgtggttggaattttggagtggagagaggatggatgagtttggagggaatgaatctaccagattaaggcaatgatgatgatgatgatgatgccatttattgagtaggtgccaagccctatactaatcgctttccattctgttacttaatcctcatgacaaccctctaaaatgggtactattattctttccatttcacagatggggaaactgatagagagactaattgtcttgcccaagattacacagtgtttgagcggtggcagaatagaacccagacatccagaatatggagacctattccccaccttgccccactcctgccctaccatcactaccaccactccttctttctcaaagtgtcctttccagaaccacatcaaaaactcttaaaatgatggtaaatattcaggttccaaggacctcatcccagcctactgaatcatgatctctggagtggaatctggggatccgctttcaaagatcctaacacacactaaagtttgagaatgcggttgaaagaggagtcagaagtgtcggggtgcgggaagggatctgaggtcagaggagggatctgttgtccaaagaggcgtctgcagtcaaagaggcctggagatgaagcatgggctggggttttcaaaagggtttgggggtgaagacagagtctgaagtcgaaaaagaggtctaaggtcggaggaggagtctaaaatcggaggaggaggatctcggaattcaaggaggggtctggggtccgaggagtttggggtcagagacaggatctggggtcgagagggatttgcggtcagtgaaagggtctggggcccgaaaaggaagcctgggatttgaggaggacactagctgtattcaggctggaaggaggaaggggtttggtccctgagctgcgtaaagtgcagagccactgaagtctcgcttgccccgcgctctcccctcgaccctgcgctgccttcctggctgtccatctacacgcacctgtgtgccagctgcaggctgatagcgctgagcagacgggggcgagtcagaccgggacacggccgagggctgggagaggcgccccctcccggctgtcgcgaagatcaggccccgccctccgccctcccactcccccgccgcagccacttccggcaggcgctgcgctgctggggggcgcgggcgaggatggcggcggagaacgaggccagccaggagagcgccctgggcgcctactcgccagtggactacatgagcatcaccagcttcccgcggctgcccgaggacgagccggcgcccgcggccccgctgaggggccgcaaggacgaggacgcctttctgggag

SEQ ID NO: 26501 - DNA, 2300 bp, Homo sapien
ggccgtgtcccggtctgactcgcccccgtctgctcagcgctatcagcctgcagctggcacacaggtgcgtgtagatggacagccaggaaggcagcgcagggtcgaggggagagcgcggggcaagcgagacttcagtggctctgcactttacgcagctcagggaccaaaccccttcctccttccagcctgaatacagctagtgtcctcctcaaatcccaggcttccttttcgggccccagaccctttcactgaccgcaaatccctctcgaccccagatcctgtctctgaccccaaactcctcggaccccagacccctccttgaattccgagatcctcctcctccgattttagactcctcctccgaccttagacctctttttcgacttcagactctgtcttcacccccaaacccttttgaaaaccccagcccatgcttcatctccaggcctctttgactgcagacgcctctttggacaacagatccctcctctgacctcagatcccttcccgcaccccgacacttctgactcctctttcaaccgcattctcaaactttagtgtgtgttaggatctttgaaagcggatccccagattccactccagagatcatgattcagtaggctgggatgaggtccttggaacctgaatatttaccatcattttaagagtttttgatgtggttctggaaaggacactttgagaaagaaggagtggtggtagtgatggtagggcaggagtggggcaaggtggggaataggtctccatattctggatgtctgggttctattctgccaccgctcaaacactgtgtaatcttgggcaagacaattagtctctctatcagtttccccatctgtgaaatggaaagaataatagtacccattttagagggttgtcatgaggattaagtaacagaatggaaagcgattagtatagggcttggcacctactcaataaatggcatcatcatcatcatcatcattgccttaatctggtagattcattccctccaaactcatccatcctctctccactccaaaattccaaccacactacagcttgtactacttctccatatccaaggatgagggaggttccttcttttacgaggtctctgttccaaactttcattgtgaagtccacaggaagagaggggggctggtgaagcctctatacacacatcctttctcttcccaaccccagaccagtctcagggatggcctgaagtgcttgaaaaatctactatatacacagcagctgcagtagcaactatagacaggagggggaagcagtgtgtcgggaacagctctggggtttgggtgtaggacttgggagagaggataggaaggagagggctactcagagctgtgtggtaagagtgcccagggagggtaacagtctatcaccaaaaagtgtacccattgtctgtgcctttccccaccccagagagttcttatctcctcagtgatgtttgtagggtctattacactaccctgaggtctaatccctctggtgggacccttccccacttgatgaggtctgcaccttctcagtgatgtccactcccacagtgtagttggcagctcctcactggagtttgagtcctctggtagggtccacgtctccttagtaaagtctatatcctctgtatctcttaggggaaatccatgtctcctcactagggtaagtgcccttcaaagccattcatgtcctattagcagggcccagggcccttcagtcagatctgagaacccccagcaacatctgtgctcccttagtggagtccatgtactgtcagtgaagtgtgtgtcccttcggtgcagtgaatatctcctttatgaaagtatctgaccccttggtggggtctatgtccaccccaagaggtctgtactccttcagtgggccctcagattcccgccctccttgggattgggcagactctcggtctcccatagagagattttttttcagcttagggtgtgcaaggtttacagtcagctgggcaaagtgcagggaagtagctgggaagggaggctgggctagatggggtcacaaggcctgtgtaggcttcaggaggtgggagctgcccgcttcaggcctcagaatcactcttggagttagatatttaagaatccttcctgccttgacagccagtctgtgaaatgatggtgaggtgggcacttctttgtggtgagtgcaggtgagagatggaggagggtcctgcctgacttctttctggggtggaggggctagagagaagctagaggtaattaagcccaggttgtggtggtggtggtggg

SEQ ID NO: 26502 - DNA, 2300 bp, Homo sapien
gaggtctgcaccttctcagtgatgtccactcccacagtgtagttggcagctcctcactggagtttgagtcctctggtagggtccacgtctccttagtaaagtctatatcctctgtatctcttaggggaaatccatgtctcctcactagggtaagtgcccttcaaagccattcatgtcctattagcagggcccagggcccttcagtcagatctgagaacccccagcaacatctgtgctcccttagtggagtccatgtactgtcagtgaagtgtgtgtcccttcggtgcagtgaatatctcctttatgaaagtatctgaccccttggtggggtctatgtccaccccaagaggtctgtactccttcagtgggccctcagattcccgccctccttgggattgggcagactctcggtctcccatagagagattttttttcagcttagggtgtgcaaggtttacagtcagctgggcaaagtgcagggaagtagctgggaagggaggctgggctagatggggtcacaaggcctgtgtaggcttcaggaggtgggagctgcccgcttcaggcctcagaatcactcttggagttagatatttaagaatccttcctgccttgacagccagtctgtgaaatgatggtgaggtgggcacttctttgtggtgagtgcaggtgagagatggaggagggtcctgcctgacttctttctggggtggaggggctagagagaagctagaggtaattaagcccaggttgtggtggtggtggtgggggtttcccttggtggagtaaagagattgtgaaggaaagaagagaatgtgggccaggtgtggtggctcacgcctgtaatcctagcactttgggagcccaaggcgggcagatcacctgaggtcaggagttcaagaccagcctggacaacatggtgaaatcccatctctactaaaaatacaaaaattagctgggtgtggtggtgtgcacctgtaattccagctactcgggaggctgaggcaggagaattgcttgaatccaggaggcagaggttgcagtcagccgagattgtgccattgcactccagcctgggcgacagagcgagagactccatctcaaaacaaaaacaacaacaaaaaaagagaatgtgaatgatttttcctatttgcacagactttgatattttacaagccttagcttcaagcctgacgaggaagtaaaaccaaatctggagtcaaagaacctagctttggccctaacttggtcgttatttgctctctgactgtgcaccagttccttccctttcctgggtttgccatttgtgcaattaggaggtgggcttattacaaaaaacctgaaggtgtctcctagtcttcacttattgagtcttgtactttagatctggatggagatttgtgaaggcaaggagattgaagacatgtcctcataagagggagaaaatctgagctggttccagggtgagcagagaggaggtgctgtcgccagagcatgccctcaaggtcatgggagaagtttttccggaggacgagaatgtgggtgtggctcagagaggggggacctggagggaagggtgtcacctggaaggaactggtgatagtcaggactgtgcaatcagatcacggggcggctccgcgatggaccttactcaactcctctccttagtccatccctttccctttcgatccttgccttaacccaaccccttatctgtcactccaagaccccaccccactctggtcactccatggctctgcctcctctcctgtcacaaccagccgggttactccccatcactccatgggcccacctcctctcctgtcccgcctggccccgcccctcccttggcactccacggttccaccctctcccttgtcacacccggccccgccccttctgctttcactcgacggcgtcactccttccggcaagtcagctccacccctatccctcgacttttccttatagtatttctgtccttgccaacctcgatccctccccaaccagacacggccccgccccctctggcaccgcccacccgccagactaagccactcccccactcaccaggccccgcccctctacggaggccccgcctctagttcggcctgttttctcagtcccggcacccgccgcgaccgcaaaggcggccgcggttctaggaacttgacgtgatggggcttcctgaggagcgggtccggagcggcagcgggagccggggccaggaggaagctggagccggaggccgggcgcggagttggtctccgccgcccgaggtcagccgctccgcgcacgtcccc

SEQ ID NO: 26503 - DNA, 2300 bp, Homo sapien
acaagcatgcactaccacacccagctgatttttgtatttttagtagagacggggtttctccatgttggtcaggctggtcttgagctcctgacctcacgtgatccacctgcctcggcctcccaaagtgctgggattacaggtatgagccaccgtgcccagccggatccagctcaatgtttttagagatgcggtcttgctatgttgccaggctggtcttgaactcttggcctcaatagatgggcccactttggcctcctaaagtgttagaattacaggtgtgagccaccgtgcctgacccaagatagtatattttttaaaagtatttctccctagtcactcatttttatatcattctgctctatttataatgcttatcataatctgaaattatcctggttatatttgttatttgtttattacccacactatcattggaatataagctccatgatatcaggtatcttacttatgttgttcattggtgccttatttcttcttttttttgtttgtttgagacggagtcttactctgtcgcccaggctggagtgcagtggcgtgatcttggctcaccacaacctccacctcccttcaagctattctcctgcctcagcctcccaagtagctgggattacaggcgtgtgccaccacacccagctaatttttgtatttttagtagaggcatggtttcaccacattggccaggctggtctcaaactcctgacttcaggtcatctacctgcctcagtctcctagtgtgttgggattacaggaaagagccaccacgccccgcccattggtgccttatttctatacatgtagatagcacatagtagttgttgaataagcaaatgaatgcatgaaggaatgactgaagtaaaccaggctaaagcctaggaaggagtgggaggcaaggctgaggaggtagacagaaatcacctgataaaggatggcgattctcaaactttatttatttattcaagatggaaactcactctgtcatccagactggagtgcagtagtgtgatctcagctcactgcaacctctgcctcctgggttcaagggattctcgtgcctcagcctccccagtagctgggattacaggcacacaccaccacacccagctaatttttgtatttttagtagagacgcggtttcaccatgttggccaggctggtctcaaactcctgacctttgatctgtccaccttggccttccaaagtgctgggattacaggcgtgagccaccgcgcctggccaattctcaagaatcccctactaattccttgtaccatcttgtaataaagaagcagatccttggaccctgtgattctaattcagtatgtttgagctggggcccaggaatctacaaatcctctagatgatttaggcacaagtgatctggagaccctactctgaataatgcagtcttgatgcctcatcagaaggaatcacatctgtgatttcacttctccttaatacattactaggatggaagagaaggggccgtcactccatttcatcaaggatcagagatggacagtgcattttctaatgacatacaacatgtgtataaaatatcttgaatggccaaagtatctgacccgtcagctcaagattggtgatggcaagattgatggtgggcagatagctcatcctcatagaacagttccaggccttagtgtcactgaatggattttatgactctgcctgtttcttgtttggggaagaagttatacccctaatcactggttctttctggtatgtctcagggagggcaatgagccaggggagaccactcagatcacataccatcagcttctggtccaagtgtgtcagttcagcaatgttctccgaaaacagggtgagtgtgggggtgtgggaaaggactgggggtctggccttggggtatctgagtatctgagacttatggggagagggcaagggatggaaagaatttggtaacagaggaagagaacaggtcagctgggagggaggccagctggatgggagggagcaagtagcagcaagaagggttcatggttcatattctgtgcttttacctgcaggcattcagaagggggaccgagtggccatctacatgcctatgatcccagagcttgtggtggccatgctggcatgtgcccgcattggggctttgcactccattgtggtaggagtttgggctggtgaaaaggggcaggcgggggggtggggctctggagaagtaggttgggcctagatgatggagggtcttaaataacaaactaaggagcttagaaggtttgtgtcataggtccata

SEQ ID NO: 26504 - DNA, 2300 bp, Homo sapien
ggatggcgattctcaaactttatttatttattcaagatggaaactcactctgtcatccagactggagtgcagtagtgtgatctcagctcactgcaacctctgcctcctgggttcaagggattctcgtgcctcagcctccccagtagctgggattacaggcacacaccaccacacccagctaatttttgtatttttagtagagacgcggtttcaccatgttggccaggctggtctcaaactcctgacctttgatctgtccaccttggccttccaaagtgctgggattacaggcgtgagccaccgcgcctggccaattctcaagaatcccctactaattccttgtaccatcttgtaataaagaagcagatccttggaccctgtgattctaattcagtatgtttgagctggggcccaggaatctacaaatcctctagatgatttaggcacaagtgatctggagaccctactctgaataatgcagtcttgatgcctcatcagaaggaatcacatctgtgatttcacttctccttaatacattactaggatggaagagaaggggccgtcactccatttcatcaaggatcagagatggacagtgcattttctaatgacatacaacatgtgtataaaatatcttgaatggccaaagtatctgacccgtcagctcaagattggtgatggcaagattgatggtgggcagatagctcatcctcatagaacagttccaggccttagtgtcactgaatggattttatgactctgcctgtttcttgtttggggaagaagttatacccctaatcactggttctttctggtatgtctcagggagggcaatgagccaggggagaccactcagatcacataccatcagcttctggtccaagtgtgtcagttcagcaatgttctccgaaaacagggtgagtgtgggggtgtgggaaaggactgggggtctggccttggggtatctgagtatctgagacttatggggagagggcaagggatggaaagaatttggtaacagaggaagagaacaggtcagctgggagggaggccagctggatgggagggagcaagtagcagcaagaagggttcatggttcatattctgtgcttttacctgcaggcattcagaagggggaccgagtggccatctacatgcctatgatcccagagcttgtggtggccatgctggcatgtgcccgcattggggctttgcactccattgtggtaggagtttgggctggtgaaaaggggcaggcgggggggtggggctctggagaagtaggttgggcctagatgatggagggtcttaaataacaaactaaggagcttagaaggtttgtgtcataggtccatattagttattcagtttcttctaggaccctggcttagagatcctgaaagttccatgagcaacccctttcttcattcactcaatccctggggctttcttctctccctcagactttcttcccttccctagtttgcaggcttctcttcagagtctctatgtgaacggatcttggattccagctgcagtcttctcatcactacaggtgactaattctctcacctcttctccagaaccccccatacctcaagccttggtctccaatcagctcattggtatttggggctactcagcatagagggtagagactgcctgccttttctctcctggtcccacctcagctgaccctctgtcagctcgaatcagctggaagagccagagttaagaggcctactcaggaagggccctatggacattgtgcccactaggcagcatggggcttactaaggcctggaatgtctgttgctccccaaagatgccttctacaggggggaaaagcttgtgaacctgaaggagctggctgacgaggccctgcagaagtgtcaggagaagtaagtgtgtttggctactgtctgagttgactgagcctttccccagtgccaggttccctttgtcccctctaccctaaatggacatgggtgggtcttgccaagttccctttgagccaacaaggctaccactttaggcttttctcttctccaggggtttcccagtaagatgctgcattgtggtcaagcacctggggcgggcagagctcggcatgggtgactccaccagccagtcccccccaattaagaggtcatgcccagatgtgcaggtgagtctggcactgctatgcctttctccaggctcaaattccttcacttttcctgcctagaaaattcttgatgtccttctttgcctgctcatcagtatactgaggatccaggagcaattctaggaatgcctcc

SEQ ID NO: 26505 - DNA, 2300 bp, Homo sapien
cctatctgccaccatctccccccatcccgtgaccacacacgggagactggaggactcagcctgtcctgtagtcagataatgtacatggtttatttaaagagtcaaaaggggccgggcgcagtggctaacgcctgtaatcctagcactctgggaggctggggcgggtggatcacctgagctcaagagtttcagaccaatctggccaacatggtgaaaccctgtctctaccaaaaatacaaaaattagccgggtgtggtggtggacgcctgtaatcccagctacttgggaggctgaggcaggagaattgcttgaacctgggaagtggaggttgcagtgagctgagatcgtgccactgcactccagcctgggcaacaacaacgaaaactccgtctcaaaaaaaaaaaaaaaaaaaaagagtcaaaaggatcttggtccctgggttgggccactgatttacgatcactaggagttctcactcctaaatttctttgatctgttcgcttcgctccatctccacagctgctgcactggctacagcctcatgatctcacatcttaactctctctgctttctctggcccatctccccacttccaaaccatttgtcacgctgtaaccagtgcctaacacacaaaactaaccatgtccttcccctgcttaaagcccttagctcctgttgctcagtggaactggcgtctgaggctacctctccaagcctaagcgcctaagtcctgttgcaaccctcaggcccttcctcattatccacaccaaactcctcagtgtctgtaaaacaagccgagcaaccctcagaattatatgccttcgctgctcgtttgttttgtttttaggacagggtctcacgctgtcacccaggcaggagtgctgcagcgtgatctcagctcacagcagcctccgtctccggggctcaagaattctcacgccgcagcctcccgagtagctgggattacaggcacgggccaacacacccggctaattcttgtatttctagtagagacggggtttcgccatgttgcccagcctggtctccaactcctgagctcaagtaatccacctgcctcggcctctcaaagtgctgggattacaggtctgagccactgcacccagccagcctttgctgcttttgttcctgcaatttggaacactgtccccatcccagcctctcacctctacccctacctccttcactacctataccttcctatccatccttcaagaccccaaaaaccatccctgattccttcagaaaggcagtttattgcctatcttatcagactgaaagcagtggctgtgtcttatttatggttaattccctagaagctggactgatacattccatttaactaaaattcgtatcaggtgcttcggactgcagacaagcctatcacaacccagaaggaagaaacagggaaggcacctgggggctgccaagcaatgaggtggggggtaggaatcatgaatccgcatatttttaaaaactgccccagatcctgatgtaaacggtacaagagagtctgagaaacacagggctcccctcaaacagtcctgacttcagcattcctggaaaaatgaaaatcctttccttttgcctctaatgctttccctgctggtatcccaggttaaaaaaaaatagataaaatcagggggatttttctgggacttggctgggctgggaaacaagcctgggttctaatacaggctcagcccctgacgtactatgggcccctgcccctccttggggcctccattaccacggccacccccacccttatcaattgtgtgcccctgaggtagtgactgtcccgctctgagcattagtttccccatcttccactagtcgtcgtcagctctgacgctctatgagctatgcatacccgtagctccccgccgaccccgatggtcccctcccctccttcccaaggtccatccgccagggtgcagccgacgcactcctaatgctaaggccgccctctcatcgaccgccccttcctggcctcgactcagcgccaaaggtatgggtctctgccccgcctgctctttaagcctagccggggcggtcagcgcaagcgcactgggtcgcatcgaggccccgccccctgagcctgggtagcggcgcgagggccgggagaaccgttcgcggaggaaaggcgaactagtaggttggggcggccacggcggccggcatgggtcacgtttcctcgggaggaacgatgtgagggaggggtctggcaagagattggaattccggaggccgggagaccttgtggctgaaacccttcgtag

SEQ ID NO: 26506 - DNA, 2300 bp, Homo sapien
cgtgttgatgtcttccttgagtatctttcctttcctagacaatgagtgtcttttgttccatgtgtccctcccagctgtagaagcattattcacagagtccttcgatgtctttacccaaagaagaaattccaggcattgggttacattgagggcagatacattttgggctgggatctaaaatcctggagtctcgctctcctgaaatcggaacgaacttcaaaggtcatccagttcagaggcctcagccctggtcgacctctgcctgagtcttccttggtgctggcaggctcactttcctccaaggcagcctctcccgctgctgatgggctgagatggtgaaaagtccccttttgcatgcatccgcatcctgcttcctgtcgctgcccatggatctacttttgaggctacacaagtcacatcagctccctctgctccaggacagctcttcaagtttttttgattttttgttttttgagagggagtcttgctctgttgcccaggctggagtgcagtggcacgatttcagctcactgccacttccagctctcaggttcaagtgatcctcctgcttcagcctccccaagtaggtgggattacaggcacacgccaccatgcctggctaatttttttttttttttttgagacggagtcttgttctgttgcccaggctggagtgcagtggtgcgatctcggctcactgcaacctccgcctcccaggttcaagtgattctcctgcctcagcctcccgagtagctgggattacaggcgcctgccaccatgcctggctaatttttttgtatttttagtagagacagggtttcaccatgttgaccaggctggtctcaaactcctgacctcaggtaatccacccgccttggcttcccaaagtgttgggatgacaggcatgagccaccatgcccagccttttttttttttttttttttttaagtagaaacggggtttcatcatgttggccaggctggtctcaaactcatgagctcaaatgatccacctgcctcagcctccgaaagtgctgggattacaagctcttcaggtattgaaagtcagtatcttacttaagtccttgcaggttatagtatttgttgcaaatcactcagagcattgggtttcctctttgcgttgtcatgtttgtttgtgagcttatctcagcaggaagatgcaccctgggtggtggaagggaacctacgaggaagatctagacccattttgaggcttggtttctcagccccaggttcatacactgagtaggtaactctaggactcagacccacatgataggtgtaagttagacttgctagaggttctgattctccaggctaattctgttggtccctgacaagaaaccctaccttctgagcatccttgaacaatgaaaagaatttttcccactttctgggctttctataaattgctccagcccagctctccagcctctgatgccataggagattaaaatcctattatctatcaggtttggttcgttcacttactaggtatttattgactttctatgatgtgcaggcacttggcaaggtgccggggacacagaccaagctcctgcccttgtgcaggtcttttctagtggcaggaggtaggcaaggtacaatctaagctctacaaagagaattgaaacagtgaggttctcacagagacaatgcggagagaaagaagaaaggaatacataatgtaggattccattcaaacaaattctgaaaatagacaacactaatctctgaggttagaagtcagtattatattgtggatcaagcaagagtcggtataaaaaaaataaaaataaaaaagaagtcagtattctattatcctaggtgagggatggcccgaaggggataatttttcataatttctgtttttgtacagggtacggttttgttttgttgttgcttttgagactgggtctgttgcccagctggagtgcaatggtgtgatctcggcgcactgtaacctctgcctcctgggttcaagcggtcctcccacctcagcctcctgagtagctgagactacaggtgcatgccaccatgcctggctaatttttgtttgtttgtttgtttgttgtagagatggggttttgatgtgttgcccaggctggtcttgaactcctgagcttaagtgatgtgtccgcctgggcctcccaaagtgctggaattacagacatgaggtactgtgcctgacccagggtatgtttactttgagaaaattcatcaaactttataagatcattcactgcagccttgactgtaatggcaaaagactgaaaacaa

SEQ ID NO: 26507 - DNA, 2300 bp, Homo sapien
gcagccttgactgtaatggcaaaagactgaaaacaatcgaaatgtctaccgagaggggacccgcgtcatttcctaatggagacacactgtaggactaattcctaatagggtctgggcggctgtaattttgataaatatcgccaagtttggcactgtaatttttttttgagacggagtctcgtactgtcgcccaggctggagtgcagtggtgccatctccactcactgcaagctctgcctcccgggttcacgccattctcctgcctcagcctccagagtagctgggactacaggcgcccgccaccacctctggctaatttttttgtatttttactagagacggggtttcactgtgttagccaggatggtctcgatctcctgacctcgtgatccgccctcctcggcctcccaaagtgctgggattacaggcgtgagccactgcgcttggccggcactgtaattttaaatgtgttcatgtaatatgcacacagtaaagtgcatacatcttagatgtacagcttgatttgttttgcaaagtgcacgcacctgtgtctcatggctctactcagcgtatagagcatttcctgcctcccagaggctctctggtgcctccagccattaccctccctcagaggaccactctgccacttctgtcaccataggcgagttttgcctgttttgaatgtagatggttgaaaatgtagctgggaaattatttctctatatttcgtctagcacacctgtgcatttggaatgggagcgcatcggtcggaggacttcccgtgtgagcctggtctggcctctggctggaaccctggatctggaactccattgttccatgtgtctggcgtctgaggttctcagatcctttcattctcgattctaaaatcctgtggcgtcacggagccctgaatggggtgatggacaggagagcctggaggtgccctgacacattccaaagactgtatcaggcagatggactgccagcgccctgaacctctgtcgagagtgggccacgggaaggtggcttcctgtgaatcttcaatgtggggatctgaaggggctcctaactgggttacatttccttgatttgcttccatttcagccaaacaattccttgattctataagttccagggctggttttcttcatgtatgatttccccagggggtccccagaaagaggatggggagggaggaagagggaaagagggcatcgatgtgctcccacttccaaatgcacaagtgtgccagataaaatatagagaaataagtgcaaagctacattttcagccatatacattcaaaacaggcaaatctcgcctatggtgatagaagtggcagagtggacctctgaggtagggtacagagtggaggcaccagagagcctctgggaggcaggcgatgccctataccctgagtagagccgaggggacacaggtgtttgcgctttgcagatgtctgagaaggatgtccctctccccctacccctcccccctctctctctccctctcactccttctctttttgatctgttcttctccttctctctccttctctttttgatctgttcttctccttctctctccttctctttttgatctgttcttggccattgctcgtctgtgagacttggccaatgctttcctttctctgggcctcagtttccctggatgtatcaagagggttggactagctggtccaatctcagtaggcattctgtggtttcccctctgagtgtccttgctctctgtatctggaggtggggtatttttctgggtgtgtcagactctgcgtgacttggtttctccccgtgagctcttcagtctcctgaacctcttactgccttgtccctgtccccgtcagtctctgcacccagcctccctgtctctcagtggagtgtctctctccgcctttgtgatcccctgacaatgggaggtaaaaatagcccaggggccgtgctggtggagataaaagggaatttgccttttgtgtcctgtggccaggctgggggggctgtgacacgtggagattgctgacatagctctcctcctctgaccttgacagtggcaataaaaggggtagcagagcttcctgccctcaccgtggtgccgaggtaggtgatcagggctggggttggagccgaagggagggcaggagggtgggcgggtgggtgagggtgcccatgggtggccgcgagtcttctgaatctggagtggaggaagccctggtgtttgagggtgtgcatgtatgctgggcactcacccaaggaggctgcattgggagccagagggagtcgcct

SEQ ID NO: 26508 - DNA, 2300 bp, Homo sapien
ctgggcttctaggcgtcctggaagagctccgtgaccagcgcctggccaaggtgctgacgctgctgcaggcgcggagccgtggccgcctcatgcgccttgagtaccagcgcctgctgggaggcaggtgggtgtgggaaggaggctggggacagggtgtgtcccctgcctctcagctcccagacccactggctctcccaaccctaacatgctgccctgtagtcagatcagcccctgtggctggttggggcaaggttctgttctgtgtcccccagcctccatttccccacctcaaaaaacggggtacggcacttgcctctccatttcaggacatcagcgtgtggcccggaggggtagcgatggcacccagtgtcttccaagactcttgcgggccgggccccaggcaagatactttctctgcattatcctggttaaagcgctgacggtcctgagaaacaggcgctgtgatggcctccactcagcagaagggtgcccgtgtcagagatccagagctagctggcacgtcagcccaggccgctgactccagagccccgtggcttaacagccctggtgtcttccgggaattgcagaggccaccaggacatggggggctcatgagccccttcactggaggcaggcctgtgggactgtgggcctcccctcaccctcacctataaagcagagctattaggagctactccatgaggctgctgggaaggcaaaacaagtgaactgtgctgagtgtcaccatttgtgacgggcagcactgagccaccttcacagcttggctgcccctccctagggatgcgctgttcaccatccagtggaacatccgtgccttcaatgccgtcaagaactggtcatggatgaagctctttttcaagatgaagccgctgctgcgctcggcgcaggctgaggaggagctggcggccctgcgggcagagctgcgggggttgcgaggggcgctggctgcggccgaggccaagcgccaggaactggaggagacgcacgtcagcatcacccaggagaagaatgacctggccctgcagctgcaggctgtgagtcagggttccccttgtgaccgggcgtccccagccccgagtacccctggctgctctgagggatagtacagcgagacccatggggctcaggccttatgtctctctgttccaaagatgccatgagatgaggcctccatgtcccagcctcaccaccccaaggcctcgtctggcacgtttcctggcactctcccctcgtgccaccttggcctcccgctaaagcagaggaaccccagctccccagctctcccctccctgcaatccctgaaaccaaacagacccatgctctcttctctggttaagggccatgggaacccaggtggcaggtaacagggtgatagccagagagcacagatcaaaggtctggaatctccccaggtccacagagcaagctttcctgccttcggcacatggctttgtgtatcaattgtgtgccaggctcaggctagtgcaggaggaacgttggtgggaagacagagatggccctgtggtcacaaaactcacctgctagtgcaggagactgtgacgcagctggacagtaaggaaatggggggtaaggatacctgagcccttccagggactgcctccaggagcccgtccgtggctgtgcagaggctgctgctgctcaccctgcccctcggaaggcctcagcccaacagcggggcagtgagcagcgggcttccctctcagaacccttgtttgggcctcactctgggccgccccgcacttctaactttcccctcttaatgctctggtgtgtccctctgcgctattgcccttccatgcccaagagcgagtcaagacattcctgagttctcagagcacagccaaactttgctacagaggcagtttcctctccagggcctggcctggtgtctctctgctggtttacctggccctcccccaacctggccccgttccgtgtgccctccaggagcaggacaacctggcagatgccgaggagcgctgccacttgctgatcaagtccaaggtgcagctggaggggaaggtgaaggagctgagtgagcggctggaggatgaggaggaggtgaacgctgacctggccgcccgccggcgcaagctggaggacgagtgcacggagctcaagaaggacattgatgacctgaagctgacactggccaaagctgagaaggagaagcaagccactgagaacaaggtgtgggccgggccagctgtggggaagggccctgagccaggggccagctttggggccaggtggctgca

SEQ ID NO: 26509 - DNA, 2300 bp, Homo sapien
tagtctcacaggcgtcagaatacagtggactttatccaacaagagccatgatttcccaaccttttttgtttgtttgttttgttttgttttttagacacaaggtcttgctctttctctcaggctgcagagcagtggtgttatagctcactgcagccacaaacttctgagctcaagtgattctcctgcctcagccgcccgagtagctgggactacaggtgtgcgccaccattcccagctagtgtttttactttttttttgtagagatggggtctcactatgttgcccaggctggtctcgaactcctggcctcaagtgagcctcccaaagtccagggattacaggtgtgaaccacctctcctggcctcccaatcttttttttctaaggtagcagaactcttcattcaaataaaattgtacccagtcctgccctgatgtctgcagtggatcacagcagagctgctctgtttgaagggcccagacccctgcgtgcctggccgtcttccttcccccatgacggggccagagtcatttcctcatctcctgcctttgcttcatagactgggaagctgaggcttggagttgtggacacttgcccaaggccagctggaagtgaacctcaggcacggagtacgctgggcctcaccctattggcagagtctttccccatctggcagactggcatgacctgtttcaacacacttttggtataaacagctctcctctggcagttctaagccatgtctgattctggatatgtttctggcctgggaaggaaagctggcctgagatgtggtgggaatgcacttggcagtttaattctgtggctgcaggggtctccggggctctggacccagttggagcaggaaggcatcctgcagacttggaaatgtccccatggtttttcaccgcctaagccagcagaatgacccatccccagggcccctgtcagcctctcagatctgtcaccaatatctctcttctatttcaggagtttggtgtgtgatgggaagaggggcttattaactcgtctgctgcaggtcatgaagaaggagccagcagagtcgtctttcaggtgagtctggggaaaagtacctgccgattctgcggggctgcagagccaggtgtttctcaggaggttaggaatacctcctttagtcaccagcgtccatgcctcctgaagcacaattactgttggggagaggtggtttgactgccatcttgtgtagttttgactcgacaggtatgtgagagcttcttctgcagcccacagtgaccgagcattcaccaagcacctgttctgtgctggtgccttatgggtgggagagaactaggatacgggccctgccatgaattccctagagctgtgctgtttcaatgcagtgtgggaaggaatggagccagggttggcccaggagctatagcagcaaaggaaagcctcttccgctgctagggctgggggctgggtgaatacagggagaccttctctgaggtccttagatacatctaagatgagtcttgaagtcagtggacaggtagagttccatcagggccgggcgtgagctgtcaggaggcttcatgcccacatgggcctttgtcacttcagtgccttgtccaaactccctgtcgtggatacccgctgtgccctctgggtccctcggtcagcatcaaccactacttccctaggccagcccatcgtctgtgagcccagtggcctgtctgcatgtgttcgtccgcttcccacacacattcctggcccctcaattgcacgtcctcccattcttgtgaaagggcaaggcctagagtatgtttcacgggggctcgcaggagccagcccttcgatcccagatgttaccctttctgtgacacagccccttccagacagacccagatagaagacttctccactgagctggctctctgtgaggatgggggcactgctgtgtccccaggcccaggatgaagcctgatgcttggtagatgttcagtaaatgttgagtacatgaaaaggcaacaaacatctcccaaccccttggagaactgaacatgggccggaagagggcagccttagccacctgagccagtatttgggtcgcaggttttggcaagctcgggctgtggagagtttcctccgagggaccacctcctatgcagaccagatgttcctgctgaagcgaggcctcttggaggtatgatctggagcagccagtgtcttgggttccgtctccccccagcccacgcgttgctgtgtcctgtcctgagccccaaacagttcatcaggagcagagcagatctcgtgactt

SEQ ID NO: 26510 - DNA, 2300 bp, Homo sapien
tttctgccaagcaaaggcagaaattaagatttatgtgaaaggtcctgattttaaatgttggtttaaatattttaaaaaccttgcatttgagctaacagaacatgcctggagacagctgtggccccagggcacctccatcatatgcacccatcctctgtgagaggttttccggctgaaagccatagaagggctccaggaagcatgttaaccttctgaaaaatggcaccacatatgttatggaactgtgctgttttccctgaggaagtgagtctctggctttcatcagactcttcagtctgagtactctgtgggatatcaggatgaatgcaaacagccatggcccctgctctcatgaagggcagagtctgaaaacagagacagttgttcatccaaggattccaccgttgagcattagtgataagtggagatggtattcaggaggagaggaacggggtctgtgagagacatttgacagggtccaggactggccagaggacactcaggaactctcccctgcagaagtggcttgccagccaagacctgaagtgtcagcttgtagtgaattgagtgaacaggcatgtgagagggtgtgtgttctagccagaagcccctgaacgagggaagaccattgtggccagctgatgggagtgatgtgggcttggctctgggctgggctgcacaggacgttgtgggtcacagtcacagggtgttgtgggtcacagtcacaggcctggattttatatacagatggtccacttagaatttttcaacttcacaatggtacagaagtagaattttgaattttgatcttttcctgggctcatgataaacagttcaatactcttgcaatgctgggcactgagctgcagctgcagctcagaatgtatttcaagaaaaatggtgaccagctacacgatcaccaaggtagacaaccagtactctgtgctgtgcctgccgtgttgccagtgattatggccaactgtaggctgaagtcagtgttctgagcacattccaggtaggctaggctaagctaggaggttcagtgggttagatatattaaatgtgttttctttctttttctttttttcaagacggaatcttgctctattgcccaggctggagtgcagtggcatgatcttggctcactgcaacctccaccttctgggttcaagcaattctacctcagcctcctgagtagctaggattataggcgtgtgccaccacgcccagctaattttttatatttttagtagagatggggtttcgccacgttggccaggctggtctcgaactcctgacctcgtgatccacccgcctggaccttccaaagtgctgggattacagacgtgaaccaccgcgcccggcctcaatatgttttcaacttaacggcattttcaaatacgatgggtttatcaggacataacctcctcctaagtcaggaaatgtctgttctaaatgcagtgggaagctgtggaagtgttttcaccgggagtgacaggatcagagtcctgattctgaagatcacttttggcaccgtgtgatgactcagttcctgtgggataccttttagtaaagggagctggtgtcctgggaacacaggacccagcagtgacaggcctggatggcaagtcgggggaagtgtcacagttaaccaggcctctgtgtgatgtgtgaccgtggtgcttggtgggactgctgcagcagggccaggcttgagtgtgattggacctgttgaggtgttggtgcctttgagaaaacaagtggaaatgtaggcaaagagaaaggcccagagctgctgagggaaggggccttgtcgatgaatgtggcaggcaggggtcggggatgggggtggggccagggagagattccactgcctgagagcccagagttccctcctgcaggtgctggctggagtgagaggtgctagaggaaagtgcctggtggcttctcagattctgtccacaggaagtgggcaggagactccctacactagcctggtgctgacccagcagccccagttcctgtcctttacctcctccaacccattttgtttcaggaacaagtacttgttactcaacaaccaggagctgaatgaactcagtgccatctctctcaaggccaacatccctgaggtggaagctgtcctcaacaccgacaggtgagtgcaggggtgcagcttttccctcagcccatcccggctgcccacgttccccgggggctcaccggtgagcacatccaggtatgcacgcgtgtcctctctcacatgcagctacagtgtcctgagggctcctgtgtgccag

SEQ ID NO: 26511 - DNA, 2300 bp, Homo sapien
caggggcccacaagtggattcaaagattttctgacttgtaattggttaaggaggtaaagctttgtctaaaaatttgggatctgcagaaaagaatgttagctctgacttatggtcgtgtcctcctccaggccccctaggaagaaatttataacaaaaaatagaagtcaaagtttagttctcagctctcccttatctgagtttgcctatcagcagatccatttggtgggggttcgagtttctaagaaacaacactcagggacaaattttaagatgttatattcagtttctatagggaacaaaatatctcctgactgtaacttctttggctatttttttttttttttctgagatggagtctcatcctgtcatcaaactggagtgcagtggcgtgatctcggctcactgtgacctctgtctccagggttcaagtgattctcctgcctcagcctcccaagtagctgggactacaggtgcatgccaccacgcccagctaatttttgcatttttagtagagatggggtttcaccatgttggccaggctggtctcgaactcctgacctcatgatctgactacctcggcctcccaaagtgctgggattacaggtgtgagccactgggattacaggtgtgagccactgcacccggctgagtttatttttgtataatgtgagagatgaggatccagtttcattcttctgcatgtggcttgccagttatcaccagctgttgaatagggtgtcctttccccactttatgtttttgtttgctttatcgaagatcagttggctataagtatttggttttatactgtgttctctattctgttccattggtctatgtgcctatttttataccagtaccatgctgtttgggtgactatggccttattgtatagattgaagtcaggtaatgtgatgcctccagatttattctttttgcttagtcttgctttggacatgcaggctcttttttggttccatatgatttttaggattcttttttctagttctatgaagatggatggtgagtctactccttttagatggggtgtgaggatggtaaccatagtgccagttcacctgggagagtcacttttatgcctaccgtcccggtgtaattatttattgtgtcttttcattctttaaagtgttctggtttgagcagtaagttacagtcatcttagttatgagtcacaatcttcaccattccctgttacatcacacttagctctcctctttcatttttattacaggccccctgctaggaagggaaaaagtgtgtgtgtgttgggtggggggagtcagtgccatcctgccacagaagttagctgaaaaaatgagtattagagacaacatgctatctggtggatagaaattaggacagggttttcatctgacagagaatatgatgtcacaatttactaatccctttcccttccattatttaatttcacaacaacctacccagttacacaacttatccagtttgagactgcgtttctttgtgtatggatctgctgtcttcccctgtaacctgcatttcgtgataaaggatcccaggccgttctgctcaccactgtatcccagacaccctccctttcccctagacatggtttggtgtcgggcgcagagaaagccccaggaactacgattgatcaggctcccagaatctatagatggagtgacctgacgaggacacaggcgcagtggcagagcgcgatgacttggtcgatgtccgcggtgagtcacgtgtagagagaagcaggcaggaagcggactcgagggcctgactcctgacctgaagcccaggatcatttcttggccagctgcctgcatcctgcccaaatcggcgagagaaatgggagaatgtggaccttgggagatttcgccgaaatgctgggcccgggggccagagaaaccggcagtgcaggaaaggccacatctcttttcccacctaccccgctgccgcgcaggactacaattcccagtagcctccacgccgcacacggtccctgccacgcggcttgcgcctccgccgacggcccactgggggcgctgcggcgacccctccgccgccccgtagaaatctccgcggccccgaggccgcttgcttcctgtttgtccgacgaggagacatggcggcggcgccggtagcggctgggtctggagccggccgagggagacggtcggcagccacagtggcggcttggggcggatggggcggccggccgcggcctggtaacattctgctgcagctgcggcagggccagctgaccggccggggcctggtccgggcggtgc

SEQ ID NO: 26512 - DNA, 2300 bp, Homo sapien
cagtggcctgatcttgatcttggctcactacaacctccacctcccgggttcaagcgattctcctgcctcagcctcctgagtagctgggactacaggcgtctgccaccactcccggccaatttttgtatttttagtagagacagggtttcaccatattggccaggttggtcttgaactcctgacctcgtgatccgcccgccttggcctcccaaagtgctgggattacaggcgtgagccactgcacccggccaagaagagtttctaaaaacatcccaggctgggtacagtggcttatgcctgtaatcccagcactttgggaggcctggctgcactctggctcaacaaactgagctatcacttccatctgactttttcagcaaataagagatagccaatcctagaatcatagaaagctcgaccgaaaaggatcttaaagatccatttgttcaaactcctcattatttatagacaaggatgctagccccagagaaggagagggtcacatacacaggttatagatgagtgacagagttgtaattaactggatcctagatctgacttcaaatccagtgttggttctaccgcatgtcacactgaccaaagtcatgggtgttgctgtggtctaaggtgctgaccaaattttagaaacttgggaataaggggaatggagaaatggatcacaaacctcctgaaagctatagtgccccagggtagtcatttgtctttttttttttttttttttttttttttttgatatggagttttgctgttttgcccaggctggagtggagtggcgcgatcctcgctcactgcaacctccgccttccggtttcaagcgattctccggcctcagccttccgagtagccgggatttacaggcacccgccaccacccctggctaatttttgtatttttagtaaagacggggtttcaccatgttggccaggttggtctctatctcttaacctcaggtgatccacgcacctcaacctcccaaagtgttgggattacaggcgtgagccaccgcgcccaaccagggtattcattcttacccaagacattctacagggctgacaggggtaaagcttccggtttgagatggagactgaagggaccatgattgtgtaaccacatcccaaattgggaggagagaagtgtcatgaattcctagaactgacgggatttcaggaaacctcaagagtgacagcatcggaaaatgcaagaggttttaaaaaaaaaagagtggaagttttggacaaataaatgtgagttgtgtcttatacaatcaacaagtaactggtttgggaaactcaatatccctaaataagggagcagaccacccctcatattgtcttatgcccaatttctgcctcaaagaaaatgtaggagttaaaagaaagacagaagtgaaatcagtagtcagacagcccggcgatgcattccaggcctggtaattaaagatcgacccctcctgacctaaccggttatattatctatagattccagacattgtatggaaaagcattgtgaaaatccctgtcctgttctgttccgttctgattaccggtgcaccggtaatcagtcacgtaccccctgcttgctcaatcaatcacgaccctctcacgcggacccccttagagttgtaagctcttaaaagggacaggaattgctcactcggggagctccgtttttgagaagtgagtcagctgacgctcccggccgaataaagctccttccttctttaacccggtgtctgaggagttttgtctgcggcttgtcctgctaggtaataatggtaaaggctgaacatttctcatgcttaccctgccttcatacttaataaggttgttgaaaaaaatgaatgagagaatgcattttaaatgctccgtacagtactagtacacaataagtgctcaatacatgctagctgttattattaaaacattaattaataacagtagtaacaacagccactgactttaagacacgttgatcagtgttgccgaaaccgtacatccgaagttgctcttcggccgcgtttcgctgcccattgcattcaggggcttgtagtccggaagtgagaggctgatttctcagcgcgcaggcgcagtggcgcggattcccggaagaacccgcagcagctcccaggatgaactggttgcagtggctgctgctgctgcgggggcgctgagaggacacgagctctatgcctttccggctgctcatcccgctcggcctcctgtgcgcgctgctgcctcagcaccatggtgcgccaggtcccgacggctccgcgccagatc

SEQ ID NO: 26513 - DNA, 2300 bp, Homo sapien
caaccatctgataatgccaagggctggcaaggatgtgaagcgagggaattctcatacactgctgggaacgtaaattggcacaacctttctgtaaaacagtttggcaatatctagtaaaactgaagatgcatatactttattactcagaaattccactgtcaagtttgcacctacaaaaactcccacatatgcacaaggactcgagtatgagaatgttcataccagcactgtttgtaatagcaaaaaactggaaaaaacttaagtgttcagcaacaagagaatggatacataaataatgatctattcccaaaattgatttttttttttgagacagggtcttgctctgttgcccaggctagagtgcagtggcatgatcatggctcactgcagtctcaacctcctgggctcaagcaatcctcctacctcagcctcctgagtagctgagaccacaggcacaacccatcacacccagctaattttattttttttgtagagatgggggtctcactatgttgcccaggctggtcttgaactcctgggctcaaatgatccacccacctcggcctcccaaagtgctgggataatacctccccagccggaatattttaaagcagtgaaaatgaatggtctacacatagccacatgaatgaatcttattaatacattaagtgaaaaaagcaaaaggtacagaggaatacatacattttaataccatttatataaagctcaaaatatgtgaaataccactatctattgtttagggatatatacataagtagtgtaagtatacagaaatataaggaaatgaaaaatatcaaatcttcattttcatctgaagtggttacttcaggggctgtggcagggagagagagatgcagctgaggaagagtccatagggggcttcaactatattagcaatattgtatttcttatgcttggtggtggggataggtatgtttgaaatgtaatcctttaagcatgaaataactcttcaaaaatgaaatatttcaggctgtgcacagtggctcaggcttgtaatcccagcatgttgggaggctgaagtgggcggatcacctgaggtcaggagtttgagaccaacctggccaacatggtgaaatcccatctctactaaaaatacaaaaattagccaggtgtggtggcaggtgactgtaatcccagctacttgggaggctgaggcaggagaatcgcttgaatctgggaggtggaggttgcagtgagccgagatcacgccactgcattacagcaagactccatctcaaaaaaaagaaaaaaaaaaagaaaaaagaaatgtttcataatttttaataaaaggcaagacaatataaattggtagttatttaagtcattctacttttcctgaggcccagtgcaggaaaacaaagttcctatccttgttccaactagaccattttgataagctgcaaaaagaaaagactttgatgctatttcttagccagtttgcaacagctgagaggtgagcatggaagctcttgcatatattcagttcagagaatgggtgcttagtttatgtccagagtttgtcccagatttcactatgacgtcagctctccggggagaagtatataaaataaaaagttaaaatccctctcagtcctttacccaatcctattccccagaggtaatctctattgacagtacccctccagatattttccctatgtatatacaaatacacagatacacactgaaagttaattttggccaggtgcagtggctcctgcctataccagaggattgcttgagtgcaggagttcaagaccagcctgggcaacatagcgagaccacatctctagtaaaaataaaaaaaaatagctaggcgtggtggcacagtggcacgtacctttagtctcagctactcgggtggttgaggtgggagaatcacttgagcccgggaggtcaagcctacaattagctgtgattgcttcactgcactatagcctgggcaacagagctagaccctgtctcaaaaaaataataataaattttatatatatatatgaggatgaaattacatatgtattatttgaacagaagtgaaatcttttctttttttttttcagacagaatcttgccgcatgacccaggctagaatgcagtggtgtgatctcggccctctgcaacctccacctcccaggttcaagcgattctcatgcctcggtctcccaagtagctgggattacaggcatgcaccaccatgcccagctaatttttgtatttttcgtagagacgttcgccatattggccaggctggtctcaaa

SEQ ID NO: 26514 - DNA, 2300 bp, Homo sapien
gttgggaggctgaagtgggcggatcacctgaggtcaggagtttgagaccaacctggccaacatggtgaaatcccatctctactaaaaatacaaaaattagccaggtgtggtggcaggtgactgtaatcccagctacttgggaggctgaggcaggagaatcgcttgaatctgggaggtggaggttgcagtgagccgagatcacgccactgcattacagcaagactccatctcaaaaaaaagaaaaaaaaaaagaaaaaagaaatgtttcataatttttaataaaaggcaagacaatataaattggtagttatttaagtcattctacttttcctgaggcccagtgcaggaaaacaaagttcctatccttgttccaactagaccattttgataagctgcaaaaagaaaagactttgatgctatttcttagccagtttgcaacagctgagaggtgagcatggaagctcttgcatatattcagttcagagaatgggtgcttagtttatgtccagagtttgtcccagatttcactatgacgtcagctctccggggagaagtatataaaataaaaagttaaaatccctctcagtcctttacccaatcctattccccagaggtaatctctattgacagtacccctccagatattttccctatgtatatacaaatacacagatacacactgaaagttaattttggccaggtgcagtggctcctgcctataccagaggattgcttgagtgcaggagttcaagaccagcctgggcaacatagcgagaccacatctctagtaaaaataaaaaaaaatagctaggcgtggtggcacagtggcacgtacctttagtctcagctactcgggtggttgaggtgggagaatcacttgagcccgggaggtcaagcctacaattagctgtgattgcttcactgcactatagcctgggcaacagagctagaccctgtctcaaaaaaataataataaattttatatatatatatgaggatgaaattacatatgtattatttgaacagaagtgaaatcttttctttttttttttcagacagaatcttgccgcatgacccaggctagaatgcagtggtgtgatctcggccctctgcaacctccacctcccaggttcaagcgattctcatgcctcggtctcccaagtagctgggattacaggcatgcaccaccatgcccagctaatttttgtatttttcgtagagacgttcgccatattggccaggctggtctcaaactcctggcctcaagtgatctgcccacctcggcctcccaaagtgccagcagcatgctcggaggagtgactttaaagcttttctacttgcttcctagagtaagggacgcattttacactgctatccaaaactcatcatagaaacatacacacacaaaaccaaagcacacatatacaactgagcaaatatttcatgacataacactttctcttactaagggtgacgcgctgaaattttgtattctgtcctatttcattttttaaaaatggtaaccatgacctgctaaattgatttcattgtccactaataaattatgacctcagtttcaaaaagattgctttaggtaaccaatcatcttctgagatttatacagattgctcataattctctcctattttttaaaaacatgctgcagtgaactgctttacactcattttatgactacttctgagaccaagatcccggattatgtaattgttatttacttaaaattctggtaaaatgtagccattatactggaaaactaaattttaatcttggatctgtcaccaccatgatatataaactttgggcaagtccctgcacctctctggacctcaatctccccatcagcaacctgctgatcctactcccaggagtgtgctctaagttgaaagtagatgccccaccccctgagtcagcgccggcaggacttctcaccaagcccttctcccccttttccgctccctgttcctggttcctaggaagcagcccaaggagaagggaaaaggcaggtctgggcaggagggagcaatgaagggcggggcagagggagggcaggagggaggccggccccctagtaggaaatgagacacagtagaaataacactttataagcctcttcctcctcccatctcctggcctccttccatcctcctctgcccagactccgcccctcccagacggtcctcacttctcttttccctagactgcagccagcggagcccgcagccggcccgagccaggaacccaggtccggagcctcaacttcaggatgttgacaacattgc

SEQ ID NO: 26515 - DNA, 2300 bp, Homo sapien
gattcttcagtctttttggacaatctttagattcacttttggcttgacttttctcaggctctgaatatgtatgtctcaggatggaactcttggccttttgctctcttcaactctttgctttcagcttcaactaccgtatttacttgaaggtgtccaaaatatccattctccaccttcttcgagaactcattcccatacccatctcacagatcttgtggtcaccccagtttcagcaagtctaaaaccgagctccttgtcacctccttcaagccagttcctccacatgaggactccgtttctgtgaagatgctaccatccatctttctcgatttgccatcactccaaactcctttccctcttcttgtatgcccattgtctcttaaatctgtctcttttctcacccccatcctagaaaaaaatgggttctgaagtcaaatcgattcagctctatcacttatgaatcacgcaagtttggcaaacttattcagagtcttccacttctttatcctaaattaggggtaataatagcatctatttcatagggtttatctatgaagattaaatgagatatcgtggaggaaagtgcttagcccagtaactagtatgtattaggcactcaataaatgttaattattattgttatccttatttccttatacttagactattacactagtctcctaaccaatctctctgcctcctctggtcattattctctccactgggaggggaactaacatggaatatctattaagtgtcaagcacctcatgctgaaagcaatcttatacagtaatagtagcatcattttataaaaatggaacagagccaagatatgaacataggtctgacgctaaagcctgtgcccttttttcatctccaaattaccacgtaatcataaaatactattttcacacatcatcctgcttaaacacacacatacacacacacacaccacacacacacaacctttaatgaccaccctcccccattttccttcagaacacaacccaaatttattatcctagcattcactgtcttgtacaacttccctcacttcccaacactttcctataggaaccctgtgctccagagaaacttatctgccgcctcaggcacatcctgtacaccctcaacttcctccctgaaatgccctctcctctcccctcccctggtttaaatccagcctttccttcaggtcctagctagagtcccaccctcctccattacactttttcctaacttccccagcccctcatcaggtctccctcgacccctggagcagccgcctgtatccttgttgacacgtggtgtttgccattctgtttttctttgcgtttatgttttctcatcaagctgtaaacctctgcactccaggaaatcggccttctcttttttgtttttgtttttgggtgtttttttttttcctttcagcatcccaagtagcccagagccctacaaatagaaagcgcttgataaatatgggttgttttggatgaaagatgatcttcccagctggatgagctctttccctctaggggtgagggactgagcttcacctcaacttcacctaatgtctcacaggaatgccccctcttaaacgctcctcaggtcttctctacccctttcccccaccaccccggcccaggagagccactcagagctccctctccggagtcaccctctcagacccagggctatttctttagcttgctctcgaaccccgcctttaccccagagccgctcctcagtctcctcccccaggctgcctctcaggccccctctcctccaatgccactccctaggaccctctccccagggttccggacccccaaccccggatatgttcccccagggccatccagttgttctacctccaggattactgatttagcctcttccccctcctgctcagggctacccccagaccccgacctccagttccaccccttcggaccctgcctctagaactgttcttttagcctctgcaaccccctccccagcgccgctccgcggcccctgccccagggctggtcggggagccactgccctcgcaggtcccgcccgggtgctgcccccgcgcccccggccgccccccaccggggcggggcgcggcggcggcgggggcagggaaccgggcagcggtggcggtggcggtggcgcgggcggacgaggcggaggcgcccttcgccgggcaggtggggctggcgcgcggggccggggcgcgggctcggggcatccgggcagggcggggggcggcaccggggacgggcctgggccgggccgcacctactgccgaggt

SEQ ID NO: 26516 - DNA, 2300 bp, Homo sapien
ctggggcacagccagctggacctcatcacaaagttcggcccattccgtggtgaggggcctgggcccaatggtctcccgatatcaagccctgctcgcacggctggagctgggtctggggatgagaaacggctaaccctgggccacagcaagctggacctcatcaccaagtatcatcagttgcacggggccaggcagggaactgagcctgggggtcccaagggtggccatctcaatggtggtaacagtgacctggtcagggatgagaaacggctgaccctgggtcacagcaaactggacctcatcactaagtacaacaagtccaagttcaagcagctccgaagccgctttgagtcctagccaaaggactggcatcgggggtgcactggcaagggcaggcccctcctctgtccaccgagactctggacttgctcaggtcccagactggggaagggaggtgtctagaaacccaggtcagacacactctctgggctcaagattcttgtgtacacacacacacacacacacacacacacacaccctaactagtatcttcttgaatctaggctgtgtttccagccctgtgctgggcctgtagagctgacaggtgggtcacactcagacctggggacagaggtgaaatgcacaagctgctggagaaggggtcagagccatatcaagttaaaggttaaccagttacagagggtgttagaaaacaaagggcagagagtcctggagaaggtggagtagtcagaaaactttcttagaggagatggaggtggcctttgagccaggccctgaaggatggggaggttttggacagagggaggagagagttagaaaaatttttggtagagagaatcaggtgaaagagatgccctaaagaggactgagtgggtctgaggtgaatgagtgaggaagagcagagtatgtggatacccggaaacacacacacacacacatcatcattatcatcatcatcattgtcgtcgtcatcatcttgctgagtcatcatcatcatcatcatcattgtcgtcgtcatcatcttgctgagtgtctcttgaagtacaggctgtgacaggttgtgggccattttcctgaactcaccacttacccgggatagtaaacatgatacacatcaataaaggcagactttattgtgaatcacagcgcctggtgtatcctgaactttgaggagttatgggagggacacgttgggggaatgggaagggcaccattcaggccaattatggggaaacccctggaggagggtgaatgccgaaggaggaattgggggagtccaggggctccaagttaccactgtgacattttgagagaacccggggcttttgcagattctacaaaatgtgggccaagttcatcctgtccaagtgtgcagcagggcccttggcccccatcactatcctggggacagaagttggctgctgagtgagtgatagaggccgtgcgagaggcacatcgtggaagccaaccagcacccacatccttgcccaccctggacccctttccagccttttcctgagcccctgcttcctcagtcctcccctctctccagcacctgcagcctggctgcctttccgtctctggctgcgctctttctccagcctcggtctggccgcacttctgcctcctggaactctctccatgggtagcctcttctagtccacccgtcttcagcccctcatctcattcgtcagcactccactcccctgctgggctccagacatggacttctgtccctcaaggcacagctggactcatccctttccccaaacctgcccttcctccggcttcatttccatcaatacctccatcatcaacccttccgcgagacactcctggcccctcctctccctcatgcctcacaaccgaccagccggaggtctaggtcgatgacagctcctaaaaagctcctgaatgaataatgaatgaatgaacgcgagcaggctaggcgtggggccaggcggggtcgcgcccagaccgctcgcgaccatagagtccgccggaggccggaggtagaggggctggatgcgtggcggggagcgccgggctctcccggaagtctccctggacggaagtggaaacggaaacctttttagggagtccaaggtacagtcgccgcgtgcggagcttgttactggttacttggtaagctggtgtgaggggaacctgggagggtcagctccggtcctgggtcgggaggggtgggggccagaggattcagggccggaggttctggtgggggcccagtgggcgggacccgaggacggaggggccgggag

SEQ ID NO: 26517 - DNA, 2300 bp, Homo sapien
ccagaaaggctctggccacacacgagcacagcttcccttctgaagccctggcctccgactccaggggaatggacgagatgatccctggcagggtttgagggagagttaggctcctgctgcagagatgggaagccaggatgctgggatcccaccggtacttccagagcctccctggcaagccttcctgtgccccaggcaggggacggccaggcctgattggcatcaggaatggggttattagtgaggctgctgctgtcgtcctcctcacccctgcctctttgatcttcctgcctgtccttgttcccccaccctggccaggcctgtgctgtgaactagggcatcccccagtgcctcgccttctcagcccccatttagacccctctatcctgggtcaggagccaggttcgtgcactgggctgtcatgactcctagtgaccttgggaaatgctgcgttgccctgcagcccaatgtttatagagctctgttatgtcttgagcattttcacatttaattccctgtaactctgagacatggctatcattatctccatttaacagatgaggaaggtgaggcttccagaggtgaagggactcacccaaagctgtgtcaccaggaagtgatagagtccaggtttgaacccagttctttctgactccagagctggagtgctatgctctgtacctcctgcctctcggccctgcctgggagagaagactctcatagcagatatatgccatgggaagaaaggccagctgggggctgggaggtgccaagaaggtttcaggggcctctttgaggcagccctttatatgggatggaggcacaagccccagcccagccctcaactgagcagaaaacttggatccatttggcatgggtgcaagtaagggagtctgcagtgtaaggggtcacaccagacctctgtggcttcacagggaaactgaggcaggactgggaaagggcagcgaagaccccagtaagtggcttgtagctgtgaccctggagaagggagcctcagacagacagtccctgggtcagagctgggctggagttagtcgggggagtgccaggaacttgcctgggaattggggtctgggttctccttctcactgctgtcccatctggggctcagtgcagagggagtgttggactagcacagctgatccacagtcatctttgagaatctgatgatggataaacactcggtgcacagaaggatgcacacaaatgctttcaaacagctaggggttcaagacagtcaaatctgggctgggatttgactgtaatcccagtgctttgggaggctgaggtgggaggatcgcttgaggccaggggttcaagaccagcttgtgagaaccccatctctacaaaaaattagaattaaaaaaaaactagcgactgggcgtggtggctcacgcctgtaatcacagcactttgggagtccaaggcaggcagatcacaaggtcaggagtttgagaccagcctggccaacatggtgaaactccatctctattaaaaatacagattagctgggcatggtggtggatgcctgaaattccagctacttgagaggctgagacacgagaatcgcttgaacccagaaggcagaggttgcagtgagccgagatcacgccactacactccagcctgggcaacagagtgagactctgtctcaaaaaaaaaaaagaaaagaaaattagccaggcatagtggcacatgcctataataccagctacttgggaggctgagttgggaggagattgcttgagcctgggagttctaggcagaagagagctatgatcacgccactgcactgcagcctgggcaacagagtgagacagacactgactcttaaaaaaaagaagacagtcaaatctgcctgtgcccaagttaagaagccctgggctaggtcactgctaagtgcccttcctgttcacttgctcttgaaggctctggcctcctgattttcagtccagtactcttttcccggcgcccagtttcctgccccaggtttggctggatgtggggagtgccctgggcagcgctgagctttcgtgtgcctccccccacccaggtggtggctgtggtgatggacatattcactgacatggagcttctgtgtgacctcatggaggcctcaagccggcgtggtgtccctgtgtacctgctccttgcccaggagcacctgaggcacttcctggagatgtgctacaagatggacctcaatggggagcacctgccggtcagtgaggaccaggggcagtaaccaggggtgtgggcggggagtcagggagggcagg

SEQ ID NO: 26518 - DNA, 2300 bp, Homo sapien
ctgccacctcggctgcccccacagctcatcaccctcccacggtctggctttgtttactcaaccttctgcccctcttgcagcctcctcacccccatggaagggcctccttggagtgcccggtgctcctgcacctgggatgggatggagtaggccataactcctgacctgtggctcccccatgctcccccaggcccttcacttatagggtccttgaagacacagccctagccccattcacctttggtcctagggctcagctcaactccggaacctctaaatcccacccagctccctcccactatatgtgtgtcaagttctttggacacagaagaccctgtgttccggacatgatcgcagaccagataaaccaagtgcgcttagtgctaaacaggctgcgaggcacggctttaggtcttctgcgcttcccgccatcctcgctggacctcatgcctccgtggaaaggtggtgaccgcttctgcctagcctggctccccagctgcagctgtcacctgctcacccccttccccagagcaaagctgctcaccatcctccgaaggacacacggtacatgctccaggactttaatctttgttggggcagaggtcagaaatctacctgccctgtttgcctcctgaccttgcagtgtgtccgcccattctctgaaacaaccttccaaccattttcatactcagccctggaggaggggaagaaggctggggtctggccaccaccaggccaagaacatccctggagttaagggtgttgcaagcacagccatctggaacagcatgtctcaggggtgggccttagcccactgcccacagtgcactgggcacttgtttaaaaactcaggaatttgaggttacagtaagctatgatcacatcactgctctctctagcctgggtgacagagcaagatcatgtctcaattaaaaaagaaaaatggccaggtgtggcggctcacacctgtaatcccagcactttgggaggctgagacaggaggattgcttgaggccaggagttcaagatcagcctgggcaacatagtgagatcccatctctaaaaaaattttaaaagtagccgagcatggtaacatgcacctgtaatcccagctactcaggaggctgaggtgggaagatcgctcgagtccagagaaactgaggcacagctgtagtgagctgtgattgcgccactgccctccagactgggtgacagagcaagaccctatctcaaaaagaaaaagaaaaaagacaagctccagaagcctacggacaccttctggatgagaatttccaggagggtggggcccggggatctgcatttcatcacctctcaccacccctggggtcagggtgagagccactgctctaggttcttgaaggacagctccgagccggggtgggagagagccagggggctgtgagcaccacagttaagatgatggagagtggcaggacgattatgggagcaaaaagagggctggctgggggacagaccagcgttgatgtccttggatattccatgtgacagtcgttcagctctcagggccttgcagacttgagccagggcacgtgctatccactgtggtatgtgttgtgggggtcatggccggtctctacatcggcgtttgggtgaagagtttatgcaagtggatgtgattacaatgtgtggtcggtctgtgtcagcccacactccatgtctgtgtatcggtcagttgtcagtgtgtccatctgcatgggtgttcatgtcttttcctgggtgtcttgagtcgctcacccacctgcagtgtgtgtgcgtgtgcgtgtgagtgtgtgttcctgagtcgcctgggcccctcttggctgtaattcaacctctgtgggtcccgggaagtcagcatttggagacttgctgggagcctggtggggatggggcggcgttgctgggaggaagagagggaggcaggagtgtgcaccgagggcctggcactgccgcttccctgggcaggcgagtcccaacacaggcagacaggtggggctgacctgacaggttccagaggccaggggcaatagggtggagcgtggctctgatttagggtggcaacagtttgggggccctgccacacacacagcgagcgggcgggcagaaggcggttctgctggtctcctcttcctgctgcagccagcccagcgtgcgggccatgggccctgccggcgggtgaggcagccgcgtggcaggcatgttcggaggcccggggcctggggtcctgggagcccagggcatggcgggacccctgcggggccgggtggaagagctgaagc

SEQ ID NO: 26519 - DNA, 2300 bp, Homo sapien
ggcgcatgcctgtaatcccagctactcaggaggctgaggcaggagaatcacttgaacccgggaggcagaggttgcagtgagccaagatcacgccattgcgctccagcctgggcaacaagagtgaaactccgtctcaaaaaaaaaaagaaaagatctattgtataacatggtgactatacccactatgaatatgtattgtattcttgaaaattgcttaaagaacatattttaaacatttccagcacaaaaatatgaggtaatgcatatattaattagcttgacttagccatttcacaatgtatacatattttaaaacatcctggccgggggcacggtggctcactcttgtaatcccagcactttcggaggccgatgtgggtggatcacctgaggttaggagtttgagaccgtcctagccgaaatggcaaaaccccgtctctactgaaaacacaaaaattagccaggcgtggtggtgcgcatctgtaatcccagctacttgggagtctgaggcaggagaatcgcttgacttgggaggtggaggttgcagtgagccgagattgagccactgcactccagcctgggcgacaagagtgaaactctgtctcaaaaaaaaaaaaaaaaagaaaaaagaaaacatcctgttgtacacaatatatattttttgtcaattaataaaaatcaataaatttaattaaaaaaatagtcgagtgaagttatttcccatgactagctcctcttcttcctttagatttcatcttacatgtcactttcttggagaggccttaccaacctaaccaaagtagctccccagttttaatttttttcactgggttcctatgcctcccccaccagtctaagaactccatgaagccagtatgtcttgtgttcagcacatagggaagactcaataggtctttgttgactgaatgaaatgaaagaagtccttcaacatcctgcccctctgctccctcaacccccaaagcaccagtactttgtcttctcttctcttgggatgtaatggaagaggagtcttctaccaaggccgttctctgccactttcctcaagaagctccttgcctctttgattgattctcctgtatactctttttttttttttttttttgagacggagtctcgctttgtcacccaggctggagttcagtgccccagtctcagctcactgcaacctctgcctcccgggttcaagcgattccctgcctcagcctcccaagtagctgggattacaggcacacgccaccatgcccggctaatttttttcgtattttcagtagagacggggtttcaccatattggtcaggctggtcttgaactcctgacctcaggcaatccacctgcctcggcctcccaaagtgttgggattacaggcatgagccaccgggcacggccctgtatactcttcactaatcttttcctatcaatatgcaaagatgtttcccttaaacaaccaaccaaccacaaatcccaaaagtttcttcctctaccaggcttcagatcggcacatgaccgccttcttgccttgactttcaggagtctggtatcccccgtattcttttatcttagcctccttctctggcttttttttttttttttttttttttttttttgagacagagtccagtcctgctctgtcgcccaggctggagtgcagtggcgcgatctcggctcactgcaacctctgccttcagagtagctgggattacaggcacacaccaacatgcccggctactttctttgtatttttagttagggacggggttttgccatgttggccaggctagtctcgaactcctgatctcaggtgatccgcccgcctcggcctcccaaagtgctgggattacaggcgtgagccaccgcgcccggtcttctggctctttctaaagattgggatttcctaaagtcctgttcttttcaacctccattgaaaagtgttggggtggagtttgggaaggaggggctgaggagtgaggctgggttaggtggggaataaagagagggatatgagaagccccgaggtctggggtcaaggagacaggcgtgggggaaggatttgaaccactgttacgtgtagtgggggagacagcagggagagcgtgcccgggcacgacagcctggtgcacagccgagaaaacaacagcgcgtgcgcgtagcgacctctttgcgcctgcgccccccttgccagtctttcgccggcaaaaggaggacgtagaaaaggggacaccggaaactcactcttcacccggaaatggttattgaggaacatggcgttgctggtgcgagtc

SEQ ID NO: 26520 - DNA, 2300 bp, Homo sapien
cagtgagacctcatctcttaaaaaaaaaaaaagtttaaaagttagccagatgtggtggcacacacctgtggtcctggtacttgggaggctaaggtgaaagctgcagtgaggtgagctatgattgttccactgaattgcagcctgggcaacaaagcaagaaagaccctgtctttaaaaaaaaaaaaaagaagaagaagaagaatgcagacctgcaggaagctgtagttatcactctgcctctttggatatcagcttccgcatctgtaaaaagtgagggtggagagttcttgccttacctgcttcactacgcaaggcatggcaatgataacagctaacacatcctgagtgccacctctgtgcctgctcctgtgttgagtgcttctcatatccttgcagttagcaccatgaaataagcatattgttaaccctctttttttttttttttttttacaaatgaggaaaccaaggttcatggaattaagttacttgcccaaggcctctaactctaagtgacagaactgaaattttgaaagtgtgcagccttcagagctgagtgaccatgggtggagagtgtttgtgaactctcaagtatgatagatgccttgtaccctttggggcaagaatgaacagtaccagtttgcagcttgttatggttgcggttggaggtgggtggctgggggagagtgttttccaaggaggcagctgaacagatcctgtggttaggatgggtgacctgatcacatccccagagtctgggtgggaaaatgcaggagggtccacagtctgaaagagagccctagggcaggttgtggtggtagaggaaactcctagcgtgtcaatccaaacagtccactgggagcccaggccttcagtaggaggggcattgtggctcagatgacatgaacctctctgactgggctaaggcagagagaagctccagttcggtcagaactttccaagaaaccagggacacgcagcccaggaaataatacctgtgggagtcagccccacctgtgacccattcatcttatctatctgcccttgggtttctggccccccagtttctacactgctctccctggatccccagcccactccttggcttccccagcacctcccttccaggcccattctcccctcacacacaccacagctctgtctgccacggcagctcctttgtttacttccagagctgccaggcccaccactagccaaacacaacgaagcccagccagtgaggggaggctccaggctcagtctgtcccctcagagagaggtaatagcctccagaccaaggaggcagctcaaaggtaggctgcccccgcactgtgcccaagcttcaggcctagagggaaagggcacaaggtctgcccatagctgggtaggaatccctactgttgaagcagctttggtgaggagccccaggaatcaaagacccagctggagggaggtaggggaaatgttgaagccccctgggtgggaagtggaggcttagactgctcctggttctccctgtgtctattctgccaggtagaactggagtcctcagcccaaggcacccatatgcctgtctccccaccagagggctatgttcccctcccaaaagtctgtgccctgtgcctccccaaagattccagctgagaaaaggaagtgagcatttactctgggccaagccccaagcaggaaacattgtcagggtgtgcctggcatttgtctgtctgaggttagtggggagtttatttatctgatgtataattatgtatttatataatgtgtaatataaaggcaggggactccgattctgtttctggagctgggggctgatgggtgagcagtgaggtgtagtgagggtgtcaagctggagggcaacagggccacagacatggtcatgtgaggaacagtggtcagtggcgagaggagatgccccaacagggagaaggagagccttggcagcccagattccccaggggagagataaaggactctttcaatggtgcccaggtaattctgtgagtatgggggtagcagggcaggcagatattggtcgatgatgtaggaatgattttagaagaaatgaaatccccaatttccctcccttttagggatctattttggagacaacaaacttgactaaggaatctcaagaagaaaatataattctgctgccaggccccaatggagcaaatagagctcgggacccaggggcctttggaaggaacaggaatgcggttagaggtgagcactggccctgcttagctgcactctctgtcccattgtgcttcagtttccaggagtggggg

SEQ ID NO: 26521 - DNA, 2300 bp, Homo sapien
ttattttgtgtgtgtgtgatggactctagctctgtcacctaggctggagtgcagtggtgcgatctcggctcactgcaacctttgcctccacacccggctaattttttgtatttttggtagagatgcctgcaatcccagcactttgagaggccaaggtgggtggatcacttgaggtcaggagctcgagaccagactggccaacatggtgaaactccgtctctactaaaaatacaaaaaatagataggcatggtggtgtgcacctgtagtcccagctactcgagaggctgaggcaggagaatcgtttgaacccaggaggtggagattacagtgagccaagatcgcaccactgcactccagcctaggtgacagagtgagactctgtctcaaaaaaaaaaaaaaaaaaaaaaaaaaagaaggaagcctatctgactattgcttctcccccgccatccttcttacagcgtgaaaagtgttgttgtagagaaatgtacagaaggggtaactggctctgtctggggacgaggaaaggcttcccgaaggaggtaaattttcagctaaacttctcaggatgtagagtgcttcctccagttgtgggagagagagaggaggatatttcaggtgaagcgaacagctttccccgctgaccctgtgttaagttgcccaggggctctacggcgaaggttccccagaggaagggatcttccatacttcaatgaggcactttaagaaacccttgagttcagctggaattcagaccttccagagctaccagaaaaacatcatgtgggaaattgtgcccggcgcggtggctcacgcctgtaatcccagcactttgggaggccgaggcgggcggatcacgaggtcaggagatcgagaccatcctggctaacatggtgaaaccccatctctactacaaacgtaaaaaatcagccaggtgtggtggcaggggcctgtagtcccagctactggggaggctgaggcaggggaatggcgtgaacctgggaggcagagattgcagtgagctgagatcatgccactgcactcaacagagcgagactccgtctcaaaaaaaaaaaaaaaaaaagcgtcatgtgggaaatggcttttccagcctcctgtaggggccgctgctgccccagactcagccagtcttgtctaagaaaactcagaggacgtctctgctggggtggtggtggggtacaccctggacctgccgccatccaaggagtgaacttaagggcgacagtgcccccaagcctgaagaatatgcactcagtcaatggcatttgggggtagggagggggtgtagtgggcactgatatttttcagtctctgggtcaccacaagtttattaaaataaaagaaaatgtgggtaaatgctgccatctgtgctgtccctactcccaatacacacacacaggcacacacacacacaggcacacacacacacaggcacacataaacacacacacacacacacacacacacacacacacacacacacacacacgcataacaaatcaggtcccagactagatgcaggagttgaaactgctttaaaaacactctaagaacttaactacaaacccacactccccatgcttctggggcttaagatctttgagctcattcttcagcatctctcctcgggaaagtggggtgggctgctccatgaggtggaggtgaagacccctgagtctgccccgtggagggggaggccccctaagcctagagtcccgctgcagggctctgtgccaggagcccccgtgagccatggcctcgaaagggcagcggtgatttttttcacataaatatatcgcacttaaatgagtttagacagcatgacatcagagagtaattaaattggtttgggttggaattccgtttccaattcctgagttcaggtttgtaaaagatttttctgagcacctgcaggcctgtgagtgtgtgtgtgtgtgtgtgtgtgtgtgtgtgtgtgtgtgtgtgtgaagtattttcactggaaaggattcaaaactagggggaaaaaaaaactggagcacacaggcagcattacgccattcttccttcttggaaaaatccctcagccttatacaagcctccttcaagccctcagtcagttgtgcaggagaaagggggcggttggctttctcctttcaagaacgagttattttcagctgctgactggagacggtgcacgtctggatacgagagcatttccactatgggactggatacaaacacacacccggcagacttcaagagtctcagactgaggagaaagcctttccttctgctg

SEQ ID NO: 26522 - DNA, 2300 bp, Homo sapien
cgacaaagcaagaccccgtctcaaaaagaaaagaaacagaagactatcctagaaagtatagggtattactttagatagcatggtcagggaagacctagttgaggaagtatcatttaagctgggacctgaaggacaggaaggtaccagctaggccaagagctgggggaaaagtggtctaggtagctggcatagtgtatgcaaacgccctgaggcagaaaagagcttgatgtgcataatatttagattgtttcatttgtatttcaaatattgttgcagtgaacattcaagcacaatgcctgttgtgggattatttccctaggatggaatcccacaccactgcttctttgcatcgttttctctgtctagtgcctggagatgttccttttcccctctctagatagtttgcctttcagaatccgtgtccttccttccccttttactctccactttctctatttctcaaattagctattaagatcttttttgtgttcttacaggagaaagataaaatatagcttttaagcgttcctttctcaggttacctttggctgtggattaacctgaagccttgctgtttcactcgagctatccactcattcacccattcactcagcacttattgagcacctattttgtaccaggccttgtgctgagcgctatagtcagatgaccaaattacagtctctacgctcaagctcacaatctcatgcagcgcttcctaaaacgtgttcccaattatcagaatcaccctgggtactttctaaaatgcagattcctggactccacccccggtttagggattctctgggggtggaaaccaagagtctgcatttaccagttttgtttttaattcctactaaaaattgagaaccactgagtgcaagagtgaggcaggtaaatggagtttacaactctaagaaagtgcattaacaatttatacacaaggccgggcgcggtggctcacgcctgtaatcccagccctttgggaggccgaggcgggaggatcacgaggtcaagagagatcgagaccatcctggccaacatggtgaaatcctgtctctactaaaaatacaaaaattagccgggcgtggtggcgggcgcctgtagtcccagctactcgggaggctgaggcaggagaattacttgaacctgggaggcagaggttgcagtgagccgagatcgtgccaatgcactccagcctggcgacagagcaagactccatttcaaaaaaaaaaaaaaaaatttatacacaaaatgctacaggaataacgcatgggtcctattgggaagaaaaagttctctagaagtcaggcttaagcagaactgcagctccgggacggattaagtcaggtaaaggtaacactctgtgcagagacatgcagacaaaaccgagtgttgagtaagtaactcgcctgtaagtgttatgctgcctgaagcttctcggagcgtctgagcagcaaggtgaacaaccctcagaaaccggtcgcgctgccagtattatcgctaaccagtggcagcgagcccctttgtttctcggcagttgtaattgtagtctggtttgtaggtggagctgtgcgcaggcgcacctagaaccaggtgaccttgcacatgcgctgtatgtaacactgaagccaaaagcgaaatgattgagggcaatttttcttttctgcttccgaaatgtccctttcgcgaatccagagaccctgaccgtccccatttctggctagggatcttataattcttaaaataataccccctttccttcagggcctctctagtaagtcggctgccaatacccaacatggcgggaggccctgcgccggctcagtctgcctataggtgcaggacttggaggggcgggcccctcccaaagggcgggagtttggggggcggggcctggccctctgcctcggggtgggctccgcccccgtcccccgcagggccttagcagcggctgccgcagctcaatcgcggagcaactagccgggcgtctgcgggagccgagcgtggtgaggtggggcctcaggggcaggtgggaggtgctcgggttaaccgtccgaggcccggagacccgcccgtctagggcgcctgagggaatcccgttcgggcagcggcctcttgttacccgggaggaacccgaggcccagagaggggctgggacgcgtcgttagggcccggggcccgcttgcctcagcttcttgctgccgccagcacgctaagctccagtcggcgccgaaggagagcttcccgaccctcgtgtccagtagccgcaatcccaggctgggagggtgaggcgccgc

SEQ ID NO: 26523 - DNA, 2300 bp, Homo sapien
gatcgcaccactgcactccagcctgggtgactgagaccaggtctcaaaaaaaaaaaaaaaagtggggggaggcatataacttatagcttggtcagtggcagagcaatgactgaaccccaatctgattccaaattctacactctctccattacattagctgttaaagcatgaacattacattagttaaagcatggactacgaactcacagctctgtgaggggcacttcttaaatagtgagcgataatgacacctatgtctgcagctttctgatcgaaaaggagcaaagaaagatagaagaactaaaggaacagagggcgtaccagtagccttggttttgttgtgacctctataaatctgggaccagttctcctttctaagccttcgcggtaaaatactgatcacaagcctagcctccaataactcccagggccaaagtaaagatcaattcaacagacgttgattaaacccaaaggcaatctagtcaagtcatcaaatgccctggggacagtttcccagctccatccacttattagttgtgggactcctggcaaattactttttctatgaatacctcagtttcttcatgggtaaaacgtgaagctatagaaagaactcaccccataggattgttgggaagattaaataggcctttggctgagcgcggtggctcacgcctgtaatcccagcactttgggaggccgaagcgggcggatcacctgagatcgggagttcgagatcagcctgaccaacatggagaaaccccgtctctactaaaaacataaaattagccgggtgtggtggcgcatgcctgcaatcccagctacttgggaggctgaggcaggagaatcgcttgaacccgggaggcggaggttgaggtgagccgagatcgcgccattgcactccagcctgggcaacaagcgcgaaactccgtctctaaataaataaataaatgggcccttatgtgtaatgcattcagtagcacctgacaatttgtgatcattccgtacagtaagccatgactattatcatcacgtgctaggccctgggatctagagatgaaaaaggcaaggcataacatctaacgaacgagcttacggtgtcaacgaggggccgggaaagtaactcggtgcacagcgagtgcaaaaaccgagaagcgaatgcagctgcgcctggagaaggcggctgagaagcgatacttcagcagggtcctgaagaatgggagctccagagtcgggtggcgggtgggactgggctttcggatagattacgtgcaaatccgccaggacacagggagcgaggggcgggggggcggcagagcgcggcgcctcaccctcccagcctgggattgcggctactggacacgagggtcgggaagctctccttcggcgccgactggagcttagcgtgctggcggcagcaagaagctgaggcaagcgggccccgggccctaacgacgcgtcccagcccctctctgggcctcgggttcctcccgggtaacaagaggccgctgcccgaacgggattccctcaggcgccctagacgggcgggtctccgggcctcggacggttaacccgagcacctcccacctgcccctgaggccccacctcaccacgctcggctcccgcagacgcccggctagttgctccgcgattgagctgcggcagccgctgctaaggccctgcgggggacgggggcggagcccaccccgaggcagagggccaggccccgccccccaaactcccgccctttgggaggggcccgcccctccaagtcctgcacctataggcagactgagccggcgcagggcctcccgccatgttgggtattggcagccgacttactagagaggccctgaaggaaagggggtattattttaagaattataagatccctagccagaaatggggacggtcagggtctctggattcgcgaaagggacatttcggaagcagaaaagaaaaattgccctcaatcatttcgcttttggcttcagtgttacatacagcgcatgtgcaaggtcacctggttctaggtgcgcctgcgcacagctccacctacaaaccagactacaattacaactgccgagaaacaaaggggctcgctgccactggttagcgataatactggcagcgcgaccggtttctgagggttgttcaccttgctgctcagacgctccgagaagcttcaggcagcataacacttacaggcgagttacttactcaacactcggttttgtctgcatgtctctgcacagagtgttacctttacctgacttaatccgtcccggagctgcagttct

SEQ ID NO: 26524 - DNA, 2300 bp, Homo sapien
ctttagatactggggagatgagaaaaggcagcaaaggagactgagtgggagaggccagaggttggaagagagcaacagagaggccccacatgagatttaaataaggagctgcatgctaatttgtttttttcaggagtaagaaacaaattatgtctgtacacaaatgtctatactgtagtttctttctcagtaaataaaatgtttgtgtcctcaagtatttttctgtttttgctttaagtgacaaattctatttaataccattctgcatcttagtccttgtagcatttatgcctctattccaagtttaggtggtagtgttgcttctcttttaaactttatttaaatactccttttgtagtattttggatgagagaggatcaaatacataatttatctcactcttctgtcactttccactccaggttcacaggtggctgttggtctttagtaagggtgctgtcttccctgtctgatccttagcaaaagtaggaaggtaggtcttgttcatttctgtaccactgtggcagactcctgatactgagttgaaattcatgagtgtttatgggataaattaatgtacaaaagaaatgaatctttccctttttcctgcagtaatgataacattggctcagtggtttacagcttagaagtacactgacactcattatcttatttagatgtaatccaatttgttacagtttgccagctactgctcttttccctttctcaggcacattgaaatttactttccctttgggggctctgctagtttattcctagcagatctgatctggcagtgtgtttgtaaaaggatgctgaactgtgtcttgaggaagctcagaatgaaatctgaatttcagaaagattcctgagataatttttctctgtctcttctcttttattcttgttttaataaattttagttttatgaggattgttttggttttaaaaaactttaaatcattttttaaaactattttttacaacaattttagggttacagaaaaattgcatagtacagagagttcctgtataccttgcacccagtctccccttttagtatggtatatttgctataatgcaaatctttttttttttttttttttttttttgagatggagccttgctcttgtcgcccaggctggacagtgttggccaggctggtctcgaactcctgacctcaagtgatccgcctgcctcagcctcccaaagtgctgggattacaggtgtgagccactgtgcctggccatgcaaatcattttttgagataagtggggcatataaaaatataaacaaaatgaagttgctttatctctacaagcctcagtttccttatctgcaagatgaggggggtggactaaatttctaaatagctttaaaattttttaattatctgctaaagtaaaataattatataattgtaatataattttctttatttgcttaagtattactaataccaccttgccaaatcatgtttgcaagttactgacagccatatcctaaaagaaaacttaatgagaattcatggaactatgtgtggcaggactgcttattagagatattaggttgaatgatgtgaaattgccatttttgtagataaaaagtaatgagtgaggctgggcttggtggctcacacctataatgccattgctttgggaggcttggaccagggggtggctgtctgaaaccaggagttcgagacaagcttaggcaacatggcaaaaccttgtctctaccaaagaaaaaaaaaaaaagcctcggtggcacacatcttcagctcctctgaagggtgaggctggaggatcccttcagcccaggaatttgaggctgcggtgagctatgattgcaccactgtactccagcctgggtgacagagctagatcctttctctaaaaataataataataataggataatattagcaatttcatatggttcaacctaatgttttgggatagggattcaacaaagtgtgagggggcctttgagacctcataaactcccactgcatgcaaaagcccggctcagccctcaccatactaggagagaaaaggctcctcagttcccttggagtaacttggatctacattattgtaggtagagttgttggcagaaatcctgggataagagaatagtttcctggaagatctgtgcctccaaccagcagagagggattgagcttcattgaactcaacagagccaacatttcatagcaccatggtgagttggtcacacagccttggcaaaaaggctgaaaaggagggtgtaatagtatggggaaaggttgtattcccctg

SEQ ID NO: 26525 - DNA, 2300 bp, Homo sapien
aaaggccgaggagggtggatcacttgagctgagttcgagacagggctggcacagtaaaccccatctctacttaaaaaaaaaaatcagcaaggctcggtggctcacgcctgtaattccagcactttgggaggccgaggtgggcggattgcttgagaccaggagatggagaccagcctagccaacacagtgaaaccccgtttctaccaaaaaaatacaaaaatgagccaggtgtggtgttgtgcgcctgtagtcccagctacctgggaggctaaggcatgagaatcacttgaacctgggaggtagaggttgcagtgagccaagattgtgccactgcactccagcctgggcgacagagtgagactctgtttcaaaaataaattaaataaataaataagcctagcgtggtggcacacttctgtagtcccagcatcttggcaagctgaggtgaaaggattgcttgaaccttggaggcagaggctacagtgggctaagattgtgccactgcactcctgcctgggtgacagagtgagactttgtcctaaaaaaaaaaaaaaaaagaatttgggtatcataggagtaggaggaattaataacacatgagttctggtttcaataactgggtacgtggtggaaccatttgttgagatagagaagttttgaagctgggtgcagtggctcacgcctgtaatcccagtactttgggaggccgaggtgggcagattacctgaggtcaggagtttgagatcagcctggccaacatggtggaatcccgtttgtaccaaaaatacaaaaaattagccgggcttggtggcacgcacctgtaatcccagctattcgggaggcagaggcaggagaattgcttgaaccccggaggaggcagaagttgcagtgagctgagattgcgccactgcactccagcctgggtgacagagcaagactctgtctcaaacaaaacaaaagagacagagaagttttgggaagggttggtttacagggaaaatcctgggttcagtctcaggcttattcaggtgagatgtctctgagccatctaagtggcaattcagtaggctgttggatatggggtctagagactacaagagaggattgagttgatgtcacacaactccagagagggcatcacacacaagtatatttaaagttccaggctggggcggggtgcagtggctcatgcctgtaatcccaacactttgggaggccaaggcgggcggatcacctgaggtcagaagttcgagatcagtctgaccaacatggggaaaccccgtctctactaaaaatacaaaaaaattagccaggcgtggtggcgggcacctgtaatcccagctacttgggaaaccgaggcaagagaatcacttaaacccgggaggtagagggtgcagtgagccgagatcgtgcctctgcactccagctggggcgacaagagtgaaactccgtctcaaaataataataataataataataataataataataataataatttaaaaataaagttcccggctgggcatggtggttcacgcctgtaattccagcactttgggaggctgaggtgggcggatcacttgaggtcaggagtttgagaccagcctggccaatatggcgaaaccctgtctccactaaaaatataaaaattagccaggcgtggtggcgcatgcctgtagtcccagctacttgggaggctgaggcatgagaatcgcttgaaccaggcaggcggaagttgcagtgagccaagatcatgccactgcactccagcctggacaacagagcaaaaactccatctcaaaaaaaaaaaaaaaaagttccctctcaacccctgtttatttatcccataaatatttattaaatgattctaagtcttagagctgcagaggtgaagaagagagactaggtcagcccctgtcctcatgaatcttacatccagtggaggtcatttcggtgtcagagaaagggtagggtggtggcttttttcaggcaggctaaaggagggaggtcacaatgtgtactttgtgatgagatctatgatataactgggatgacagcaaggcccccactgaggtattccttcccctctcaggactagccacatgctgtctctctgccctggcctcttccaccccatgcccagtcagagaccgttttgagggtgagcaaatggatagtgaggcaggagaggaggggttggaaggaggtggaaggtggtgggatggggagttgtggaggccgacaggacagagggaagctggtgctgtctgtggcctcagcccctcatccttacaggtaga

SEQ ID NO: 26526 - DNA, 2300 bp, Homo sapien
gggccaagtctccacttcagcctctgatttggtcgcaggccaatccttcataggtgtagccaactggaggcttctaaagggcacctaggggtgttgccaggtccctttagcttaatacaaaccctgattgaggaggctcttgagcagcttgctctaaccagctgccgctatgaatcgtcttcaataaatctatgcttttgttattccgttcttctgttgctgtttgtctttcgttgcccttctgttactttatgtgttttgttcaacacgccaagaacctggacaactctatgctggtaacaactgcaggtaacctggtaacaactgcagtttcaaactctcctgggctcaaccccagcctcccaggtagctgagactatagacgcatgccaccacacctggctaatttttttatttttatttttatttttggagacagaatctcactctgtcgcccaggctggaatgcaatggcatgatctcggctcactgcaacctccgcctcccaggttcaagcgattctcctgcctcggactcacaagtagctgggtttacaggagcacactaccacgcctggctaatttttgtatttttagtagagatggggtttcaccatgttgaccaggctggtctcaaactcctgaactcaagtgatgcttcctggctcggcctcctgaagtgctagggttacagatgtagtttttaaagtttttgtagagtggggtcttgctgtgttgcccaggctggtcttagactcctggcctcatgtgatcctcctcggtctcccaaagtgctgtgattacaggtgtgagccattgtgcccagcccaatttttaattaaaaaatggaatgatggaatgcacattactttgcatcttttcccccttaaaaatacattcttagtatacctaaaggagtaaatctacctcattcttttgaaaagtggcctaatattccatagaatgggtgtatcgtgatttattcaatttatttaatgtatcagtgggcattctggctggttccagatttttgccattgaacaatctcatgcatacatctttatgatgtggtgcacttaaaatctttaagagacagattcaatatcttaaggtgtaacaaccacccagatcatggtacttttatccttatattaaaatttttttctgttaaccttggatagctgcttacatattttttcttttttaaaatttttctattaaccttgacatggtgcttttacttcctaaagtggaattcctgtatgaaagcctatgagcttttatatcttactcattgcagctgcattactgtgggagctgtccctctagagacactgggctgcaatgggaagtgtcagggagagcttaagctccatatcacttgagtctaaacctggagggatagagcgtgtccgtgaggatcccagggcctggagagcaatttagggtaatattcagaaagcagcgctcaggagaagcactgggacgctgtttaggtaaaatcaacccaaaagaccctgattcccagagtactttgaggtccagaagaactgggctggaagcaggtcctgctattaattggctgtgatcttgggcaagttatttaacttctccaggtcacagtttgctctttggaaaacggagataagtcacacctgctttcagggcggacacccttactttacatcagaatcatccgatgccattcctagcgtttcggcttcagtaggtgggaatcaattatttgcatttctaataggtaatcagttgataatgatgcggccggtccggtacactcgaaaaaccactgttccaggatattccaagatgttccaagagtcttaaacacctggtgcagttccgagcacaaggcacacgaacggtgctattagcgtttctaaccccgcagagaactcctcgcaccccagtcctcaaaatcccgccccggacagcggaggcccgggcagtagcttccagacccaattgcccgcgcaagggggcgtggcagcatcgttgggcggggccgcctgtaagagaacgcggctaaaggtggggccaagcgtgcggtttgctgcgcctgcgtgaggaaaaagaggggggcgtggctccaggccggaagagggagtctgtaggggcgggccggctggcgtcccctttccggccggtccccatggaggcgctggggaagctgaagcagttcgatgcctaccccaagactttggaggacttccgggtcaagacctgcgggggcgccaccggtaggccgcagcggggccggggtcgcgtggaggggggcgtcct

SEQ ID NO: 26527 - DNA, 2300 bp, Homo sapien
ttccagtaaaatatacaaacttttctgtggtatagctctatttttcctctcttttgtgctaaaattgtcatatatatgtgtatatatgtatatatctacaaatacataaaataaacccaccaatacagtagtaaaattgtttcccttaggatccattgatagatatggaattccatatatatattttatatatatatatattttatatatatatatattttatatatatatattttatatatatatattatatatatatattttatatatatatattatatatatattttatatatatatattttatatatattttatatatatatattttatatatatatatatatggcctttaaccataaaataaaataaaccataatatatattttaagacagagtctcactctgctgcctaggctgcagtggcgcgatctcggctcactgcaacctgtgcctcccaggttcaagctattcttctgcctcagcttcccaagtagctgggattacagccacccgttaccacacccagctaatttttttgtatttttagtagagacaggatttcatcatcttggccaggctggtctcaaactcctgacctcaagtgatctgcctgccttggcctcccaaagtgctgggattacaggtgtcagccaccatgcccagccaaaaaatatatttgtgtgtgtgtgtgtgtatatacacatatatattttagacagggtctcttgctctgtcaccaaggctggagtgcaaatcttggctcactgtaacctccgccccctgggctcaagtgatcctcccacctcaacctcctgagtagctgggaccacaggtgcgcaccactatgcccggctatttttttgtatttttggtacagatggtgtcttgccatgttgcccaggctggtctcgaactcctgagtttgagcagtctgcctgcctcagcctcccaaagtgctggggttacaggcatgagccaccatgcccagcttctgacagcactttgtaggctccaaagtacttatgtttctattatgtcatttgatatttacaacagtcttttgaatccaggattgtgtccctttttttttttttttttttttgagatggagttttgctgttgttgcccagactgcagtacagtggtgtgaccttggctcactgcaacctccaccttctgttttcaagcgattctcctgcctcagtctcccgagtagctgagattacaggtgctcaccaccacgcccagctaatttttgtatttttagtagatatggggtttcactacgttggccaggctggtctcgaactcctgaacttgtgatctgcccaccttggcctctccaagtgctgggattacaggcatgagacactgcgcccggcctgtgtcccttttttagctaggaaacaggatgagaaggcaatggtttaccagagattacacagtgaggctatggcagagctgggcttagaatgcaggtttagatgtattttttttcctacctgtctctgtggctacctttccctgttccccaggtcttcaaagacacagctcctctcttccacccccaggacttgccggagcagccttacttgcagcctccactcagcatcttggtgattgagcgccgggcctttggccacacagtccttgtgggttcccacattgtcccccacatgctgcgattcacatttcggggtcatgaggatcctcctgaggaggaaggagagatggaggagacaggggatatgatgcccaagggacctcaaggttaggaaccttctccttcagggacaccagacagaagcccctctgattcctggtggacgtggctccagagggccctccgatggggtgtggaatctgacttctacttacccactctcctcatgctgccattttccccctcccaggacagaagtccctggatcccttcttggctgaagcgggtatatccagacagctcctgaaggtgatggggtagaggagatagatggtgaaggggctggcagtacttgggatggtgctgggttagagggacaaagtctgctcttcctcagcctcctctgaagaagctcccactaggaggcctcctaaatcaaggccctgggctggaggaagacatcccagatccagaggagctcgactgggggtccaagtactatgcgtcgctgcaggagctccaggggcaggtgggggcagagaagggtcccagggagggggctggggtgtaaatggtaaaaagaatgatatcttagctaggcatggcggcgcgcacctgtagtcccagctactca

SEQ ID NO: 26528 - DNA, 2300 bp, Homo sapien
cccgtctctactaaaaatacaaaaattagccaggtgtggtggtgtatacctgtaattccagcgactagggaggctgaggcaggagaatctcttgaacacaggaggtagagtttgcagtgagcagagatcacgccactgcactccagactggcaacagagggagactccatcttaaaaaaaaaaaaaaaaaaaaaaaaaagtgtagctggtttgtgggccaaagatttctaaatgaggtgtccctggaaaagataactgaaaagggtccctaggagggagaagccgtgacccttggggttggggatggggaatgtaaacgtgtagggggtggaggggacaaaggtgggagagcagagctcagagtgtagttaggggtctggggagtggggtacgggaagtggcagtgttagggcaagaggtatagggagtaagagtgtgagggtcatggcgtagggtggagggtaggaagagggtaaggctgggcaggtagggagtggactgggagtttggcatggtgtggcgatgtgcagtagaggtgtgccctggggaagcaggattgctaggtctagctggggtcatgagaagaggcatcggggccctgacatgccttcttcacacacaggcacccggggcagcccctggtgaggtctgtgccaagctggagctcttcctgcggctgggcctgggcaagcaagccaaggcctgcacctctgagctgcccccggatttgctgcccgagccctcagccgggctgccctccagcctacaccgggacggtgagtgcagagggtgggcagggcaggtataaggcccacctggctctctgcccaaggtgtggggctcagtcaggggacttcagtggttcccctgggcaaacatgacaccttccttgcccctcaccccagactttagctacttccaactccgggctcacttgtaccaggcccggggtgtgttggctgcagatgacagtggcctctcggacccctttgctcgagtcctcatctctacccagtgtcagaccacacgggtgagggctgggatgacatgtgggtggaagggacccaggagacaagttagggtgggtctgagcttttccccaaggcccctctcctcgcactctgggtttgcagagcagggtatcaggatggggtactagatggccctaacttagcaggtgatgtagaactggaggtcttagcggcgaggagtcattttctggggttgactttaggcctggactctgaggggccaattgcaatggggaggcagggctgtgaggggctggctgcaacaccaactgaagatgctttcgtcttcctcacatctcactcttcttgtgatgagcatttacttaaagtattccttcagagcaggggtgttcgcatggcatgcatgttgggagccttctcctgatatctgctgctacccgcttctctgtatggcccccaaggtcctggagcagacgctgagccctctgtgggatgaactcctggtatttgagcagttgatcgtggatgggaggagggagcacctgcaggaggagcctccattagtgatcatcaatgtatttgaccacaataagtttgtgagtgtggcctgggccctccctgggttcctggccaggagtttcccccttgatgcccaccttccctggctcctgagcctcttcccctttgtcttcactgccctgctccccctagggcccccccgtgttcctgggcagggcactggccgccccaagggtaaagctgatggaggacccataccaacgcccagagttgcagttcttccccctgaggaagggaccctgggcagccggagagctcattgccgcctttcaactcattgaactagactacagtggccgacttgaggtcagcatgccctggcgtggctagcacaggctgtgagcccaacttgttagtccatcaggccatccagccctagggaatataaaacatggatatgtcccaggaccagcctccaggtctcttttccccagagaataaagactgcaggtttgtcctgaggtcacctcattggaccacttgaccccaaggaacattgcaagtattcatgtgctaggttcaccttgttgggccatcctgcatgcctcagacaccctgctcccttcctgcacgaagctgcttcccgagaccccctcccttccaccaatccagccttggttggttcctgtgcatttacatttcaccagtacctctccatatcccctccccacacctaggcttttcctcctttggcctgattcctcttcgccctctgactgtttccctcct

SEQ ID NO: 26529 - DNA, 2300 bp, Homo sapien
ccggccccgactccgcgctgatctcccttctcctgtctttaacgccaccttcagggcgagacgtcggtgagcgccgaggcggcggcgcccgaatggaacgagcagctgagcttcgtggagctcttcccgccgctgacgcgcagcctccgcctgcagctgcgggacgacgcgcccctggtcgacgcggcactcgctacgcacgtgccggacctgaggcggatctcccatccgggccgcgcgggtgagcgcttctggccgcggcaaatctggcctcactcgcctcggtccatagggctccatagggcccattcccaaccgcaagccccatcctcgcgaccccgctccgcctaggagggctggtccgcccgcaaaacaaactgcttcaagccgcccccagactgtgaaccccaccatcggtttggctccgttggcaaaattctgaccacaaccgcctgtccagtaaccagcccagtcccacccttctacagctgtgcacacgctgacactgccggtccactcctttccccgacccccaggcctggccgatcgcccgtagctccgccccaatcccgaccccgcccccagggctcaggctgcgtcccccgaggccgggctcccgcgatttccagctccttggggcgctgagctgttttggaggcgccccaggtcgtgttccacagcggcgcgtccgcagctgctggccaacttcttccgtttcagagcggcttagcccccctcccctgccctcacccccgaatacttggaggagatcagggtgaggtgcagagatttaccagcactcgccctccccacgctcccctccaacacgcttctcttgttccccacagcggggtttaaccctaccttcggcccggcctgggtgcccctctatggctcgccccccggcgcggggctccgggatagtcttcaaggtctcaacgaaggcgttggccaaggcatttggttccgcggccgccttctgctggctgtgtccatgcaggtgttggaagggagagctgaacctgagcctccccaggcccagcaggggtccacgttgtcccggctcacccgaaagaagaaaaagaaagccagaagggatcagaccccaaaggcggttccgcagcacttggacgccagccccggtgccgaggggcctgagatcccccgtgccatggaggtggaggtggaggagctgctgccgctgccagaggtgggggctggggggtagcaaagggggcggggtcacctcagctctggaaggtggaatccactctcaggcattaaacaccacgacaggggtctcaatttgggggcctgggcgaagagtgaggtgtgtgcccacatgggctctggtatatgcacacatgttgtgggagagaggacccatacccagggccaatgctggggccgggaggagggagagggagtaagaaacctgcagtgacttccaagccttggtcgcacttctttctgtgggcaatgcggccaagcatagtccaggctgttccctgggagagtaggtgctgactccagcctgatggcctcccccagaatgtcctggcgccctgtgaagatttcctgcttttcggtgtgctcttcgaggccaccatgatcgaccccaccgtggcctcccagcccatcagcttcgagatctccattggtgtgtggcctagccgaacccctgagtgccatttcagaccttagaaccctggaaggggtgttgactttcagtaaggggcaggttctgacttctgttgaggcagaggtggttgagggggggttccagccctcagcctggcgcccactgacccttgctgctctggggcaggtcgcgcaggccgtctggaggagcaattgggccgagggtccagggctggggagggaactgagggtgcagccgtggaggctcagcctctgctgggagccaggccagaggaggagaaagaggaggaagaactggggacccatgctcagcggcctgagcccatggacggcagtgggtgagtgctgccggtggctggaagggggggtttgggaggtctccaggaacccagaatgcccgcgaagcctcctctccatctgccaggccatacttctgcttgcccctctgtcactgcaagccatgcatgcatgtgtggagttgctgggaggaccacacctggcgcctgcagagcagcaactgcgtgcgcaaagtggccgagaggctggtaagggcaaggctggcgcccacagggagagaccgggccgtagggacgcctaggacactgcagcctttgaaggaagctctgcagtggggctaa

SEQ ID NO: 26530 - DNA, 2300 bp, Homo sapien
tcacctttcgaggtgaggcttgcaggggcgccctaaggatatttgaaactgggggcccttgacccaatgccttcccatctctacagcccatttcttttctctacccacactggtatctccaaccctctgcctctttccttcccattgtctacctttctttaagggtgaatccaggagggacttgacactgggccaagagtgggggaagcaaattatttttgtgtgtgtggggggaggggctgatatatgactagtttcagttctgagcaggctttacccagaaaacaagaaaaattcactgtggtccagaagcagatatcggtgaggtcagtacagttggttcctgatctgtctcccatccaagtccaacctggggttcaggggctcattcctgggtttggggaagtatagtcttgggaggtggggtcagtctgaggcctgagagatcagacccagattggaacaaattagttgcaagactgggggaattcattcttgatcactagttagtcccagatcagccctcactcagattcaaacccatgtgcagggatcccttccaggtttggggatgttagtcctaaagttagctctaagtctggaggattggctcctgtctgagggttaggaatagggtttttttttttctttttttttcttttttttttgagacagggcctcactctgtcactcaggctggagtgcaatggcacaatctcagctcactggaaacttcacctcccaagttcaagcgagtctcctgcctcagcctcctgagtagctgggattacagacatgtaccaccacacctggctaatttttgtatttttagtagagaaggggttttaccatgttggtcaggctggtcttgaactcctgatctcaagtgatctgcctgccttggcctcccaaggtgctgggattacaggcgtgagccactgtgcccagccaagaatgggctttggattggagtttagggtcagcacagcatgggtgtcacaagcttcctcctgtccccagctgttccgatggccccactatggggctccactggctggggagtgtctgtctgtgcaggtggtcaactgcagccgtgtattcagccttaggtgagtaggcctggggagacagggatgcaggttgggctgggggtgacttagagccattctcttgggtcactcttttgctctatgccactcccctaggcctctagggaccctggtgatctccctgcagcagctacagaatgctgggcatttggtgctacgggaagccctagtggatgagaatcttcaagtgtccccggtgagcccctctggcccccaggctgccacccttaagtacctctagataaagggttccatttctcacaggggaaaacctaagacccagagaggagtggtaacaaggcctccagccaggattcctttcagcaatcaattcttttgggagacaaagatgaacctggctggattttcctggtgtttcatggaagggctcatagcctagtagacatggacctaacttcaaatctcagatctgccatttcccgtctgggaacttgtacacgttctttagcatttggtagctgttttctttttttgttgttgttttgagacggaatcttgctctgtcacccaggctggaatgcagtggctcaatctcggctcagtgcaacctccacctcccaggtttaagtgattctcctgcctcagcctcccaagtagctgggactacaggcgcccgccaccacacccagctaatttttttattttcaggagaaactgggtttcaccatcttggccaggttggtctcgaactcctaaccttgtgatctaccctcggcctcccaaagtgctgggattacaggcatgagccaccgcacctggcctggaagctattttctcatttatataatgtggagttcttttgttcagtccgtcatcatttgttgagctcttatgataagccaaatgctgagctgagcaatgaggattccgtggtgagcaaaaccagataaagattcacacccttggaagggaggcaaacattaaacaaatattcacacaagtaagtgtgaaactggaactggcaggtgttagaagaaagctggtaggggctgggagagggtaccacaggggagtatgatctacttgggggccagagaaggttccctgaggaaatagtacctgaacttagacttgaaggataacagatgttaactgggaggagagaatgttccaggcagaggaaaaggcatatgcaaaagtccagcgccttgaaggagcacagctggggtg

SEQ ID NO: 26531 - DNA, 2300 bp, Homo sapien
aagatacattcatgacttcactcagcaaaagtattgtacatctgttttagggttattaacctaagtgatgagctcttagtccacaaaagtgtacacatgcccaatattttgcagaaaatttcaaagatttgcagcctccatggagccattctatggtcccactaggatcctaggaccccaagttaaggacacctggcttccagctgaatgcttactatgttgcaagctaggaacacacatttaatcactttttaattcaataaatgtgttgaatgcctacagcactacttctgagggctaagggattcatttattagttcatccatttgttcagtgttttaagggtctaccatgtgccaaaccctgatctgggcactgagaacaggaagatgaacaagaaacaacatgaggccaggtgtagtggctcacgtctgtaatcccagcactttgagagtccgaggtgggaggaccacttgaggccagcaatttgagaccagtttgagcaacatggcaaaaccccatcactacaaaaaatacaaaaattagccaggcccactggcacatgcctgtagttccagctacttgggaggctgagcctgggagattgaggctgcagtgagccttgattgcaccactgaacttcagcctaggtaactgagtgagaccctgccttaaaaaaaggaaaaagaaagaaaggaaggggctgggcgtggtggctcactcctgtaatcccagcactttgggaggctgagatgggcagatcactgaaggtcaggaatttgagaccagcctggccaacatggtgacaccccgtctctacttaaaaatgcaaaaattagccagggcgcaatgagtcatgcctgtaatcccaggactttggaaggccaaggcaggcggatcacaaggtcaggagtttgagactagcctggccaatatggtgaaaccccgtctcaactaaaaaaatacaaaaagtagccaggcgtggtggcatatgcctgtaatcccagctacttgggaggctgaggcaggagaatcgcttgaacccgggatgcagaggtggccatgagccaagatcacaccattgcactcttgcctgggcgacagaaggagactccatctaaaaaaaaaaaaaaattagccgggcatggtggcgggcacctataatctcagctgtgtgggaggctgaggcaggactattgcttgaatccgggaggcagaggttgcagtgaaccaagatcacaccactgcactccagcctgggcgacagagtgagacttcatctcaggaaaaaaaaaaaaaaaaaaaagaaaagaaagaaagaaggaagaaagtaaaaaaaataaaaataaaagagagcgagagagagatagaaaagaggagaggccgggcacaatgactcatgcccataatcccagcactttggggggctgaggtgggcagatcacctgagatcaggagtttgagaccagcctggccaacatggcgaaaccctgtccgtactaaaaatacaaacaattagccagctgtggtggtggacacctgtaattccagctacccgggaggctgagacaggagaactgcttgaacccaggaggcagaggttgcagtgagctgagatcgtgccattgcactccagcctggatgacagagcaagaccccatctcaaaaaaaaccaaaaaacaaaaaacaaaaaaacaaagaaaaaagaaacgaaaaggcatgaggtccatgtccttgaggcctcatcggctggcagggagcagactggggtcctgttcactccccttgcctccctcccaccctatcacagctctcactccctgaggatgcaggatggaggctgaggcagtcctgccagcttgcagctggtggaggcagggagggctgaattgacctccaggaccttacccctatccctcggtcctctcctccctccccacccatgacccccaggcctgctccctgtgtgtttgactaaagggtagggattgctaaacctgctgggtgagtccagtgagtcagaggcgattcaggtgggcgggctggtgggcagaagggcagacgggcagaggaagtgccagtgccactgggaccatggctctgacggtaacgcgtgcaacgactaacagggctgaccggcacccacgaccgacaagtgaagctcacctttcgaggtgaggcttgcaggggcgccctaaggatatttgaaactgggggcccttgacccaatgccttcccatctctacagcccatttcttttctctacccacactggtatctccaaccctctgcctctttcc

SEQ ID NO: 26532 - DNA, 2300 bp, Homo sapien
ttgtattccagcctggccacagagcaagactctgcctaaaaaataaacaaaaacaaaacaaaagcacattcctgggccaactcagaaattctgcagtatctgcagtagaatcacaaggtgtgcctgggaagctgaatttctataagctgcactgatattctgttacatagcaagagtttggggacctctagtcttctggctgtgaccatctgattcctcattctttcctccatggctcaggtgtgcagcctgagtgtgggtatgacgattggtgggtgctgaattctcaacccacagacccctgggaaaaatgggtctggaggagggacccacagatcctgaatgagctctctgacctgatgtctaggatgagaggagggggctgaagggcttgcagagcaaaggggactaagtatttagaagtgccctgagtgatgccctgctccttcttaacattcattatttgcaaatatttgagcacctactacatgctaggcttatctaggtgctggaggatacagtagtgaatgaaaatctgtgccctgattaagtttatgttctagtgggcatggcaggcaataaggaaataaataaatgggccaggcatggtggctcacatctgtaatcccagcactttgggaggcagaagtgggtggatcactcaagctcaggagttgaagaccagcctgggcaacatagcgagaccccatctctacaaaaaatacaaaaattagctgggtgtggtggcgcaagcctgtagtcccagctactcgggaggctgaggcgggaggattgcttgaggccgggagatggaggttgcagtgagctgagatcatgccactgcactccagcctgggcaacagagcgagactccatctcaaagaaagagagaaatgaaatatatagcatgttagtgacacgtgctgaggagaaaaacaaaacagggaagggggatagaaactggtatttgctaagtgcaattttagatggggttttctaggaagtgctgtgacgtcatcacttgctttaaaagaggccaggcgcagtagctgactcctgtaatcccagcactttgggagccccaggcaggcggataacctgaggtcaggagttcacgaccagcctggccaacatggtaaaaccccgtctctacaaaaatacaaaaattagccaggcatgatggcgggtgtctgtaatcccaactactcgggaggctgaggcaggagaatcgcttgaacccgggaggcggaggttgcactgagccgagattgcactactgccctccagcctgggcgacacagcaggactctgtctcaaaaaataaaaataaaataaaaataaaaatgctgggcgcagtggctcatgcctgtaatcccagcactttaggaggccggggcgggtggatcacctgagatcgggagttcaagaccagcctgactaacatggagaaaccccgtctctactaaaaatacaaaattagccaggcatggtggtgcatgtctgtaatcccagccactcaggaggctgaggcgggagaatcgcttgaacccgggaggcggaggttgcagtggaccaagatcgcgccattgcactccagcctgggcaacagaatgagactccatctcaaaaaaaaaaaaaaaagaaagaaagaaagaaagaaagaaagaaagaaagaaagaaagaaagaaagaaagaaagaaagaaaaaaactgttatagactgagtgccattttagatggggttttctgggaagtgctgtgacatcatcgcttgctgtaaaagaggccgggcgcggtggctgacgcctgtactcccagcgctttgggaggccgaggcgggaggatcgcttgagcctaggagttcgaagttacaatgagctatgatcaggccactgcactccagcctgggcaatgagaaagaccctgtctcttaaacaacaacaaagtcagaaggagaggctgccatggctacggctccaggtgacgtcacggccagctccgtgacgcgcggccagggcagcccgcggagaccgaggctcctctgtgacgtcagcagccggccgggacacagcgggagggcaggtgcggccgcggggcctgccgacttcacgcagggtccgtggggtccccgcggcgcgcagcggctgaaggaggccccagggccttggcgaccgcagcggcggctttagcgtcagtgactaggcagcagggggtcaggatgcggcgaagctcccgcccgggctcggcctcgtcctcgcgcaagcacacgcccaactttttcagcgagaacagctcaatgag

SEQ ID NO: 26533 - DNA, 2300 bp, Homo sapien
cctgtgttgctcaggctggtcttgaagcaatcctcttgcctcttggcctcccaaaatgctgggattacaggtgtgaggcactatgcccggcctaaacttcagattttattcagctttcaccagttttcctgtcttttttctgttccaggatccaaccctggatgctacattgcatttagtaggttttgtttttaatggactatgttttacctacacagagcaaacctataaaaacctataaagcataggtttagtttaacagtgtggcctggttttccaacttgctgtttttggcatactgggctagcaccagtccagtctgccatagaaatcccgaaaggttgttggaattgtgataatttcaaccttttttttcttttttttaagtgatagggtcttgctcttgttacctgagctaaagtgcagtgatgcaatcatagctcactgcagcctcggactcctgggctcaagggatcctcctgcctctaactcccgagtagctaggactacagacttaagccaccacatccagcttttaattagcaggggcatgaagttcggggggctaggcccaaagcggcttgagaacagctttctttttttttttttttgagatgtagtctcgctctcctgatggtctccatcccctgacctcgtgatcctcccacctcggcttcccaaagtgctgggattacaggcgtaagccaccacgcccagccagagaatagctttttctataataaaataatactatagtgaagccgtggaggggtcacgatggatttaattttttttttttttttgagacggaatcttgctctgtcgcctaggctggagtgctatggcgttatcttggctcactgtaaccgccacctcccggattcaggcgattctcctgcctcagccaccctggtagctgggaccacaggcgccagccagcacgcccagctaatgtttgtatttttagtagagacgaggtttcgccatgttggccatgctggtcttgaacccctgacctcaggtaatccgcccgcctcggcttcccaaaatgctgggattacaggcgtgagccactgcgccctgccctagattaaaactctttttttgtttttttttctgagacgaagtttcgcttttgtcatccagggtggagtgcaatggcgccatctgggctcactgcaacctccacctcccgggttcaagcgattctcctgcctcagcctcccaagtagctgggaccacaagcaccgccaccacacccagctagtttttgtatttttagtagaggctgggttttgccttgttggccagaccggtctcgaactcctgacctcatgatccgcccttctcggactcccaaagtgctgggattataggcgtgagccaccgcgctcggcctgtataaactttttttttttttttttttttttttgagatggagtcttgctctttcgcccaggccggagtgcagtggcgcaatctcggctcactgcaagctccgcctcccaggttcacgctattctcctgcctcagcctcccgagtagctgggactacaggtgcccgccaccacgcccggctaattttttgtattttttagaagagacggggtttcaccgtgttagccaggatggtctcgatctcccgacctcgtgatccgcccgcctcggcctcccaaagtgctgggattacaggcgtgagccaccgcgcccggcccccggcctgtataaactcttaaatgggaaaaaagaatcaggttttggctgttttgtcaggatataataactagccaccacgttgtggtccatttaatcctcaaaaaacttagaggtaagcacaattcgctccttccgcggaaactggaagacgtgaagcaatttgcacagtcttgcagtgaagggccaagctagacactcatacccagcccacccgccagggccactagcccaaggtcggtcctgtgcgccaacagtcgcaagcagggactgaatatccccctcttagcacaaaacccagtaacttccgggagatcgcccgagaccgtcagcgcgcttgcgcggccccttgacgtcaaccacgccgttcctcccccttctggaacgcggagccgctgagcgggccgacggccattttgtgaagcggcgaaggaggtggtggctgcgttgggctccgggaagccgttcgggctggggctgtcggccgcggggcggaggcactcgcgcggggggtaattcggggtctgggttctggtgccgcgcagctttccccggtaagactcccgcagcccctgaacgggtggggc

SEQ ID NO: 26534 - DNA, 2300 bp, Homo sapien
gcctccagggttcacgacattctcctgcctcagcgtcccaagcagctgggactacaggcgcttgccaccacgcccggctaatttttttttttttgtatttttgtagagacggggtttcactgtgttagccaggatggttttgatctcctgacctcatgatctgcccgcctcggcctcccaaggtgctgggaatacaggtgtgagccaccacacccggcctaatttttgtatttttagtagagacagggtttcactatgttggccaggctggtctcgaactcctgacctcaggtgatccacccacccttggcctcccaaagtgccggaattacaggcgtaatcccgtgcccggcccaatgcctggctaatttttaaaacagtttttgtagagatagaggtttcactatgttactcaggcttgaattcctgacctcaagcaaccctcccgcctcagtctcccaaagtgctgggattacaggcatgacccactgcacccagcttattatttaaaatctggtgtccttcataatcgatttggaaaccactgccttaatttttatagtacctccattctcagcataaacagtttttctgtgtgggagaactgtcaagtgccaattctattcagaagccctgattacttggtgaataactttgcatgctcatgctcatattttggcacaaaatttctgtaattcggcttgtttagtcacaggttatacgcatttttaagttttttgtttttttgagtcaaggtctcagtctgttgcccagcctggagtggagtgagtggcacgatcatagctcactgcagcctcgacctcctaggctcaagtgatcctcctgccttagcctccagagtagctgggactataagtgcatgccaccatgcccagctaagttttaatttttttttttgtagacacggggtctcactgtgtttctcaggctggtcccaaacttctggtctcaagtgattctccttccttggcctcccagaatgctgggattgtagtcatgagccaccgtgctccaccaaattgtttttaaatttaaattttattttgaaaaagtaatattcatgtgattcaaaattcaaaagctacaaaaaagtgcacagacagccaggtgcagtggcacacgcctgtaattgcagcactttgggaggccgaggcgggcagatcatgaggccaggaatttgagaccagcctgtccaacatggtgaaaccccgtctgtactaaaaatacaaaaattagccatgcgtggtggcgggtgcctgtaatcccagctaatcaggaggctgaggcaggtgaatcactttaaccgggaaggtggaggttgcggtgagctgagaccgtgccattgcactccagtctgggcaacagagcaagactcttgtctcaaaaaaaaagggaaaaaaaaggcacagacaaaagtctgcctctcacctctgacctccagctatgcagttcccttctggggaggtaatttctttcttggtttttttttttttttttttttttttttctgattttctctggttattgggaggcaatttcttgggtttttctacaattatcctatgtgtttacaaacaaatatatacttctcctccagctttcttttttatccagatgatagcatactgtactcactgtttcaatctttcatttttcacctaatggtacatctttttttttttagacagagtcttgctctgtcactaggctggagtgcagtggcacaatcttggctcactgcaacctgtggctcccaagttcaggcgattctcctgcctcagcctcctgagtagctgggattacaggtgcgtgccaccacgcccagctaatttttgtatttttaataattacggggtttcaccatgttggtcaggctggtctcgaactcctgatttcatgatctgtccgcctcggctgcccaaagcactgggattacaggtgtgagccaccgtgtccagcccataatacattttttttttttagacggagttttgctcttgttgcccaggctggagtgcaatggtgccatctcagctcactgcaacctctgcttcccgagttcaagcaattcttctgcctcagcctccctagtagctgggattacaggcatgtgccaccatgcctggctaattttgtatttttagtggagaaggggtttctccatgttggtcaggctggtctcaaactcccgaactcaggtgatccacccacctcagcctcccaaagtgctggtattacaggcgtgagccactgcgcccggccaatacatctttgttttt

SEQ ID NO: 26535 - DNA, 2300 bp, Homo sapien
aaaaaaaaaaaaagaactattgagctcttactatttatagtacttcttacttacagatgttgtggtaataaacactttatcagcattgtcttatttaatccacccagtaaccctacagagtagaaactaccacaatctctgttttaaatgaggaaaataaggctcaaagaaattagataacttgcccaagtcatttagccaggaaatatgggaaccaatcaaatgcctgcagtcaaactccaaggctgctctttgaatctcttccagaaagaatccaaaaccatttctacctccatgcacacctaccaagaaagaaatgcctcccacaggccactgcccctctttgaccttagaacctcctagactcctgtgtactaacctgacgagcacgttccatggctgcctcactctcccagccataagcatgtgtccgggagtgtgggttcccatagtagttgattaggtaagggagcatggcatcaagcacccgggggtcctgaacacaacagaacagatcattttccttgagcgcatcgtcaattcaggtcccactccacccctcagacctggccaccctgccttaagacactctcaacccctcaggcactgcctagaggaggcctcaaacattcttttgttcccacaaaactacccaccaaatatcaacctaatacactcccactcacaacccatcccaactcggattgttctgcctcccctcaggtagtctacaaacactgccttgttccgacatctgtttctgctggtgtttccattcctgccaggtaatgtgatctataaggggctgggacaggacagggcctaggcaaacacccctggtcacacattggtgaaaacttgcattagtcttttaacccgtttaatacttgtccaagttcacacagttactaagtggccgttctgctcattccagagcccatgcttttaactaatactatagagcctgcgctgaagtgatctgaccaaggtcaattgctagtgagtagtaaagccaatgccagtggcctcgaatttaagcctcccgactcctcgctcagtgctttttccagcacaccttcacggctctcacttctccagggattcagccatttctttgcgtgatcacgcccatcatttacttcctataagcagccttgggaaaagcttcatccttaccagaggagttgtagcttgcacatccatatagagaggtcgcagcactggccccacctccggggcagcggctgtatctgcgggaaccgcagactgaggagcacggtctccaactgataaaaaatggaacggagtagccaagtaagaccgaaggcaactatgaacgcatggcatccaaagggcagaaggaaaaatctggctggaggtgagataagtgtaagggatgctagggtcgaatctcaatggaaagaaaacaacaccagatacctgacacgctgtaaaaggaggtaagggagagggagagagggttcctggagggggtgttgagttgatattcaaatggtatcgtaggaaggaaggctctaaagggcaaagacgtttagaaggaacgtggagccagagtaggtgcagtcccttctgaccgaaggtaacggtctgcacgggagcccggagcagcatctgtaacttggccaggagcggtctgaaggacgcgcctccacggctctgggggcctgtcgcgcagggtgcgaggggtggtgcgccggggtcaaccgttcggggacccgcctaagaaagtttgagggatgtgtcatttgagagaagggtcagagggtctgggcagcagggtggacaggaaggctccggaatattcagttgcgtcgccgcgcggaggggacaggtccgcgcctcccggagagcgggacccgagcgtaccgcgcaggcgcagcccccgagtgggcgccgcgggcttcggccctggagccgctgtcaccgccactgccgcccgcctccaagcggctcggagcagcatggtcccgctggcagagcccaccttccgaagccgctgcagtcctgggccccaggctcccggaagtgctgcccggcgctccggaagcgattcatcgggccgcgagcgccctccccgtcgttttccgtgagagacgtagagctgagcgacccagcccgcgagcgaggtgaggtaggcgccgggcgacgcggggccggaacgcgaagagggtggtggagtcgggctacccactgattttccttcccttacttcccctgagcccttgggcccacttcccagcctaccgcttccgtccccgcccgactcttgggccagcgcc

SEQ ID NO: 26536 - DNA, 2300 bp, Homo sapien
gaaataatgcaatgtgtgaccttgaggaaatttcggcttataaatccattttttgaagtagtttttctcctttaaaatggtgaccgtagtaacaagcacagagttgtactgagtaattagttgaatagtatctatggaaaatactagacactcccaagttttccaattttggattaagagaggcaggccttgtgaaagagatactaaccctagtcattacgttagtccatctctttagtgcagaagatccttggcaaagctggataataggctgagagaagaatattcctttaagagagggacactgactactcaaagactttcttttattagtacatgggctgggattgatgggaagggacagatgtagttggcaaccatggttagcatcggatgcccatcccaatggccatgaatgtgccaaaggtgccgccactctgcatcatggttttcccaatgccgcccatcagctctcgaccccgcattccgatcctgaggaggaaaccaagatggagctatttggtaacaaaaatatcagaaagagtattaactgctcctttccaattttttgctaacactagtctagcaacccctacatctgattttccacttactggatattatatcttactacctggggtgggtaatgagaaggaaaaagatccatctgggtctccagggtatttttctggtggatgtcgtattaactgccttcagtttgtgggaggcagcagatgcagtgtaaaatacatagagaaaccagcttttttgactggtgttgcctgcagtttaagacccaataaagacatctgtcttttagtttcttggtgttaatgattttggagtaaggtgggggttcaagagtcagctctacaatttacacatagtgtcaagtgtaaaatgggcatctcaacattatttacaggattttgaaaactacagtatttagcacagtgcttaacatagagtaagtgctctgtaaatgataatttacaatctagggatatggcaataacagcctctaaatgtgaaaatgacctttagagtgtaaagtttaactgctttatctctgtatcctgtatccagaatagtaaaaccgctgaacgagtttctttccttatgcgcaattggaaaaaaaaataaaagcaacagtagtaactagttactgagcacttaatatgtgccagatgctgtgcaaagtgtgctgatcgaatttttacaactctataagttagatgctactgtcttcattctacacttaaggaaacccagtctccaacttgcctaaagtcaccgaaccagtaagaaaagggccagaaagcattttgactctaaagctcaaattcttaagcactgacgcttccaacctgactttacagattgaaggtggtttggaatgagtctggctcgcgaggggacagagagggaagtcgaaagaaggaggctgtgttcaggctccaggccgaatggggcagggccggaaggtctggttgtcctgcccagagatcaccgcccgcgcccctcacctgagacaggaaaaggtgccgaagagcgccccggccgccatgcccacggcgcaacccatcacgaagcccattttgacacggtcgaagcagcttggctgggactgtccgtagggacccacggccaccggcatctgcgggggataggaaagtgtgggcccaggcgctggcccaagagtcgggcggggacggaagcggtaggctgggaagtgggcccaagggctcaggggaagtaagggaaggaaaatcagtgggtagcccgactccaccaccctcttcgcgttccggccccgcgtcgcccggcgcctacctcacctcgctcgcgggctgggtcgctcagctctacgtctctcacggaaaacgacggggagggcgctcgcggcccgatgaatcgcttccggagcgccgggcagcacttccgggagcctggggcccaggactgcagcggcttcggaaggtgggctctgccagcgggaccatgctgctccgagccgcttggaggcgggcggcagtggcggtgacagcggctccagggccgaagcccgcggcgcccactcgggggctgcgcctgcgcggtacgctcgggtcccgctctccgggaggcgcggacctgtcccctccgcgcggcgacgcaactgaatattccggagccttcctgtccaccctgctgcccagaccctctgacccttctctcaaatgacacatccctcaaactttcttaggcgggtccccgaacggttgaccccggcgcaccacccctcgcaccctgcgcgacag

SEQ ID NO: 26537 - DNA, 2300 bp, Homo sapien
taggcatggtggcacgtgcctgttatcacagctactcgggaggctgaggcaggagaaacgcttgaacacaggaggcagaagttgcggtaagccgagatcgtgccactgcactccaacctgggcgaccaaggaaacaaccaacctcaggatgaacattgctttggaaataatgcaatgtgtgaccttgaggaaatttcggcttataaatccattttttgaagtagtttttctcctttaaaatggtgaccgtagtaacaagcacagagttgtactgagtaattagttgaatagtatctatggaaaatactagacactcccaagttttccaattttggattaagagaggcaggccttgtgaaagagatactaaccctagtcattacgttagtccatctctttagtgcagaagatccttggcaaagctggataataggctgagagaagaatattcctttaagagagggacactgactactcaaagactttcttttattagtacatgggctgggattgatgggaagggacagatgtagttggcaaccatggttagcatcggatgcccatcccaatggccatgaatgtgccaaaggtgccgccactctgcatcatggttttcccaatgccgcccatcagctctcgaccccgcattccgatcctgaggaggaaaccaagatggagctatttggtaacaaaaatatcagaaagagtattaactgctcctttccaattttttgctaacactagtctagcaacccctacatctgattttccacttactggatattatatcttactacctggggtgggtaatgagaaggaaaaagatccatctgggtctccagggtatttttctggtggatgtcgtattaactgccttcagtttgtgggaggcagcagatgcagtgtaaaatacatagagaaaccagcttttttgactggtgttgcctgcagtttaagacccaataaagacatctgtcttttagtttcttggtgttaatgattttggagtaaggtgggggttcaagagtcagctctacaatttacacatagtgtcaagtgtaaaatgggcatctcaacattatttacaggattttgaaaactacagtatttagcacagtgcttaacatagagtaagtgctctgtaaatgataatttacaatctagggatatggcaataacagcctctaaatgtgaaaatgacctttagagtgtaaagtttaactgctttatctctgtatcctgtatccagaatagtaaaaccgctgaacgagtttctttccttatgcgcaattggaaaaaaaaataaaagcaacagtagtaactagttactgagcacttaatatgtgccagatgctgtgcaaagtgtgctgatcgaatttttacaactctataagttagatgctactgtcttcattctacacttaaggaaacccagtctccaacttgcctaaagtcaccgaaccagtaagaaaagggccagaaagcattttgactctaaagctcaaattcttaagcactgacgcttccaacctgactttacagattgaaggtggtttggaatgagtctggctcgcgaggggacagagagggaagtcgaaagaaggaggctgtgttcaggctccaggccgaatggggcagggccggaaggtctggttgtcctgcccagagatcaccgcccgcgcccctcacctgagacaggaaaaggtgccgaagagcgccccggccgccatgcccacggcgcaacccatcacgaagcccattttgacacggtcgaagcagcttggctgggactgtccgtagggacccacggccaccggcatctgcgggggataggaaagtgtgggcccaggcgctggcccaagagtcgggcggggacggaagcggtaggctgggaagtgggcccaagggctcaggggaagtaagggaaggaaaatcagtgggtagcccgactccaccaccctcttcgcgttccggccccgcgtcgcccggcgcctacctcacctcgctcgcgggctgggtcgctcagctctacgtctctcacggaaaacgacggggagggcgctcgcggcccgatgaatcgcttccggagcgccgggcagcacttccgggagcctggggcccaggactgcagcggcttcggaaggtgggctctgccagcgggaccatgctgctccgagccgcttggaggcgggcggcagtggcggtgacagcggctccagggccgaagcccgcggcgcccactcgggggctgcgcctgcgcggtacgctcgggtcccgctctccgggaggcgcggacctgt

SEQ ID NO: 26538 - DNA, 2300 bp, Homo sapien
acttactgttcagacttgctactgtttcactctgtagcagctttcagatggcgtccactgtagaaatctaacgattatatgagaaaatatattggtcacatccctcttatttttaatactgattagatgttttcattttcctaaacttcatagcttttaagaaaactccagagatttttatttctgccttgctaaatttttacactaggccaggaaatcaataatcaagttgccccattatgggctagatttgacaagttaaatctttgaaaagtccttaaaaaaataatatatgcatactgttggaatggtgtatttcccaatggtgatgttcttcctaaattgggaaatcatggaaactgttacagctttttgatgtgcagtatttacaattttataatatccttttaaagtgttaagtactatggccactaaaaatataaatacttgcatttcccaagtacttggaattgaattctcaagatcagggtttttcactcattttctgaccggtgtgcttccctttccccatttcccattattcccagctgtatagtagtgtagtgaaaatcacttgagatgtggaagagtagtctagtctaggaagagagagggaaaagtaagtttcccaggataagagggggaaaaaaggccccaaagccttctcaatgaggaatggggaaggaggttttgctgccaggttttactaagtgcatttgaatgaaccctgctattgtagtcctcttttattaatgctttcctgacatttaccctgttagttgaggctcttcattgttcctgcactgagctgtagaattctcttttgttatagatttgcaaacaagactttcccagcagactgaaggtgagttgaagtgttcatattttttatttttgtctttgaaatagaattaaatgtagtaagacagttttctatatttattgtcatatttttataccagtaatttggaccaaattttgacacagtgacacatagtggtatattcatagtaatctgtctgtatttcagaagacctaacccaaattaatggacttaaaaaaaatcaaaataacaatttttttttttgctttagtttgcttaaaattttcaaccttgtttttgttttatgcctacctgtgtgttctaagtgttgataagttgcatatagaagtcaggaaatgaagtattctcttattaacgagtaggcaagtattttagaacctggaatctggaagttgtcttagtataaagttgtgaatcatgctataaaactcacctttttttgcttaagacatagtactcagtgatttatttaagccagtaccaagcaataagaggtttatacatacttaaattacatgcacatttcagagaaaccattcattaagtaggctatgatttcttgtttttagttatcactaaatctctgttgcttgacatgagcattttgctgttaatgtaagttctatatcttttgtaggagtatgcttaatgtttagggaaatgattatgagaaagatatgtcatgttccatcacagtcaagaattaaattttttcacaaacaagatgcttctaatcagtgctgttttgttaagagatttttaaaagattttcctagatttactgtgttctgcattgatctagcttgaacgtgaatgtttgtatagtacgttttcttaatattttttagtattcatagtatataatcatactaaacttgagaaactggaagaatcaagtcttcctcagttctgtttagactttctagttttttttaaggatacttccatatcttctgtaagctacacagtgagcttcatttttgcacagttataatacactctcgaatctttaacttttttccagcagaatttgacatgttatattaaaattttgttttatttaaaataaaactttatgaaagaaaaaacttatatgttacagagaagctaaagcacctgtaatgctaccagaaagttatcatttatgatatatttcatgcacagccctaatttctcggtgtaatatttctgatactttaagtgatcgtttattttaattaccataatttctaatgcactgttttatccttagctttgtttgttattatgttttggaatgaaatttggtcagataatatgattacggtgagttctgtaacagctactggtaatatttttgtaaatcacgtgaaagcattggagcaactgtcttggaaaatgctctttaaacttcaaaccccagtatgttttggtagtagtggatattacacatatatgctgctcttttcagtgttct

SEQ ID NO: 26539 - DNA, 2300 bp, Homo sapien
agtcccttttaagttgtaacaggatttgactattagtgtggatttcgataacccttctttagttaatgtaataaatgctctttgaagctggaaatatactggtttcttgcacccttgtagttttctctgggcttttatgcaaaagattgtattttctgaatgtcttagtatgttgctgtctttttacctgcctggggttgccttcagatgtgggtgaggacttgtttacaaaaagtcctagaagaccttaagttaaaattagctctccaattttcaagtgttttcttttggcagaataagttttgggtcctatgagaggtaaataggttggttgcctctcttgctatagcccatctagagcagaacaaaaactttgtttttgagggggatggagttactttttaccttgttccctaattgaatatatttaggacttttggttttagaaatctcagagttctatagttggaatagtgtcacagagatagtgttaggtttcttaggcaacaaaattggagtgttacctattgcccatctgggcatggctttgatgagttctatataaataatgagtgtagcctaattttctgtcatgtgctacctagcatatacatttctgacagtcaggtggattatcttgaaattttagacaaactttctgcctccttggaaagctctacatctccttgtgattggagtgtgggtttcaagattccagaaggtgggtgtcttcattttctattttcaatgcactctaaagatgacctgcttacaggttctctgaggcagacctcagttgctcttgtgatatgtaactttgctttgataaggaataaacaattacatatccagataatgatacagaattgtcaaaatgtttaatcattaagccactacaaatagacattttcgtggaataaactgattttgaaatgtctttcaatttatattgaaatatctgaaggcacctctaaaatttgggtgatgacacagaggtatagattataagatttaattatgaatgggtggtatactgtgaagactacggaagtgagcagaaagatatgtttggcttttttggtttttagttagagattttaaaaaggtctgtgaaggtcaagttgatcattggttttgattgcatcccacaggtttctataaactggcttaaaaatggcatactccattttctggtgtattcattgtaactttaggaagtatttgaaatggtcacattaaagtctaggaatgtcaaattgtattttaatgcgttagttctttttctttttctttttttttggagacagtcttgctctgttgctcaggctggagtacagtggcatgatttcggctcactccaacctctgcctcccaggttcaagcgattctcctgcctcagcctccacagtagctggaactacaggcctgtgccaccacgacccactacttcttgcattttttagtagagatgggttttcaccgtgtcgactaggctggtcttgaactcctgacctcaggtgacctgccttcctcagcctcccaaagtgctgagattacaggtgtgagccaccgcacttggagttgggtttttttttttttttttgagatggtgttttgctctttttgcccaggctggagtgcaatggcatggtctcagcttgctgcaacctccacctcccgggttcaagcaattctcttgcttcagcctcccaagtagctgtgattaccggcatgcaccatcaggcctggctaatttttgtatttttggtagagaggggatttcaccgtgttggccgggctggtctcaaactcctgacctcaagtgatctgcctgcctcggcctcccaaagggttgggattacaggcgtgagccactgcactggcctgcattagttcttattgtcctttgtcattacggttttgcccatgaaaaccaaaatgttgatgtctatgtgaccctttgaacgtgttaaatatttccatatgtaaatgggggcaaaattgacttaatggtaaattactatatttgatgaaaatttttataaatgaaccagtactagtacttgaatgtgaaaatattctattgtaagtttgttttattaatttattttgtggattacagtaatgcttttgttggcctgttgtatgacaaactatttaaaggttcacattttgatttgtatttgccaacaagcccttttgcttgttaaagctatagctaactctcaggagataattgcagttctactcttagaggatggtgtctttcaaataatgtcttgtctgctgattttcagtaa

SEQ ID NO: 26540 - DNA, 2300 bp, Homo sapien
agcagaaaactatttaagggaccttaaatcatcaagcgacttagagcttaaatccttcctcttcccaaacaagaagtctagcggttaaggtcaaattctgtcatgtcatgttcctaaacaaacaagaaaaaccaagtgccatcttcatgctttcattttgcactagtcataatactggaattaccgaggggcaggaagagatagcaaaggttagcttgctttatttctgacatattatgcttcaatttcctgtgacagttttcttttctttctttttctttcttttttttttgagatggagtctcgatctctgtcacccaggctggagtgcaatggcatgatctcagctcactgcaacctctgcctcccaggttcaagtgattctcctgcctcagcctcccgagtagctgggaattgcaggcgcctgccacctagttttttttttatttttagtagagacagggtttcgccatgttggtcaggtcttgaactcctgacctcaggcggtccacccgcgtcggcctcccaaagtgctgggattagatgcatgagccactgcgcccagcctccagagcgagactgtctcagaaataaaataaaaagaggatctgaattttcagaaaaaggattaagggagtattctaactacaaaataactgttattaataatcctctaagataaatcctaacctgtgtgtaaagttaacctgagaggcaaaaccacttaacatctatatttgctctaaataattttgtttagcagaaacagaagttagctgttttgaagatcaaatatttaccaggcgttttacagacattatatcatttaatcttcactatagcccttctgagccttcattcattaatttactgagggtccacttgggcagacatgccctgctaacctctaaaaattcagtactgagcattacctgccttcctcagtctcaagtagcttagactagctactaagtacgtcctcttttaaatcaggaaatgaaagatcccctctgagaggttaatttgcttgtccaaggtcacacagtgttgcagcagctagttacactaatcaaggcgtctcatttccaatcttttctgccctcaatcattagactgttaagattagagggtaagatttttgctttgaagacttctttccagttttttttcccagcatctaggaggaaacctcacacagtactgaccaaagaacaaatggctaattcatactctaattacctggcatctagaagacttcaggggagaggagccaggtcccagggggaagggggcctttttttttttgttgggggggtgtcttattttttcaccaaatcgtccagtaatattcaggaaggggaacatttttgaaggaacggtagcaaccctgacacaagagctgattaaattcggggcacaaaactgatcccatgccaagggaagcaagagtttattttttccaccttttttttgcttttctccactatttccaaggttgtttcaaagctcgacagtggaggccgcgccattggctccaaatgacagggaaatctatttttattatctccccctctccccctacccctaaagatctcttcttctggccttctgatacacttttccacttcctctccaccctcagcggataatctgaatatggccgttttatcctatcgccataaggactaggttgccttatggcgaccttgacagccatctgtgtgggaggccggagcgggggcgatcggctgtgccggaggaatcttcagatggccgtgaggaggcgccacgagggggaggtgaccgctgagctccactcagcgaagagctctctgaaagattgacaggcagcctaccaactgtctttgccctagagacccgctctgtctcgcgagatttgggtgcttacgcggagggggagtgaaaggcgcctcactgaatgggggatgggaatatctgtggcgcaatcattgcgcgagattgggctacggtcgccggagccatacttaggtctcgcgatacttcggccgctcaaatttggagcttggggcagcttctcgcgagagcccgtgctgagggctctgtgaggccccgtgtgtttgtgtgtgtgtatgtgtgctggtgaatgtgagtacagggaagcagcggccgccatttcagggagcttgtcgacgctgtcgcaggggtggatcctgagctgccgaagccgccgtcctgctctcccgcgtgggcttctctaattccattgttttttttagattctctcgggcctagccgtccttggaacccgatattcgggc

SEQ ID NO: 26541 - DNA, 2300 bp, Homo sapien
ttgctctatcacccaggctagagtgcagtggtgctatctcggctcactgcaacctctgcctccagggttcaagtcattctcctgcctcagcctctcaagtagctgggactacaggcatgcaccaccacacctggctaatttttgcatttttagtagagagagggtttcaccatgttggccaggctggtctcgaactcctcacctcaggtaatctgcccgtcttggcctcccaaagtgctgggattacatgcgtgagccaccgcgcccagccatgttacaattttaatagaatacatgtactgcccaagcaagtgtagctgaagcttttgtccctggttccacagtgtctctacctaagggctgctctttgccctgactacctcaactgaggcaataccctccttagtttccagccctggtttaaaaagcacccctcaggctggatttgctggctgaggcctgtaattccagcatttctggaggctgaggcaggaggatcacttgagccaaggagtttgagaccagcctggtcaacaaagtgagaccctgtctctaaaaaaaaaaaaaaaaaaactcggccgggcacggtggctcacgcttgtaatcgcagtattttaggaggccgaggcgcgcggatcatgaggtcaggagttcaagaccagcctggccaagatggtgaaaacccgtctctactaaaaaaaatataaaaaattagctgggcgtggcggcgtgcgcctgtaatcccagctacttgggaggctgaggcaaagaattgcttgaacccgggaggcagaggttgcagtgagccaagatcgcaccactgcactcccgtctgggctacagagcgagactctatctcaaaaaaaaaaaaaaaaagtggccaagtacggtgttaattccagcactctgggaggctgaggtgggtggactgcttgagcccaggaattcaagaccagcctgggcaacatcgtgaaactgcgtctctacaaaaaaatgcaaaaattagccaggtgcacacctgtggttccagctatctgggagactgaggtgggagaattgcttgggcctaggaggtggaggttatgaggagccgagactgcgccactgcactccagcctgggtgacacagtgagaccgtgtctcaaaaaaaaaaaaaaattagctaggcatggtggcatgggcctgcagtcccagctactcagaaggttgagctgggaccacaggtgcgcacgttcacgcctggctaattgttgtatttcttggagagacgggggtctagctatgttgcccaggctggtctcgaactcctgagctcaagtgatctacccacctcagcctctcatagtgttgggattacaggcgtgagccactgctcctggtctcatattcttttggggtggcttcaactccgaccttcgtccccagagaaaatacagctccttatccttagcagcaattggaaacctttctaggagttaatgataaagtgggggagaaatgagtgcaaaggctctgagatgagaagaacctggattgttagcggagttgaaggacactgagaatgtgggggagctggattcgtgaggataagaaagcagcaggtcaggtccagactttgaagagcctggtagatagtctaggtgaagagttagatcttaatccggagtagggagggaaacgagctttgagcaggggatggcgttttgaaaagacctctctgccggtgtacgaagaatggattagaacggcgaagagtaatagggtggaaaccatcttcatcttggagagagatggtggtcgcttcgatggagaaatgggaagctttgagacgcatttaggtggcaaaattaacgggtgatggatagcgtccattccccggcttcggtgatctcagtgattacgagtgagtggggacttcgtgttcctgctagggcgcgggcctgtttcccgcgcgtcagggtagtgggcgtggcctgcgcaggccgttgccacagtgatcgggcagacggggcagggggcggggcagctgggaccttacgtcactcggtggtggcgatgatgcgtgtgtgtggggggcggggcatacgctgggcgcgtcccgggggtcacgtggtgcagagcacgcagagtccttctgtcggttggtcctggagcggcgcagccggagtggggccgtgaggtgagctcgcggccaggcgaagccggccggccgggccgggttgggccgggcccgcgctgcgcgcgcgccgtgcgggcggggacggcgacggacgccaccgctgcttcggtcccctgcccgg

SEQ ID NO: 26542 - DNA, 2300 bp, Homo sapien
actccggaggctgaggcaggagaatcgtttgcacctgggaggcggaggttgcagtgagcagagatcgcggcactgcactccagcttgggtgacagagcgagactccatctcaaaaaaaaaaaatccacaaattctcttggacatttttcttgtaccctcaaaactaggcccagtgctaagataattaatgtagcaagtagaggttgaaaactggagctggatcatagaaaagattcaggaggtcaattggcaaggtatcaccatctcctgtaaggaagtaatttctcactcattttactttttttcttttatcttaagtaagaatgcccttttgatggcccatttataatgcagtgatttctgcatatatatatgtatatatgttttatttatatataaaaatgacagacactaagaaattatgtatctttttttgtgtggttttataaacatggtagctgtggattcaaactctcaaactttgcaaccaataacattggaactgagaagaaggaaaatatcaaaaggatgtgaagtcccattaaaacgtcctcggcttgacaaaaattcatgtgagtctacagtttgtttatgtgtggctagaatttgacgttgtttgggtcaacttcctctatattcatcctgtcccccattccctataggctctaatgtttgtctctggtcacatgaggtaatgtgagttggatgcagttggatcagaaggagtttttgctagaagaaaaataaatcccaaagcacaaactgtactaatgttgggttctgtggtatcatctccatatccataaatcacatttgatttggatgccactggaaatttaatggcttaggaagggatgggtttcatatgcagagtgaaactttaaaaatactacttattggcctggcgcagtggctcatgcctgtaatcccagcagtttgggaggctgaggtgggtggatcatctgaggtcaggagtttgagaacagcctggccaacatggtgaaaccctatctttactaaaaatataaaaattagccgggtgtggccaggcgcggtagctcacgcctgtaatcccagcactttgggaggctgaggtgggcagatcatgaggacgggagattgagaccatcttggctaacatggtgaaaccccatctctactaaaaatataaaaaattagccgggtgttgtggcaggcacctgtagtcccagctattcaggaggctgaggcagaagaatggcatgaacccgggaggcggagctagcagtgagccgagatcgcgccactgcactccagcctgggcgagagagcgagactccgtctcaaaaaaaaaaaaaaaaaaaaaaaaaaaattagccgggtgtggtggcgggtgcctgtaatcccagctacttgggaggctgaggcaggagaattgtttgaacttgggaggcagaggttgcagtgagccaagactgtgccactgccctccagcctgggtgatagagtgagactctgtcctataaaaaataaaaatacaaaataaaatactatttattgatttaaaaaaataccctctggagtgagttggctcaaatgtttaaataaatttaaaataaaatagtatcctgttggctccaaaaaggatttgtgatagctctaagtaaggctcttataaacctttttaagtcgactttgcaagttagtacatttgggaagccccaaaatagaacatagttgtcaagattcggacatgacctagcacatgttttcagaccatgaatccttaaagaagtgaaattctatcctggcagggacacttttcccttacttaaaactgtaaactagtaaagggtatttccttttatcactactctaacattccagtagtctctctgtaaagtccttttagagacatccagccctgaaatctgtagtagcacagttatttcttcttgttggtctcttgactacaactctcttaatggtttaatagcccaggaaaagtcaaaaaactactcggaaaacactgacaaagacttatcgaggagacgttcctccaggctgtccactaatgggacccatgagatcctagatcctgacttggttgtatcagatttggttgatacggatcctttgcaagacacgttgtctagtaccaaggaatctgaagaaggtgagtcagtctgttcaggaattgtcttgccaacctggttcctatttagtgagaatcaatgtaaatcattatgttctgccttccacaagtattaaattgtcttgaaatcaaactattgaatgtgctgcagtgtttttataatgta

SEQ ID NO: 26543 - DNA, 2300 bp, Homo sapien
gggcagttttcctctacatcttgccctctctgtctcaaggatttaggacctagattatgttgctgcttcaggcagttctgctgctgacaagataaattctgttagcatttcactaagctgatgggtataattactttagttggaggtcactaaaacctgaatttacaaataaaaactggatcagggagcagtctgtgtgtgtgttgtggaggagtgtgggtgaaggtacaacagataatatccctcctttgctgagatccttccagtggctccctaaatcactcatagtaaaagccaacttcctcacagggcccttcatcatgttctgctgctagcctccatctgcttctttcccttactcaacctaattctaatttcagttccattggagccatacagatctccttgctatttctttatttcaaattccagttattcattgctggcatatagaaaagcaatagattgttgtatattaactttgtgtcttgtaaccttgctgtaagtgctgttctggcagtctttgttttgatcaattctttgggatattctacatagacagatcatctgcaaacaaagatagtgttatttcttccatttcaatctgtagagcttttatttccttttctggcttattccactcgctaagatttccagtaaaatgttgaataggagtagagagagaggcaccttgctttgttcctgatcttaaggggaaagcatccaatttcttaccattaagtatgaagttggctgcaaagaagttctttatccagttgaggaaattccctcctattcatagtttgctgccccatcagctttttaggttggtgcaaaagtaattgtggtttttgctgtgactttcagtggcaaaaacagcaattcttttgcaccaactgaatagaatgtagctctgtgagggacagggggtgttatctgtctttgttcattgcaatatccctcctccctagaatgtgcctggaacatagtatatgcatggtatctgttgcctaaatgaattgaaaccatggctaataatacggtggtagtcaaactgtgtaaaaatgagttttgtttttatgtttggggaagaccctgttctcaggatcaatgaaaagtaaaaatgactgatagcttttttgaaattcagaaggcatctgaccatgttttgccagtctgctgtctttgggccttgggtttttggttttaaaaatgagtgcttttacaaattggtctaagttctctccagctttcatgtttgttgactttctttctagttgcagggtattttaaaagttaaggagctcaaatacccttaagtcctatgttctctagccagtagatcaactctgcctatagattccaggcttgccagccagtaggcacagcccactcttcctttctgatggttaccaagtgctaatttgggagaggggcctgggttgcagaggagacatggtgctggagagtcagaccaatttgcttttaaatacctatgtgatgtcaggtgggtgatttcacctctctgagcttcagtttcccggcctgtaaaatgggaatgatatacacacaagttgttgtaaggattaaatgagatatttgtggtttccttgcacacaagtgcttagttaaaatggaatctgattgtctaccctgcctcacacctgctttgtggatatcttgattccatatcagaatcacttggaaagttttaaaaatcctgatatccttgaaaacatcatgctaaatgaaagaaaccagacacaaaaggtcacatattgtatggttccatatttatgagatatccagagtagataagcccatggagtcagatgcaggttggtggggctgaggggaagggcttaggggaggggaaatgctgcttaatggtaaagggttttactttggagtgatggaaatgttcttagaactatatcaaagtggtcgtacaacattgtgaatgtactaaatgcaactgaattggttgtttttctttacagctgtatcgagacttaattgtacaatgaactacacatatttaaatggtataattggtgagatttgacatatgtttatacccaactatcaccacaatcaagatagtaaacatattccattccctcccaaactttcctcatgcccctttttagttcctccttcccacctctcccctccccctgagctccaggcaaccactattctgcttactgttacttgtggtgtgttttctctcttttttcttcccccccgagatggagtcgctgtgttgcccaggctggagtgaagtggcacgatctcaa

SEQ ID NO: 26544 - DNA, 2300 bp, Homo sapien
acgactgaatttttctttctttcttttttttttttttctttgagatggagtctcgctctgtcgccaggctggagtgcaatgacatgatctcggctcactgcagcctccgcctcccgtgttcaagcgattctcctgcctcagcctcctgagtagctgggattacaggcacacaccaccagacccagctaatttttgtatttttagagagacggggtttcaccatgttggtcaggctggtcttgaactcctgaccttgtgatctgcccgcctgggcctcccaaagtgctgggattacaggcgtgagccaccgcacccagcaatgactggatttttcaatggtgaagctattaattttgaaaactgatctcagtagagtggtaggtgggaagctttttagaatgtaattaggaaaaactgtgaagggagaagtttggacagggaggattgacatcttaaggagttttgttgtagagtagagaggataaagttttggtatttagaaggcatgaactgttcatttaaaaataattttatgttatatgaatggtacctcaatttttagaaaaagaatgaaacaagcaacagaatcctggctggatgcggtggctcacacctataatcccagcactttgggaagctgaggcggctggatcacctgaggtcaggagttcaagaccagcctggccgaaatagtgaaaccccatctctactaaaaatacaaaatttagccaggtgtggtggcgtgtgtctgtagtcccagctactctggaggctgaggcaggagaatcgcttgaacccgggaggcggaggttgcagtgagctgagatcgcgccactgcactccagcctgggtgacatggcgatgaaaacaacaaaaatcagatccccaggtgattccagtatgtagccagggttgaggagcagtgatctaagtagagttttgcaaacttgtctgtaaagggccagataataaatacttttcaaccttggggttgaaaggtctctgtcctcacttttcagctctgctgttgaagtgtgaaagacacgtaaccaatgaacatggcatgtttcactaaaatccatttacaatgacgggccatgggccagagtgtgctgagctggactgaaaggctaagtgatggaggcgtggctctgcctccagactggagcaatctgctccagacttcccaggcagagccagacccatcggacatgcttgcttaggagaagaataagcaccccagcattgaaaacaaaatgttaaaatgccaacatttgtgtttaattctagctacaaaagacaaggaaaagaataaagagaagaaattcaaggagtttgtgagagtgaagccaaagaagaaaaagaaaaagaaaaagaaaaccaaacctggtaattttttttcctgagggtttcacttaggtttccttactatgaatggggaggggttgctttctcccattatggcctctgggcctgcgctgagcagaggaaggaccaatagtctcttaccagggcttgtgggctcaacctagtatgggccctggaaggggaggcatccactcacccaggtgttacaaagtcctgctggcattgaaaagccttctcacttgctgccttggccagtgtgccctgctgcaggatggtacagatgaaggcatcgaagtgtaagcagatgtgcaggtgaatgatggtatttgttcacacacacgactcttaaaacacatctttgagccctcttgagaaaggattcccttcttaaaaactgtgtctagccctcacaaaaatgtttagaaaaatctatatattctgacttgggacttaaaggatgccacgttttattcttggtgtatcttctagcttagaaaaacaatcttatcagaaaaagaggagagggtcaatacttaagaggaggtgtttgggccccttcatctgctctccacacctctttttggttgaattgtccctgagcctttgtgctgcttgaaaaggaggcttgttggttggatgagattgattctagaatgcaccagtgttaactagggttattcattccttcctgatcctgttcttccagaatgcccctgcagtgaggagatcagtgacacctcccaggaaccttctccacccaaggcatttgctgttaccaggtgtgggtcctcacacaagccaggggtccatatgagcccgcagcttcatggcccagaatctggacaccacaaagggaaagtgaaagcattgggtaaggaggctcttctgtcctgatcatttgctgatcatttattggaaaatacaagcatacc

SEQ ID NO: 26545 - DNA, 2300 bp, Homo sapien
tctttggaatggtgcgaataaattttcagaataatttttagaagctttatcattaatgacctatacataaaggacagttgattttatttttttaacccctgggtaatcattgcatttttgtaatcaaatgccattacatgctgggatcattgtgactgtttattaataagttaaggttatttttagtaagtcacatttgaagagcactttaccaccattaattcacttaattgttatgaaactcagtgtttgatggtgttggcaaaaagagtcaaattctgtaaaatacttgaagatatttattctgagccaaatatgaggaccttgacttgtgagacaccctcaggaagtcctgagaacatgagcccaaggtggtcaggctacatacagcttggtctcacacattttagggagacataagacatcaatacatataagaagtacattggctgggtccagaaaggcagaccaacttgaggggtgggtgggcttccaggtcataggtagattcaaagattttctgattggcaattggttgaaagagttaagttattatctaaagagtcaagttattatctaaaggccagtcgccaggcttggtggctcacgcctttgggctcccagcactttgggaggtcgaggtgggcggatcacctgaggttgggagttcgagaccagcctgaccaacatgtagaaactccatctctactaaaaatacaaaattagctgggcatggtgacgcatgcctgtaatcccagccacttgggaggctgaggagggagaatcgcttgaacctgggaggtggaggttgtggtgagccgagatcgcaccattgcactccagcctgggcaacaagagcgaaactccgtctcaaaaaaaaaaaaaagaaagaaagaaaggagtgtctgggttaaaataaggggttgtggagaccaaggttcttaccatgtagatgaagcctccaggtagcaggcttcagagagaatagattgtaaatgtttcttatcagacctaaaaaggtgccagactcttccttaattttctcctggatcaggaaaggacctggaaaggaaaggaggttctctatagaatgtagatttccccacaagagacagcttccagggctagttcaaaatatgtcaaagaaatatattttggggtaaaatactttgatttctttcagtacctgctatctgttatgttggtatcttaattgctacagtctgttttgtcagtctgagggtctctattttaatgttttgttgttgttgttgttttgttttgttttgttttttgagacggagtcttgctgtcgcccaggctggagtgcagtggcgcaatcttggctcactgcaagctctgcctcctgggttcacggcattctcctgcctcagcctcccaagtagctgggacaacaggcacccgccaccacgtccagctaattttttttgtattttagtagaggcggggtttcaccgtgttagccaggatggtctcgatctcctgacctcgtgatcctcctgcctcggcctcccaaagtgctgggattacaggtgtgagccaccgcccccggcccgttttaatgttaatgctggtcagttgtgcatgaattccaaagggagaagggtataatgtggcttgtctgactcccttcccatcatggcctgaactagtgtttcagtttaatgttggaatgctcttggccaagaggaggggtccattcaggttggttgaggggcttagaattttatttttggtttacaatagcagacagatcagacagataattagcccagtttcacagaggaggaagtaggaatgatgctggttgagtgagttgtcccagagttgaaatccagtcaggtcttctgactgagagtccagtcccactcactgtgtgtgaccacagtgggagctcactaaggagtggtctcctaggagaccacggattcacattcgctcttgtttagcaaatggtagtgtgtggtcagatggcccaggtggagctgctgtccctactgggagagtatttaggaattgagaacccctgcaatggtgccagttactccaaagcccatgtcctctttgtcctctcaacagaagccgggagcatcctgatctgccgctgtggtgccagccttggaaacagcactcaggggaggggagatctcatttcagaaacatccctgtcactgacaccaggagcaaggaggaagctccaagctatagaactttgaacggggcagtggagaagcccaggcccctggccctgcccctgccgcgttctgtggaggaatcct

SEQ ID NO: 26546 - DNA, 2300 bp, Homo sapien
aaacaaatggcagatgaaagacaatcaccaaaaaaagaaaaataaaaaagctaacatgaaacagatgataatcatgaacaacaaagaagtcaaagggcttaatgaattttaaaacaagagatcaaagcaaagatgtaatagttcaaagaaaagacactgagacagccagaggagacgacactggcagagctcaggaaagaagggattttaaaaataaccatctcagaagagaaggtcattccagaaacatcaaaaagaaagctagccttgctgagaacagaagataggactgcaaaaagcaaatgaaggagttgggaatgaatgatttaaaaagagccaagaggccgggcgtggtggctcacgcctgtcatcccagcactttgggaggctgaggcaggtgggtcacctgaggtcagaggttggagacaagcctggctaacatggtgaaaatctgtctctactaaaaatacaaaaaattaaccgggtgtggtggcaggcgtctgtaatcccagctactcgagaggctgaggcaagagaatagcttgaacctgggaggcagaggttgcagtgagccaagatcatgccaccacactccagctgggtgacagagcgagaggaaagaaaaagcgggaggaggggggtggcgacagagcaagatgaaagaaaaaggggaggggaggggagaggagaggagaggagaggaaaggaagagaagggaagagaggggaagagaagggaagagaagggaagggaagggaagggaagagaagggaagagaagggaagagaatggaagagaagggaagagaagggaagagaagggaagagaagggaagagaagggaagagaagggaagagaagggaagagaagggaagagaagaggagtatggcagtatagagacagagaaagtgagaggtaggggcaggcacggtggctcacgcctgtaatcccagcactttgggtggctaaggcaggaggattgtttgggcccagcagtttgaggccagcctgggcaacatagcgagaccctgtctctataaaacaaacaaacaaacaaaaaaacaattagtggggcatggcggtacgcgcctgtggtcccagctactcacaaagctgaggcagaatagtttgaacccaggagtttgacgctgcagtgatctaggactgcaacactgcactgaattttctgaataactaatgacactgagcttggatgacagactctgtcaaatgaaatactaagtgctgatgaggatgtagagcaactaaaattctcattcattgctgggccctggattctaccctggctagtacttctactttctgaactttagtttgcccatctgtgaagtaaaggggttgtcctaaggttctatgaatcaaacacatgtctatagaaagaaaggtggcaatatgtagcaaaatatttcagtcagtcctcttttgggattacagcttaaggaagtactggtatcccttaccatccaagctcttgctatcagaatgcttccttttcaaactcagagaccaaatagatttgatagtaatagatgcttataattcaaaatcagaacaagctttaagcaatatatgattatcacattattttaatgaaaaatcagaaataatctaagtgttcagcaataaagcaatattctttacagtgcatccagactgagtctcctaaaacacaaatctgatcacatccttcccctgctttaagtccttccatggttcctactgtctatgttaaacgtgggtttgaatcccaatcttgccatggattggctgaacctgggcaagttaattaatctctctagaccttaatttctcatctgtaaataaagtatcacacatacacagatgttcaataatgatatggtttggctgtatccgcacccaaatctcatcttgaattgtagctctcataattcccacgtgttgtgggaaggactcagtggaagataattcaatcatgggggtagttcccccatactgttctcatggtagtgaataagtctcacgagatctgatggttttataaggggaaacccctttcactttctcattctgtctgcctgctgccatccatgtaagatgtgacttgctcctccttgtcttccaccacgattgtgaggcctccctagccacgtggagctgtgagttcattaaacgtctttcctttataaattacccagtcttgggtatgtctttattagcagcatgagaacagactaatacactaataataatatcaatgcctgtgacttttaaaaatactacatactagaacttacat

SEQ ID NO: 26547 - DNA, 2300 bp, Homo sapien
attgtcatctttaatagaaaaaagcactttagagcctatatttttctatatctttagaaggactccagagatttgagttctagtcaccaagttccattcaatatttgacacttgatttgggtgaggtcttctgttttgctgagttttttttttattgtcctgatttaaccagacttatgggacagtactatgcacccacgttccagggcctccaagttctaagtctcagagtggtccctgggctaaggtgctggatgaacctactcccagcctagaagcctcccgctgtaacaaagtacacccatttttctatgagatagagaatgagttatctttttaaatcatctttttcttctttctcttttgtgtttttcttctgttccccacttcctacttagctgattagaaatgcagttataaccttttgctttcccttcaccagacactcctagagcaagtgtatctgtgtgcttacttaaaagctccagagtagaaacctctcccaccagattgccttgagagacaatagtcaatttacaaccaaaagtatgcctgccaggaaactctgccccacctggagagtatctcgagacaaggccactttacaacctagttctgcccaagatggtggcagctcgaccaggcggtagataaggcaccaaagtgagtcatggagactcccacctgctcattccctcctctgcatgccatttatgccaattccccctcccgcttttttttttttttttttttttttttttgagacagagtcttgctctgtcgttcaggctggagtgcagtggcacaatcttggctgactgcaacctctgcctcccgggttcaagtgatcctcccacctcagcctcccgagtagctgggattataggtgcccaccacctcacccggctaatttttttgtatttttagtagggatggggtttcaccacattggccaggctggaccagaccttgcttctgttaattggatgctacaaatggagagcaagtgtacctgacatttagctacactgctttcttaaaaaaaaaaaaaaaaaaaaggccctggccaggagtggtggtttatgcctgtaatcccggcactttgggaggctgaggtgggtggatcacttgaggtcaggagcttgagaccagcctgggcaacgtggtgaaagcctgtctttactaaaaatacaaaaatcagccgggcatggtggcacacgcctgtaatcctagctacttgggcggctgaggcaggagaatcacttgaatttgggaggcagaggttgcagtgagctgagattgggccactgcactccatcctgggaacaaagtgagacagtgtctcaaaaaacaaaaaagccctatctttgcaggacaggtgagcccccaaattgagacttagcttaggagagttcttggctttgcccaaggaaggaattcaagggtgagccagtggtgttagacagcaatcttttattgaatagtgcttctccttgtggggcagggctaactcatgggcaatgaatccggagtcgatacccagtgtatgagatgttggcaactgtatttatgctcatctctaatcccttctcagccttttggctgagatcaagtgtagtatacgcattcctacccactttcaatcacatgcaaattaaggggcaggctaatgcaaattaaggggcaggttaatgcaaattaaggagtgggtttttagagttttctaggaaagaggtagcaacttcctggtcattgccaagacatttgtacactgtcatggcactggtaggagtgtcttatgttaatgagggatggggacagctagggggtcctagatcctgttttggtcagcagggttgtgccattctcctgtctcaccaggactctggcagccatttagctactttgagccccagtctcctatgtatggagttgagtaaaagtttgggtggttgtgaggattagctgagataatgcctgtgagtatcccataaatgttagactcccacattccaatccctgtgtcccctgcctccagaatctttcattgtgaccttaggagattctgagaatgatttttctcagagcagggcttccagtagctgatggtatggtaggaggagtggagtggagctcttgccttgttactgaggaaatctatttgtttctagtattactggatttttggggaaaaatttgtagtcctccccttgaaaggcaaaggggctagttgtgccatttgcctgcacaggaaccatgaggagacatatggtaacttatgcctggcagctcctgaagaa

SEQ ID NO: 26548 - DNA, 2300 bp, Homo sapien
ctcacacctgtaatcccagcactttgggaggcgaaggtgggtggatcacctgaggtcacaagttcgagaccagcctgaccaacagggtaaaaccccgtctctactaaaaatacaaaaaattagcctggcctggtggcgagtgcctgtaatcccagctacttgggaggctgaggcaggagaatcacttgaacccaggaggtggaggttgcagtgagtcaagatcgcaccatttcactacagcctgggcaacagagcaagactctgcctcaaaaaaaaaaaataaaaatacaaatacaaacaaaggaactcagaggctgggggcggtggctcacgcctgtaatcccagcactttgggaggccaaggcaggtggatcacgaggtcagaagttcgagaccagcctggccaacatggtgaaacccccgtctctactcaaaaatacaaaaattagctgggcgcggtggcgggcgcctataatcccagctactcgtgaggctgaggtaggagaatcacttcaacctgggaggtggaggttgtagtgagccaagatcgcgccactgcactctagactaggtgacagcgcaagactccatctaaaacaaaaaacaaaaaaacccaaaggaattcagaagtctacacaaaatgtgaaaattcacgaggaagttcatcacagcattaattctaaaagctggaagtgtcatttccaaccttatcttaattgacacatcagcagcatttgacactgttgataaattccccttgaaacactttcctcatttacttccaggacaccacactctcctggttgttctcctaccaccctggtcgcttctcagtctcctttgctggttccttctcattccctgacctgtaaacgttacccagggatcagacctcagaccttgtccctctcttggttctctcatgcagcctcaaggttttaaagacatctatatgctgacgactcccaaagattcatctccagttcaaacctttccctgaatgccagactcataaatccatctgtctgcttgacatttccacttgaatgtcaaacagacatctcaaacttaacatgcctaaaactcagctcctggtgttctccccaaagcttgctcctcccatggtttcttccatctcacttaaggcggctgccttttcatttgctcaggccaaaaagtgtggagtcatctttcagttctcgctctcccacttcacatctggtccgtcagcaaatcttatagacttgagcttatgtcaacccctgaattcaaccactttttgccccctttgctgtcgtcgccctggcataagtccctatcatagctcacctgcttgattgcaacagtcagttatcaggtctccctgcttctgcccctgcctccacttcagctctcccgcactgcagttcaactccctcccatggtcccatttctctcctctcttccccagcctctttgctgttcctggaacaggcctggcccacatgcttcggctttgtggcctgtgcataagctgttcccctacagacatctccaagcatggctcatcccctcgcctccttcgggtctctgctccagagtcacctggccgtactataaagcattccgcacctgcacttcatattcctctttcctttttatgtttccaaagcactttcgctatctacccttttatgcattttaaggatcttgtttattgttgtttcccttactagaatgtaaattttaggagagcagaaattttcctgtgtttttttctttactgctgcactcccccgtgcttagaggcacataggtgctcggtaaacaggtggtaaatgagtcaataaatgaaatattggagtcttcttatccagcaccggaggagtaaggagatagagaagcaacgtttgctcagggaattctgaggccagtagcaatttccgttgcgaagagcaagcggggtggagggggccctaaccccacgtgaccacaccccattccccattccccacccccacgccggaacattgcagacccggaaccacggctcgcgggcccccagcgcaagggcacttccggtaccgctcctctcttgccagcgcagagaactgccaagtcagttccggtccggcagagatcgcggagagacgcagaacgcagcccgctcctccagggccctccaggccctccggccccgggccggcgggtgaactggggggccccgggacaggccgagccctctgccctgcagataacggaggcctctgctgtggctgcccactggctgtgcccgcccactggctgtgcccagaccttga

SEQ ID NO: 26549 - DNA, 2300 bp, Homo sapien
tctcaccctgttgcccaggctggaatgcaatggcacgatctcggctcactgcaacctccacctcctgggttcaaccagttctcctgcctcagcctcctgagtagctgggattaaaggcacgtgccaccacaactggctattttttttttttttttttttgtatctttagtagagacagggattcaccatattggccagattggtctcgaagtcctgacctcgtgatccgcctgcctcggcctcccaaagtgctgggattacaggtgtgagccactgtgcccggtcaattttgtatttttagtagagacagggtttcaccatgttggccatgctgatctcaaactcctgacctcaggtgatctgcccgcctgcctcggcctcccaaagtgcttggattacaggcatgagacactgcgcctggcctcaactctggtttccgttgatagaatattcatattcactttctcctccttcctttcttcgctttctccttcctccttctctttgttccctcctccctccctccctccctctctctcttctttactccttttctcccttcctttctttctttttggcagcacgttgcattgttgagcttgaggtcaactaaaacctttaagtcactttcactgtaattactgttgattgagattctttctacactgtatttggggcacttgctcatttggaagggcactgtccaatatggcagccattgtggccattcaaatttaaagtacttaaaattaaatacaattattattttgcatttcctcagttggactagccacgcttcaagtgctcaatagccacagagggctagtagccactgtatcagacagcaaagattcaggacatttccatcatcatggaaagttctgtgggactgctctggtttggacctaagagcaggagtttatacttacaatctgaggcacgtcatcttgagagttccagctcagcctccaaaactgctgagagctttaagaaactgattctggtttccggagtcttcattttccctcccaacctcatgacaacagtagatttgatcaacgtttcataccttcctctgcttcatctaaaaccaactgataaaaatacccagcagaacagagaggcttgcaatcgagccctctatgtgacaccctgctctccagtcccatgcggcagttgtgcagtcatttaacaaattaggcctatatcctaggtgctgtgctgggtaccaggtacctacaaggaagtcagaagacatcaattaaaaaaaaaaaagagtcctgctgagttgggtgctctagtagttcaaatgtctttgcttcccattcaaggctgcctcttctgtctgttttgtggttgttaaaagtggaagcttggggctgggcacggtggcacacacctgtaatcccagtgctttgggaggccgaggcaggcggatcacttgagtccaagagtttgagaccagcctggccaacatggtgaaaccctgtctgtactaaaaatacaaaaattagctggatgtggtggcatacacctgtaatcccagctactcaggaggctgaggcaggagaatcacttgaacccaggaggtggaggttgcagtgagccaagatcgtaccactgcactacagcctgggtgacagagtgaaagtctctctcaaaaagaaaaaaaaaaaaaacggaagcttgggagtcagcttcccaagtttggatcctagctctgccactttagaagctatgtgatgtctttgtgtttctgtttcagcatgcataatgtgggaataagaataacctctaatgttattgtgagaattaaacgaattaatgcaaataaagatcttagaacaataaatatagtaagtgttcctaaccggtgagttattatcagttcttattgttaatcataatcttccttcctggacaagccatgttcagtcctgctttggggcctcagttccttagttttgccctcccttagtttgtgtaagtccttggaggcccaagccctgcctctccttcctgctttcttatgttctcagctgctcactttgcacctgctcttagtatcctatacctgaggcatggaccacagtgaagaaccagaattgttgggcttcatcttggctctgtgctgcctggaggggagacctaggataggctcctgatctgcaaaatggggataatcccagctgccacttaagtgagacaagtaggtgaaagctacttagcaggcctttgcatgtcttgacttccagtaaaaccctggcaagtgaatgacatttgcatcttccctgtttctt

SEQ ID NO: 26550 - DNA, 2300 bp, Homo sapien
atcctaggtgctgtgctgggtaccaggtacctacaaggaagtcagaagacatcaattaaaaaaaaaaaagagtcctgctgagttgggtgctctagtagttcaaatgtctttgcttcccattcaaggctgcctcttctgtctgttttgtggttgttaaaagtggaagcttggggctgggcacggtggcacacacctgtaatcccagtgctttgggaggccgaggcaggcggatcacttgagtccaagagtttgagaccagcctggccaacatggtgaaaccctgtctgtactaaaaatacaaaaattagctggatgtggtggcatacacctgtaatcccagctactcaggaggctgaggcaggagaatcacttgaacccaggaggtggaggttgcagtgagccaagatcgtaccactgcactacagcctgggtgacagagtgaaagtctctctcaaaaagaaaaaaaaaaaaaacggaagcttgggagtcagcttcccaagtttggatcctagctctgccactttagaagctatgtgatgtctttgtgtttctgtttcagcatgcataatgtgggaataagaataacctctaatgttattgtgagaattaaacgaattaatgcaaataaagatcttagaacaataaatatagtaagtgttcctaaccggtgagttattatcagttcttattgttaatcataatcttccttcctggacaagccatgttcagtcctgctttggggcctcagttccttagttttgccctcccttagtttgtgtaagtccttggaggcccaagccctgcctctccttcctgctttcttatgttctcagctgctcactttgcacctgctcttagtatcctatacctgaggcatggaccacagtgaagaaccagaattgttgggcttcatcttggctctgtgctgcctggaggggagacctaggataggctcctgatctgcaaaatggggataatcccagctgccacttaagtgagacaagtaggtgaaagctacttagcaggcctttgcatgtcttgacttccagtaaaaccctggcaagtgaatgacatttgcatcttccctgtttcttcctttagcatctaacaaaggaggctcaggctcattattccgggcacttctggagggcctggccctgccccaggagccctagggcaggaattcctttctttatctatagaaggcagacacttcatccctgccccatcttctttcagatgctatcttgggctcgctgaacacgggttagttcctcctctctcctagcctcagtgtgtactccaagaaggacctaaaggagcgcctatacgggccgtggtggttataaccctaatttagaaaagcccattactttgggggtgtttgggcttgtggagggtgggcgtcgggatcccagagccagggactcagcccttggagagtccccagagagtccagaggttgccacctgcgaggggctggaacgcactgggctatcctccgcgagccctggccgcgggaacaatgggagcgcggcgtggaaaagggtgggcgtgggccaggtcctggctggaggtagacgaggtcggcgagctgggcgcggggccgcggggttaccccggggcaccgggcacagagccgagaagtctaagctagggaaaatcgaggtcggcgctggcgggaacccgggaggacgtgggggccccgggtggggtctgctcctcttcttcgcccggcctctgagcccgccgcagctcaggttgacgccgggcccacgtggggaagccggcggcgggtccccagcgccgggagggttcgcggggctcagccccttcctctgctcccctccccgggaccggcgcgcggccccagctccggcggctccggcggctccggcgctcccctggtgttggctgctcgccgccgctgcttgctcgttcgcccgcccgctgctgcttggggggccgggatcgccgccgcctcctccgggggagccggccggggcggggcggagcggcgagagggggtgtggggggcgggcgaggagggggctgagcgccgtgggagggagagcaggagcgagcgcgcgagagagcggggcatttctgcgcagctctagcgcgcctcggagcccgccggggcagccgccggacaccaggaccgcgagccagacagctcccggaagccgcgccgccgccgccaggttagccgcacccgccgtccccctccgcgtcccggggaccccgccgcgtcgggtcccgcgtgtgcgtgtggggtggccgccgagggcggcgggctc

SEQ ID NO: 26551 - DNA, 2300 bp, Homo sapien
gaactgctgatcacatagcaagttggtggccaagctggagctgattctgtttgcttagatccaggcttcagctcagccccagcaggatggatggccctgcttgtcagtgcccttctctcctgcccagtccccagagagggcttctgagaaagaggcttttgtttcatcagctcctcctggtttcctctcaaggtagctacacacatgtgcacacacacacacactcacacccattggccccagtttgcatttgttacacacacacactctcacatcccattggcctcagtttgctttacacacacacacacacacacacacacacacacacacacaccattggcctcaatttgcatttgtccctattccaggtttaaaggaccctgaaatttgaagactatccacacatatctactttctggatatccacggagagaccatgggctttttcatcaaggaggcctgagttcaaatccttcttctatgtctgattctctctgtgaccttgggcaagtcacttgttcttttttgacctcaacttcctcatttgaaaagcaggaacgggaatggtatgtgtacaacctagtggtttagctgggctccagaccccagccgcagtgtaggggtctcagctctgccacttattcactgcctggtcttcagtgagtcatttcatccttctaggtctcagtttccccatctttgaatggtgctgctaccttttggacagttgtgataaggcaccttgctgagctgttcacaggcatcatctcatttagtccccccattagccctgggagcagacacttttactcctattttccaaatgaggaagtaaagtgacttgccctgggccacataagtagtaagtgttagaaccagaattcaaacaggtctgagttactccagagcctaagctcataaaccactgtgtgttcttcctgttcacctgagtttcacattttacatgaagtaggaacacctcatcccacctggagactgactgttctgagtgtgtgagtccagggtgcctgtagcttctccctccaagtctcctgccccattgcatactaagcctgacctgtggttggagctcaaagaagattgagaaaagtacttacatactttgagtgaattacaccagaacaggatgtgaatgctaaaaagaccccgagggaggccgggcatggtggctcatgcctgtaatcctagcactttgggaggccgaggtgggtggatcacttgaggtcaggagtttgaaaccagcttggccaacatggtaaaacctcgtctctactaaaaatacaaaaaattagccgggcgttgtggcgcacgcctgtaatcccagctacttgggagactgagataggagaatcgtttgaacctgggatgcggaggttgcagtgagcagagatcgcaccattgcactccagcctgggcgacagagcgagactctgtctcaaaaaaaaaaaaaaaaaagagaaaagaaaagactccgagggatcactgattccaaccatatttatttcacagatggggacactgaagcaaggaaaggccaagtggacagcagggggtataaccatggcacctgaggaggcatctggaggttggggcccctgctctcccttctccccatacatctagtccaccagcaagttctggggataccaccttttaaatacctcttgagtctgtccacctctttctgtctcttctgcaaccaccctagcttaggccctcatcatatctccgctggataatcacaacaacctcctaactgatgttcctgcagcttcccctgcccctcttccatcctctaccctgtaagccagtggtttctctttgctcttacaataaagagcgaatcttctccttggcctccaaggtccttcgctgcctggcccctgctgccgcttcaggtgcatatttgttactttctattttgctttccgccttgtcacaaggcctttttgtttaacaggttcagcaacttccctaaggtgcctcagagagtcaaatgccagcctctcaatttccagcacatgctgggctcatgaactcctgttctgaggagctaacgctgtttcctccctctaggtgcctgactgacagaagttcttgcccccggggagctggtgtggacagaggaggggtgagtgttctggaggcacagacttattctccttctgctgaggttggacgaagaggtcttccaggccctcggcctctcgatttttgacatatttgactgctggggaagtgtgaggctttgtctacgccacctgtttctggtggcg

SEQ ID NO: 26552 - DNA, 2300 bp, Homo sapien
tgggctgggcatcaagaaaccttgatttgacctttgctgtgagatcttgggcagtcattttcctctctgaattcaatttccttacctgtaatatgagggggttggactagcgcagttctaaaccttttagggggctgggcgcagtggctgacgcctgtaattcttacactctgggaggccgaggcgggcagatcacctgaggtcaggagtttgagactagcctggccaacatggtgaaaccccatctctactaaaaatacaaaaattagccagggatggtggcgtgcgcctgtagtcccagctacttgggaggctgaggcaggagaatcacttgaacccgggaggcagaggttgcagtgagccaaaatcgcgccactgcactccagcctgggcaacagagcgagacactgtctcaaaaaaaagaaaaaagaaaaaaaaagaaaaagaaaaagaaaaccttttatcggtcctgatttcctttgaaaatgcaatgaaaactgcagagcttctcctagaaaaatgtacatgggtatgcacctgcacacacatacacacacacaaagtcacactcacacacacacatacctacctttatcatctttcaggtatcaagagagctcatgaagcccatgcatagatcaccccctgagtgatagatagataatccccttggttaagacttgggctagatgatctctaatcagccacgataagaaattagctgtatatgtgtgtattttgtattttgtatctaatttaaaggaaccctacattaaagacttcactaagacgatgagcttttatgtgggcttttgtgggacatagatgttgattggctaaatgctgtgcttccccagagcctgcctcacccttgtcatattgcctctgaagtcaccctctccattccactctctctgccctttttcagcagggagtgagcacacagtcctgaaaaatactgctacccccactagctgtctctgtccccagctatgagagggtagaaaagagcgagcctggtctgcctctcatactcccaccccaaagccctggctcagaggtcaaccaatcaagaggcccccagatggcacctctatccccaacacacacacacacacacacacacacacacacacacacacacacaaacacaccctccctcacatagccacaaccacaggactgcacctccagacacctggcggtgcggtcactcggaaccggcaggagttatttttagaggccaagtgacaggatggtgagagcagttccactctgtcagagttactgctgccaccaccagctctgatgaatcactctccactacgtgaatggacaagtctgtcagcatggccacggaggccatgccagcttctagaatgaatgtcttggattggtgactacgctgatcacaccaggctgagcccaggatcacaccagggacaagactgccaggcctgagccagtgcagccaacccagcccaactgcccagcacagcctcccataaccaatacagtcgggccaacacagcacagcacagcacagcccgggcaggtaagccccttcaacacagtccaacccagccccatcaggccacccaggggcctctctttgcaaagtccttttagagtggctattgatgcctccctccgcccaatccgtgcaagtgagcctcccacccactaagctaccgctgccgggttattaagataatgagccgccaataaattgggcagattcagacagtgtcaatgcagctatcaactggtttcatctttcatcgttgaaaaagtacatgataagccttaaaagtgtgcataccgtttaacgcagaaattccttttttaggaatggatccttagggaacaatgaatgacacaaagatgtggctataagaacatttgtctaagcactgtatacaggagtaaagtagagcattggagttaatatatatgtccaataatagtggctacgttataaaaatagtgatacatacatatgctgaaatactacgcagccacacaaaataatgttgtggatctatatgtggctatataatcatgttcttaacacaatacaggtaaaaaagcagagacaaaatggtacgtaacaaatgatccaatttctacaaaatacgttttttgttcttttttcttttctttttttttttttttgagatggagtttttgctctattgcccaggctgaagtgcagtggcatgatctcggctcactgcaacctccgcctcctgggttcaagcaattctcccacctcagcctcccgagtaattgggattaca

SEQ ID NO: 26553 - DNA, 2300 bp, Homo sapien
gcagctgtgcatctgaaacaataaatgcatctggtataactcctgagttttattggtcctttcactcattcatttaaataaatgtgtggtgagctaaactcaaacagagcaccttgtgtggcaaagtgacttgcccaaggccacggccccaggggcctgtgtgagactcccttgggagctcctgggaaaaagtgaatttgaaaggcctggggatgagaagtccaaaggcaaaggacaggatttgtacagaaggctgccaagcaggacactcgtccttctgtcagtcggcctgggcagatttgtctgtcttcccaccttctgtctggagggtgggcctgttctctaggactgggagaagctggcttcattctgctctctgctcttcatccgctgctgaacctggtgagcagggggagtgaaggcaccggaagctttgtctaaagacacctgatgaaggaggtttaagttggagaagagaaggcttgctttgggcatggtacaaagggacgcaattgtatcttgagttctctaaagggtgctgaggagagggcatagcctcattctttggaggccctagagtgcctatgaggacccagggtagaaggtcaccatgatggagcagcacactgggagggaggagttgggggagggaggtgcctggctctatagtgtgtgacaagcagagatggagagcccactggtgaggctgatactgagggaatcgcatcagggaaggatggagggctcagctcacatcgaggctgcttcccagcttggggcctctgtgcttcccagggcagtggattctgtggtaagaactatggccagcacatggtaggtacttaggaatgatgtgaagaatgaatgaatagttgtgtatgcctggaggtgagggtggtgactgggggttcgcggtcatatgggttgcagtggacccatggacagaaatctttggagatcatgctgcggttacccaccattctctctatgccttcgccatgaactagggaccctagagataggaacgtccagccctttcgtcatttgcaaatgaggcccagagcatggaacaacttgcccaagggtacttgctgagccagtggcagacctggactggaacccaggccctctccctcccagagtcctctgtggcttgaggtccccaccttcggattgtgtgagatggaggtgctgcagtggttggactggtttttttagtgggtaacagtgctcctggaggggaggagcatggcttaccttggttttgagccatgatctctgccacaagctgcttggccagcccctgccctttcctggagctcaggtgcacactcagcctgtgctcagacacatacagcaagtgcgcctgtacacaggccccatccccaataggtccctgggctctcactgttacacttactgtcattgtcaccaaggcgcatgtggacaaatgtacacatagacaccctctggacacactcagaggcacagaggattcccaggagacagttgtaatacctcctcccggtgggggaggacgccgagtcctaggcgggttctgccctgtcgctgtgctgcaggggtggtgaggggatccggctccggtgggatgggaggcccactgaggctgagtcaccccttctgagtcaggcatgcatccccctcttctctcctccccctccctttctcgctgatgagcccccaagagggcttggcgagagcaaggaggcccggggctggctaggaccagggtgggggcagccggggcgctcgagaggccccccagctgcacagtcccgcagtggtctgggaactgcccgtgtggcacggaccgggaggaggtggcctgggagcctgagagagagggcggggcgcggggggaggtgggtggtagaggagacaggcagagaggaggcggaggcaggggcagggccgcggcgcgctgggaggcaggcgcaagcggcggccgcccctgggctgggctccgaggccggggcgggggcgggggctggccgcgcgtcgggcgccaggcccggggctgtgggcaccgtgcccagcccctggcgcacgccgagccgccgccgccgccgccgctgctgcagtcggcatccatcagcgggcgggggtgtcgccgaacaggctgctccgcagagcccgccgcgaccccgcgccgccccgccccgcggcctgcctgccagaggagccgagggggccgcccctcgcccaacctgcccgacatggggaaccccgggcccaggtaggcacatgggggaatcaggtggctctcggggccgggggct

SEQ ID NO: 26554 - DNA, 2300 bp, Homo sapien
tggcctcgggatgtgtccagagccagcccatcttccctaaaagccaatgggagcagggagtctggtgtttccccacttctgggggaccctggccaggaaggagaaggccaaggctaatccttctctgagagctcctagtcagtacttatctacccctacccctcagcactatagtaatattcagtccacaaagccacccttgcctcaccaggcacacacacacacacccctcacacacctctccacctggactggccctggcctaccaatgaattgcctggctccactggacaccaacctggtacttccagatattgcccccagtaaatgtcatggtagaaagaagggctctggactcagaccgcctcgcactttccagctgcgtaactttagtccagtgacataacctctctgagcctcagtttctcctctgtaaaaagtggataattaatcacatctatctgacagggttactgtgaaatgactcaaagcacttcttgcagtacatggcatacagtaagtttcaataaatactatcactttgattgtgtaatcattggtatttatctccaggcagagatgatcatcctccccgccctttttttttctttgagagggagtctcgctctgtctccaggctggagtgcagtggcacgatgtcggctcactgcaacctctgcctcctggggtcaggcgattctcctgcctcagcctcccgagttgctggggctataggcgtgcactaccacgcccagctaatttttgtatttttagtagagacggggtttcaccatgttggccaggatggtcttcatctcttgaacttgtgatctgcccgcctcgtcctcccaaagtgctgggattacaggcgtgcgcaatggcgcacgcctgtgtccccttttaacaaatgggacagagaagcccagaaaggggctcttagggaagtcccggcaggtgctaacaagcacctcccaccacagcctgaagtcagaaaactctctgttgccccctggaggctcaggccagaacatccctgggcacctggcatcctctcagctctatgcacttccaagagggtccaggaccacccacggccctttctctcagccctgacctctcctgctcacctactgagggcaagggctgggaggccaacataacacccctcctaagggatcaggtagcctcaggctccaggctacaatgcctagcccttggcagagtcctgtctatagcacaaccaccgcagcagggaagccagcacctgagctgcaagagccccagaacaagaggtggaagacctgggtacattaatgctgactcccccgctcagctgctttgtgaccttggccaagtcactcttactctctaggccccgttcaacctttcaatatcgactgagtgaggactacctgaccaagcattgttttcatgcaggattctatggaagaagctcttcaagaagctcacagggctgagcccaggaggactgtcacatagcccaggaagggctttaataggaacaatgccctctgcactgatctcctccaggactgccttgaggtgcccctgaaatcccagggactgtgctctgcatgccataaatactatgcctgggttgccaggcaggcatgacctcaggctggccaggagaagccagctccatccttgcacagagctggcagagccttcctgggccacggtggctcataggggaggctggcacaggctgcctctgccgcaggctccatctggaggaatgggtgggcagagaggcacacagctgcctctattctccacacccttgcccgggacaggaggcactgtcttccaagagctgcggagggcaccatccaggccccagatcttgacctggctcaagtgccactgattctggaaggctcctaatgctgagggtggggggatggggtgggaatgaagccaagccgctggaccccgcacagccctggagaggtcctaaatctggccgtctcacattcccacctttgggtgcagaggaggtgctatgcggatccagaagtgaatgtgggaacacgtggtgctctctcccccaccaatgcatcctcagagctccgagggaaaagcaacgacgatggctggcagctgagggagagaccagcatccccagaactcccttttggtccttgtccagacttcaaggtctccatggaccactttgagccatatacgtctgccagtcagtggcctctgcacccagtaagtaccccaatggctgtagacattggccccccatgcccatccctgagaccccagcctct

SEQ ID NO: 26555 - DNA, 2300 bp, Homo sapien
tgcgaggaacattatgaatccttctctgaattttccctataggtctcctttagcaatctgttatccctagggttctggaataggacttggtttacaaacaatgggtcttcatatgattcctcaggaccccatacaccctgatccatatttctgtctcccataaaggaccatcctgactcggcttttgtcgaataatcaaaggtaagttcacccagattagtgtttttcaactgcattgagagtggggaaatgacccctcctcctttacccccaacccccgccccggggacatttagcaatggttgtcacaactgaggggtgctactagctctagtgggtagacgccagggttgctgctaaacatcctacaatgcacaggacagccacatacaacaaatacttatctggccccaaatgtcaatagtgccaaggttgagaaattctgatctaaatggacatgtgacccacaaggtgggactcctaggccaccatttacagcttctacaaccagtgttcagtgtcctggagtctctgaaaagacggtgagcccaactgaaacagggagctttgagaccagaccatagagctcagcacttaagactgggagtggggaggggtggagagggagctgagcttcttcatgcaggagatgaaacttgacaggacaggctgagattggtaagcatgactgtgactgatggaggctgtctctggttaatcctgcagcagctcattgtgattaaccatgactgcagggcccggtctagtctgcaacccactaagagataaattttgaccgagacagattggcgtgtccagctgtcactgaggaaatgtgacagacaagctaaggagcagcagcacaagagataagaacagacagcccttggtttgcattctagctctgccattctctggctgtgtaacatctctttgaacctcagttttctcttctgcaaattgggaatacacataccttacaagggttagtgcaaggattataaatacccaagtgggccgggcacggtggctcatgcctgtaatcccagcactttgagaggccaaggtgggcagatcacctgaggtcaggagttcgaaaccagcctggccaacaagatgaaaccccgtctctactaaaaatacaaaaattagccaggcacggtggtgggcgcctgtaatcccagctacttgggaggctgaggcaggagaatggcttgaacccaggaggtggaggttgcagtgagccgagatagcgccattgcactccagcctgggtgacagagtgagattgcgtctcaaaaaaagaaatacccaagtggcctgccctaaaatcacataagccaattcttggcaataaatcacttaatatagatctcctactggctctgtatctttggtggaaccctgattaatagtgcagggttagacccacaaatagttatttattaataccaaattatcatcattattaattaaatgcataatatatgtactcagctgagcttttgtgcctggctttgtgctcggttccagggaaacagtgaggaacaagacaggcagattccttccctagtgcgttgatagcctgactgagatgttaggacttggcctgcaggaaggacacggggtgataatggccagagggactgaggtggcgaccgctgctgctgcagcagcggaggctgacgctggttctctctgggctggtggctgggtttctgaggctctccccgagggctgagtgtgactggaagctgagacactgtgaccgggatagagactggctgacaaagacagtgaccgagcgcctgactggctacttctgaatagtagccactggtacaagccttggctgtgctttagtgaccatgactgcttgagcccaaagtaagatggctggtggctgtgtttctggacggggatataaaatgcataggttaatgaaagttgttcacaattcagaagctaaaacgagaaactaagaataacaaaaggcaaccttgcatccggcggaacctgcaggcacgggccattcttcccgcgacccagggctctgccggaccgcttcccccgtcgctccagtcagacgccaaagctggagaacttccggtgcgtttccgctgtaccggaacgtggggcgaggcggtgagtgtggcctcctggcctctttttcctttcctgattccttgtgtatgtgtggctgggccgcccctcttctcggctcagagtcacggagtgccttgaactaggcccacctcgccggggcggctggttctctgtttgtgggacgctggtgtctc

SEQ ID NO: 26556 - DNA, 2300 bp, Homo sapien
aaaaattagtcaggtgtggtggtgcatgcctgtagtcccagctactcaggaggctgaggcaggagggtcgcttgagcccagaaggtcaaggctacagtgagctatgattgcaccactgcactctagtctgggcaacaaagtaacactctgtctcaaaaaataaaaaagaagaagaagaagggggaatcaaggaggagacttgccgttctgtcagcaaggaagaggtggggaatttgaggaggcctcgggcccctaggccagggccctgcggcaccctgccgtgctgggcacaggccacctcccttggttgccacttcttttccttcagctttgggctctgggtgaatttggctaaaagtgacaactcggtcaggaacgcatcttctcaaacaccggtctttcccgccctggcaattttcacaccttatggtgaatcttgaaatcttttatgcatcttcgagaatttgtgtctactgactcagaatgttttggggtttgtattttctttttctgctccttaacacttttattcaggtggctatgcctgtttttcttggtttggtgatgttgtccctgggggaggctgcatcgtcctggagtcaggtgcctgggttggaggccctgccctgcctcttcctgggtgtgtggttgtcgaagctctccgtgccttggatgcttcctttggaaaatagagatgacattgtaaggctgtggcaggaaggaaatgaggtaaagcctgttacaggtttggcactgagtagattctggaggtttggttcttgatcagatgctaaggagagatggtgaggcctttcagggccctgagatagcaaggggagaaaggtgagcctccccgaccagcgactgtccctttctccttattcctcccatcccagagccccctagacctggacctctcctctcagggctcagacgtggaaagcctgagttcaaatcccgacctaccactcgggttctgtgtccccacaccagctaggcttcttctgtgtctcagtttcttgacctgtaaaattggaggggagagggtggagggtgaggggagggtgttccactgaggcctccagggcagccaaaaggcttctgggaggggtgtggaatagaggggcctttttcttctccctagaggactggttcctgctgattcgtgggttttttgtttttggttttggtttttttgagatggagtcttgctctgtcgcccaggctggagtgcagtgacaccatctcggctcactgcaacctctgcctcctgggttcaagcagctaattttgtatttttagtagagacggggttttaccatgttggccaggctggtctcaaactcctgacctgaagtgatccacccacctcagcctcccaaagttctgggattacaggcgtgagccaccgcacccagcctggttcctgctgatttaaagatccaggcaggagcagtgacacctgttcaggggaagtgggtggagagggacacctggcttccctccgctctcacacgagagtgccacatggaggtggtgatgcagtgaagggcctcttagaagggcctttattgggcttatttcacctgcactgtcttctcagtcctcacagtagccttcagagaaggcactcttgttcccatttggctggtggggaaactgaggctcagaaaggggaagctgcctccctggtgtcaccccgcatgtgagaggctgagctgggatttgaactcaggactgcatgactcctacccctttcccaacttctcccatccggggaaaaggaggaagaagcaagacagggaaggatttgagactttggaacccagcttcccgactgctgtggggattctgtgggtggtgggaaaggcactgtaaatatgcatgacatgcaaatttgcctctaaaaaaacaatgtgggtgctcacatgagccgggatgccagggtgctctggaaaatgtagtgttgtgcaaacacttgggtttctatgaccactgctccatgtcgtctccttccctcgtgtccccagggccagtctaagggtctcaggtggagggcttacctccagcacctcctaatcaccattcctccccattcctgcaggcacccgtgcctcccctctgccaggaaccttggggccttgtgtgtgaccaggacctggtggcccccgggcggtggcagagcccctgtcccaagctgcttcctgccggcacctctgatcaagtgcctagagggatgtgtgtgccagccctcggtccagtgcccgctcctgagctgactcctgctgggccccgacagc

SEQ ID NO: 26557 - DNA, 2300 bp, Homo sapien
tttcttttttgttatttttttattttggagacagtgtctcactctgtcacccaaattggagtgccgtggcaggatcacagctcactacagctttgacctcctgggcccaagcaatcctcccatctcagcttcctgagtagctgaggagccacaggcacatgccaccacacccagctaattttttaatttttgtggaggcagggtctccctatgttgcccaggctggtctttttttaattaattaattaattttttttgaaacggagtttcgctcttgttgcccaggctggagtgcaatggcgcaatcttggctcaccgcaacctccgcttcccaggttcaagcgattcacctgcctcagcctctcaagtagctgagattacagacatgtgcctccatgcccggctaattttgtatttttagtagagacgggatttctccatattggtcaggctggtcttgaactcctgacctcaggtgatcctcccgccttggcctcccaaagtgctgggattacaggcgtgagccaccacactcggcccagaatctgcttttcagttggtgcccccagtgatctctcttcagggtgtcaatcacggtccacagtttgaaaaatcttgccttggtccagtttctctccaggaaacagatagggctggtgagtcccagagagggaaagggacttgttcaaggtcacacagggagtgtgttattaaatttgggagggtggaagtggaataatgatatttcatcttatgctgtgtgtgctgccttgggttgtcagggcccataacaaatgtaccttgtttttttcctaagtaaatcaaccttggctcacgcctgtaatctcaacactttgggaggccgaggtgggaggatcgcttgagcccaggagttcaagaccagcctgagcaacagagaccttgtcgctacaaaaaataaaaataaccaacttaaagtgaatagtacaggcgtagcataagtgactgagataggatgaccttcaaagtgcttagcacagtgcctggattcaaaacggttggctaaccctcaattccgtttattatttttacaccttaatgcaaaaaccatgacagtggtattggaaacactatcatcttcgccagtgctcaaaatattttgatatgtcaaaaattcttttctccattttttggaaaacagatgcgagaaaggaaaggacttgcctaggtcacccagcaaggcaggtcatgaacaagagttgggtctgcgtctggcagacctaccacaggtgcggcctggagagatgaggcccacaaggcagcgacaggacctggattcagtgaggagaggggactcgcggggtagaagccaggaactgggaaggcgaggaggcgtgaaggcaccacctactgccaacccggctcgagctggtcactttgccctccatgagatcgtaggtgtgcttgttgttttattttacgggggaggaatggaaggctcagggaagttgaatgcggatgttgttcaagatcacacaggcctccagaggcggagccgggattggaacccaatctctaggactctgggttagcaaagcaaagggaggatgcagtggcgaggacagctagatacacctagggcgcagagcagccaggaccagagggccaatctgactatgcaggggtgagagggccacctcgggcagcttcctcggagcctcggttccccccttacagcgaggtgtcgctggggtgaactggtgggaactcccgcctcggtccacctcccgcacagagcatgcgtcgcgttccagctggaaccggtttggcgaggcggttcgaggggcggcgaccccacccccacccccccatgctcgggcatgcgcgtgccgacgtgggcgcgcgctcctttcctgggccggccggctgggcgtgggccggacgcggcggcccgcgcgcctgccgaccagcccggctgcgcgcgccgggccacatgccaagcgggctgcgcgcgcccctgcccggcccgggagtccctgacgacgcgcgcgcggctgacgcggggggcggggaggggcggggcaggtgcgggactttaacccggagccccgcccctcgggcgtacaaaaccggagcctcgggccgggctgcgtgagggaggagggtgagtgcccgccgctggccgccgccgccgccgccagtccgtccgtctgtccggtccacgtcgtcgctgccgcctcctcagcccggacgcccggggcccgcccagcgccgcccggagcagccgcggccccgcgaggagacgggggccgccccgcccg

SEQ ID NO: 26558 - DNA, 2300 bp, Homo sapien
ctcttgttgcccaggctggagtgcaatggcgcaatcttggctcaccgcaacctccgcttcccaggttcaagcgattcacctgcctcagcctctcaagtagctgagattacagacatgtgcctccatgcccggctaattttgtatttttagtagagacgggatttctccatattggtcaggctggtcttgaactcctgacctcaggtgatcctcccgccttggcctcccaaagtgctgggattacaggcgtgagccaccacactcggcccagaatctgcttttcagttggtgcccccagtgatctctcttcagggtgtcaatcacggtccacagtttgaaaaatcttgccttggtccagtttctctccaggaaacagatagggctggtgagtcccagagagggaaagggacttgttcaaggtcacacagggagtgtgttattaaatttgggagggtggaagtggaataatgatatttcatcttatgctgtgtgtgctgccttgggttgtcagggcccataacaaatgtaccttgtttttttcctaagtaaatcaaccttggctcacgcctgtaatctcaacactttgggaggccgaggtgggaggatcgcttgagcccaggagttcaagaccagcctgagcaacagagaccttgtcgctacaaaaaataaaaataaccaacttaaagtgaatagtacaggcgtagcataagtgactgagataggatgaccttcaaagtgcttagcacagtgcctggattcaaaacggttggctaaccctcaattccgtttattatttttacaccttaatgcaaaaaccatgacagtggtattggaaacactatcatcttcgccagtgctcaaaatattttgatatgtcaaaaattcttttctccattttttggaaaacagatgcgagaaaggaaaggacttgcctaggtcacccagcaaggcaggtcatgaacaagagttgggtctgcgtctggcagacctaccacaggtgcggcctggagagatgaggcccacaaggcagcgacaggacctggattcagtgaggagaggggactcgcggggtagaagccaggaactgggaaggcgaggaggcgtgaaggcaccacctactgccaacccggctcgagctggtcactttgccctccatgagatcgtaggtgtgcttgttgttttattttacgggggaggaatggaaggctcagggaagttgaatgcggatgttgttcaagatcacacaggcctccagaggcggagccgggattggaacccaatctctaggactctgggttagcaaagcaaagggaggatgcagtggcgaggacagctagatacacctagggcgcagagcagccaggaccagagggccaatctgactatgcaggggtgagagggccacctcgggcagcttcctcggagcctcggttccccccttacagcgaggtgtcgctggggtgaactggtgggaactcccgcctcggtccacctcccgcacagagcatgcgtcgcgttccagctggaaccggtttggcgaggcggttcgaggggcggcgaccccacccccacccccccatgctcgggcatgcgcgtgccgacgtgggcgcgcgctcctttcctgggccggccggctgggcgtgggccggacgcggcggcccgcgcgcctgccgaccagcccggctgcgcgcgccgggccacatgccaagcgggctgcgcgcgcccctgcccggcccgggagtccctgacgacgcgcgcgcggctgacgcggggggcggggaggggcggggcaggtgcgggactttaacccggagccccgcccctcgggcgtacaaaaccggagcctcgggccgggctgcgtgagggaggagggtgagtgcccgccgctggccgccgccgccgccgccagtccgtccgtctgtccggtccacgtcgtcgctgccgcctcctcagcccggacgcccggggcccgcccagcgccgcccggagcagccgcggccccgcgaggagacgggggccgccccgcccggcccggcccggccctgccccgcccccgccctcgccctcctcctcctcctcctcctccccgtctgtccgtccgtccgtccgtccgcccgcccgcccgcccgcccgcgcttccgtcctgtccagccgccagtcctccagcccgtgtccccgctccgcccgctttgtctctccccggctcgctgtctctttgtctctgccctcgcgctcctccgcagcccctccctcgctccccatctcgggtccccttctcagagcgctcttcagccctcaga

SEQ ID NO: 26559 - DNA, 2300 bp, Homo sapien
accttgtcgctacaaaaaataaaaataaccaacttaaagtgaatagtacaggcgtagcataagtgactgagataggatgaccttcaaagtgcttagcacagtgcctggattcaaaacggttggctaaccctcaattccgtttattatttttacaccttaatgcaaaaaccatgacagtggtattggaaacactatcatcttcgccagtgctcaaaatattttgatatgtcaaaaattcttttctccattttttggaaaacagatgcgagaaaggaaaggacttgcctaggtcacccagcaaggcaggtcatgaacaagagttgggtctgcgtctggcagacctaccacaggtgcggcctggagagatgaggcccacaaggcagcgacaggacctggattcagtgaggagaggggactcgcggggtagaagccaggaactgggaaggcgaggaggcgtgaaggcaccacctactgccaacccggctcgagctggtcactttgccctccatgagatcgtaggtgtgcttgttgttttattttacgggggaggaatggaaggctcagggaagttgaatgcggatgttgttcaagatcacacaggcctccagaggcggagccgggattggaacccaatctctaggactctgggttagcaaagcaaagggaggatgcagtggcgaggacagctagatacacctagggcgcagagcagccaggaccagagggccaatctgactatgcaggggtgagagggccacctcgggcagcttcctcggagcctcggttccccccttacagcgaggtgtcgctggggtgaactggtgggaactcccgcctcggtccacctcccgcacagagcatgcgtcgcgttccagctggaaccggtttggcgaggcggttcgaggggcggcgaccccacccccacccccccatgctcgggcatgcgcgtgccgacgtgggcgcgcgctcctttcctgggccggccggctgggcgtgggccggacgcggcggcccgcgcgcctgccgaccagcccggctgcgcgcgccgggccacatgccaagcgggctgcgcgcgcccctgcccggcccgggagtccctgacgacgcgcgcgcggctgacgcggggggcggggaggggcggggcaggtgcgggactttaacccggagccccgcccctcgggcgtacaaaaccggagcctcgggccgggctgcgtgagggaggagggtgagtgcccgccgctggccgccgccgccgccgccagtccgtccgtctgtccggtccacgtcgtcgctgccgcctcctcagcccggacgcccggggcccgcccagcgccgcccggagcagccgcggccccgcgaggagacgggggccgccccgcccggcccggcccggccctgccccgcccccgccctcgccctcctcctcctcctcctcctccccgtctgtccgtccgtccgtccgtccgcccgcccgcccgcccgcccgcgcttccgtcctgtccagccgccagtcctccagcccgtgtccccgctccgcccgctttgtctctccccggctcgctgtctctttgtctctgccctcgcgctcctccgcagcccctccctcgctccccatctcgggtccccttctcagagcgctcttcagccctcagagccgccctttctgggcgaccccactcttcgggactccccctcagagcgcccccagatcttttggggttccccttgagaacaccttccactctccccaagggctccccgtgagtttcttgcacatcctttgggggttctgcaccccaagtcgctggggtctcgcctcctctgaacccccattgcccctgggctttccctcttctgggtgttccccatatccactgggagctcctaggtcccaagttggggtctttctccttgggaccccccaatatgtcctcagctccctgacttcaggagctcctctctgctttcccctggtttgtcccctgtcgctgtctctccttgttctctctcaggtctccgagcacccccacttctcgggatcggggtcccctgctttgctctccctgcccctctgtgcccccacatctgtctcggtggtctcgccactctgtgcctcttgcgctgaaggcccccctttgagcctgcttctttgcctggggcccttggcccccccttgctttttcagccctagccccctgtctccccttctctctgctccttgtctccctctccctttttctgtctttgccgggtctctgggtctctgacccccatccggccctcatggctttgtgtctgga

SEQ ID NO: 26560 - DNA, 2300 bp, Homo sapien
gacctagctgcttggaattctcttcccagctgcttctgccttgggagaaagaagcagaggaaaggagggaaggatttgaggctgggtgggtgggagtctttgagctgtttttatcatagcatacagatgagttgcccaatttagctgtgtggtttgacaagttacttgctggctgggagagggagtgggatcttaaccagccctcagcccttccactaatgagccttttccctagcttggcagtaccagcaaagggagttaagggagtctgcctttctctggggtcagcttcatccattcatgggggccttgagcccggccccactgtctttgctgtaaagcctgagccatggcttccaggttgtctgtggccccagggcacctgttcctcttgaggagtgtagaccgcctctcctttgccccctcaggcacctgggagccagcaggcatgaggcccgtgttaggcctcaggaccaagttcagcctggcctccaagacacatgcagggggctagcttcttgaggttgctgtgtcctccgcatccctcgggaaatggagtcacagccactcctgagtatttgaagctctgtttggccagcttataacctttacaataaaaaacaaaatgcaggccgggcacggtggctcacgcctgtaatcccagcactttgggaggccaaggtgggcggatcacgaggtcaagagttcaagaccagcctgaccaacatggtgaaaccccatctctactaaaaaaaaaaaaaaaaaaaaatacaaaaattagccaggcatggtggtgcatgcctgtaatcccagctactcaggaggctgaggcctgggaagtggaggatgcagtgagccaagatcgcaccactgcactccagcctgggcgacagaacaagactctgtctcaaaaaaaaaaaaaatgcagaaacaaattcattctgacctgataaatacagtttggaggataaaatcttggggtagaagacagaaataatgagataaaggaagcttctctagaagaagcaaggacttaggtgctgcgaggtagggaggctgggctagatacctggggctgggagcaggctgcacggaggatgcatcgcacaactggcttgtgtctgggctgtggcatgagggacctgcatggctgagagggggtcaggagaagcaagcatgcagcccatggggatgggtggtttcacgtgctgtggtttaggggctggcaggaagcatggagaacaggggaagggggctccagcagaaacccatgcatgtgtaaaggcttggatgcacggaggtgtgccgtgtttgggaatggtgcactgtgcatttggttctctgaagctggaaggggtatgctgagggggtgggaggggcatgagatgaagctgctgagatggatgggcagggaccaagcaaaaagggctcaggtttgggaggagccctagaaccttggatactaaagtgttgggagcctttgctatatggccaaataatctgggtttttggcaactgagggtttttgtagtgataatgaggtttattttctctttcaacaaattattgagagcctttgtgcttgaggcataaccccaatcctggcatgtggcatgatttgtcaggacagagttccctcaattgccccaggcctgtagctgtcagttgactcctccaagcccgtggactgatgtggtcagtgctctgatggagattcccaggtggaagaagagacggcagtcgggaggctctcagaggaagaaattctgaaacttgtgggtagctgagggaagccttccaggcagaagaacagtatgtgtgaaggccccagcgggggaggaagtggccggggtgaggtattggaagaggtgggggtgaggtatttcctcactatatttcctgcattcacacatttgaaatgagagctctcctgtacaaggttaggtcccatctccctgcttcagggaggcaatactcagagctgaggggtgcctgtcccccagggagcccctgaagccccaaaatcttgtatgctagacaacaccacttatctggctgtggcctgtgtgtgcctcaggagacagaggatccaagatcagctcactttcctcttaccgaatcaggcctggacttgctttctggctgggttactttccctctgatgactggctgcctaggccagggctcagggcgtctgagggtgcttagtagaactctgggcccagcagctctgagagagaggctggagggtcagtcctttgtccagaccctgactgtgggcagtcctgttgtcttccatt

SEQ ID NO: 26561 - DNA, 2300 bp, Homo sapien
agtggagaacagggagttggaccagtggagaacagggaggcagaccactgtacgggtttcacataacgagaaagtgttggggtgggaatggcaagatagggaaaggggttagctggaccctgaaggatgtgtgtttttttgtttgttcatgtgtttgtttgtttgtttgttttgagatggagttttgcttttgttccccaggctggagtgcaatggtgcaacctcggctcactgcaacctccacctcccaggttcaagcagttctcctgcctcagccttccgagtagctgggattacaggcatgcgccaccacgcccagctaattttgtatttttagtagagatgaggtttctccatgttggtcaggctggtctcgaactcctgacctcaggtgatctgcccacttcagcctcccaaaatgctgggactacaggcgtgagccactgcgcccggccagatgtgttcatttttgaccaggtggagagggggcatccaagcagagggaataggggagagggaaggtggtgtggaaggaaaagaccagggggagcactgagtctctcagtgaccttgaagatagcaaggttaaccattccttagctgttttggcatctgctctgttgtcaccacctccccacggcacgggtcagggtctgtcacagcctcgtggccccacgcacttcacctagtacatgcccctgctggataataaggtttgtgtgtgactgatgtgggggatatctttggccagtggtggcatcccctcaagactttgtctcgaatgagggtgggtagggcctgtgtgtgtctgtcttggtcattgcagtcttgaccctcgttctccctgctccagaaatccttgcggacggaatggctaagcccagagctagggccaagtcaggcagggcttctgcattggaaggggcttgagagggttgggggcttcaccatctcacctctcccctgcccttctctcatccatctgcaggttcatcatgcctagtggcgtataagaagaccccgccaccggtccctccacgcaccacttcaaagccgttcatctcagtcacagtccagagcagtactgagtctgcccaggacacctacctggacagccaggaccacaagagcgaggtgactagccagtcgggcctgagcaactcgtcggacagcctggacagcagtacccgaccgcccagcgtgacacggggtggagtcgccccagcccctgaggccccagagccacccccaaaacatgcagctctgaaaagtgaacaagggacgctgaccagctctgagtcccaccccgaggccgcccccaaaaggaaactgtcatcgataggaatacaagtaggggctccttttgcactctgtgtcctcagcccactccgtgcacctgcctgtgtgtaattacatctggtagaggcccactaggtctcctgggaaaaggtggtttgtctctctattttgggggatcagccccaagtggccaaaccgaattccacccatagccacgcctcgctggtatctgtccacacgtgctgctggtcagcagctgtgggcatgtgtttctgctcctccagtgggttgtcccagtgaatgtagttacactcagccagccatctcctgtccactgtttgcctgtccactgtctgtctgtccactccaccctttgccctgccagctgacccgtgggaggcgggactggcctaacagttctctaatccaaggtcagctcgggtgcggaggccatagccccgcttggcggcaggagcagcatggagcatagacgctgttgggccaggggcccaggacccagggcccttgagccatgggggttgctcgaggggaactttgcccagagccctctcgggccttggggacaggtaggtggcttgaggtaccaggcccatgtcattgagaagggtgatgccggtctcactgcctccctccatgggatagggtccaggcgatggttccccagggttaggtggccaaagtcagcaggccctccatagtcatggcacacagcagggcaggtgtgccagcttcccctccactgcttcattgcactcctgcatgcacccgatgtcaataatctgtcttgtttgctgagctggggaaacttgggccctgccttgtagtttttaagagtttctctaaatccagattgagtggactctccctgccctggctggacctgcagaccaaactagggcacgttcagagccatgagggaggggcagctacagtgggtgagggcgagaggggagacagggcccccccaagcccaggggttg

SEQ ID NO: 26562 - DNA, 2300 bp, Homo sapien
tctcaaccccccacccccaaaaagaaattctgatatacactaaacatggatgaacctggggcttgaggacattatgctgggtgaaataagccagtgacaaaaggtcgaatgctatatgattccacttacatgaggccccaataagtagataaactcacagaaaacagaaagatgaatgatgactgccaggggcggggagaagggggcaaggtggagttagtgtttaactggcagggagtttcggctgaggaagatgaaagtgctctggagatggatggtggtgatggttgcaaaacaaagtgaatatacttaatgccaccaaactatacacttaaaaatgctgaaaatggcatgaacctgggaggcggagcttgcagtcagctgagatggcgccactgcactccagcctgggcgacagagggagactccatctcaaaaaaaaaaaaaaaaaaaaaaacacgctgaaaatggtaattttatgttatgtatattttaccacaatcaaaaaataaaatgtaaaactgggacactgaagaaatgtgatgacaaatgatcttactttggctcctagaccagaaaaaattcctctaaaggacattattgggataactggcacaacctgaatatggactgtaaattaggtaattaaatcaatgtgaaaattgtcctgacttttatcattgtactatgcatatttaagagaatctcctttttaggaggtactcactgaaacatgtagagataacaggacatacgtatgcaagaaactctcaaatggttgggggtaggaataaataaatataaatgtatgtacatgtattatatatatgtatatgtatatggaaagcaagaagaaaatataataaaacccaatggtaacaaatggagaatctagatgaagctatacagggttctttgcacagttcttctaactttatcctaagtctgaaatcatttcaaaataaagtttttaaaaattaatctgtccaaaatagagtttcttatccccaaactgctccacacagcaaacccatcatagaaaatggcagctctttctcgttgctcacatcaaaactctgagagtccaccctaactcttttctttcacacccattcccatgccccagcagatcctaccggctgcacctcggaaatagttttagcacttgtccctcggcctccccgctagtccggatcagcctgatccttgctgggtcgctcctcacaggtcccctgctcgtggactcggccccctctgcgctattttcaacacatcacccagaaggattccgtcaaaacccaagccaggtcgtcaccccctgctcggaaccctccgacaccccacatggcctacagggagccacagaggggtccctgctgcttctcagcccctccggctcccgcccccatcctcctgacctcctgctgccggcgaccccaagcccgggagccctcacggcggggcgcacccctgcacctcctgtctgcccaatgtcactgcccagagcaccctgcggaacagcccacgctccccccaggtccccttctcctttgaggccccaggccgcggagctacttgttcatcgtgtttccctccacgaaaccagtgcttcccgagtggttccttcaaccccgctctggcgggcgaccgctgatgtggacagagcgagtcaccgggcgtaggggtccctgggagcccccccacccaccgcctctgccctccccacgtcgagagccgttgcccgtcaggggaagctgcactcccacggcccatacaagtgggaggcctctggggaagcggccctggacattccgtttgcctctctggaggggaaggggtggcccagagcgaacccccacaccccctctcccattgcctgctcaccccatcacctcccctccctacaaggccctctgtgcagcccgggctggcacagcaaggaaggggggctcaccccagagcgcccccgcctgccagcccgtgggtcgaggccaaataaggccggacggcagccgagggcccccgcaccccgcccgcggccccgccccgcgcacattcttctgccttgtaaggcccggccgccacgccccgcccccgcctggagtccagacccgacggccggcccagttccacgcacccagcgagcccaagcgccttctccgcaccaggtgggatccggggccccgggggtcttgaggacaggcctaacggcccagggctggagatgagaggtggcccgggcccgacccggctgtcacggggggcaaaggcgggccccacggactgggacgtggtagggt

SEQ ID NO: 26563 - DNA, 2300 bp, Homo sapien
tgcaattttcccgaatgaacagttctgcaaagaacaatcttctataagcatttatctttgttgtacagctacttcaaaagacagattcctagaagtggaattactgtcttagagaatctacacattttaaattctgatacttactagttcagaaacttgacacggtaattctcaaactctaattgcacttaggctttatctgtgaagcttgcttacgtgcaaaatctgaccggctaccagcctccctccaccactaccccgtcctccaggagagaggaggggctccaggtctttgttatgcagctctcaggtggaggaggaggcagcactcccccgcttccattttcccaaccacatctagcaccagacttgggaaacactcgtctaaggggctgctgcaggcacaatttacggtgcggtctcttcctctagcccaggcccccagtggcttccccagaaagggcagaatgtggctcttacgcatacaggagaaaaacgcctagtgcggagttcaagctcagcagccactaccagagccccctctccaggctcacctggtcgcacccatttccccctggggctcccctcttctgaaggtccctgtcccatacatttcctagaggccaaggcccattggttttacatttcttacctaaggcaacccagacgtggctttttctttcacagggccgtggggggagcaccacttccccggccaaaaaaattgtttctgacccacactctgggccttattttccctgtctgtgaaatggagagcaacaggcagtgccactgacatttcacccgctgccgtgaggaggtttttaacatttgcaggaagtctggcttctatggggtgtccaggtgaaaccttaacaatctttaatcagcattctgattggcttaaggcttgtttggaaaaaattaagagttttgttcctagagttctccattgctaaagggtaattaagtccaaaagctgttttcaaagcgatttccaagctcaagggccctagatatctggacctagccgtgtccgggtacagggctggggggcgtggggggatgccctaagaggctggttaacagaaatatcacagtatgtggtacccacagcagagagcagggaagaatgtactgactggggtgggggaggccaaggaaaaccttctggagtagggtgtaactggcagaagaggaaaaagaaaccagacaggaactccgggagctcctggactgatcgtttaaggccgggcacaaggggtaagggatcaggcttcactatcgaccgacctgggctgaatgataccggttgactgtgtgacaaaagcaaatcaagaacctctctgcggctcatgagtaagccagagacttacataggacaacacataccctatcacccgaggatgagacgggatgacacacacgaagtgccccgcacagcgtcgttgtaaagcgttggctgttttcacctctggccgccccctgtgagcccgatcatgtgctttttgggcttaggtcggaggcggcctcccagattctacaggccattgaggtcgtaacaagcgtctccatcagagcctagtccttaactagctgcgggtaagtgcccggactaagtggcctcagtttcccctcgaagcaacgggaccaatcgcaccgccggcaggacatcttgtgcggggcgcgaagtgacaaaagtcaggatttgcagaagttcccactcggtaacgacccccaccccggcaaggagcacagtaggcgctccggaaacgccctccacgaggagggccgggccacttcctgcccccgagcgggctctccccggcggaggctcccaccgccgctatgggtaggccatgcagcattcctgagggcggggtgggcgcaggaagaaggtgcccgcggccccgccccctccgggcgcgctgggcggggcgaagcccctcggcgccgacggcccgccccgcggggggtgggcgcagctcgtcgcgctccgcacaaagtttgttttctccctccgggcgggtgggggagggcgcagagggcgcggggggaggagaggggatctgacgtcaggccgcgaggtgctttccagccgcgagctgtcaggccgagtgtcaggccgggcaggtacgcggcgcgcgcccccggcgccccccgctccccgccgggacgccccgcgccgagccggaggccgcgtggacccgaaagccgctgggaaaagtcagtgcagggagcagcagagggccagatgggggtgggggcgcgcggacaacttggaaagtttctttttctcg

SEQ ID NO: 26564 - DNA, 2300 bp, Homo sapien
ttgttcctagagttctccattgctaaagggtaattaagtccaaaagctgttttcaaagcgatttccaagctcaagggccctagatatctggacctagccgtgtccgggtacagggctggggggcgtggggggatgccctaagaggctggttaacagaaatatcacagtatgtggtacccacagcagagagcagggaagaatgtactgactggggtgggggaggccaaggaaaaccttctggagtagggtgtaactggcagaagaggaaaaagaaaccagacaggaactccgggagctcctggactgatcgtttaaggccgggcacaaggggtaagggatcaggcttcactatcgaccgacctgggctgaatgataccggttgactgtgtgacaaaagcaaatcaagaacctctctgcggctcatgagtaagccagagacttacataggacaacacataccctatcacccgaggatgagacgggatgacacacacgaagtgccccgcacagcgtcgttgtaaagcgttggctgttttcacctctggccgccccctgtgagcccgatcatgtgctttttgggcttaggtcggaggcggcctcccagattctacaggccattgaggtcgtaacaagcgtctccatcagagcctagtccttaactagctgcgggtaagtgcccggactaagtggcctcagtttcccctcgaagcaacgggaccaatcgcaccgccggcaggacatcttgtgcggggcgcgaagtgacaaaagtcaggatttgcagaagttcccactcggtaacgacccccaccccggcaaggagcacagtaggcgctccggaaacgccctccacgaggagggccgggccacttcctgcccccgagcgggctctccccggcggaggctcccaccgccgctatgggtaggccatgcagcattcctgagggcggggtgggcgcaggaagaaggtgcccgcggccccgccccctccgggcgcgctgggcggggcgaagcccctcggcgccgacggcccgccccgcggggggtgggcgcagctcgtcgcgctccgcacaaagtttgttttctccctccgggcgggtgggggagggcgcagagggcgcggggggaggagaggggatctgacgtcaggccgcgaggtgctttccagccgcgagctgtcaggccgagtgtcaggccgggcaggtacgcggcgcgcgcccccggcgccccccgctccccgccgggacgccccgcgccgagccggaggccgcgtggacccgaaagccgctgggaaaagtcagtgcagggagcagcagagggccagatgggggtgggggcgcgcggacaacttggaaagtttctttttctcggccggacggggagggggcgtcgtcctggcgcgtgcggtagggggtgtgtgagctcgggggtgtttgtgagtcccgacggcccccggggggtgtttgtgagtcccgacggcgctgcgctccgggggccggtgggggactgttccagcccccgggaggaagcccgcttggggccctggtggggggcccagcttcataggatcccaccccaggagagggccgatcctgcaccggacctgagtgagcgcgcggggggacggatttgtttggtttcaaaagtgcacgttgctaaccgccagcagggcccccccgccgccgagccggacagggggcggccgagagtgacagctgggggtgggggccgcgggaagggcccggagcgggggggccctggggagcccgcgcgagttcccctttcctttggaacaaaggaaagtctgtctccgaggcatctgtcactcccaggctggccaaggaagcggggcgcgtggggccggcgccccggagaaagtttgttcgcgccgggaccctcgggcaggccgaaggtgatccaagcctcccgcgggagaagcgcgtagtctccggggcagggggcggccaacatggagtctgggcgcagggctgggggggggggggcggcgcggaggtgggagcccagccccctcccctcccttcccctcccctccccctccgggcccagttcggagcacaaagccgagcgcgcacgctccgccgtccccgcgccccgaagagtcggccagccccgaactgccggagtaggggtgggaaccaaactttttcctgccccgggacagacacgtgagttttctttcttccagagcccccgtcccaccgggatggcgggcccgcgcgggagctggtgcgcggagtcggcccggggtgtggggactgtggggtgcaagcgccccgagcgcc

SEQ ID NO: 26565 - DNA, 2300 bp, Homo sapien
tggggaatgacccctcagtctacacaaacttctccacctcggtgttccgccacacagggccatctgtagtctgggaggcttcccacatatgcaccccacaccgcacccagacacactcacgccaggcaattaaccaacagcgctaggataactggcccggacccatcgctcaagccttacaaaccctagggttttcaccgacgcatacagcacgcacacgcacagcttacagaccccaggcctagcacgaacaactgtgacccacacaactagcccaacttctgtacccgcccacccacgaactccaaccgacccggccacccccgatctctccgacagggaaaactccaggcgtcatcacactaacaatcagttctaccctcagtgacctgtggcagcaacccctcgacacaacatcccgtacaccctcctacagactcccacgacgccacctgcagccactcccgcacgaactttctgacaactcccctagctggtcccgacactcccccgggccgcgcactcacgcccgcattcccagcagttcagacaaagcgcgcaacctcccccgcggcccagaccgagtcggagcacatggctcctgggtcggcgaggaatcgtccggcgctcggggcgcttgcaccccacagtccccacaccccgggccgactccgcgcaccagctcccgcgcgggcccgccatcccggtgggacgggggctctggaagaaagaaaactcacgtgtctgtcccggggcaggaaaaagtttggttcccacccctactccggcagttcggggctggccgactcttcggggcgcggggacggcggagcgtgcgcgctcggctttgtgctccgaactgggcccggagggggaggggaggggaagggaggggagggggctgggctcccacctccgcgccgcccccccccccccagccctgcgcccagactccatgttggccgccccctgccccggagactacgcgcttctcccgcgggaggcttggatcaccttcggcctgcccgagggtcccggcgcgaacaaactttctccggggcgccggccccacgcgccccgcttccttggccagcctgggagtgacagatgcctcggagacagactttcctttgttccaaaggaaaggggaactcgcgcgggctccccagggcccccccgctccgggcccttcccgcggcccccacccccagctgtcactctcggccgccccctgtccggctcggcggcgggggggccctgctggcggttagcaacgtgcacttttgaaaccaaacaaatccgtccccccgcgcgctcactcaggtccggtgcaggatcggccctctcctggggtgggatcctatgaagctgggccccccaccagggccccaagcgggcttcctcccgggggctggaacagtcccccaccggcccccggagcgcagcgccgtcgggactcacaaacaccccccgggggccgtcgggactcacaaacacccccgagctcacacaccccctaccgcacgcgccaggacgacgccccctccccgtccggccgagaaaaagaaactttccaagttgtccgcgcgcccccacccccatctggccctctgctgctccctgcactgacttttcccagcggctttcgggtccacgcggcctccggctcggcgcggggcgtcccggcggggagcggggggcgccgggggcgcgcgccgcgtacctgcccggcctgacactcggcctgacagctcgcggctggaaagcacctcgcggcctgacgtcagatcccctctcctccccccgcgccctctgcgccctcccccacccgcccggagggagaaaacaaactttgtgcggagcgcgacgagctgcgcccaccccccgcggggcgggccgtcggcgccgaggggcttcgccccgcccagcgcgcccggagggggcggggccgcgggcaccttcttcctgcgcccaccccgccctcaggaatgctgcatggcctacccatagcggcggtgggagcctccgccggggagagcccgctcgggggcaggaagtggcccggccctcctcgtggagggcgtttccggagcgcctactgtgctccttgccggggtgggggtcgttaccgagtgggaacttctgcaaatcctgacttttgtcacttcgcgccccgcacaagatgtcctgccggcggtgcgattggtcccgttgcttcgaggggaaactgaggccacttagtccgggcacttacccgcagctagttaaggactaggctctgatggagacgcttgttacga

SEQ ID NO: 26566 - DNA, 2300 bp, Homo sapien
ggttccttaagccaaccctttcctgcctcagttcagttgcattggaggaccatagaggtgaaggagggcagatgagaaccccacggccagggcctttccttggaattgtctagaacattcttagctttctgtatggctagctcttctaatccttatgtctcagccttccagaacccttagctatgggagtttctcttatctttataatgccccctttattcttgtttctgttgggggcttgttggtggttattcacctaatggttaatagtcagtctccatgactaggtgcactataagctccacagggtggagtgcatgtctgtttaattcacaaaggcatcccagcactgagaactgggcccaatataccaggcactcaaataatatttgaatgagcaagaagccttgaagagcagcaggaaggtgagaagctctaacttgacttttttttttttttttaagacggagtctcactctgttacccacgctggagtgcaatggcgtggtcatggctcactgcaacctctgcctcccgggttcaagcagttctcctgcctcagccccccaagtagctgggactacaggcgcgtgccaccacacccggctaatttttgtatttttagtagagacggggtttcactatgttggccaggctggtctcaaactcctgacctcgtgatctgcccacctcggcctcccaaaatgctgggattacaggcgtgagccaccacgctcgaccgactttttttttctttgagacaaggtctcacgctgtcacccaggctggagtacagtggcacagtcacagctcactgcagcctcaaactcctgggctcaattgatcctatcacctcagcctcgcaagtagccgagactacagacacgcaccaccatacccagctaatttttgtactttttgtagacacagggttttgccatgttgaccaggctggtctggaactcctgagcgaaagccatccgcccaccttggcctcctaaagtactgggactgcaggcgtgagctgcagcacccagcctgactctccaggctggagtgcactggcattatcacggctcactgcagtctctgcctccctggcctcaggtgatcctcccacctcagcctcctgggtagctggggctatagggcacatgccatcacaacagctgatttttttgtatttttgtagagatgtggtttcaccatgttgcccaggctggtctcgaatccctgggctcaagtgatctgcccacctcggcctcccaaagtgctggaattacaggtgtgagccaccgtgcccagccgggggagggtcttcatgtccgggctctggagtctggacttgatcctgtaggcagtaggagacaaatggcagtttgcaacctcctcctcccaggttcaagcaagtttcctgcctcagcctcctaagtagctgggattgtaggtgcctgccaccatgcccagctaatttttgtatttttagtagagacagggtttcactatgttggccaggttggtgtgtgttcttatttaactctgtcttcccactatgaacctctgtgttttcttccatgttctggggtcctgagacatagtaagtgcttcatagctgtttgttttggtttgttttgaaacagtatcttgttctattgcctagactggaatccagtggtgcgatcatagctcattgcaggctccacctcttgggctccagctatcttccgatctcaggctcccaagtagttgggaccacaggggtgcaccactacacctggctaacttcttttgtagaaacagggtctccctgtgttgcccaggctggtcttgaactcctgggcttaagcaatcctcccgccttggccacccaaagtgttgggattacaggtgtgagccactgtgcccagcccatagctgttttagattaagcaaattgatcggtcttgtatattcattccagatatgtaactggttcatcaatgcccggcggcggcttctcccagacatgcttcggaaggatggcaaagaccctaatcagtttaccatttcccgccgcgggggtaaggcctcagatgtggccctcccccgtggcagcagcccctcagtgctggctgtgtctgtcccagcccccaccaatgtgctctccctgtctgtgtgctccatgccgcttcactcaggccagggggaaaagccagcagcccctttcccacgtggggagctggagtctcccaagcccctggtgacccctggtagcacacttactctgctgaccagggctgaggctggaagccccacaggtg

SEQ ID NO: 26567 - DNA, 2300 bp, Homo sapien
tacttgggaagttgaggtgggaagatcgcttgagcccagaagatcaaagctgcagtgagccctgatcatgccaccgcatttgagcacgggcaacagagtgagaccctgtcttaaaaactaaactaaaatagtcattatactagggagccatattttggggtaaaatattttgatttccttcaactggctaagctttaccatttcatatgggagggaaactggatcagaaaagaggcagggctgaaaagaacaagacccacggggaaacttaggacaaaaggagtgcacccatataacgtatacggcccttccaccagttccagacagtaacgtgatcacagtatgtttcaccttgggggtccagccccacttaatctactgaaacaatgtcagggtgggcttggggtggaaaacagcagctatagtattctggaaaagctctctaggaggttttttgtttgttttttgttttgtttttgagaccaagtcttgctctgttgcccaggctggagtgcaatggcgcgatcttggctcactgcaacctccacctcccaggttcaaacaattctcatgcctcgagcctcctgagaagctgggattacaggtccccaccaccacgcccggctaattttttttgcatttttagtagagacgggctttcaaccatgttggccaggctggtctcgaactcctgacctcaagtgatccaccgacctcggccttccaaagtgctgggattatgggagtgagccactgcgcctggcctccctagggaggttctattactcctgaaaagtgaagaattacaggtgaatgttgataggtatgcaaaagatactctgacctgtttaaaaaaaaaaaagatactctcagctttaaagtttaacggttaagagcacagattctggagtcagacacacccaggtaccagatacattacttgtctttataaatccactgtccagaggccgggtgaggtggctcacgcctgtaatcctagcactttgggaggccaagatgggcggattgcctgagctcaggagttcgagaccagcctgggcaacatagtgaaacccccgtctctactaaaatacaaaaaaaactagtggagcgtggtagtgggcgcctgtgatcccagctacgtgggaggctgaggcacgagaatcgcttgaacccgggaggtggaggttgcagtgagcagagaccgtgccgtctcaaaaaaaaaaaaaaaaaaaaatccactgtccagaagggatgtgccttggtctctggacttaccagcacagtgagcctggcaccacctggagggccaccggaaggagccccatccccaggggttctgagtcagtaggcgtggaatgggggccgagaacctgcgcctctacccagttcccaggcgatacggccgctgctgatccggaagctcactttgtgaaccactgacgcagcacatggtgaggacgctgtatgtgaacactcagatatcctgatacctaacccaatccttgtatttgccgcccaggagtccccggttgggtccaccttgctatacggcctcagaatctcatttcctcttttggggtctcagggctctcgtgtgccaaaagagggtgctgggcaagatgaaatggttagttattacagaagagttaacatcttcaacaaggccctacagaacttgcagggttaggggagaaaataagcgggctaaatcctgtggggcagcttggagctaccctggagcaaggtctgggctcagcaggcgagtaggtcgcaaggaaaggtagagccgctcctgccccactcgctgctcgaggggcagctgtggccgactgggcgacgctgacgtccagcctcggttttcccctacctcctcggtctccacagcgcctcctggcgcccatgtcaccgttctaccaagattgtccctcccctcacaccttaccgcgagcccggcggatgctgacgtcatttccgccacgagtagcgcgcttgcgccaaggcgccggtcgctgtttcactcggatggcttcgcggtcgccgattggctgcgtgagcacgtcggcgggagggcgcgcgacactgcaccgcccctcccttcgcggcgcctgctctgtagagccggcggaaccgggtagcttggccaggttgtgaggaaccgcagcgcgccgcaggaccgggccgctgagcctgcagccgccccgcgccgtgacctgcgaccctagaccccgactccctttggctcagcccgcgcgccccaggcccggcccgggcggcgcgacgggaggatgagcggcggg

SEQ ID NO: 26568 - DNA, 2300 bp, Homo sapien
acaggactggtccaggacgccacagaaatcactccatgatattgatggacgcccgtcctcatccaggcagtgtggggttcaaaggcaaggaatgagcccactctgtcaccaccccattcagtgatctcctccagagtaaggtgcatgggttcccctccagggaccaccagtccttggcaggtgcctgacacagagcagaagctccatgaatatcagctgaactgggccaattgtgtaactgtgccttgtccctactgaaaagaatgaaaccatctgaaaagaaagacaaagctccgcctcccactccccaaacactttaaaatagtgtttggaaaaatcagcactaccctggaaatccggggatttaaactattctaacgataagacacctacctgtctgaagagctaacagtctcatttagttaatgtgtgctgagtgctttctgtgatgcctcactaaatgctgagtaataggcaaacaaaagaagtctttgtcctcatgcagttacaggatagtggcagattaaacaagtaaactctcaaatgaatgatgaaaacttcccaagggaggctgggtcccatggctcacacctgtaatcccaggattttgggaagctgaggtgggaggattggtggagcccaggagttcaagaacagcctgggcaacatggcatgagcccgtaacttaagaaaaaaggaccgggtgcggtggctcatgcctgtaatcccagcactttggcagaccgaggagggcggatcgcctgaggtcgggagttcaagaccagcctgaccaatatggggagaccccatctctactaaaaatacaaaatcggccaggcgtggtggtgcatgcctgtaatcccagctactcgggaggctgaggcaggagaatcgcttgaacccaggaggcggaagttgcagtgaactgagatcgtgctattgcactccagcctgggcaacaagagtgaaactctctgtattaaaaaaacaaaacaaaacaaaatttgcaaagaggctggatgtggtggctaatgtctgtaatcccagctacttgggaggctgaggtgggaggatcccctgaacccaggagttcaagggtgcaatgagctaggactacaccactacactctagcctgggtgacggagtgacacctcctggggaggctcccaggagaggccgctgatgaactgacattcaggacgtggtaaaggaaacagggggctggtcagggttttcatgtgcgttatctctcggacctgtatgttgagtgttgttatccccatttttcagatgaggaaaaggaggcacagagaggggaagtggctcaacagtcagtcccctaaagccttgcaagtcatcactgcatcatacaacccacggtccttttttttttttttttttttttttttttttgagagggagtctccctctgtcacccaggctggagtgcagtgacttgatcttggctcattgcaacctctgcctcccaggttcaagcaattctcctgtctcagcctcccacctgagtagctgggactacaggtacacaccaccacgcccagctaatctttgtatttttagtggagatgaggtttcaccatattgatcaggctggtcttggtcttgaactcctgacctcaggtcatccacctgcctcagcctcccaaagtgctgggattacaggcatgagccaccacacccagccctccttgcagacctctgatccaagccacagttcctggtatgcctggaggaagctcactgtcctgtcattgtcccctgccacccagtagccaagtgtgatcccgggtcagagaaagggttctaagtgagccataggaattcaaaggagtgatcaacaaaggctaggggctgggaggcttcctggggaaggaagaatgggatccaaacaggactgaaggagaggagagggcatgactgcccatcggagggacccaagcagaggcccagaaagaaaaagttgagcctgttgtggcataaaaaagatgagatgtggagaaaacagcgtccaatgtgcaggaagccttcagaggctggcagagaggctggagcctggtcccacaggagggaggtcattcacatgctctgtgaggaggtagccagggccgatctggggagggagaggtatctgagattgggccagaagcctcggctctgtccccatcactgtgtctctttcagatttccctcgatgatgtgcttctgagtgctctgctgaggaacaatgggaagtctgcccagcagaagaaaatctctgccaagcccaagcttgagttcc

SEQ ID NO: 26569 - DNA, 2300 bp, Homo sapien
actccactccagtctggacaacagagcaagaatctgtctaaaaataataataataatacatagagcaaggtctggaggggtcccagggagttggggtgtgccacccttctggtgtgttggatgtgttcaccaacctggaaactctctgaacctcgtactttagggatttttatggaagcttcatcacataagcattatcaattattaactcaatctcgagctcctctccccactccagaggatgaggtgggactgaaagccccaagctcataatgatggctttgtctttctagtgaccagtccccatccaggagcccaccaagtgttgcctcattagaacagaaaacacttctgtcaccgaggaaattagaagggttttagcagctctggccaggagccagggaggaacaccagtgcatatttcttagtggatagacctaggattttaaattttgtaattcttaggtgcctccctaagtagaaaaggagagttatgccgtgggattcttttaagaagagaccagagattccctacttcctgccccattcatgaactgcaccttgaggcttgttttgaagatgtgcgtatcataagaagacgggcattacagttgtatggcagcaggagtgggaaggtgggctcaagctcaagtccctccctgccaaggcccacatccctgagtggctgtcacccattctaacgtcctgattagaactctcttgcagaagtgtgcctccactctggctccttcagctctgtgtgccaagtgcctacaaggataaaaatcaaaccagccttccctaggatcaaaggagaacctgagcaggagtgctgtagctggcaaggccccagaaagggctgcatgggctgagctggagtcaggaatcatttcagtgcagtgggccctttgtctccaagagtactaatccccctaatggggaagcagcgagagggtgtggttaaatcttaatgaagagtgggactgaaggtaacacactgatcaaagacaattcagccagagtcagattctttatcctagaccagtgattctcaagcttgggcatggactgtggctcatgcttgtaatcccaacacttagggaggtggaagtgggaggaacaattgaggccaggagtttgagattagatggagcagcacagtgaaacctcatctgtacaaaaaaaatttaaaattagccaggagtgctggtgcacacctgtagtcctagctactcaaggctgagaagggaggattacttgagcctgggtcaaggctgcactaagctatgattgtgccactgcactctatcctgggtgacaaagcaagaccctgtaaaaaaaaaaaaaaaaaaaaaaaaaaaaaaatcaagcctgggcatgcatcggaatcacctggaggcatgaaaacagattgctgggcctacctccagagtatgattccatagatctgggatgcggcctgagaatttgcatgtctaacaaattcccgctgaggctgctggtctagggaccatacttggagaccactgtccagatactgctgctattcaaagtgtggtccccagactggcaacatgggggtcacctgggagcgtattagaaatgcaaaatactgaactctgccccagaccttctgaatcagagcctgcagtgcaacaagatccccaggtgattcctatacacattaaaggctgagaaggcagtgcttcccacactcgtcagtcaagggaatctcctgcagggtttaaaatttagattcctgggctccctatctggagacttggatttagaaagtttgggagatcccagaaattgctacaattaagtcccgctgagtgattattatggtcaggccagcatgggaactccggctcattttcctcagtcctgtgttccttggacaagactaagccacaaagccagagaaaaaccttttgctccacgatcatgacaaggcagcagctgctcccctagaaacaggaacttggggaaggtggctcctcgacggtctgtgatgccgtcagaggaaacgggtggttgtgagaaccacagagtctgcagtcggagctagagctccaaggaccccacgcctgtgtctctgtgacagagctcaaagggccctgggccttccctccctggctcggctgtgcttgggagggttccccagtccagaatccctaaggagcatggggcagctgatccatccctggtgtacaaactgctgactgcagacagatgctgagctacccaaaccaacacctagcctctccctgaagatcctcccaggctgagagagttct

SEQ ID NO: 26570 - DNA, 2300 bp, Homo sapien
ctccagctcccgggttcacgccattctcctgcctcagcctcccgagtagctgggactacaggcgcccaccaccacacgcggctaattttctgttattttttagtacagacggggtttccccgtattagccaggatggtctccatctcccgaactcgtgatccacccacctcggcctcccaaagtgctgggattacaggcgtgagccgcagcgcccggtccataaacaggctttttgatgcaagactcttatctgcaagttttcaaaaacaacagggtggatggaggcctttgagtggtaaatggtgatgacaagtttaatctgaaggaagagacaagcaaagagaaactgaagggcaggaaggaggaacagaagggcaccagaagaacaccacgctttgagtaatgaaaagggggggtggaaattaactgagtccttaccaaggatctactgtgagccaggcatctggagctgcaaagatggaccatgccctcaaggggctagaagtccgcagggtaagactgaggctaagaccctgttttgtgaacgtgtaattctaattgggaaaatcaagcagggaaggcttcacagagaaggtggtgatttagtggagcctttgaaatgtggaggaggatttgctaagggagaaaaacgacagtttgagctagttattttgggggagaaacattcacatatttttatagctgttcatttggaactttaaatcatgggaggcttcttaaattcagcaccactctatcaatgttctctttctcttcttgctttatcttaaatactgaaatgttcaagcccaaccttggggcaaaggcagaaagcctcggacagaaagccccggaatgaggtgagtgctagccaaatctgctctgtcacctccaagtccagcccgcccagctagcccagtcagcccagtcctgctctcttggcaggaaaggaaggctaataatatcccctgagggccagggtaagggggggggggggcgcggcgggggtgatctggatgccagcaggcaaggatcactcttgttctgtcagtaagccaccaaaggaaagcttccctgcttcctaatccacggggctcctagtctacctgtgatagggaggccagctctgcaggaagaaaaaaagggcttcatgacaaggaagggggaagcatttggattgggaagtgcagaggtggttatgcgaggttatcttaataaaatgcttagcaagatccctggcacacagcgagcggtggaagaacgttagctcttatattaataacactattattattacagtaacacctcaattgtactccgacaacaagaaaatcttttttgtgcagcctacttttacgacgttcgagagcaacttcagagatgacaagtgatttcaaaattttttcaaaggtacgagatcaaattccaaccgcactggcctgagagcccgagaccctgagttgagagctgaccctgccacttgtcagctgcgtgaccttgggcatggcacttcacctttccgtgcctcagtttcctcggctgttaagtggggctaagaagcctctccccggtagggtagtcgtagggtcccgttagaggatgccctctgctgctctggggccggacgggtgcaagggctgctcacggcccctcttccaagcatctgggctcttggagcgggcgaggtagatggatgagcaaccccaaggcccaccaagctctgccgcctgcagagccagagcgagagaagggttcgcgcctgcggggggcgtccctgtgacccagggtgttgagcccggagggaggctctcttgctacccacacgctgtcgccggcgggctgggcgcggggagcggccgaggaaagccgggctgacctgggtccggcgggcgggcggggcggggcagagggccccgggggcacgggggaggcaagcagcacgggccaccagggcctcgccgtgccgcggagatgatgcggggaaggagcagggcaaaggagcgacgcccccgaatgcggcgccgcgcgccccccgcgggccgggcggaggcgctcactcacctgaggcgcgggcacccgccgtcagtgcagcagcagcggcggcggcggcggcggcggcggcggcggcggcggcggcgagaggggcgggggaggtgctgcggtccgcgcaggcgcgccgaggacgccagggcggcgcatgagtgctgtgcccgtccacctcgggaactaccgagaagatggtggctgagccaggagaggccggcggcgccatctttgatgtagtttttcttgctgcgga

SEQ ID NO: 26571 - DNA, 2300 bp, Homo sapien
cttttttttttttgagacggagtctcgctctgttgcccaagctggagtgcagcagcgcaatctcggctcactgcaagctctgcctcccgggttcacaccattctcctgcctcagcctcccgagtagctgggattacaggcacccgccactacgcccagctaatttttgtatttttagtagagacggggtttcaccttgttagccaggatggtctcgatttcctgacctcatgatctgcccgcctcagcctcccaaagttctgggattacaggcgtgagccactgcgcccggccatgaattttcattttatcctcaatttcctcatctgtaaaatggggacagattatctctctaaagatgattataccctccccctttttatttattacattgtattgcattttttgcttataaggatttcttcaaactcaagaagtatgttttgtgtcttcaacagtaaaatacgatagaacaaagaaaaataatacttactgagctctaagcattttacatgcatattatcattcagtctttgccacaaccttgtaacttctatttctgggtgtgtgacatagatgaggaattcgggcatggagaggtgtggagagacttaattgtctaaccaaggacatagggataaatagtggatggtgaactagaactaatttgaattcagtaaatgttaacgaacataaaccataaaataaatggctgtgctcaattaatgttagttttccttccaactaaattcagttcaagaattgtgcttgatgaataacaatattattgctgccctctgagatgtttggtaatattcatttgttcagtttgccttaattaaaagaatatgcttttagtggccgggcgtggtggctcacacctgtaatcccagcactttgggacgcagaagcaggcggattgcttgaggtcaggagtttgagaccagcttggccaacatggtgaaaccccatctctactaaaaaaaaaaaaatacaaaaattacccaggcatggtggcgcccgcctctagtcccagctacttgggaggctgagggacttgggaacctgagccgagatggcgacactggctcgggttaaaagggcgtggtggctcacacacctgtaatcccagcactttgggaggccgaggcgggcagatgacgaggtcaagagatcgagaccatcctggccaacacggtgaaaacccgtctctactaataatagaaaaattagccaggcccggtggcacacgcctacagtgccagctactcgggaggctgaggcaggagaatcgcttgaacccaggaggcagaggttgcagtgagccgagatcgcgctagtgcactccagcctggcgacagagtgagactccgtctcaaaaaacaaaacaaaacaaaacaaaaaaacttttagtcagtggtacttaatggtaaagaaataatagataataaatagaggaagagtgtgtcctgtacattttggtgttaaattgttgggtcattaagtttaatatctgcaatcattctgggaaaaaaaattccatctctaatgttgcattcaagaaagtagatgatttggctgacggttgtaataggggtgatacaatggaggactggtaattcggagccctgagtcttggactctagttcttaaattactatgttcattcaccaaaaatttactaagctctttccacgtgccgagcactgtgctaggcgccctgtgaccttgggtatggctctaggtcaccttaaaaggaggatgccataccctgcaagagctcttaggggcttcataaggatgcgactcagggaactgagggaagcgctccagacgcagagctcaatggccctgccgcccagcgcctccaaaatctgagattcttctctgaggaaactccgcagcaagaaaaactacatcaaagatggcgccgccggcctctcctggctcagccaccatcttctcggtagttcccgaggtggacgggcacagcactcatgcgccgccctggcgtcctcggcgcgcctgcgcggaccgcagcacctcccccgcccctctcgccgccgccgccgccgccgccgccgccgccgccgccgccgctgctgctgcactgacggcgggtgcccgcgcctcaggtgagtgagcgcctccgcccggcccgcggggggcgcgcggcgccgcattcgggggcgtcgctcctttgccctgctccttccccgcatcatctccgcggcacggcgaggccctggtggcccgtgctgcttgcctcccccgtgcccccggggccctctgccccgcccc

SEQ ID NO: 26572 - DNA, 2300 bp, Homo sapien
tttgagatgaaatcttgctctgttgcccagactggagtacagtggcatgttcttagctcaccgcagccctggcctcccaggttcaagtgattctcctggcctcccaggttcaagtgattctcctgcttcagcctctcaagtaacagggattataggtgcataccaccacacctggctaatttttgtatttttagtagagacagggttttgctatgttggccaggctggtctcaaactcctgacctcaactgatccgcaggcctcagcctcccaaactgctgggattagaggcgtgagccaccacacccagcctaatgacacagtgccttataggggaaaaaaatgtgtgcctcctgtggacaggagggagccatgcaacaattcaaagcagggaaacgatgtagaagatgtattgggtctgtattccatgaaatcattttctcattgtgccccaggatggccagccctagctgggaaggaacactgagttctcttcctggcacgttgacagagaggagtttaagaggcaggcaagcataaaaggaactgggtacctctcaaccccagaaagtgatattcagggagccaagggcaaatctctgctttcagaatggctgctgcagccagcaggctggaaccacagggtggaaatttcaggaaggcagatttttgtctcccaccagaaaacttttccaaggaccacaactgctatggaaggatgaccacggtcagctccagctgcctctctccaacccctcttttggactgtgggctgcttataattcaatatttggaagtttttctgtgaaagaaaggactgtgcacatccaaggggacattttggtggcgtcgtgctgggtgctgaggaagcagcccgctctctggagcctcctagaccagcatgggatagtggagcaggaacagattgggctcctgggagcacagaaaggacagttggttttcagcctaaggccagagagaatgcttggagagaaatcaatcattccttagctgaggcttaaaattcgaggatgtggccgggcgcagtggctcatgcctgtaatcccagctctttgggaggccgaagtgggtggatcacttgaggtcaggagttcgcgaccagcctggccaacatttttagtggccgtctctactaaaaatacaaaaattagccaggcgtggtggtgggcgcctgtaatcccagctactcgggaggctgaggcaggagaatcgcttgaacccgaacccgggaggcggaggttgccgggagccgagatcgcgccactgcactctagcctgggcgacagagcgagactccgtctcaaaatacaaaaaaattggaggatgtagctaggaaaagcagggaaagccttcccaggcagagggaacagcgcctgggaatatagcgcctcaaagggcatctgatgccctgtccccgtcctacccctaaggaccagcccgacctgccgcaccccccgaccccgactaaggacactgcgaccacttgggggcgctgcgacctcctcccgggtgaaatgaaacccgagggcaggcccccacccaccaagcaagtaaagcaagccgtttgagggagtggcctggaaatgagagagaaaaagtcctagagcaggagtgggatagactgtgaggcaaactgagctcagagctccagtccaccctggggagagtcacggtccacattttgggagttaaggagataaagggagtgggaaccagagcctagcgacggggacagggcatcagatgccctttgaggcgctgtattcctccggcaagaatctctccgggcctctgtttcccccatcttagatgggctctggggccgtcgggcgcaaaaggacacgatagtgtggcgggtcccggaaagggactcccgggcggggtgttgcggggaggtggtgacgtggccagacaggacctaaaggacttggactagaggagcggagctggcaggagcgttggacggcggtgtacgcatgcgcgtcgggcggcggtgtacgcatgtgcatcgccggaggcaggcgttctgcgcgcgcgtgcccgagaaactgacggccgcgcatgcgcccttggttggcgggagtttcggaggcggtgaccgtgacgtagaaggtggagaccgcttcaccctgatcagggagtatcggctgcgggtgcgcaaggcgtccaggagtgacctggggctgtggagagcgacccgtggccttgtgtttcaggtacggaggttccggactggacgggcgtcaggaagtcacagacttgtcctctgatgtggcccc

SEQ ID NO: 26573 - DNA, 2300 bp, Homo sapien
tcttggagctctgattggcccagcctggatcacatatggtgggggagttggatgcagggcagccagaaactgaccatgctagatcattgatgacatcattcctgctctccggatgaggagattcaagcactgaggtcggggctggtctcttgttccatgcccttagtgctctggtggccagaactgacccttcctgtctctcttccttgacagacacgcagtgagaagatccacgacaaggaggctgtttccgaagttgagcttggaggaaatggtttaaagaggtgcttgcatgctggtcccctgctctgcctctctgaccggccccacagcctcgcccctctccacctcctgctgcgccctgcacccactctacctgctttcaccgcagccctgccccgcccctttgccctcttcctgccgccaccccaccgcatccaagttgggagagcatcgggatatggtttctctggaacccgagccactcaggagctggaaggcttggggcagtgggaattccaggctgctgcatgttgtttgagtccgggaatggaacacaggtggaaacaaaacattttgctcctcttgggattcttttctcctgcctctggagttaggagagtcaagattgacctctattcctgggattattgagcagcatcctttgggcccagccctgtgctatggccaaggagacccccaccccaagaccataaggaccacgtctccactgttaggaaacccatgaaaggagtcagggaaacagaacccccagccgctatcagaccagcccagaagcaaggcaggcgggacaggctgtggagccagagggccaggtttgaatgccagccctgccagttctagctctatgaccttgaccttgagcagtacttcccatctctgtctagtggggatgataggagctgcctcttgaagttaatcagagtggtctgacacgtgcatttccatatgcctggtgtgttcagtgattcaggcaataggtgtgccaggagcttcatggcgtcttagtttgggttcccccataagcaaaccctgagacaaagatttaagtgcaaatggtttatttgggacagaatttcaggaaacacttggaagtgagacagggaagggaaagcagccgataaaaggagcttcaaccaggttattccacgggcaactggagttcaggctgtcggaggaactcagggagccagaggagaacatgcagcttagagtcatcccaccacaaggaggctggggcacttgttcaccatatcccacctattgtttgttgagggctgtgtttaggggtgtgaactcattaactctgtgctatctctagcttcggtttgggcgtgtgttttgttttttttgtttttgttttttttttgaggcagagttttgctctgtctcccagggtggagtgcaatggcacaatcttagtttactgcaacctccacctcccaggttcaagcaattctcctgcctcagcctcctgagtagctggggttacaggctaacgccaccacgcttggctaatttttgtatttttactaagagatagggttttaccatcttggtcaggctagtctcaaactcctgacctcaggtgatctgcctgcctcagcatcccaaagtgctgggtctagcttcttctatgtgtaggacagccaagtatgatcccacaggcagaaaaaaaaaccatcagatagagaatggtggagtatgcagttcagagtatgcagttttaggtgtataggtgaaagtgcaaagagaggccaggtgcagtggctcatgcctctaatcccagcattttgagaggcagaggcaggaagatctcttgaggccagaagtttgagaccagcctgggcaacatagggagatccccatctctacaaaaaattttttaaaaattagccaggtgttaggctgggcacagtggctcacatctgtaatcccagcactttgggaggctgaggcgggtggatcacctgaggtcaggagttccagaccagcctggccaacatggtgaaaccccgtctctactaaaaatacaaaaattagctgggcgtggtggcgcacgcctgtaatttcatctgctccggatgctgagacaggagaatctcttgaacctggagggtggaagttgtagtgagccgagatcatgccactgcactccagcctgggtgacagaacaagactctgtctcaagaaaaaaaaaagaaaaaaaaaagccaggtttggtggtgcacacctgtagtcccagctactctggaggctgaaatgggaggatcacttga

SEQ ID NO: 26574 - DNA, 2300 bp, Homo sapien
aggctggtctcaaactcttggcctcaggcaatcctcctgtcttggcctcccaaagtgttgggattacaggcatgaactaccacatccagcctccatattcattttatccattagtattcattctgaattacagttcccactagatgtcagtttcatgaagacaggattttctctgagatggagatttgcatgcagaggtttatggaagagtctccttgggaacaacaccacagggagtgaggcagagctggaagctgaattacaccagtgatctcaggcgatcccatggggagctctggagctaggatggccctccctgtagagctgaggcaaggggtcatggacccatccctggatgtgggctccatccacggatagcacctgcccttggacaaggtggttctcctcaaccaatggctgtcgctgggagaggtactcagctttgaggtctcagctctgggaatgagtgtctcagttccgaaggggaatctgggcaaagcaccacaacatcctccctggttcactgctgtgttctctacacctacctacctggcgcttgataggtgctcaggaaatcctttgatgaaagacaaatgagaacagaaacacagctttccaagtcttcgccgaggccaactgggtcacacatgggagcaggctggaggggaggagccctgagcaggtgtttttagaatcatcttctccaatgcttctggcctatctcccattgctgctcactgggtgatctggagggctcctcttactcaacagtcagtgccatcagggtggggtggcctggggactggggccctccctggaccctgggcactgtgacagctctctgcatgtgcatcattctgtgagctttcagtcctgacttttttttttttttttaattaaatctcacttcagcattccttgaagaaaagaggaacccgctccctggggaaggccgataagaagactttggtgcaggtaattcccagcagcccccgtaggaaggttttattctgaagacctgagcctgactctaagtggcctggggatcccagattctgccctgtcctccccttgctcattttcctttttttcttttcttttttttttttttttttgagacggagtcacactctcttgcccaggctgcagtgcagtggcacaatctcagctcactgcaacctctacctcccaggttcaagcaattttcatgcctcagcctcccgagtagctgggactacaggcgtgcaccaccacacctggctaatttttgtatttttagtagagacagggtttcaccgtgttgaccaggctggtcttgaactcctggcctcaagcaatccacctgcctcggcctcccaaagttctgggattacaggtgtgagccactgcgcccggcccccttgctcattttcttagtttcactgcccactttatttcccaaaaccacatcctgagcccatggttcttagatgcttagatgctcgctccccaccccagccaggaacttagcaagcagcactacagtcaaatccaaaggtctagagttggagacccaggcttgaatcttggctctgccacttgactgccatgtgattggagcgagtcattttgagtttctgggctccatttcctatctatccctgtcttgggggttcattggaagaattggatgaagtactatatgcagcaaaggccacataccgttagctcctagtggtatgggattgtcagagtgccaggcccttttcatccttagctcatttaatcccgtctgtggctctgggagggaggtaatgttaccgccccattttactgatgaaactgtagtggcagcagttgctcatcagtatgtcacctgttcctgtactcccaggctatgtgtggcgccccatccttgctgtcatttcaacatctacccctctgcgtctcccccggacccttagctccttgagggtctggctgtgtctgattcatccctgtgttcccagcacatagtgctccccaaaatgccatggctggtactgagactcccagcactaaccttcctgggttgtgtctgtctctgtggtcccaggaggacagtgcagacctgaagtgccagttgcactttgcaaaggaggagtcagccctcatgtgcaagaagctcactaagcttgccaaggagaatgacagcatgaaggaggagctgctgaagtaccgctcgctctatggggacctggacagcgcgctgtcagccgaggagctggccgatgccccccactcgcgggagaccgagctgaaggtgcacctgaagctggtgg

SEQ ID NO: 26575 - DNA, 2300 bp, Homo sapien
cccattggcccctcgtggccagtgcctttccatgttcgcagtgagaggagggcaactgcccacctggaacaggacttccctgtggccatgtggggaccctagggcttcccccggacagcaggctttgcctttgctttttcagtggacatgagcacctactgggtgccagccgggctccatctgcacgcttccaggtgccatggcagctttagggacagcccagcttgcacgtgttgacctctccctgggaggctggaagcttcctgagctctcctgccgctggctgggcacggttttggaggaggctgaaatgttgccgactcttgtcagtggatgatggcctggcacaacacccagagtgcccctggctgtggagctcacagcatgctgctggtttatgtctgccctcagcacttaggttttaacttttccttgtggctcttctgaccaaatgggcttctccctcattagagtgttggtgtcttgctcaactatgtctctgtctccccattttccccgggatctgctctccagcctgagttctgtaaatgcttgtagtatggaaggacaaggtctgtctgaatcaagagacacctttccccaagccaggcctcagtctcctcatccgttaaatgggaggatgtcttcccaagggccgggttcggtgttggcaactgggagttcagtcggctctttgagtcttcagaagccggtggtaaggagagggcaagtggaaggtgaggaggaggagggaggtgacgagccaggacaagggtcttttgctcctgccctcttggtgctctgagctgcttccagtgagtgctgcctgaattggccttaaccgaaactctgagttcctcacccctgcctcccggttcctgctactcactctggtgaagggggatgggttgcagagctttgcttcagggctcctaggcacccatctccatgggcccctgtccatcccaggaagtcatcaggctctgacccaaagtctgtttgaggcacccatgactgtttaaaggggaaaacagtcccaggaggctgggggttgagcccgggatctcacaggggccggggtccagctggggacatcccacgtttgggccaagatggaaccgtaatttccaccattcattcagtggctcaggcttcgtgctgctattggatctggggtctgtcgcttcctgacggcgtgatctttggcaagttacttaaaggccctggacctttgctttctcatttgtaaaaatgggacagtaacacgctttccaacctcaacggttaaatgagctgattcctgcaaacaccattagagcacctggtatgtagtaaacctctgatcactgctcttgtcagaggcacgggacatgtttccatgtgcacccagcctgttctcttgtggattctgtgagggcagaatagatcctcttcatcacccaaggcaggctgggctctttctcctggcccctcattggttcattcggcagctgtttatttagaacctgccgtgtgctagggcagatctgggatacagctgtggacaagggaggatgaggtgtctgttttcatagagcttttggggagaccagaattaaacaatagtcatacaagaaatcacaacacagatcataatgagggtaaaggggacagtttgccaggagcacacgaaggtgggggctggggtgcacagggaggctgagggctgcaggatgccgtggagccaactgagtgagggtctggagtaagaagatttcaggctaagggaaattggaatgctcgttgagttcaagaacagcgctaaggccagagaggggaaggagtgtgggtaagagaggagagcaaggccagcccatgccacttctcactgtgtacatttgggttagtcccttaacttctctgtatatctgtttatcccagccgccagcctcacagaggcagggtcaaaatccagagactaaatgtggaccataaatagaggggttattactggaggtgttgtgttgtttattccacagatgggaaaactgtggccagagtgggtcccagagcagggtcgctaggctgccagggcttggagtaagcatgtgttagactcttgatgtgttttctgcctttctggactactttgcctctaagatgcagaaactgagtacaagggaaaggactccaaatccccagtatgtcccctgcaggagcagagttgaaggaggtcccaccaggtctggtgggtggccctgctcaggcttacctcccccttgtaggggtcactgggaactgtcaactgcgaaggactgtga

SEQ ID NO: 26576 - DNA, 2300 bp, Homo sapien
acatgggaaaatcaacacggccaggagccaaggagacgcccagacgcccgggaggaaagaaaacacgcccatcagagctcaagtcctcctgcactgctcctggtggggacgtgtggggtcagggcaaccgtcccagcccatgccagcccccacgggggccaaaaccgccttccaaagcatccgctaggctgacatctcgtaataggtcccctccattttatttttgtttttatttatttgtttatttttttgagatggagtctagctctgccacccagactggagtgcagtggcgcgacctcggctcactgcaacctccgcctcccgggttcaagcgattctcctgcctcagcctcccgagtagctgggattacaggcacgcgctaccacgcccggctaatttgtgtatttttagtagagacggggtttcatcatgttggtcaggctggtctcgaactcctgacctcgtgatccacccgcctcggcctcccaaagtgctgggattacaggcatgagccaccgcgcctagctacgggtcgcttccattttagccgtacagagcctgaaacccgggtcgggggcgcatggggagaaatatccgccggtcaaggtgcgcgagccaggcatgcacacagggcttcacggtccctatgccaggagagggaagccgaggcagggggagcccgagcgcgcccgggaggtgtgagctttgggtcccatcggcgccgcctagaccgtgagcttggcgcgtgcaccccaggcttcagtttacgcatctgtgcgatgggatcgcggctccggcgatgccggctaagggggcggagttcgcgcacgctcggcacggggcgaggggcgaggcgctgggcgtgcatggatgcgggttcctgcgaactgaggtccgcccggcctcggcccgggagtcccggctcccgccgctctcgcaggccctgcccggacgccgggcgcaggggcgcctccgccgggtgccttccccgagcgggcaggggaggaggcggcggagcggaggaggagggagcccgggccgcggctgcccgcgccagcctgaccctcgaaggggtcgctgttgcctcgcagatccctccctcgctccctgcctgcgtccctccctgccgctcccgccgcgtccgccttttgttcgcggaaccgcgcgcccccgagccgaggcggcggggcggggagctggcggggctgcgcggggggcgggctgcgccgggcggagccggggcccgggccgcagccggactcggagcccgagggagcgatcggcgtgcgggcggcgggggcccgggcgcgctccgggggcgcggcgaggccgagggggcgggcgccgggcggagccgcagccggagccggggcgcctggaggcggtcgggccgcactctccgagcccagagcagcggagagaccgcgcggcggggcttgggacggggacgcggtgtcggggccgaggtgggccgagagcagccgcagccccagcggccggagccgcgccgggtccctccccagggacgtcgaggccgggcgggcctgggccatgcgcgcagctcgctgaggccgagggaggccgcgatggaggcgccggcggccgagcccccggtccggggctgcggtccccagcccgcgcctgcacccgcgcctgccccggagaggaaaaagagccaccgcgcgccgtcgccggcccggcccaaagacgtggccggctggtcgctggctaagggccgccgcggcccaggcccgggctcagcagtcgcctgcagcgccgcgttctcctcacggccggacaagaaggggcgcgcagtggctcccggggcgcgcggtgcgggtgtgcgggtggccggggtccgcaccggggtccgtgccaagggccgtccgcgctcgggtgcggggccgcgaccgccaccgccgccccccagcctcacggatagcagctcggaggtgtcggactgcgcgtcggaggaggcgcgcctgctgggcctggagctggcgctgagcagcgacgccgagtccgcggccgggggcccggcgggggtccgtacggggcagccggcccagcccgcgccctccgcgcagcagcccccgcggccgcccgcctccccggacgagccgtcggtggccgcgtcgtcggtgggcagcagccgcttgccgctcagcgcctcgcttgccttctccgacctcaccgaggagatgctggactgcgggcccagcggcttggtgcgggagctggaggagctgcgctcggagaacgactatctcaaggtgggggcgcccgggtagaaagg

SEQ ID NO: 26577 - DNA, 2300 bp, Homo sapien
tctcgattgttgttagtagaaaaagtattttataaaactgtgtggtcggccgggcgcggtgactcatgactgtaatcccagcactatgggaggccgaggagggcagatcacctgaggtcaggagttcaagaccagcctgaccaacatggagaaacctcgtctctactaaaaatacaaaaattagctgggtgttttggcacgcacctctgatcccagctatttgggaggctgagacaggagaatcacttgaacctgggaggcagaggttgcagtgagccaagatcacaccactgcactccagcctaggcaacagagcaagattctgtctcaaaaacaaaaacaacaaaaacactgtgtggtcaatatggtatgaacacataatgtgagccctttgcaaatatacctttgggggttgagagtttatttgtgagagatggaattgtgaatatttttatattcttattcttttccggtttctcaaattttctacaatatctaaatatcactttttaattagaaaaaaaaaagcttgggccgggcccagtggctcacgcctgtaatcccagcactttgggaggctgaggcgggcggatcacctgcggtcaggagttcgagaccagcctgaccaacatagagaaactccatctctaccaaaaatacaaaattagctgggtggaggctgaggcaaaagaatcactggaacccgggaggcagaggttgcggtgagcccagatcacgccactgcaccccagcctgggcaataagagtgaaactccatctcaaaaaacaaaacaaaacaaaacaccttttaaaatctattctttttttttttactgaacattaacaaaagtttatttatgtttcaatttagaaattcatatgttccatagtgaaaccccgtctctactaaaaatacaagaaattagccaggcgtggtggtgggtgcctgtagtcccagctacttgggaggctgaggcaggggaatggcgtgaactcgggaggcagagcttgcagtgagccaagatcatgccactgcagtccagcctgggcgacagagtgagactctgactcaaaaaaaaaaaaaaaaaaagaaattcatctgttccccccacccccatctgaaactaaatatggaaaaagaaacaaagacttaataaagaaactttctgttaaatgacaagcaaagcaatgatgaaagcctaaaatacatctgtgtttaggatgcaaagtaaaaatagctttttttttttttttttttgagacaaggcctcactcttgcccaggctggagtgcagtggcatgatctcggctcactgcagcttcctcctctcaggctcaggtgatcctcccacctcagtcttccgagtagctgggattaaggcgcacgacaccatgcccagctaatttttatattttttgtagagacagggtttcaccatgttgcctaggctggtctcaaattcctggactcaagtgatacggctccctcagcctcccaaagtgctgggcttaccggcatgagccactgcactgggccagattgttctttcagtctaggcatgcccccttctagcttctgttctaacacactcatcggcttggagagggaagtgaatggcagactgtcagtcccgcgaagtcttctgagattatctggttcaacatgttacatgttgtgtgtggtgaaactgaggctcaggagtgcaaatgggcttatccaaggtcatacggggaactagaggccccagacctccagcctgggccttaggcatctggccaatggcccacagtcccaaggccaggctgccagaaggacaaggaggtagaaaggaattgcaaccagaatctatggtgtatggttaatacgtgttacatgctaactgcaatgaggtcttgaatgccgagttgctcacagactcacccagcagcagctcggcctggagtgacaggtgagagggagcaaagggcagctggcgtgggcatggagctggctgggtgtgccccaggcctctccctctcatctctaggcctcacctatcagcgcttccttcctgggcagggctgaggattcactcactgcccacggccggctgagcagggacaggagaatgagaggcctccgctggcgttacactcggctggtaagggttccaactccgtctgtggtgcaggttgggaggtgaaaggaggtgaggtctctggcagggtggggcctgggctagggttggatgcgggcagtgacttgttcccctctcaagtccctccctggcaggcctgtggtttggagcaaggactgactc

SEQ ID NO: 26578 - DNA, 2300 bp, Homo sapien
gaactcctgaccttgtgatccacccgcctcggcctcccaaagtgctgggattacaggtgacagctactgcgcctggccacccagctaatttttgtaattttagtagagacagggttttgccatgttggccaggctggtctcgaactcctgacctcaggtgatccacccgcctcggcctcccaaagtgctgggattacagacgtgagccactgcgcctggcaggaacacctttatactttcctccatgggtctgcaggaaaagggagccattgaaaattgtgggttaaataatagaaaatagttttatatcaaaaccccctttacttatttatttattttttattattattatttttgaaacagagtcttgctctgttgcccaggctggagtgcaacgggaagatcttggctcactgcaacctacacctcccacatttgagtgattctcgtgcccccgcctcctgagtagctgggattacaggcatgcaccaccaggcctggctaatttttgtattttagtagagatggggtttcaccatgttggccaggttggccttgaactcctggcctcaagtgagtgctctggcctcccaaagtgctgggattacaggcatgagccactgcacccagccccaaaccccctttaacaagcagtggttggcaagttatcaagaccatggactttggaaccaagttacatctcttgggtttgaatacaggcttcatcatttcctagctgtaagaccttgggcagctgggtacggctgtgtaatcccagcactttgggaggctgaggtgtgggaatcacctgaggtcaggagttcaagaccagcctggccaacatggtgaaatcctgtctctactaaaaatacaaaaattagccaggtgtggtggcaggcgcctgtagtcccagctacttgggagtctgaggcatgagaatcacttgaacctgggaggcagaggttgcagtgagctgagatcacgccactgcactccagcttgggaaacagagcaagactccgtctcaaaaaaaaaaaagaagacctgcggcaaattactttttcctacatcctaaggtaattgtgataattaagtgaagtaatatgtgtagagcccttagaactttacaatatttgtaaaacccttagaagttataaaaattatttaatatttaaataatttaatgaatgtacttaattcatttagtattatgtataaatataaaattattttatatttgtaaagcccttagaaccgtgcctggcacacagtaaagctctgtttgcaaataatattttggctcaccagtagaccactagttcatactgcttgatgataagctattccgcctcattcgtccttgaccccctaaacaggtctatgccttggttgctgggaaggtgtgttggctttattaacagtaatagtgatatgtccttttaccaggcaattgcatggaccagtatttatagggaagtttgagccctgccgcagaggggttaagtgatgggaaaatgcctgccattttcacatgctgttacaaccaggcagtaaaagtcctcagaagttaaattttaagtaatcagactggccactttccttcctctgggaatgcagttgggatggagggctctgtctctagttggaaagaagtctgaagtcccctcctgtgtggacaccagacaacaggtatcccagggccctctagttgaccagcaatactgtggaatgaagacaccctcaagtcacatttgaaatcattccgggttcttccagttcagcaccttgactgttttcctcttcactgggaaggtgctggcagcctgacggccttttaggcttcttttaagtttggggcatctgaaacccggccaaggtgcggcgggtagtgtactcattcgaaggagaatacccccaattcactagacgagcccctaattgggggtgcggtgccgggcgcgctctttcctccccctttccaccagcactgccctcagttctgcttctagccacgccctttcgcgttcacgtccagcgccctggcgggattgatttgaggacgactggactgccattgcgcctgcgcagggagcccaaggcaagagccgctaggctgccctgcccgaagggctcaactgtcagtgagcctgcgcaggaggccaataggctgccaatactccttggactccccgccagggccctgctgtcagtgcgcctgcgcgcgggtccggcgccgaggttcttgactgctgtgccggacgccaggtgtagccatgcagcgagccgattccgagcagccc

SEQ ID NO: 26579 - DNA, 2300 bp, Homo sapien
catgctttgggagaactctgaaatattaaaccacaacagggaggctaatcatagaggctatcacacaatgggatcaaaatagaaacaaccttcatgtgtatctggctcaaaactgaagggcagagtaaatctatttcactacccatacttcattttcttttttcttttttttttttttttttttgagacggagtctcgctctgtcaccaggctggagtgcagtggcacgatcttggcttactgcaacctccgcctcccaggttccagcgattcttctacctcagcctgccaagtagctgggattacaagcgcccgccaccatgcccagctaatttttgtatttttagtagagacggggtttcaccatgttggccaggatgatctcgatctcctgatctggtgacccgcctgcctcagcctcccaaagtgctgggattacaggtgtgagccactgcaaccggccttccatacttcattttctattcagaaaagctcaattttgggttaaatgggcatgtcctgggataataagaaaaaataaaaccaatataaggaagggcatattgatttttggtttttttaaatgcatgcaggtgaggctgggtttgacagatgtgtcctcagttgtttgtttttgagacagagtctcactctgttacccagactggagtgcagtggtgcaatcttggcttactacagcctctgcctcctcggttcaagcgattctttattctcatgtctcagttgcccaggttgttaggattacacaagtgcacccacacgcccagctaatttttatatttttagtagtgacggggttttgccttgttggcctgactggtctcaaactcctggactcaagtgatccacctgcctcggcctcccaaagtactgggattacaggcaaagcaaataatggaacaacaaaagaacgaagacagggatttattgaaaacaaaagtacactccatagtggggaagcgaacccacgcagcagctcaagggcccagacacagaatcttctggggtccaaataccctctagaagtttcccattggccactttatgctctcttgatgtaactgaagtggtagcccacaatcagtctgagtggttgcagaaagcaaccaatcagaggccagggtgaagttaacaaaattatacttctatgcaaaggaagactctcccgccatcagtctgattggttgtggacagcaaccgttcagaggctggagtgaagttacaaagttgcaaacaaagactggaaggcgctcagtgtgatttgttgcagacagccaatttcccatctgccatgcagaaaaggtccaagggaacagcctctggttcttttgttacttaggcgtggaaagttggggttttcctttcaatttagttctaagaagtcacgtgaaacagccataggttccctgcctccagaccctattctcctgcctcatttactgcagtcttctctgcctgcctcttttagcgactagcatgagatgaggattcgtcttctaatatccgtcaccaatccttcccctctgtcatttagcgaaccactcactgggcactaggactttggggagagtcccaagaggcccctcttcgtccaggggctacttttttctcttccagcctccatctcctaactcaaggggtacagctcagattatgtttggcgcccagggacagtgacaaacccagggcccgtggatagaggaggcatctcactacgctgcacgaggccacctcgcagtaggcagcccagccctgccccaaaacccaagagcctaaccaggaagacagggggaggccgcgggcttcatctcccaagagatggactacacctcccagcaggctctgcgcgcgggctgaggatccctccgctctttttctgtcccgccggctgggccccccgcgaccagccaagggccaaggacaggtctttcagaatctgaggtacatcttcttatcacatttccggggagggactgctaggagctccggaggaaaaacggactttttttgaggagaaaagcggaggcagacggtggatgacaacacgtcccgcagctgcagattttcgcgcgctttggcgcaggtggttgtgggtagcgcgcctgggagggagaaagaagtcgggggccgtggcgcgcagcccgcggggcctgaagggatgttcgaggacaagccccacgctgagggggcggcggtggtcgccgcagccggggaggcgctacaggccctgtgccaggagctgaacctggacgaggggagcgcggccgaagccctggacg

SEQ ID NO: 26580 - DNA, 2300 bp, Homo sapien
tccaaaatggtcgtaccactttacatttccatcagcaggatatgagagatcctgttgctccacatccttgccaacatttgctattgttggtctttttctttttcattagtcaggtgtggtggctcccatctgtggtccacagctagtcactaggaccacagatgcgagccaccacacctggctaatcaaaattttttttttgtagaggcaggtcttgctgtgttgcccaggtgggtctcgaattcctggactcaagtgatcctcctacctcagcctcccaaaagctctgggattacagactgagccaccattcctggctgcatatgctaagtctgtggtgtaaatactcccatcatggccaaaatcaagctaccaatactaccttgggaagagatgttcaatggcatactgtcatatatttccaccacacagttacaacagatataagcaaccacaaaagcacacaaaacgtaaaatgtagtgaaataattagaaaataatgagttttgttttcaatatactttatttcatcctaaattgatataattttctaaatggctgtatttaaccaatttgcaaaattactgcaaatttaacaatggactctcaagatagtatgagacagctccagcacaccactggttggttgtcttattcttgagctgggagaattctttatatattctacatcagcactgcccaatggaactttctgcaataatgaagatgtcctataattttgagtggtccaatctgatatccactagttatctgtggctactgagcacttgaaatgtggctagtacaaatgagagactgaattttaaattttacttaattttaatccatttaaattcaaatttaaatatccacataaggctagtggctatcataacagacacagaaagaactgactctctcccatgcgggataacatttgggacaataataacgttaataagagttatattgtgcatactttatatgttcataaaactgtagttaaaagcacagattctggagtcagctgcctaggttcaaatctgtttccttctctttaaaatgggattagcctgtaatctcagcactttgggaggctaaggccgaaggatcctttgagcccgagttccagaccagcctgggcaacaaagcgagacgcggtatctaccaaaaataattttaaagattagctgggcgtggtgtcgcaaggcagcagtcccagctactccggaggctgaggcgggagggaagattgcttgagcccaggatgtcgaggctgcagtaagctgtgatcgcaccactgcactccagcctgggcgacagagcaagatcccgtatcaataaaaaaggaaagaaaagaaataatgcttgtagagcgttcggcacagtgtcgggttatactgtaaacattcagtagttggcgctagttattagagcggtgttcctggatgagccacctccatgttgagcctgtaaaactggcctaatatgttctctatgagtcactgcattgctctgcaaatcagataaaacgtcactcgtaggtcagttattaacaaccccactgataatctttggaaaaaactgacataattttctttttcttttttttttggtgagacggagatttactcgttgcccaggctggagtgcaatggcgcgatcttggctcaccgcatcctccgcctcccaggtccaagcgattctcctgcctcaggctcccgagtagctgggattacaggcatgtgtgaccacgcccggctaattttgtatttttagtagagacggggtttcaccgtgttgcccaggctgatctcgaactcctcacctcaggtaatccgcccgcctcggcctcccaaagttctgggattacaggcgtgagccactgcgcccggccagaaactgccacaattttctaaagaggaaaaaaaaatcccttctaagctatcccctcccgacgagacccttcctgttcctttaaaatgggccgggcagcagaaagacgagtgagtgacagcagacaggccaatcagaagcggccccgtctcgggcccaccccgaggcctggcccaaccgcgtcccggtagctcccggaataggagcgttgcgagacggtcggttccaagtgggcctgggcgcgggggagaggcgggtctgtcctcgggaactgcaaggccctgtgagcgggaggactgggatcccggccgcggctgctggaagcgtcgaagctcagcggggccgcggacactgacctgtgcttagaactcatcctggcccgcagagcctgccgcgagtccctg

SEQ ID NO: 26581 - DNA, 2300 bp, Homo sapien
ccagcactttgggaggccaaggcagggggatcacctgaggtcgggagttcaagacaaacctggccaacatggtgaaaccccatgtctactaaaaatacaaaacatgagccgcacatggtgacttggcctgtaatcccagctactagggaggctgaagcacgagaatcacttgatctgggaagcagagtgggcagtgagctgagatcgtgccactgcactccagcctggggctctgtctcaaaaaaaaaaaaaaaaaagaaaagaaaaaccaaatgcaaacattctgaatcaggagtatgtacacatacagtgttttttgagatcagcaaggacagtacagcttgagtggaataagcaaagggtaagaagtagatgaggtaacagaggtagcagaggacaaatccagagggccttgtataccaccgtagtggaagccactggaaagttcttttttttttttttagacagagtctcgctctgttgccaggctggagtgcagtggcgcgatctcggctcactgcagcctccgcctcccgggttcaagcgattctcctgcctcagcctcccaagtagctaggactacaggcacgtgccaccatgcccagctaatttttgtctttttagtagagacggggtttcaccatgttggccaggatggtcttgatctcttgacctcgtgatccgcccgcctcagcctcccaaagtgctgggattacaggcgtgagctaccgcacccggctggagaccactggaaagttctaagcagaggagtgatttgacttacactctaatggtattactgtgttgagaataaacaatactgtgtggagaacagaccatgcaggtgcaaggacagagcaggggacaccagttgggagactaccgccataatccaagccagaagatgatggtggcccaaaccagggcaacagcagtgaacatgatgagaagtgatgagagttagtctggctagaattcaaagtcaaagcctatcagaaactgctaatggacagaaagacctaagagagagcggagtcaagatactaatgctgaatccccaatgccttgtgcacaggcgggtacccaatatatgaagatctagtgaatggctgcgactagcattttcccacctagaccgtaaattcccctaaaacagcacctgtgtcagaatcctaatcttctcactccatgttaacgagagcagtaacttttctgactaaaagttgagcacttaatatgttaggtatgcccacgctatgctgtgctttgcacacaccaaatcattaaatcctcacaacatctaagcaaggtggctattttctgcatttcacagaccaggaaagtaaggctcagaagtagttacctgccctaggacacatcactgaaaatcaaacttcaggcaatttgaatccaaagtctgcttttaaccactttactatcctgaacttctcaaataatgaaacggtgagccactgactcattcatgtgtcaccctgggcaagtaagttcccttccgtgggattccaacttctcatctgtcaaatggtagtaacaagagtacatgcttccaaagttacgatgaggctacatgaaattccaccctgcacagcgtctactcagtaacttccaatgcagttaacttagttcttacctagggccatgcactgttctaaactaagcacgaagattatttcacttaataaagcaactcaacgaggcagataacgtgactaatttgactaacttattttacagatgagaaactgaggtgtagaggggttaagtaacctgctttgggttacacaatgaatacgtggccgactgcaagtttgcacctagagtgtcacttgagaacttatgctccaggctcccagagagaagtgagggttttctttgcccctttcactgaatgggaaactacagcacaaagaaggacaatctgcccaaaacctcacacggagtaaggggcagcgccgggaccagaaccttaggccgcctggcccagaagcccgcgcgagtgaaatgaatgaggccagacctaggctaagcgcgtccgcggtccccacggctgagcctcggggcgacccgtagctccgcgctgcacccctcccccaggcaccaaccccgccaggtcgcgggcactcccaccagctcgcagccctccttcggaccctcgatccgagagcgccccagccagagcttgtgcccatgcccctgtcccgcaggggaaggggatcccgcctggccggctctcgagcggcgactagtaacctcccgcgggcgacagccctctccccaaa

SEQ ID NO: 26582 - DNA, 2300 bp, Homo sapien
ccggcagggtgggtagcagggtcaaacacgtcaaatggcgagagcgtggtatagctgcaggaggctagagggtaagattttggagttggagttagggctatggtgatgcaggcagcatggagagggagggtcagtcttgagggcatttcatgctgtgtcagaagttggatcttgtctgagaaaaacagggaaccactgaagggttttaaaggtaaagcaacacggttacacttgtattttgtgaagatcagtcttgaagcagtgtgcagaatggattgcatggctttagaccgcttaggagatgactgactgggacaatgtaggtgagaaatggcaagggcctgctgtaaggcagtgacagaaaccagaggcgggactgggcctgagaaatgaaaaagaggtagacttgataggcttggagggtggggaaaagtcaaggatggttcccatgtttctggtttgggttgctggatgcatggtattacctgtgcatgagctgggaagtcctggtgaagaaatagaaggttttaagctcattttcttttttatttttatttttttgggggactgggtctcgctctgtctcccagactggagtgtagtggcatgaacatggctcactgcagcctcaacttcaagcagtcctcctacctcagcctcccaggtagctgggaccacaggcatgcgccacctgctctgctactttttgaattttttgtggagatggggtcttaccatgttacccaggctggtctcaactcctgagctcaagcagtcctgcctcagcctcccaaaggcctgggattacagatgtgagccactgcacccagcgttaagctcattttagatttgttgagcctgacttggccttggtgacatctaagtggagatgccagtaaagttggaatcagaagagactgccacttggtagctttgtcaccttcatcaggttacttgccaatttggagccccagtttctttttcaggtaaatggggatagtgataatctctaccaaaggatcatgttgttaaaaggaagagcttcctaaatacccagcacagtccatggccagacaggtgatccgggaagtggtttccttctttcctttctaaggttcggaaggactcaagcgccttcaggcttattgctctttgtacgaagtgagcaattttgggtaataccgtgtcctatggaaagtaactacttaactaaattcatgtagctcattccttaagccatctataatggctgagaatgttatctaaaaacgcctttgcttttcctggttcactacatgtgtcaccacttaacattgacttttccccactgtgtagaaagcatgtacctacatcagatctaaccttgatcccagcaatgtggattccctcttctacgctgcccaggccagccaggccctctcaggatgtgaggtgagtccgggttcctacgctgacaatgactttaactatttaaagtacatttttaaaggggaggagtcatgtcaaacatcctttttttaattatgagagtccattattgtgagtgggaattccattcctgtgattttttttttccttaagaaagtatagtttatgtttctcctaagtttttacttttcaagggttttaaataacctttttgtacagtttttgcttttcttctggtaggtcttgattttttcctttccatctgcctttaacacgtaaaaatgttcaaagtgtacccccacacgaggtttctggaagtcattttgttgaacataggagaaccatataagtagaaaggtaacttgtcagcatcttttcacatgggagtgttgtaccgaagttttgcaaacatttcatcctggtgtctggggattagagggggatgagcatgtgcgaggcggaggtgactttggcagctgctccgcattctgtctttgccatgcctgccacaaattgccaagacctgttctaaaactctgtgtctgccaattctttcttagatctctatttcaaatgagaccaaagatctgcttctggcagctgtcagtgaggactcatctgttacccagatctaccatgcagttgcagctctaagtggctttggccttcccttggcatcccaagaagcactcagtgcccttactgctcgtctcagcaaggaggagactgtgctggcgtgagttgtcatctcgagcatttctcaggcttcatttgtctcgggtcctatccgaagagggctcattcattggttcagcaaatactttctgggcaagtacttgcagtaaatacttccgtgtgccaggtgctctgca

SEQ ID NO: 26583 - DNA, 2300 bp, Homo sapien
cttttacaatttttttttttcttttttgagatggagttttactcttgttgcccaggctggagtgcagtgtagtggcgtgatgtctgctcattgcaatctccacctcccagcttcaaatgattcttctgccccagcctcctaagtagctgggattacaggcacctgccaccatgcccggctaattttcgtattttcggtagagatggggttttaccatgttggccaggctggtcttgaactgcctcagcctccgagtggctgggattataggcgtgtgacctcaggtgatcctcccacctcagcctccaaagtgctgggattacagttgtaagtcaccatgcctggcctttacaatgatttttaatggctgcatattattgctatgtaattttttaaaaactaaggcccagtttactgggtgtgtggcttgcctatagttccagctacttgggaggctgaggtgggaggatcgcttgaggctgggaggtctaggctgtagtgagccatgatcataccatatcactccagcctgggtgacagagggagactctgtctcaaaaacaaaaacaaaaaactaagggtcaagctgggcacagtagcaggtacctgtagtccagctacttggaggttgaggcaggaagatcatttgaaccgaggagcttaagaccagtctgggcaacatagtaagacctgtttctaaaagaaaaaaattaagggtcaatttttatatgaattagtgtttttcccagctaattgtatagaatttttttttttttttgagacagtttcgctctgttgcctgggctggaatgcagtggcgtgatcttggttcactgcaacttctgcttcccaggtacaaggaattctgcctcagcttcctaagtagctgggattacaggcacccgccaccatgcccagctaattttttttgtatttttagtaggaatggggtttcaccatgttggccaggctggtttcgaactcctgacctaaagtgacccgcctgccttggcctccgaaagggccaggattacaggtgtgagccactggccttatatggaactttttgaagtgttaaattaggtaataagttattgagatcaggagttttcaattttagagagaaaatgcgtttcttaatcataaggatacataggcaatatgtgaaattaaaaagcaaaatcatttttaggcgtgtcaatggagtggtaaaagacattgagattttactatatagttagagtaaggaattctctacctttttttccctttaaaataaaaataaatatttttaataaaagtaagatatgtcctttttgagaaattcacaaaacacggaaaggtagaaatcataccaaaaaattagccacaattatactatcgtacaccaacctctttgtacattttggagtattttcctctacatttttgttgtcattgtgaaacatatgtgggatcacattgtaaacttctcaattttacattacactgtggaaagctaccaggagtttgaattttaggagtggtgggagtaacaaaggaaaagaaaacgttggaaacctaggggtgttcatcttagatacttttctccacatgccaatctgtgattaagcacgagggtcaggcatggtgactcatgccccagcctgcactttgggaggctgaggcaggtggatcacttgatctcaggaccctgtctctacaaaaaactgcaaaattatctggacgtgatggtgcatgcctgctgtcccaactaccagggaggctgaggtgggaggatcagttgagcctacgagttttgagactgtggtgagctgtgatcgtgccactatactccagcctgggtgacagtgagaacctgtctcaaaataaaaaaaaaataagaagcacgagattgcccaagtggggtgggaagtcaaaaaggtaaggagttggctagccttggacagtctccaggagacattttgtagctcctgtttgttatatccatgactttcctacctgagttcttgctaagcccattgtcattcttaacagggatgtttttgaactaaatttcatgaacgtcaaattttccagtggttattatgacttccttgtcgaagttgaaggtgacaaccggtatattgcaaataccgtagaggtaggtgtttttctttccttcccattgccatgttagtatatccaaggatatggccaaattgacacagtattaattgtctggtgcattgacttttctctacaaccaagctaatgtgtttatgtggagggagggctgcattcagtctttgctgtttgac

SEQ ID NO: 26584 - DNA, 2300 bp, Homo sapien
ggcggggggatcacttaagcccgggggtttgaaaccagcctcggcaatatagtgagactttatctttacaaaaaatttcaaaattagctgggcatgatggcacatgcctgctgtcccagctactcaggaggctgaggcaggaggattgcttgagcccaggagtttgaggctgtagtgagctatgattgcaccactgcacctcagcctgggccacagagtgagacccgctctcaaaataaataaataaagaaccatctggaaataagctcccgggcctgggggtagtgagatccctgtcattcgctggcagcaagtgctcactcgagcaggaagtggaggacagccagtgtgcgtgttgtggggatgctcatgtcatggagggaggggctgaccactgaggcctgggctgctgctccctccagctctgcaggtacagggtctcaggctgcagtaagcagaccccctgagtgctgcctgggggcccaaggcatccctgggttagaggagacttcagtgccttcagaaaggagggtgataccctgagagggccgggagagcaaggtgggttctgccagtgctggccctgcctgccagaactcctcagcaggacccaggagtgggagagaaggaagccatgtgaggagattgtgggaaaggcgggggtgctggccacctccggggctggctgggcttctggatggatctacacccccatggagtagacatcctgctgagagagggagaaacccatgggagatgggaggacccaattcctaggtggccaagtcccccgaggccagccgtgtttccatgcttgggcaggtctgggctgacagcagtggcacttgccccagcggaggcgggctctgtcccctgctggctgtttttcccctaattgcagagcatgctgtccgcaggccccaattaagggtagttacaggacctatgagatgactgcgccacactggatcccccggctcttcagtctcttccaggactaaaactcttcagcaaaatctaagcatctggagcaagacttagagcccttctcccctctctccaactccaaacaaaattaaaacaggaagagcctgccctctgagagggttggtcttaggtagacacagcaaaggtttctagagaattccctattggttcaggcacttacctcaccagatccttccaggagccgaagtaggaggtctagttactatcttggttttatggccggggaaaataaggctcagagaggtgaagccacttgtcctgggacacacagctaatgacagcagagccaggatttgaacttccagtttgtctgactcagagctgagcagttacccttgctgcctgctttcactgccacactggatggggttgaatgaggggcactgagagaaggttctttgaccttccccattccttgctaagggatcccatttattctatttatttaaattttttttttttttttttgagacagggtctcactttgtcacccagcgtggagtgcatgggacgatcttggctcactgcaacttccacctcctgggttcaagggattctcgtgcctcaacctcctgagtagctgggattacaggcacacgccaccactcctgtcttatttttgtaatgttagtagagatgggatttcaccaggttggccaggctggtctcaaactcctggcctcaggtgatccgcccacctcagcctcccaaagtgctgggattacaggcgtgagtcactgtgcctgagcccaaatcctacttctaataccttatggcaaggggaaatttccctactatcactggtttttggttcaaccctatgtggttggcaggggagctccatcacgcccattctacagatggagaaaatgaagtcagagcaggtggctggcagaggcagaacatgaactcaggtctgtctgacttccagtgtctgggttctttttcccatcccacagcttccaaaaaccaaggaccaaggcttgccatggagccaagcccagggctgggccagtgaaggccatcccaatggctgtggctgtacctgaccttcccctcctgtcactctgcaggtgccaccccgggtgaaggatgccactctgggtgttcttctttgtgatcctcaccctcagcaacagctcccactgctccccacctccccctttgaccctcaggtaagcagaccctggggaaagttcccaccactcccaagccatccctgccatggggcaggcgttagtgaatgcagactcagcccatcagctgggccctggctatgtctccaggcagca

SEQ ID NO: 26585 - DNA, 2300 bp, Homo sapien
tctcatggacgtcttccctcatcacctctcttttgattgtatctcccatgttattgcttctctcatggctcccccttcttccttcccaacacatctcatggtttttaagtgtacatttatctgtgtgattgattagtgggggtgacagacattgacccctagtctataagcacagtcagggtaggatcccacctactcaccattgtcttcccagtttcatagtgcatgatccagagtagaaactccataaatattttttaaatgaataaattatgcattttgggtcccccatgccacctcacatagtatgggattagtgaatgttgagtgtattatttgtcttctaagagactgaattcctttagggcaagataggtctctctctctctcttttttttttttggagtctctggtatctaacctctgttccttgatcctctatgtatgttatctaggctgcataaccaattatcctaaaacttaggagcttaaaacaataacatttagtatttcacaatttctgtgaggcaggcattcaagtggcattgcaaggtatttctggctcaaggttgctcttgagtttacactgaagattttggccaggccacagtcatttgaaagcttgactaggactgctggagccacttggctcatacacatggctggcaagttggagctggttgttggcaggcagctcagttactccccatgcgagcctctccataggactgcttgagtgtcttcacaacatggattccccatgagcaatcaagacagaggaaagaggaagttgcaatgtcttttatgactttatcttggaactcgtgctccaagatttccgcaatatcctatgggttatacaggtcagtcttattcttggtgggaggtgactacagaggggtatggatatcaggagccaagaatcgtcagggtttatggtggaggctggttatcacactctcatctaggtttctttttctcctactacttgccccccaccccttcttaatcatggaacactgttctttgccttcaaaaaacttatcctgttatatgattacacattcatttaattagtctgtctccctccaacggactgtaagcaccacaagggcagagactgtatgtgtctgctttagcactgtgtcctcagttacaaggacaaagcatagagtacgcgctcagtgaatgctttttgaatgaattataatgatttgcttctgtctgaattacaagaggtgtttctgtttgtctcctctctgcattgtaggctcctagctcaggacctggcataaaattaaggaaatgaacgtgagaaacacttttgaaatagtgacaacacatccagatgaacattttgcaggacagctacacacccgttttagctcaccagctaccagttgtgactgtgctctgctctgggagatggcttagctttgcataggacaaaattctaatctagtttcgcgcagttcttacgaatttgttacaatgagacgggccaagctatacagcccattgcgatgaataagtaacttttttttttttttttttttttttttgaggaagagtctcattctgtcgcccaggctggagtgcagtggcgcgatctcggctcactgcaacttctgcctcccgggattcaagagattctcttgcctcagcctcccaagcagctgggattacaggcgcccgccaccacgcccggctaatttttgtatttttggtagagacggggtttcaccatgttgaccaggctggtctcgaactcctgacctcaagtgatccgtccgcctcggcctcccaaagtgctgggattacaggcgtgagccaccgtgcccagccccgagaagtaatttcttttgttttctttttaattaaacaaaaatgttgctgaaacgagctgagtgatataggagcttaaagaattgacaagctctagatttcatttccccaaacctctttgtccagctcgaacccacagaacagggacaaaagtcgacaaaacccagcggtgcctcacccagaaacctggcaacgcgggcggaacagagccggttggttgctcagtgcgcgtcacttccgggactcagggtcgcagggaactacttccgggggagcggcgcggcggcgcgggaggtgagtgccgcagctttgcggtggggtgggaaccgagagagagccgtcctcggtgcggtggcctggctttcccggccggcctgtctccagcggcgccgcttggtgggcccggctgtcgctccgctcagggcctgaatacgttccctcggcggttgttcgaa

SEQ ID NO: 26586 - DNA, 2300 bp, Homo sapien
tctaactgaatggaaactccgtggcagggattagaccagtgcctggcacatagtagattcacaataaatatttgtccaatgaattaatgtcttacgtcaccagtgtctggcattcaggggtgaacttcgcagtgtccagtaacctcatgaaattatttgccacgttcagtaataattaattatgcaccttttgttaaattctgatggggtatgaaagtcccctggtgtataaaaacctctacctgtaagcaagtctggagcaggacagggctagagaccaggatagcagctctgccctgactcatcaggagagtctagggaaacctcgtggcctctcagctcctccttgtcgttaaatgatgactctgttggttgaggcatctgctcttgctttcgaggtgggaaacagaggcataggcttagtcatttaccaaatatttatgagtcaggacctggaataaactcaagatgtacccaagatccttgctgttcaagagattacaatggatcaaatagaaaacagtagattccagtgtaatatttctcaaacaataagaaataacattctaaaatttgatccagcacatgcatgctcagatgtagatggatgttgaaaaagcttcaggatataataccggcccttaatgtgatactctttgatattttctattgttatttacctacttaaataaagtgctggctaataaaaaatgctggttgcagccccctaaatggttttcctggctcactaatgggccacagcctgcagtttgaaaacgattgacatactgggtaagcgccctgactctggggaagccagcccctttgaatcttgcctttgccacttatcagccaggttatccctgggtaggtcatataacctctccaagccttggtttcctcatcctcattagtaataccacctcccagtgtggtggtgaagtatgcgagttgctgcctgtaaagtgctgttcgcaacacctggccgttcatttgccgactgctgctgctgctggaacaatggccagggaacaaaacctgtcacagccagtcgaaggggtgtctcctagttgagatctgcaggatgaataggacttgtttgactttggtcatcaggaaaggaaagcccagaaatactggcaggagggctgggaagtaaagcacagaggtgcagagagaactagatgagagccgtacggcgcacagtgtgtgtagagcagtttatgtttccagaaccttttcacaaccaccctcctgttacacctgtgctgtccagtagggaacctttggccacatgtggctttttattgttaattagttaaataaaatgaaaaattcagtttctctgtaacatttaagttttcaacagccacatgtggctggtggctaccatttggagaacacaaatacagaacatttccatcactgcagaaagctttattggacagtatgacattataccctaacaaaagtcttgtgaaggaagtaggtagggcatagatttttcttagatactttattgtttcataacattccaaaaaattaaaactcatgacttattcaccttaacagcaactatttatgtttctgtagcatcttttgatctttagcccatgaaatcagcttatagatggttccaatcatagtgtttatacaattgcttatttttttcaattactgttactttgcaaagactttccactgacctgatacacaatgtttatatttgccgggttagtgaagagggattatgccatgatgtaccatcactgggttaactgcttcctgattgttggacgcctgggttgcttcctgtttttcagtattatgaatagtgctgccatgaacttttttgtacctgaaggctttttcttcttttgaattgtttccttactataaattctaggaagtaagttattcagtcaaaggatataatcacttttatggctcttgttatattttgtctaattgccattttttaaaaaaaggcctaaatgtattataggtatcattgttgcttggctcatgagaacatcccgtctccagaggtcaagagattattagcccaaagtgtagctacttgcagatagagcaggggcttttgtcctctgcttcccaactcttgccctatctttctattgtaccactccaaatatttcttatcacaatgttgctgttagtagtaacactagtaaatctgagtatttataagctcataaagcttgttacagccttaagcaaaaagcttggggccaagggcgttttaaaaaatgcacactttatgaggtgcaactgcggag

SEQ ID NO: 26587 - DNA, 2300 bp, Homo sapien
aatgaccactgcaggaggaaggaagagtgaagccaagccaaggactagggggtggggaaccttctgggcagagggatcagcaagtgcaaaggcctcaggacagggactgcttgtggagggacagcaggaggcaggtagaggaggggaggagaccagggcctgcacagcacgacatctctgtgtaaactgtgaagtgcagtgccaggggaggtgccaagcccattccacagactcaggctagagcccatcccccacccaccctgtcctgtagccctgagcctggtggcttcaactagaccactcacagcacaccatgtggagaatggcagaactgttctggagtttcccactgaggcctgtgatgggtccagtttcctggctgctgcagcaagggtgagctgggctggggctgggcatagcagatcagccatcattgagccagggtcaccagggcactaggtgtgctgtgggcagcacctctgatcccatgtcatgggacaactctggctcgtgggttcactgccagtcgtggagggccaggcctcaccctaccccctccaccctgccctcagttgtggctttggcccacccaggttgagggaaggagggaagaggaggtttctggagacagaggactatacaaccagcactcaccatctcagcaatgttgacgtcaatagcatctatcatctgctgggtgcttttgggttgggaagtggttcctgttggtgttctaagactggcctggggccatatatacagttggtagtcaataaatgcttgctgtccattaacgatgatttgcaggaattaagcaatgagttgctgctttaccaacaaagaatgttttaagcaaaataatttgcacaaagagtcacttatctaccaggccagaccagcaactcccaactgcacaatcctggaacttgccagggttgttaccctcgttttactgatgagtaaactgaggcccagagaaggcaggttcacatagtcactgaagggaagagctggaacttgaactcttgtctgtaggtcccaagtcagtgtgtgctgcctggccaactgggcagtgcctgctccgtgctgggcatgggccaggccttggtcactgccctcagggtggggacagacacactcagaacggacttagcacgtgcctccatcagggcgtgtcaggaagcatgttgtggagaaggtggcgtttactctggactttgaagaacaaggcgaggtagccagggacaggggctgagccttcctggcaggggttacagcctagcaaaagcccagaggggtagttaaaaataaagagtgcttcaaacgctcaataatggaaccattgtgctggccacatcctcctgagaacctcagccgctgagccaggcccttgaagtcggcagtggcttcaggtgggaagctgcatctgtgcttgcagaacctttacttgtctaagttgcctcctctctgataagagcatgtagggtatgaatgagaaagagatttcacatgtgctgagcgggcatcacctcatttcatccttacatgcgtcttctgggggctgtgatatctttagcccactctgcaggttggcatactgaggcttcttacattatctgcaaagtggcagagttgagacttgaacctgggtctggtccaaaatctgtgcttttaagctctctgtcatcccagttctcgaaaagcccagaattttctgttgaactcctggggatgagtttagtgatgtgctcgtacatattgaataaccagctctctggaagaaaaaagaggcttgattggtagcgtattccgatgtccaaggggtaaatactcccactgtggctgacatggagctatcagtgtgacattcttgaatatggagttgggaagagatgagcacagttggttcttgcaagtaggtaagggccagctccagcgtgtcactgggtaaatgtccctgcctcccccccgagcccagtatggccagtaaaggcctttagacatgtctaaggaatggaagagggctgagaaacctgctcctccagctgggggcccgccctgagccctgggaagctgcggttaatctttaagccagccttgcaaacaagtgcggccatttcaccagcccaggctggcttctgctgttgactggctgtggcacctcaagcagcccctttcccctctagcctcagtttatcaccgcaagagctaccattcatctagcacaacctgaccatcctcacactggtcagttccaaccttcccaggaatcttctgtggccatgttcactccggtttta

SEQ ID NO: 26588 - DNA, 2300 bp, Homo sapien
gataagagcatgtagggtatgaatgagaaagagatttcacatgtgctgagcgggcatcacctcatttcatccttacatgcgtcttctgggggctgtgatatctttagcccactctgcaggttggcatactgaggcttcttacattatctgcaaagtggcagagttgagacttgaacctgggtctggtccaaaatctgtgcttttaagctctctgtcatcccagttctcgaaaagcccagaattttctgttgaactcctggggatgagtttagtgatgtgctcgtacatattgaataaccagctctctggaagaaaaaagaggcttgattggtagcgtattccgatgtccaaggggtaaatactcccactgtggctgacatggagctatcagtgtgacattcttgaatatggagttgggaagagatgagcacagttggttcttgcaagtaggtaagggccagctccagcgtgtcactgggtaaatgtccctgcctcccccccgagcccagtatggccagtaaaggcctttagacatgtctaaggaatggaagagggctgagaaacctgctcctccagctgggggcccgccctgagccctgggaagctgcggttaatctttaagccagccttgcaaacaagtgcggccatttcaccagcccaggctggcttctgctgttgactggctgtggcacctcaagcagcccctttcccctctagcctcagtttatcaccgcaagagctaccattcatctagcacaacctgaccatcctcacactggtcagttccaaccttcccaggaatcttctgtggccatgttcactccggttttacaggtgagggggctgggctgggaagctgatcgacttgtccaccccacagcagaggggcagctagcctagatgcgaacctagatcagtgtagagtaaggctttgctcattcctggtctcctggaaggtatgttgtacccagaggcctttgccttccacattctagggtgctcctcccagctcctctcagcagggacctttgcccagggaatagaagcctgacctgtctgggccttaatttcccatctgtgaaatgggagaactttcaaagaaggaatatggaggcaggtgtgatatttaaagctggacccaggcccacctttccctgtgctaggattccaggacaggtaaggagccaagggtggggtgcccagccccaaaaggatagccctggagcctgcgccagggggtaagaggggagtctttgtggcctaaagcagcatttcctcaatgtcccgtttttctgctacatttcctgccctggttcagaggtacttagcctctttacttacttggaagtgtgactgccactcagatgccctggtcagcccctcctaagcagtaataattagaactaggggacttccgatgggctgccagggatgttttgcccttatgcacttaaaatgaacccgtaactattaaaataaatgtcgctcctccccaccctgtccctcctgccccagcccctactttgagaaactcaggtcaaggctaaagtccaaggcctggttcttgtcagtgcctcagtttccccatctgtaaagtggggcgatcttccgccgctcaggccaggtggtggttaggattaaaccctgaagtcgacctgagcagcttagcatggcgcctggcccagagcgggcgctccacgcccgctgatattattaccaatcgtgatttcgggagaggcggatctggggcgtagaaggtgggtgggttggggagggcattttggcctgggggcggatggggcccgcggggtgcggcgccctggcggagtgggaggcggggcttctgtgcccggtgtccccaccccgcccggacccccagctcgggccgcccctgggtctctcccgggtcaccggcggggaatccgtccccgcgcgcttcctccttcctcctcctcccggctgcctgccgggcccctcctcccagctcgcgcgctccctccctcctcttcccctccccgggccgccgccgcctcctcctcctcctcctccctttctctctcgatctgtctctcccggcccggaatccattccggcctgggagccggagcggccaggccgccgtctgcccgtcccgctggacgtcccgcggtccgccctcccgtgcgtccgtctgccggtgagcccgcccgcccgccggcccaggtgagcgccccccgcccctccgcggaccccccgccccggccagcgcgggggagcccccgccccggaccaccctggcgtcggatcgcgggccggcgggg

SEQ ID NO: 26589 - DNA, 2300 bp, Homo sapien
taaatctaaagcaagtaaagagatggaattattaattttaaatcttctcacagaagcagcccaggcccagatagctggactggtgaattctaccaaatttttaaagaagaaattataccagttcttctctaggaaacacttcccaactcattttctgaagccggtattaccccgataccataaccacacaaagacatcacaagaaaagaaaattacagaccaatgacttttatgaaaatgaatatatatattacatgtatataaatcttctacaaaatactagaaaactggatccagcaacatatgaaaagaattagatgccatgaccaagtaagaccgatgtcaggaatataaagtcggtttaactttttttttgagacggagtctttctctgtcacccaggctggagtgcagtggcacgatctcggctcactgcaacctccacctcctgggttcaagcgattcttgttcctcagcctcccaagtagctgggattacaggtgcctgccagcacagccggctaatttttgtatttttagtagaaacaaggtttcgccatgttggccaggctggtttcgaactcctgacctcaggcaatcctcccgccttggtctcccaaagtgctgggattacaggcgtgaggtaccaagcccagccaaagttggtttaacttctgaaaatcgattaatgtgatacactataccaatataataaaggtcaagaaccaggtaataattctaatacatgtagaaaaaagcatttgacaaaattcaacactccttcatgacaaaaacgatagaagggaacctcctcacccagataaaaagcagcaatgaaaacctcacggctaggccgggtgtggtggctcacacctgcaatcccagcactctgggaggccgagccgggtggatcacctgaggtcaggagttagagaccagtgtggccaacatggtaaaatctcatctctactaaaaatacaaaaattagctgggtgtggtggcagatgccagtaattccagctactcaggaggccgaggcaggagaatcgcttgaacccaggaggcaaaggtttcagttagccaagatcgcaccactgcactccagcctgggtgacagagtgagactcccatcttaaaaaaaaagaaaaagaaaagaaagaaaagaaaaaagaaaaagaaaaccccagagctaacatcctacttaacggtaaaagactgcgtgccatccccccaagatcagaaatgaaaagaatatctaccctcaccacttctattcaagattgtactggagcttctagcccggacaattaggaacgaaaatgaaacataaggcatccagattagaaaggaagaaggaaaactctctttttttgcagataatatgatcttatatatagaaaatcctaagaattccaccaaaaaatcagtagaactaataaatgagttcagcaaggctgtaaagtacaaaatcaatacacaaaaatacattgtatttctataggttggcaatgaagaatccaaaaataaaattaagaaggaaatttatgatagcatcaaaagaatacttaggaaaaagattaatgaaagtataaaacttatactccgaaaactacaaaaaaattttgaaagaaatggaaagacatcccgtgttcatggctcagaagcctaaatattattaagatggcaatactccccaattggtctgctccctatcaaagtcccagctagtttctttgccaaaattgacaaactgatcttaaaattcatatggaaagtcatgggacccagaatagccaaacagtctttaagaaaaacaaagtttgaggactcacacttttcaatttcaaaactgtaaaacaacagtaacagcatggtactggtataagtgtagacttataaaccagtggaggggaattcagagtccaaaaggaaacaatcacattgacagtcaattgattttatgcaagggtgccaagacaattcaagggagaagaagctggacaccttcctcaaatcctgcataaaaatcaacacaaattggatcacaaacctaaatgaaagaggtaaaaataaaaaactctcataagaaaatataggcatagccgggcgcggtggctcacgcctgtaatcccagcactttgggaggccgaggcgggcggatcacgaggtcaggagatcgagaccatcccggctaaaacggtgaaaccccgtctctactaaaactacaaaaaatagccgggcgtagtggcgggcgcctgtagtcccagctacttgggaggctgaggcaggagaatggcgtga

SEQ ID NO: 26590 - DNA, 2300 bp, Homo sapien
gcaaattatacatccatgcccatttagtcttttgtctattctgcaaatagttccagagcacctagtgggtgtcaggcccgtcctggtctctgggggcatggagatggatcctgcctggccctgacagccgcgagtgcacagtggagggcactgggtggaccccagtttgttgaccgtcttgcgttgctgtgacgctggaaggaaacgcaccaccacacccaggtgtttgtcttctaggggcagaattatggggcattttcttttattttttcttttctttttttttaatcttcttgtagttctcaaagagtccactctgaatgataaaagttaccatttacggaggcctggtaacgttccgtgccatcctgagcatgttccgtgtacttttctcacggattctcccagcagtcctgacacgggtgttattcccgatcgatagagaggaaaactgaggcgaagggcggccggccaggattcaaaccagggagtctgctccagcactccggctcttaacctcaaccgtctgcctctccacaaacaccaggatcaaccaccaagaccaaaaaaacagtctcacaaaccatcaaacattgcacttggtggctcaggaccttagcttcgtcttaaaggtccctgttatgctttttctgagtgccccagtgtggagtggtcttcgtgtttgtgagtgcaggggtcaggggttgtgtcttttcttcttgtccccttccaagaggtgacatgtatccttgatactggaagggcccttaaggtctagccctggctctctgtctcccttcatggcacatcagccaagtacccattctcccgtctttgattacctccagtgacagggagctcactcctcaacatttattttattctaaagaaaattcaggctcttagatagttcttcctccataaaaattttttaaaaaaatttttacttcctcttaaagtctcataaacaagtcccctgctttggggtcctgaggcaggacctggctaattcgtctctatgtccccctatagtgaggagcacagggcctgctagtaggtactataaatgctgcaccaggaagcaagtggctagggggcgggctggttgggcccccatcaatccttgggctgcaggtaaccaggtcagcagttcttgtgggacaccagctgggtgagtgctgatgggtatcgtgacctcaatggaataggttgccatagaaactgactttggacctgtccccaggtccattgacttgtccctcaggagaccatggtaatcccttgagctcttcagcaggtctccccagggcctccccaaccccacattctctgagctgggtggtccccagggagcatgcaaaccatacccccattgtgcagctgggtagcctgaggccccaggggcacaggggacaggctgaaattcacacaggcagggggcgtctcatagctgggctgggcgctcagggcaaacagccttgcccgaggacccagccagtcagggggccttttccccactcatgggttctcagaggaaattctggaccgattcccaggccttctgcctccccaaagaataatcggaacctgcctccctggtgtgtccagaattacacaatatcaataacggctgaggtgacctgtgatgcccctagcaccctacagtgtcttgtgcatttatcacaatgaccccatcgttacagatgaggaaacggcacagagagaagttaagtcacatgcctaaggttacacagctatttaggggtagagccaggatctggatgtggagagcccagctccagagcccactctcaccaccatgccataccctgtctcgctcttgctttgagagggttgaaaagactttgggagggttgaaggatatttcaggtctaggaggctcttagcacgggcctgctagagccatagcctgatgaacagtgatcagagagtgggcgccattatgatttctctttctaatgacatcctcaaaacagtgctgagatgtctgctttatccctgctttgcagatgaggacgctgaggcccagagagggaaagccacttgcctagggacacacagcggggagaggtggagcagggcctctatttcgagacccctgactccacacctggtgtttgtgccaagaccccaggctgcctcccaggtcctctgggacagcccctgccttctaccaggtgagatgatggccctatcagggctcaagatgggtggggagatcccagcgaatctgggtgggagctgggaccagccagggcctgcggatggggaaatgggag

SEQ ID NO: 26591 - DNA, 2300 bp, Homo sapien
ctttggggtcctgaggcaggacctggctaattcgtctctatgtccccctatagtgaggagcacagggcctgctagtaggtactataaatgctgcaccaggaagcaagtggctagggggcgggctggttgggcccccatcaatccttgggctgcaggtaaccaggtcagcagttcttgtgggacaccagctgggtgagtgctgatgggtatcgtgacctcaatggaataggttgccatagaaactgactttggacctgtccccaggtccattgacttgtccctcaggagaccatggtaatcccttgagctcttcagcaggtctccccagggcctccccaaccccacattctctgagctgggtggtccccagggagcatgcaaaccatacccccattgtgcagctgggtagcctgaggccccaggggcacaggggacaggctgaaattcacacaggcagggggcgtctcatagctgggctgggcgctcagggcaaacagccttgcccgaggacccagccagtcagggggccttttccccactcatgggttctcagaggaaattctggaccgattcccaggccttctgcctccccaaagaataatcggaacctgcctccctggtgtgtccagaattacacaatatcaataacggctgaggtgacctgtgatgcccctagcaccctacagtgtcttgtgcatttatcacaatgaccccatcgttacagatgaggaaacggcacagagagaagttaagtcacatgcctaaggttacacagctatttaggggtagagccaggatctggatgtggagagcccagctccagagcccactctcaccaccatgccataccctgtctcgctcttgctttgagagggttgaaaagactttgggagggttgaaggatatttcaggtctaggaggctcttagcacgggcctgctagagccatagcctgatgaacagtgatcagagagtgggcgccattatgatttctctttctaatgacatcctcaaaacagtgctgagatgtctgctttatccctgctttgcagatgaggacgctgaggcccagagagggaaagccacttgcctagggacacacagcggggagaggtggagcagggcctctatttcgagacccctgactccacacctggtgtttgtgccaagaccccaggctgcctcccaggtcctctgggacagcccctgccttctaccaggtgagatgatggccctatcagggctcaagatgggtggggagatcccagcgaatctgggtgggagctgggaccagccagggcctgcggatggggaaatgggaggcagagggtggtggcaggactgtgggcgtcagggggagttttcaacttggtttactctgtgtttccgtctctctggacctcccaggtttctggctctgaagtcccttagctcttaaatagtcactcattcgttcagctgtttactgagcacctactgtgtgccacaccccatgctaggcactgggagcacagcagtgaacaagatgaacaaaagcccacgacagtagtcacataaccacatgaattcaaacaacaaaaacaaaacaggaccacatgttatcaaagacagacacaagtcagggggacccagtgaaaggatttggggaacacttcccaaggaggggacttttgagttgagaacggaaggaggcaccagtcaccctggtgaagtggccagggaacagcatttgggcagtgggaatggtatgtgtgaaggccctgtggctggagtgagctcccagccatctctgcttcaaacctcctgctgtatggccttggctgccacttttagcacctttccccagcgttaggcaattcccgtcagccacgtattcattcaacaaaccctcaatgagccccctccatgtgctaggtgcccgggacataggcgtggctcagatactgtccctgccaggagggagggaaacagtgactcagggggaggtgggtgggtaaggtcagggcttctgattatgaggcatttcttccgttcctggcgctggaccgaggaagccctttacggatggatgccatccttacgctcattttacagatgaagacatcgaggttttgagaggctaactctcccaaaaaggctggtgcccctgtcccccatttttttcttttctttcttttttttttgagacagagtattcctctgacgcccaggctggagtgcagtggcaggatctgagctcactgcagcctctgcctcccctgttcaagcgattctcctgcctcaccctccggagtagctggg

SEQ ID NO: 26592 - DNA, 2300 bp, Homo sapien
tttgagctgggtgttgtggaatgagcaggagtttggtttgtggagtagggagggaagaaccttccgggtggaggtaatggcaggatcaaagtcagggaggtgcatttgaggaacactgagtaatccgcggtggccagatgtccagagaaagatgaggcttagtctctctggcctcagttttctcagataaaagatgaacataggttgtctggaggtctgagtgtcacacagtaacaggctcgttcccagggtaggtgctgctacaatgagccccgcttcttcctcttccccaggggtccctgggctgcactggatgctggaggctggttttgccctcccccaactgcagtcctggtccctgcccctctcctgtccctcccctgagccagagaatgaagaccatcccctttctctccagcccctctgaaagtgggttgcaggcgcccgtcaccatggcagccaagctgagctgcttcctgtgggcctggggctcagcgggagatgggaagcagagcatccatgtcgagccgtgcatttacgagcagtcgtgcagccatgtgcgggtgtgcatgctgtgtgtacatctgggcgtgtgtgtgtgtgcatgtggggtggaattgtctgtgtgttgctgtgtgggaatggactgctgtggtttgtctggtgcctgagggcctagggagcgtgtacttgtgtgagcgtgtggctactgggcatgggcatgcctgtgcgtgtatggacatgtggctggggttggcttcagcctcaggcctgtggcttccacatgcaccctcccgggccatcagtagaaaatcatggttgcctaaggcaggctttgagtccccggatgtgggtttgagccccagccctgtctctggtttgctgggtgaccccaggctggccacttccctctctggacctcatttcttctgtacgctgggattgtaatctcctgaagatcgcagagggggaggtctgtgggctaggatggctgggcttcccccatgcccatgcactgcctggccaggctcctgagaaggcctgtccctggctgctggagcctctgcccctgcctccggggctcagccttgttccctgatgccatttgggcgtctcttggcctctggtcctacccaggcctgctggatgggaggaaacttttccggccaaaagcttttctatgctcaagggaaagaggggaggcaccagggctggccccgtttgacccaggcagccttcaggccacacccagcccgtggtctcctgcccacgacggccaaagcctctgccaaccaccccctcccgcctgagcctgggcctgtcttcagcaaggaggttggggggacatggacagtgcccccgcaagctgacccagagagggaaagcagttaggccagggccacacagccacagggagccactcacaggctcccagcagttattgagtgcccagtgtgtgccgggcccttctatatgtggttgcatggaatctccccagcagccctgggagcacccgcattgtgcagaggaggaaactgaggcccagatagggccagcaacccctccaagtctcatagctaggatgtgcacctgggatatggaggtcttgctggggccaagggtgcgtggcaggacgtactaatcaagtgtctcttgggtcccttggccctgcctctgtggctgccccggggctggctgttgagagacagggtgggcctggggccccgcctgggcctcccttccctccaatgtcaggcaggcacagaacggtgtccagagcagcggcctgcggggggagagggcatggcggtcacggctcccctcggtgccccgcaggtgcctactgcctctcagtgtctgacttcgacaacgccaagggcctcaacgtgaagcactacaagatccgcaagctggacagcggcggcttctacatcacctcccgcacccagttcaacagcctgcagcagctggtggcctactactccagtgagccagcctcggagggcggagggcgggcgggcaaagcctcagctgcagactctggggaggggccttggagcctagaagggtggggacttctgttatcctgcttctctccccacttccccctcccccctcccttcctctctcctcccttttccctcctttccttgtctccttcttcttcctcttctttcccccagcccccctcctccctgtccccctctctccctgctccacgcagtgtcccactgcccgcctttctctgcagctggctggtatggagggggctgccctgaggagccccagagtaagctgga

SEQ ID NO: 26593 - DNA, 2300 bp, Homo sapien
ctgaggcatgagaagctggtgcagttgtatgctgtggtttcagaggagcccatttacatcgtcacggagtacatgagcaagggtgagtcctgggcggccggggcagggggcaggggcactccggacagggcagggagcatgagcctcatttcctctcatgtctagaatgggcatcttcaaaggtggaatgcagtagagccaaattctctgttgcctgggccggagtgtggtggtgcaatcatagctcacttcagcctcaaccttccaggctcaagcagttctcccacctcagccacccaagtagctgggaccacaggtgtgtgtcaccaggcccagctaattttttattttttgtagagatgggaccctatgttgcccaggctggtctcgaactcttgggctcaaggagtcctcccacttccacctcccaaagtgctgggattacaggtgtgagccacagtaatttttaaactaattagttatttttcaaaattccactttttggaggtatagtttacatatgataaaatacaccccttttaagtgttcagttcagtgggttttaacaactggatttactgtgtacccctaaccataatgaagatatataacatctccatcacccagaaagttcctcatgccctttgcagacagtaccctccagccccaaacccaagcacccactgatttgctttctgtcattataaatttgttttgtttattctagaatttcatacatggaatcttttacatctgggatgcattgtttttttactttttacatttcaattttttattttttgagatgaggtcttgctatgttgcccaggctggagtgcagtggcgtgatcatagctcactgcagccttgacctcccaggctcaattgatcttctcatctcagcctctcaagtagctgggactacaggtgcacaacatcctgcccagctacttttttttttcgtattttttgtacagacagagacttactgtgtagctcaggctggtctcaaactattgggctcaagcgatcttcccacctcggcctcccacagtgctgggattgcaggcaggagccactgctcccggcctgagatgcatccttgttgcatctcccagcagtttgttcctgttgttgctgagcgggactccgctgtctgcattagcacagtttacctgttcacctggaggtggacttctgcttgtttcccatcctgcttgccttttgagtgacaagcactgagtgagactttattcagagatgagtttacgtaaaatctgctgtgctggttaaagcaaggccagccacctgggaggatgggttttgggaatcactgcatcctggcagagggacagggcaggagctggagctgggtctctctctgcccagggagtttgctggactttctcaagggggagacaggcaagtacctgcggctgcctcagctggtggacatggctgctcaggtgagtcagcccctcccgcctccccacacccttggtcctcaagcacccagacccatctggtgcagccagttctggcctcttgagtgccccctccaagaagcctgccttgattgcctccacactcactgatcttgccgcacgtatttaccaggtctgcttacaggtgccctgaggggtgattctgggcagcagaaggcccttacctgggcatcaggggtcactgacttactgtgggacctcgggcctcagttgtcgtctctgtaaaggtcatttagtcgcttagcagacgtgttcatgcttgctgtaggcagtggtcaacaagcctttttttttttcatttaatcctcatcacgaccaggagtgacgaggattggctgttattcccattggacggatgagaaaactgaggctcagagaggggacttgggcagcaggcaggacctggcactcatctgtgtctgggtccgctggggcctctttccctggtcacctcgctttcctggctgcatcggatctcgtgcctcccctttgacctttgccttctgccctctgctctgtgccctgtgctccctactcccgcagagcactgctcctgctttcgatgccaacagcatttactgtgaactgacctcacttgcctgaagaagtgtggggagggtggggaaggggtggttggctctccagccccagagtgctctgtggccctgggagggcatgggtggcacctgagccaggctcccacggttccgcctgcagatcgcctcaggcatggcgtacgtggagcggatgaactacgtccaccgggaccttcgtgcagccaacatcctggtggga

SEQ ID NO: 26594 - DNA, 2300 bp, Homo sapien
actgggtctggctgagaaaggagggagggggagttggagcaggcagtgggtccaggaaggagctaattcttccaggagacatgggagggaggaagcagtacaagcccagttggaagggcagggcggggcagtgagaggggccctggagctctgggattaagtgtagaggtgaagggattagcagtgttggtgaaaagggacaaaagtaaattatgtacattttagcaagtaacctgatctccatgttctttgggaggccttttctctgccctctgggtactgactccagctctaattagcacgggtttgtctgcctcgtggctagggccatgtctttctcattttcttgtacctttcagcacctagcaacaggcagccagctaggtaggggcagaataattattttctgcttgaaatccagtgtctgaaatagagattcagaaatttttctttgtatcaaaaagactttgtgacaatatccagggagcaatgaaataggtaaggtccaggtcacaggcttgaatgggacattcagggtctcagtagcagttctatttgttggtattgcctagacatcaaagaattctatttcttcgctatttggacagaagtcaaagtccagagagaggcttggtttagctggctgagcttgggccttgtgccatccccgataggacctgggtggtaagaggcaggacctggaggaggggcctccatagcttccatgtgagagaacggcccaggtcccaccacagccacataagatagaaaatttccctaaaagtaataaggggcttcagggaggaataaggcatgctaaaaagccaaaactcccagatatccattagaagaagtagccagttcagaggcaggagacttccaggtaagagaggggaaggcctgaagtagaccagtggggatggagagagatcagaacttgtggtagataaaaaccagaaataattagtgagtacttatctgtgagagtgagagagaaggtcaagccaaaggtaattcccatgtgtcttggttttgtttgtttgtttgttcgttcatagagacagggtctcaccatgttgcccaggctgatctccatctccagggctcaagcaatcttcccactttgacctcccaaagtgctgcaattacaggcatgagccaccatgcccagtcccgtgtatcttgagtggagtcctgggtggatggtggggaggcccctggggtggggaacacagcatggagagccagtttgagggacaggatagtggactcagacacagccaagtggggcccagcagacacttagatcctggtgtccagggctcaggaagagatttagctggaagcactagcccagggctgtcaccactcagagtaatggggaccctaagcataagtgagattaccagggagagtgtgtagagaaaaaatgggagagggctcaggtcagaatcatgagtcatagtgacatttgaggagccaggtgtgggcaggcaaaaaaggagaaataaaaggaagggcctgagagatgcgacaaacaaccaggagagggggttgccatgacaaccaagttagggaagagtttcaaggagaaagtaatcaacactgtcaaatgcagcagagaattccaataagatagagaatttttcctttggatttcataattagtaagttttgatggccttaataagagcatgttgagggagtgatggcctaggctggaataatggtgagatgtgagaggacatggatctgtcactaggagtcctctaaggagtccagaagggagatttggagatgtgaagggtaggggctgggaggctgaggctaggaaagatgagcaggtgtataggctcagctcccaaagtgttaagcatccattgtttaatacgaaagttgatacattccacataattctcttttagcacctaattgtgtgcccagcccagcagtgtgcctagcactgtggatacttgggtgaatgaattaaaatagtcagaatccctgttctcatggtggtaggggagaaagacatagtcagataatcacatatgtaaatgtacaatttccaacactgataggcactctgaaggaatggtactgagtactgaagggtgtgccaccaggggacctgccctcatctgactctgggaggcttccctgaggaggtgatcctccaaaccaagatagaaagaagagaacaaagttgaccacaaagcaaattggaaagcattctgagcaaagggcctgactagagaggaaggagaggtgagaccagagagacaagcagttctggctat

SEQ ID NO: 26595 - DNA, 2300 bp, Homo sapien
tgaaccacagggcggggttgaggggcttggggatgaggaggacgggcagcagccactggaggcaatacatgatctctgccgggcagggccttcaccaaggctgccgggcaccgctgcaggaaccgacctaatgggagccagcgggcgcaggcggctgccctccgctttcttcaaccctcactctccaggagctgagccgctgtgctctctggctgtcagcccgggatcaccaaggcagcagggatcctgaagagaaaagtcaacacaacagacaaacagacaaagaacagacagacagacaaaaaaaaaaaaaaaaaaagaaaaaaaaaaaaaaaacaggaacagaatgtatacttatttgggaaaatggatcatggttaacaacagcaaatgtgaaatgccctttcctccctgcccacccgtgaaagttctactcctctccaagtcactaattcgggaagcttcctgggatgtctccccggggcttctcctgggggatcggggagagggctctttggcacggtttcacacagtgggctggctttgcctgggccctgcccagcagagatcatgtatcgcctcctggggctgcagcccgtcctcaaggggcccagacctcacaataccgcccagtggttgccaaaggacgaccaagggctccctgctgtgcccccacgtggtaaggacagggttctgtatctagcatctctcacagccataggtgctcaggcactaagtgcagagttaaagctgttagcggggcactgccggccaccagaccacaggcaaaggatcctgaggcagctacagcctcgaaatattttaagatggcagcctaggctaagcttgcctttttcaaacagcccagcgtcactttgccagaatctgccaacttctccgaaagtcaatgtagaaaaaaagtcactatgctactttgtccaaactgaactcgtttggatcattacacctccatctgctgctggcactgtatagaacctgacctctgggagcttttaatgaaaattaattttctatccacataggggcaaatgccagttggtccctgggccaggcagcttgctggaaagaggtgctttcggctggctaccggtgcgcggggaccacactcacaaaccgcattccggtcttcccgcccgaaaatccgcgctgtgcgagggacccacaagactggcggtctaaaagggacccgcctcacttggaaacggggctgcggtagccacaaccctccggtagcggtagcgtaaccccgttcggtgatccagccgcacagcgcaacgggtacaaagaaccccactggctaaggccgacctaccagggcttgggggaggggagcggaagactgaggtcgaaacgacctgtccagcagaaaactatccccaagcatattccaaccacttctccgtagagctcattccttccgtgcatacgaagggcgccaatccttcctgtatccctcctacagataccgggtgactactgcttttgcgcccaaagcgcagtgctctggctcagctccctacagtagcgacctccaccgcagattctcatctcctcgctaccgtaagagagatgtaaagaatcagacgggttacgcgctcaggcaccctcatgaagcagaggacctgggcttaaaactcattcagtatcaggaaaagagcgccgagcacgggcctattatgccaaagcttctgaaaggggcaccacgttttttgctctatggggcagatgacccctccctaatttcggttttccatccatccccaaggtaggctttggagtggcaccggagactgagctcaaatttgcaggccagggactggggagaagggcgccacactaagagacctgcacccccattctcgccctgtactctacccagagtcgtggtacccctccattttaaagcaaaatccaaaagcaagcacggcggaatcttctggaagggggctaagatggaactcaggaggcgggggtcggtatggaaagagcagatggattatttttttcctctcctggcgaatgaggagcgcccccagccacccctcctcataaacaccccccaaggcgcgcatgcgcacttaggtggcgggcgggtacttaaggcgcggccaccgcggctgcggcagtgcgcccaacagcggactccgagaccagcggatctcggcaaaccctctttctcgaccacccacctaccattcttggaaccatggcggcagtggcggcggcctcggctgaactgctcatcatcggctggtacatcttccgcgtgctgctgcagg

SEQ ID NO: 26596 - DNA, 2300 bp, Homo sapien
gatagccatcttgtggccatgagcataaaccagcacaaggacagaagataaaatgaacctcagtccttgatgacactgcctagccactgagtggcaggctacttatttttttaagccacttgatgtagttgtgtgtttaacttgcaacataaaagatacagtccaccaaccttctttattcccaaaccccaacggctccatttctgttctcaacagcatcagccccactgagcactccctccttcctgaaacctcctctctaggacccacactcacttggtcctctttctaccccactggccactgcttcttagtctcctttcccggatcctcctcttcttttctctccaccttctttcacttgcgttctcacccagcaccatgacctttgtattgatggcccccaaatatgtatctcctgccccagcctccgttcgcagcttctgtgtcacataaacctgcctactcaccctctctgcctgcatgttgccccgacatttcaaacttaacttctcaaagccgaacttgatcttccccctcagtccgttcctctttcaggctttattgtcttggtcaaggaatcttttaccctttcatttactcaaggctaaaacctagcgaggagttattgccaatgcctccacatccacccaagtccaatcttccacccttcccttcacctccccaagctaccaccctgtctgagtcagcattggcttttgtctggaaagctgcaaccacctcctaactggtctgcctacacccactcctgagtgctttccaagccatgcggcctgggtggcctttcagaaatcctaatttgctatcctcttcctgatgaaaatggcttccctgactctcaagagaaaagccaaattcagtatgtagctgacctgttttcttctgtgctcacctcaccccaactctgccgcttcccagctccagatctgggacaaatgttctttctgcctagaacatttcccctctcactcttaccctaatcgtcctttgtttctcaacctaaatgccatcttcccaaggaggttccaccctttccctacattagtactccattaatttctcctaacactctctacttcttctcacagcacttcccatgatgtgtaattatgtattgattaaagtcactaatatacagtgattatatgactgtctccccgcctacccgccattagactggcagtgccttgaggtcagggacagacccaggttaccgactctacctgcccttagcactgcgcttgggtacagtaagcgcccaaggaatatgcttaattagctaataaatgactacacggactcattcaagcctcataaaagccctaaggtgggcatttcaacagaagccgggtcggggtgggcgaggggctcgctggcccaaggtacggggcaagtgggggagccgaggcctgacccaaggcagtcccaagttctgagcccggacctttcagctcctgagccttggctgcatgatgaaacgctagggagggggtggactttgagccacgagaaggttttcccggagtccacggaccatccacgcgggcaagaacgaagcgggttcaccaacatgaacacaacccggcccgcccagcgctcacggagtaaggatcacaatctgctgcatatgcatgaggggacccggccgcgcttcggggctgtccacactgcgcctgataaaaattattcgggcttgaagatctcggggctcccagagttttgtaaaagtgcatacaaagtcctcaaaggtggtctgtggctgatatttacgggaaatggggcgaggatgagcccccacttcggaccttgtgatcaggcgtttgcggtagacagcccgatcccaggatgggtcctcggccggctcgactagaagactaagggggcgtctccccggcttcctgcggcgtcggtggcgagctgaggtggaggcaggctgcggcagacggcgacagtggcggcggcgccatggcagggcttgcaggtaccgtggcgtcaacctgcttggggcgggatgagaggccctccatgcggccgcgccgccatattgtcccttctgggtcaccttaggcgtcgccgggtccccgtcactggggttttccttccgcataccccgggaaggcagggcgcccctgtccggcttcaggtgattgccgtgattggacctagcctgggccttggggggtcccttcccagcccggaggtgggtcatagtactcctgggtgctggctctggccttgtccaaggtcagcgcccttgcaggatgagacaggcagagccg

SEQ ID NO: 26597 - DNA, 2300 bp, Homo sapien
catctgcaaagccagctctctctttttctaaacaagagcttccactacaagactcctcttgtcattcagtgttggatactgggtgtggctgccatggatgcattgatcctttagcctgtaagcagcaggatggtgggaggccacattcaggcctgttttgagtctcagctggaggagaaatggacatctccttgctttggatgtgacctcaggaactggatagccatcttgtggccatgagcataaaccagcacaaggacagaagataaaatgaacctcagtccttgatgacactgcctagccactgagtggcaggctacttatttttttaagccacttgatgtagttgtgtgtttaacttgcaacataaaagatacagtccaccaaccttctttattcccaaaccccaacggctccatttctgttctcaacagcatcagccccactgagcactccctccttcctgaaacctcctctctaggacccacactcacttggtcctctttctaccccactggccactgcttcttagtctcctttcccggatcctcctcttcttttctctccaccttctttcacttgcgttctcacccagcaccatgacctttgtattgatggcccccaaatatgtatctcctgccccagcctccgttcgcagcttctgtgtcacataaacctgcctactcaccctctctgcctgcatgttgccccgacatttcaaacttaacttctcaaagccgaacttgatcttccccctcagtccgttcctctttcaggctttattgtcttggtcaaggaatcttttaccctttcatttactcaaggctaaaacctagcgaggagttattgccaatgcctccacatccacccaagtccaatcttccacccttcccttcacctccccaagctaccaccctgtctgagtcagcattggcttttgtctggaaagctgcaaccacctcctaactggtctgcctacacccactcctgagtgctttccaagccatgcggcctgggtggcctttcagaaatcctaatttgctatcctcttcctgatgaaaatggcttccctgactctcaagagaaaagccaaattcagtatgtagctgacctgttttcttctgtgctcacctcaccccaactctgccgcttcccagctccagatctgggacaaatgttctttctgcctagaacatttcccctctcactcttaccctaatcgtcctttgtttctcaacctaaatgccatcttcccaaggaggttccaccctttccctacattagtactccattaatttctcctaacactctctacttcttctcacagcacttcccatgatgtgtaattatgtattgattaaagtcactaatatacagtgattatatgactgtctccccgcctacccgccattagactggcagtgccttgaggtcagggacagacccaggttaccgactctacctgcccttagcactgcgcttgggtacagtaagcgcccaaggaatatgcttaattagctaataaatgactacacggactcattcaagcctcataaaagccctaaggtgggcatttcaacagaagccgggtcggggtgggcgaggggctcgctggcccaaggtacggggcaagtgggggagccgaggcctgacccaaggcagtcccaagttctgagcccggacctttcagctcctgagccttggctgcatgatgaaacgctagggagggggtggactttgagccacgagaaggttttcccggagtccacggaccatccacgcgggcaagaacgaagcgggttcaccaacatgaacacaacccggcccgcccagcgctcacggagtaaggatcacaatctgctgcatatgcatgaggggacccggccgcgcttcggggctgtccacactgcgcctgataaaaattattcgggcttgaagatctcggggctcccagagttttgtaaaagtgcatacaaagtcctcaaaggtggtctgtggctgatatttacgggaaatggggcgaggatgagcccccacttcggaccttgtgatcaggcgtttgcggtagacagcccgatcccaggatgggtcctcggccggctcgactagaagactaagggggcgtctccccggcttcctgcggcgtcggtggcgagctgaggtggaggcaggctgcggcagacggcgacagtggcggcggcgccatggcagggcttgcaggtaccgtggcgtcaacctgcttggggcgggatgagaggccctccatgcggccgcgccgccatattgtcccttctgggtca

SEQ ID NO: 26598 - DNA, 2300 bp, Homo sapien
tttcccccatgctcttctcataatgagtgaatctcatgagatctgatggttttataaacgtctggcaatttccctgcttgctctcattttctccttcctgccaccatgtgaaggacatgtttgcttccccttctgccatgattgtaagtttcctgagacctccccagccatgctgaactgtgagtcaattaaacatctttcctttataaattactcagtctagaatatgtcttttacttttgtttttgtttgagaaggagtttcgctctgtcgcccaggctggagtgcaatggtgcgatctcggctcactgcaacctctgcctcctgggttcaagcaattctcctgcctcaacctcttgagtagctggcattacaggcacgtgccaccatacccaactaatttttgtatttttagtagagacggagtttcgccatgttggttagggtggtctcgaactcctgaccttgtgatcctcccgcctcggcctcccaaagtgctgggaatacaggcatgagccatcacaaccagcctcgaatatgtctttattagcagcatgacagtggactaatacaagggagatggaatagaaagaaaacatagggaaaaggaggggacctgctttaggcagggccatcagggagggtcactcttgataggtgacccctgagcacagcccaaattgttgagaaggaatatacacatcttctgccaccaatgccttgtgactcagtggttctgaaaatgtgaggtttcagggactatacaatataaaatttttttttgagaactaatatagggttgctaactattttgccaaataaaaacaaaaaacaattcaactatgaatggccatttactatctccatgatttcataaatgaaaggacatttaaaacactcccagagtaggaagaacatgacctcagaataaagacagtcttttaagtgaaataaatttagctttattaaaaaccctcttcttttcttcattttgtccccaaactcttggaaatttctctccatctcaaggtctaccttgagggctcaggacacattgttattctctttgttttctcagcttggggattttggtaatgggagataaagtgtgaaattgcatgtatatgcccatgtccatcagtttttccatttgcaaagttgggtagttgcttgaattatttctaaagtataaactagaaagtccagagatcttagcaattcattcatttaacagtcacagaaactgcatagaattcctttcttctcaccaccaccttctctgcgggggaaactcctctcctactctcaaaacccagttcaaatatcctgttcctgggcttctctctgcaatcagtcagccatcctccctgcagagagtcttggcctatattgaggacacagcccctatccattgtgataggtgattgtctctgggtgggggaaattggtcctgtgtctcccttccagaaaatcttttcatttctcagaactcctcagtataaatgtgggtaacgcagaaatgcaggaaatagagatttgtgagcagaagagaaggggaagggaagtagcatttattgagtatctgcaatgcacctgtcaggtgcttcacgtgtgtattatttcattggaagctcttacgtactttaatacagtccctcccaccataactactgctccttatcccattcctacacacacactgctctttccatctgtgacacctgtgctcctgccatttcttctgcccaggaaacctcgcctcctaagtcctcctggattcttcctgtgtgctcttgactccacgcctgggacctggcagcctgggggtttgtccgccctgtttagacgaaaatggtcattgcatccaggccacatagttagggtcagagttcagggagacagaagctcaaatgaagaggctgcctggccctttctagcctgaaaacactgagatcctttaaacaagagactccctcgatccaagactctagagttgttcgcagttttgtgttcatggctggtcctggaatgctgattctcacttccaagattctagaactctgagattctacaaacagtggagagagcctctgcttcaggacttgagctgtctctgctgcctctccaggggccacctggcctcaggaccccaggcaagcaccgtgggttgggaaccaacctggtggaaaactaaaatcagcccatcttcaggtctaccgcggcggatgaagcctcacgcagaacagatacagttgcttggcaagcagggggctgcaggtgtgtggaggtggagaggatgc

SEQ ID NO: 26599 - DNA, 2300 bp, Homo sapien
catcttggctcactacaatctccacctccctggttcaagcgattcccctgcctcagcctcccaagtagctgggactacaggcacgtgccaccacacctggctaattttttgtattttagtagagatgggttttcaccatgtgggccaggaagatctcaatctcctgacctcgtgatctgccctcctcggcctcccaaagtgctgggattacaggcgtgagctaccacacccggccgggcacagtccatattcttatataagtaggagggggaaagacacccaaatagactgaattcaatgcagattgcataggtgatcctttaaaaacataagcccagtcacaaaactaccttgcttaaaactttccttatgccgttagcataaaatccaatctctctctcttttttttttttttttttttgagacagagtcttgctctgtcacccaggctggagtgcagtggtggaatctcagctcactacagcctctgcctcctgggttcaagcgattctcctgcttcagcctcccaagtagaggcatgtgccaccatgcccagctaatttttgtaatttttagtagagacgaggtttcaccatggtggtcaggctggtctcaaactcctgacttcaagtgatctgcccgccttggcctcctaaagtgctgagcttacaggcgtgagccaccacgcccggccacgcctagccaaaatctaatctctttaccatggcacacaaggcccattatgaaacctctccctctaccaggcactgtactaggcttgggggatacagtggtgaacatgacacacacatgtcctgcttgcatagagcttgcaatccagtaaatgaggctgtcaagaaacaaatagtcaaccattaagcacaaaattacagaatgagatatatacgtagtggagcaggtacttggaaaaagaataatgaggagagaggttgattacctggaccagggtgagttgaagaagcccttgtaagaaagtgacatttgagacccgaaagatgagagaattggatgaggtatggtgctgatggccaggcagaaggggagaggatttgtcattctgaggaataagaataatttctgtataattggagccagtgcagatgggatggggaccaaaattataaatatgaagggcatataaatataatataatacataaatataattataaatataaaggacaggggcttatggaaggaggtttaatttcctttgaagatggagccttaagtcccaggtgcattctgatcttgtttaagatcagatgcactctgaatgattctcttccaattatgggcaactttctcctccagaaacctttttatatcacctgggtagcaaggggatcatctagtgaccgttagacttcgcatagatgagcagacacaagcctagagagggacatgtgatcaccaatagtttctcagccagtaatagttgtacagccttggaacaagtcactttttgagccagcactatctgatagaaattaatgggaaccacaaatgagagccacatgtgtaatttaaaactttctactaaccacatttaagaagtaaagagaaacaggtaaaattcattttataatatatgaatttgacccagtatatccaaaatatcatttcaacctgtaatcaatgtaagtcttagaaatctggtgtgtattttatttacacttatggcacatctcacttcggagtagccatatctcaagcgctcggtagccatatgtggctagtgagtaaagtattggatggtgcagttgggagcgtcagtttccttttctgtgaaatgaggataaatcactggaagctcgtgagagcgcacacgaaacacccggcactccgccctggacactagggacgcgcaatcaagtttggtttcttctggtccctgctctcccctcccgcccctcctctaagtctccgccccctttccccgccccctcaggctccaggcggaagcaaccctgttccaaatgcagcgcgctttacggcggcgcgtccttttaccgcggtgtggccggctcgcttgtcgctcgcacttttgccctattggctctgcggctccgctcgccgcactttacggcagtgtggctggagccgcggctgacgggcccgcggtctgggcgtgagtgcagggaagtggagtatttgctgggccgggtaccatggacgtgggcgaacttctgagctaccaggtatgaggggcagggagggccgagcgaccgcgttctcacctgggcaggggtcgcaggagccagagccctttcatctcac

SEQ ID NO: 26600 - DNA, 2300 bp, Homo sapien
tgcagttttctgtgtggatcccaggtatttttcctttggttagatttggcacatcattattgcctgtcaggaacttttgaattgattctgtcagctgctgtgcttactgtctctttaagctttgtgtcatataacattttttcattttgccctttatctatctttgctcatgttattgattaaaaaaaaataataaaatacttgatctaaacaggcctaaggacagacccctccaggtgactaacaatcgttcaattactttatttatttattttttgagacagagtctcactgcattgccgaggctggagtgcagtggcacgatcttagctcactgcaacctccacctcccaggttcaagcaattctcctgcctcagcttctcgagtagctgggattacaagtgtgcgccaccacacctagttaatttttgtgtttttagtagagacggggtttcactctgttggccaggcaggtctcaaactcccgacctcaagtgacccgcccaccttggcctcccaaagtgctgggattacaggcatgagccaccacgttcgctgtcgatcacccaaatcaccagatcttatactgcactcagcacaatttttttttttttttttactgtttagtgcccagtctcccttgccagttcttccaagtgaactggaaaaaccttttgtcaggttgttctccagaaatcttgtatacactcactcacataaggcaaataagccttagaggtttgttgaggcctttgggttcaaggattatgtagatctcctggcccatggaatatttgaatccttctgcaccagccttactgagtcatgattctgatttagcttccacacttcaagtgatctaaaaaaataatctatttgcaagcagagaaggaagccttttaaaaaaaaggtattgggggaaaatcttgctaaaatagttatgaaatttacttggaataataagtgagaacaggcaaggaaacactgaaaaataaaaacaacaagggagttgtttgcagtaacacacataaaacatactataaagctataacaatgtggaagtgtggtcctgactcaggaatttacagacgaatcaatgaaatggagtgaaaaacccagaaacagaataaagtacacattaaaatttagtgtatgatagatgacatttctttaaatctctggggaaagatagattatagtattggagcacttggccaaacatttgcagaaaataaagttagatttgtgccctatatcaatacattaaaataaatttcagatagattaaatatttaaatatataaacataaaaatacatcataaaatatatcttcttttagcacagaaaatatcttgctcaggatacatgtaaaatagagttcataaaggcaaagattttgctacttgaactttttaaaacctttatgtcaaaaggaaaaaaaaacctttatgtcaaaaagcacaatgtacaaattaaagggcaaacacttttctctgattattttttttgcagtgtaggatagagattaatttccttaatatacggtgtttataaatctataaacaaagtgagcatcctaataagaatgggcaaagaagaaatacaaacagtaaacattagaagaatgttaaccatcttactatcagaaatgcaaaatacaaaatgagttgtcttttctatctcaaattggaggagatactgtttgtgaagagggtaaggggaaataggcacttcatgcactattggtacttttctggcaaaatatatcaaaatctatttaagtcatgtgtactctttgacttgtccctttccttcctgggaatttatcctaacacagtaattaggaatgcatacatcttagtgtcatttgttaaagggaaaagaaatggaaattatctgaatgcctgacaaagggggattggttaattaaatcacagtacgtctactcaagggaatattgtgtggccattaatctatgacttagaacagggattgtagataagcttaatcggccacacccagcctgtgattgattcatagtctcttcttggaacactgtgttgagaaggattctgaggccagccatcttggctcagcagggaagagtgctgtggtgagtgagggattttgccatggagaaggagaaggacccatagcagtttgtcaggtattggcttctcctattgtagtagaataatgataaggggaattatttagcctatattaacaacaacagcaaaatgaatatagaactatatactatataggcttactttttggggggaaagtctgtgagtt

SEQ ID NO: 26601 - DNA, 2300 bp, Homo sapien
tatttaattttttggagatggatcttgcaatgttgcccaggctggactcaatctcctggcctcaagtgattttgcctcagcctctggagtagctttccatgttactgagaggatcaaaggagtgtataagtgctgagcacagttcttgatacatagtaggtacttggtaaatgttacttgtcactgaatctgattcgtgacttccaaaaccattttatactttatcttggctatcaggtgtgcagtagctttattgcaaaggcttttgatgtgcctgtggacagggttatgttcattaaaccaaattctcttctagtagttgttctgtttgaatccagatttccaaaggtaagagacaaatgtagttagtctgcttgagtgatattcacagggaatctgctgttgcttcatgttattttcatctttctggtaatctctctcctgagagcgtgtctgactaagttcttgcctggctgataattctcatagaaataaatcagtgagtaattttaatgcaggcttcttgaagggcagtcttaagacatttctgatgcttcatgtaatgttagatagcatcaagaattgatctgttagctcccagatttatgactttgttcaccagggtttgctgtggggttctgggttgtataagaaccctagttagcttgctgctgagtgagctcagtgtatggtctcatgaaattcattcagtagagctgctgtgagtgctcatgatgtaccaggcactgtgctaggcccttaggaaccataagctgtgctggttgctcaagcagcatcagtcagtaagtatatattgggtattgtcttggtctatttgggctgctataacaaaataccgtaaactgggtggcttataaacaacaaaaatttatttctcacagttctggagactgggaagttcaagaccaaggcaccagcagttttggtgtctggtgagggtctgcttccaggtttgtagatagctgttttctcactgcgtcctcacatggtggaaggagtgagggagctcgctgtgtctctttttaggacactaatcccaagggccccacctccaagtaccatcacattggggataggcttcaacatatgaatctgtggggggatataaacattccatctttggcaggtaactgccatatgcctagctctattctgggcactaatggtgttcacagactcagtgactacgagttctggttgttacttcacatttcagttcacctacagaagggtagatttcagaatctgatcagaccttagagaggacttagctcagtaccttgtttgtttctacttagtgacaagtgtgaagtccagatgttggacagctaacttgaagttaagacaggcactccaggtctgtgattttcagtccggtgttcctccagtgcacctcaggtcttcctgtgggatttacgacattgctgacagagtcgcatggtcacctgttaccctgtatattattagtacagaaatgacttattttctttctggaaacaccactctcattcttttttctattcctgctaactcaaaataatagtagctgcttttggaagatactgacattttgctgattcaccagcctggctcctgccggggagaagactgacacaaaaaacgctgctcgacatcggcatatttgggaaaggcaagggcacagatgttccaagttgttaagttctggtctttaaaaagggaaaaaacacatccccctataataactttgacagattgccatttccctcctgttttctgagagctaaactgttttttttttcctcttgtatgccaacctgcacccaactgccctaatgatattttttaaaatctgatgtttaattatgtcttacatcaaatttaaagtgcatttgaaattttttaaattaccttaattttaattagaggcagcaaataggggtaaatgtcatcctcctcaaagtacgatttttcttgaaagtgatttcaggaaagggcaggtcctcttgacttgcatctaccatatcctctgttggtcgtaatgttgctctccctgcaacattgcactctgctgcttgtcttatctgtgatctataatagaaatttttcttcaggaaacggttgttaacaatttactgttgtacagctgtaactgcccaaaacaccttagcatgaataaacaatttcatggcagtcatgacttaaatttttaatcttttttaactcttcatttatcaaccaagaccatatatggctggttatgttcccagcaagcacaggtcatctttgcttcatcctcc

SEQ ID NO: 26602 - DNA, 2300 bp, Homo sapien
atacacacaaattgaaagaaaaaatatttttatttcattcttaaatatcatagttacttcctaatggtatgtgtgccttttggtactgctcaaatccttaaaccttaggatcagattgaacgctacgaccatcattctgatttcacatcgattttcacagttatttttgtcagagcagctatccaaacgcagctccacaaagatatgatgtcaccagaagaaatgtaacttgagctcctggttaatgcagtgttcaacagatgtcacatttcactgtgttctccttgaaaatttaacatatcctgtggtgaattaaatatgacaccccagttgccacagcgcaaagttggagaactgcagatttgagtcaaccttaggtgtgtctaatgccagatctgtgttttattttccttttttaaaatttgatatttctacaaaattaattttaattcagtgtaaggtttttaaatgccacaacagtggacagagttcagatctaagttacccctgtttgttctcttgcttaattctgtgtcttccctatagcaggtgcctaataagtatttattgaaaggaagaaaaactccccccaacttgaaaacaggagcttacaaaattgaataaaggacaagaggcattagatccacagaaaggccatggctctagtgacctactgtcttttggcttctttcagttaagtgtcttgttttaaacaagaaccatggcccttgcaatgctaatgtataagttggtgtggcttaaatcttttaaaatataatagcagtacttggaacttacataatttgagtgggaaattttattcgcaaatccttgattttgatagagatgcttactccttggcttttcaccttcatgttttgattttcgttaatatgaaaccatttttcttaaagtgaaacataccacaggttgcatttaagccctgactattatgctgaatttcttgaaacaaggcttcaagctcgcccagggagcataccttacatttagcacatgtaagaccttgcatttatagatcttttaacctaagatggtcatacttggttgacctcctgaaaccctgtaggctgcacttagcttgatgaggaagacgtgcacagaaaactgaaatgatactgaatattgcttgattaggtacaactcttcctctttaagtataaaaccaatatctaaacagatctgtgaatggcggtaaggtgacggaagtgttagttccaagataaacacttcccttgtcttttccaagtacagaaattctttgtcatttcaaaaacacagataggtagcaaaggttgctgctgattaataatcattgtttacatgcctgcattttaaggatcatgggcaccataaataaaaacacaccactgagactcgctcctctctatgcacctttatccagggggcagtgataatggtgagatatttaagtctcactaccgaagcaacactgaggacagccatgaaagatagtctgtgcagtagatgtgtcccctctgaaactcccaaatagcagagcatgcagcggggaaagaattgtgggtagtaatttgggtgttaaaatattaacacatttttgcatatttaatgtggtttctgttttaagtagtaggcagattatggcatgcaagcagataagtttatgatttcaaattaaattttaagcattaaaaaaatccagaaggaactactttgtgataaatacattcagttaatcaagaattgctttcttctctgctcatatattaactaatttatagcctaatttcatgattgtaacttgtgaattaagcttcatggtgagttttaatcttaaaagttcaaaactctcattcatctagttcacatttgggtactatgggctagacatatataatctctggactcaaaatgggaaatcttggaagtcttcaccgaggaggtaaccttaatacctgggcattaagagtgtgagagccattgtttcaatctgtcactttacttggttctggtctcttgagagcagaggcagacgtttttacccttaactgccttttccttttctaacttctgcttctctctaactcagatcatagtactcgtgaaaaatttgtcctggggaaggaagcaagaccccttaacatttttctcatttctcctatttccccataggcaaagatgccttttgatgccaacaaactgtattgcagtgaagtgctggccatattgctccaggacaatgatggtgaggcgccctctcagtattgatattctgttaggataggagccaggcttgtttc

SEQ ID NO: 26603 - DNA, 2300 bp, Homo sapien
ggtctcttgagagcagaggcagacgtttttacccttaactgccttttccttttctaacttctgcttctctctaactcagatcatagtactcgtgaaaaatttgtcctggggaaggaagcaagaccccttaacatttttctcatttctcctatttccccataggcaaagatgccttttgatgccaacaaactgtattgcagtgaagtgctggccatattgctccaggacaatgatggtgaggcgccctctcagtattgatattctgttaggataggagccaggcttgtttcagatcatgacagcaagctctcttgcctttggcatccccttgctctccctctcactccctgtgctgcttttgtactctgtcaagctgtattgattttgtttgctgatgtatcagtgttagacggctgtaaaatctgacagttaggttcattttttttcttcctctatttttttcccctttagaaaacagggaattgcttggggagctggatggaatcgatgtgcttcttcagcagttatccgtgagtaattcttatgcttcctgtctgctgtaagatacatggtctgctttgaatgggaggtggagctggaaactgtgggaaggaataagccatgtgctgcaagccatatggagcatgttggcaggtttgagggttatacggagggacatggtttgcctccttttcttagtcatttgctctttatgaccagacatcactgtgtatcagttctgaactttcttcatcttctgatatgatattgtcaactcaaaaaagatgtgcctcatgcttaagtgtgtatgttctgggccaagcataccaaattattttcatttgacccactgccaagattattcaccaaccttcctttcaatctgctgtgaaaatggagtatgttcatttaggatctgaataagctcaaggagtacaagttccactgcagtggggtgggggtcaaggggaggataggggaggatgtggtgctgaaggctggagtgagaacttggaaactgccattttctcactgtaagaaatgtaaatccagttgaaatgttattctgctggcattctgaaaatactgttaagatttcctcttacaagttttagctgtgttattctaaaaacaggactgaaaatagatcatttggataaaatcttaagagtgttgggagagtctgagatgtcagtttgcatacagcttccatcttggtgccagcagcctgagtgtcttggcctccaccccaaaaatagagctttgaaatgtgaatctgtttccagttctgggaaggtgcttagtccttttcctgtgagattattgatcttcttgtagtagactgtatgggtatgcatatacagtttaaaggcttctcttaacatgccttacatctctggcaaaaagaaaactaatgctgtaagcccttcccatgaattaaagccccagctcccctgtgagggaattcagtagccttggttgtcaggaaatgcttccttatattgagccacgattcagccctctggattgtggttgcttttagaagggaaagaaatgagatatggttgggttgggcaagtggagggctttgaggggagttggcaaagttgtttctcatcctggataatgatttcaggggtgttcacttcatttagttttatatgtcctttatggagtttttctgtatctgtgttatatttcacgataaaaagattttgttttttattgggttttggtttttaaaaaaatctgcttgcctggaactgtcaattactgatggacccagtggtcagtagagtgttttggcttttttttttgcatgtatttaatatatgtgaatcatttagtttctctaaaatggaaactgatgagaattttgtttggtgagcttctgtttcctcagtcgtagagttatgacccacaggttttaggaattgttggatggaggctcatgaaaagacattctcttatagctctgtgctttgtgctgtttttgcttgacaggtgtttaaaagacacaatcccagcacggctgaggagcaggagatgatggagaatctgtttgattccctctgctcctgtctaatgcttagttccaatcgtgagcgcttcctgaagggcgagggtcttcagctgatgaatctcatgctcaggtatgtttcgaatgccctagttctcccaccttttttgcctgacttttcactgttagcctgaattcaagagcatgtagctatgatcatttattctgttgggtttcctagactttaccctgaagagtaaagtcttcaggcatgggggga

SEQ ID NO: 26604 - DNA, 2300 bp, Homo sapien
tcttgtttactcctctttaatctcctctccctccctgtccccttgcctgtgtctgctccctccaatctgtggtttaagaggagaaagcccgggtttgagtcccagttctgtcaccacagtctcctggtgaggcctcaggctggggttgaaggagtcctgggttttagtctggctaacatggtggctgctatgtgatctggaggattctcagtttccatatctttatgatggaagcagtagttcatttcgctgggagcggggttcagggtagttaatgaatgagaaaacacgtgcatagagtccaagacgcctggccagcccaggataacctaaacaccacctctgtgtgggaagaaagtgagaagtgagagaatcaggcaaacacggccccttcctccaaggcatgtggtccagaaggttcggggggtgggggaagcggtcgacgcttgggacctgtcctcggtactgaagggagcgcgggggctgtggacggtgctagaacacagtgcttgtaagtgcgggacatcgtggaggaggtgtccttagtttggaaggagctggattgttgctggctaccacgggccccatccggtgtgctaccccccccccataatactggaaggggggcgctaagacagagggaagacggcgaggggctatgttccttggtctctaaccttgttctcaaacttgggcgctgtacacacggctggacgcgggatccacctgtgttctggagtggggagtgggctgtcggaggggttgaccctgttcgacggggacggggaagaaagtctgagggtctgtccacggtgtgaaccctagcatcaaagggccagttgagacgctgtccacggtgcccaaaggatgggcccgggtggggcggggggcggggggcggggggggggctggcgctgtcctcctccgtggtgctgaaaccgggaggaccaggctgtgtgagcagggaggcctggggaagggcaagggatgagagcaggagggaccccgcccaggagtcaggggcctcgcccgactcgccgtgggacctcagagaagctaattacctgatttcaggcgcttccttatcttttaaatgggaccacagttccgccctcctgtctgtcccatcagccccagtaacacggcttgggaaggaactggaggactttgttggattcttgctcttgggaatgggaatggtgccctatccccctcccctgccacactcacacacacatacacccacgcatacgcgcgcgcacacgcacacgcacacacacactcatgcacacacacaccatcaaggctcattggtctagggaaggagcctacagtccagaagggggcgatcccatccaccacataaggtccagtatcttcaagagccaggagccgcaacaactaactggcctgtctctctcccattacaaagactcgaaaactgagtcccagaaaggggaacaccgacaataataactactgagctcctaccacgtaggcagcattatgctaagcgctttgcatgcacgatttcgcaaatcctcaccaggacccccgcagacagctattacccctatttctcagatgaagacttcgaggttcagagaggggtagacacccggacgcgatcacacagcgagccgaggtcggcggcagagctatcaccaggtcccctgggtctcagcccaggctcccaccctacctcgccctcacccccagccccactggcccctgaccccggccccgccctgccggtaaagttaggagcctctgagtgcgctggcctggcggcgggtgccctggcttttctccctctccccgctggacggcatttctgtggctgaagcccgttgggtcgtgctttgcgggaaccgcgtccctggggtggctctctccgccccatcccggccccgcctccgcactcgggcgggggaaagttgcgggtaccgctttaaaaatcccagcctgggcaaaactttgatgataaatcaagcggcagatccctccgccgcctgctccgagcgggaggagggaggggaggagggaggggaggagggaggcgggaggagggaggagggtgcggcggcggcgcggcgtggccttccgcggaagggaagagtcccgcagtcggaggcggccggctgggcgtgcgctcgctccccgaagccggggctgggccggagccgggcgagggctgggagctgggccgggtccggggacagcgggcgaggggcagctgccggagccgggcagccaggccgctcagggcaggggacagctggcgccggttctgcggtctc

SEQ ID NO: 26605 - DNA, 2300 bp, Homo sapien
attgaagttacttaccactttctgacttattctaaacttgcatgtttgtttttctatctttctcagtagaaagtaagttcctgagaacgtggattttgtctgttagcttagaagagtgctttggacataggtgctgaaaaattattttccgaatgaatgaataaactattggttcaggaggcaagaatttgggatcagacataagataaccctaatttgactcctggctctgctatttcctaactatgtccaagtacatagggtacttaaccatgctttacattttctcgtctatcaaatagtgattgtaataatttcaactcctaagactgatgtaagaattaaatttaaaaagtatgtaatgtgcttaatagacagtgacttggtataaaagtgctcagtatatgacagtgttattaatatggaaagatgatctagatttcgacacaaaagccctcagttatgactagatactcactgtatgattttaggttactcacctcttttacactaactcacttgataaatcaggaactggggccaaaaagatggctaagttgcagccccttccctcaagtcttagtaatgtgatcttgggtaggtcacttaacctctctgagcctgtttcctacgctgtccaaagggggataatataatacctcacagctttgttgtgaggattaaatgagttactgtgtgggaattgtgtctagcacatagtaacctctcactgcgttagctatgattatgattccagtctggaggaagggtaaaagcatgtaagcaaagaactgcaatacagtgcaataagagcaaaagcaggcatcaactagaagaacgtctcctaaactagagtctgcccacaactaggaagttataccacgatcaggaaattttaaaaccctcttatgtctataacttaactccctaccatcacccccgtggcagtaagaaaaacaaaatttctctgctgctttgatacctgggatttaaaacttaaaaaaaaaatagggtcaaggtttagagtctcagatagtgttttgttttgtttcagagaagagtctcgctccatcgcccaggctggagtgcagtggcacgatcatagctcactgtaacctctaactcctgggctcaaggtatcctctcgcgtagctggaactgcaggtgagcgtcaccatgcctggctaattttcgctgttacccaggctggtcttgaactccagtcctcaagctatcctctcgcctcggcctcccaaagggttgggattacaagcaagagacgttgcgccaggcctcaaatagtgtgtctcaacatgaggtcaacagacacattgggaaggctaagttagttccctccaccttttccctaaagttaacacctcacttaagttcgaaaaagtcaactggacccgcagacggcaaaagcagcacgtaataataccctgagtgagaacccacttaagagccgagagcccaaatgtgtgtttcatgacggcgctgttacagactaaaaggtcaaaacaggacattaaagggtgctccggggggctgagtaggagctcaccaggtgagaaaggggatgtcactttcggacagagaacgagcgccagggcgtggaggcgtgaaaagggcacgtgggtggcttggaagaaccaaaactaagtgttttgggggacagccagagagccgaacacatatggaggaaagatgcggcctggggcccgccagattagaaaggaaatccccctcccatatccagatcatgatctctcagactcaatgtcccctcaggatacccctctacagggtcccagctgctgggctccctctggttcccgccactcttcccttacctcgtcttccagcctttctctcactctcccgcctcctctgcctcgccggaagtgacgcgctaagtagcgcgccgtatcgcgccagaaaggttccgagggagcgggaaaaagggttccggcgagatccactgcgccggtgtgcaggctcgagcggtcaaagctctttccgggggcccggggaactactctccttgcctcgctctgtctccttcgaagtgctctgcgcgaggttcagagcggccgccgcctccaaagggacggttttctagagctccgacgcctctcggtgcccctctgctccggcccttgccctttgacctcgctctcgcggcagggtgagaggtcgggtggccatcttgtggcggcggcgcgggcggctgttactgcggagacccatcccctcccccttctcgcacccctggcagtctgtcagtcggtaaaaagtcc

SEQ ID NO: 26606 - DNA, 2300 bp, Homo sapien
aaagggctagaactgggtctcctgaaaaaaatcatgaagattttggtgtttgccagcctgttgtagtctgagcctgttcagttcgaaagccttgaaaataccacttagccacttcagtttcctcacctgtagagcaggacatctgtggtgtccccaactcacagatagtatagaacacttgtaaagccacttcgctataaaggcctaccacatatagggtgtctggagcagctctgagcttcatttcttcagtcttccattatgaaactcatccgggagtgtaggtgtccatctttccccaccagactgtaagcaacttgaaggtaaagaccatgcctcacagtgagtaatcaaaagtctcatctcaccataatctgctgaatgcctacactgtgcctcaccccatgctaaatgttcatttggattatcccgtttactcctcaccacgagatgagtctcagtttttcctcttctgcaaagttcctacttcatagggctccgagaattttttttaatggcaatgtatgtaaagatatcagtactgcacttcgcatgtaataaagacatagtaaatttcagttatccattctgtagataagaaaattaaggcacagacaggttaagttgctggggtcagtaaggcggcaaagtcaggcttaaattctaggcagttggcagaggcaacatgctgcaagtgtccaagccagtgcctggcacataacagaatgagttcaatgaattgtctgtcagaacctgagcagggcctgaaatcaatgacaactgcatgagagaggagaggagaggagaggtaaggtctgggtggccccttaacctaagatgggagagactacctacttcacagggctgttctaaggactgagtgcgaggatacacacaaaggtcttagtatagtgactggtatgaagtaaaggctttgtaaggggtagctatccttgcctccctcttacagatgagaaaacggagacacagggagatgaagaaactctcccagtattattcagctggcaaatagctgagccaggactcgatctgcagagtctgactccggagcccactggcttttactccaaatacccagcactgggcccgacatgctagggccagtacggcagtgaatgcagccgagataataacagccacaaatgtcagggggaaactgaagggaaaatggcttgatgaactagaagtctggacacctgagtcccagtccgtggaccctcaggcaagtaccttaaaccttcccgggcctcagtttccttcttcgagaaatggggctaactttgtctcccatctcagaagctcgatcaggcctggaaagcaaggctcaatgaagaggcttagaggggcctaggttgtatgtgggcgagaggacaatccggggaccgtccagggggtggggatttggtgtttacctttgcggagctcgcggtgccacacggagacgatgggtcccgcgtgcttgcggtggtggatgagccaaagggacagggtctgcacgctctgctgagagttgctcagctccgagagcttcttctccagcgccgactcagagaaggaggacatggtggcggcagtgaggcccggcagggagcggcctgggccgcccagtgcggcgggaagagcgacggcacgaggccggggcctcacctgacaggctgcgggactttttaccgactgacagactgccaggggtgcgagaagggggaggggatgggtctccgcagtaacagccgcccgcgccgccgccacaagatggccacccgacctctcaccctgccgcgagagcgaggtcaaagggcaagggccggagcagaggggcaccgagaggcgtcggagctctagaaaaccgtccctttggaggcggcggccgctctgaacctcgcgcagagcacttcgaaggagacagagcgaggcaaggagagtagttccccgggcccccggaaagagctttgaccgctcgagcctgcacaccggcgcagtggatctcgccggaaccctttttcccgctccctcggaacctttctggcgcgatacggcgcgctacttagcgcgtcacttccggcgaggcagaggaggcgggagagtgagagaaaggctggaagacgaggtaagggaagagtggcgggaaccagagggagcccagcagctgggaccctgtagaggggtatcctgaggggacattgagtctgagagatcatgatctggatatgggagggggatttcctttctaatctggcgggccccaggccgcatctttcctccatatgtgttcggctctc

SEQ ID NO: 26607 - DNA, 2300 bp, Homo sapien
tttttaatcttaaaaattagtatttgccattttttgccacaggcacctaaacatcttagtgaattaaccattttttaaaaacgatcagtcaagcaataacaaaactaaaaccaacctaaccaccccaggagcttgctcatggactgagccactgagcaggaaggagaagttggcggtcctttatcctctgtgactgaggtgatctctttcctttgtgttccattccgctcacttcttccccttcaccaaggacattctttgtttcccatccctgaggagggtagaggttcctaatctttggcatcacacccaatctggaatccttcagcagttcctcttgcaatattcacattaagaaggcatcgaaaagccagatggctgtttgccagagatactgtgttggggattcttaaatcctagttccccaggagaatgcgagctctcacctctgacagcctgtatccatagggaatgtcatggaactgtcccacggtactgccggagtctctggtgccctttgtttcaaagcaccaacctactcttttgattcattcaggtcttttaaaaatgagttatacatatttaaaattcgaatctcaccaccacccacacataattaattatatcagttctttgtaaatacagatcctgctttttcttctcatttcttaattatgagcctttgttcatcacttcttcccaaaaataccctttcttaatgtttttccacccccaaagcatgagttacaacccattaattggatatgaaatcagtctggtagctaatgaccaacagtttttgaaaaatggaataaagccatcctggctaacacagtgaaacctcgtctctactaaaaatacaaaaaaattagacgggcgtggtggcgggggcctgtactcccagctactcgggaggctgaggcaggagaatggcatgaacctgggaggcggagcttgcagtgagccgagatcatgccactgcactccagcctgggtcacagagcaagacaccatctcaaaaaaaaaaaaaagagataaaatagaagatagagcacacatagtaagaatgggtattttatgaaacgctgctttcatttttctgtgtatttacataagtgtatttctgctgtgggtcatgttcagaaacatttaaaaacctctttcttatcagactttacattttgtcaaatgtaggaagaagttcatccccacgtccaaggcttacatagtttaagagatagagtgctatagatcattttagagatctggcttcgagccccagcatctcagctcactgcatatagaaacctgtcatgtagttttttttctggcggggagggggtcttagttcccacacccaataaataagtgcatgctattttttattccagtggaaagtaaaaagactacttaatgaaatatagtggtccctccatatccatgggggtttggttccaagaccttctgaggataccaaaatccaaggttgctcaaggcccttaaatggtgtcggatttgtctataaccaacaaacatcttcccatatactttaaatactctctagattacttatcatagctaatgcaatgtaaatgctatgtaaatagttgttattctgtatttttaaaattgggtttttaattgttatttttattggtttgtggggttttttggtctgagtattttccattcatggttggttgaatccacagatacagaacccacagatataggggccaaccgtaatataaatgaaagcacttgcaattctcagagacaaggaacgattttttcacaggtgatcttcaatatctctttatgcttgttttgtcaggagagcttttgcaggaacaggcatttagaaagcctttgccagattccccccatgtacagcttcctcacttcaggtaattgagtagtgtcctgtcttgttgacagagtgaatgcctttggatttcttgcttaatcaactcattgtttgtccacaggtgctggcttattctcagactctgtatattgggagagaaaccgttaacctcccccagaaatgtttgtagtcatacctgtgtgatttgtatattttctctattttttggtctcatttgtacttagacaaagaggcagctgaacgtctttcaaaaacagtagatgaagcatgtctgttactagcagaatataacgggcgcctggcagcagaactggaggaccgtcgccagctggctcggatgttggtggagtatacccagaatcagaaagatgttttgtcggagaaggagaaaaaactagaggtgagtgcattg

SEQ ID NO: 26608 - DNA, 2300 bp, Homo sapien
gggctcacacagccagtgagtggccagacagggcctgaggcaagtctcccaatctgagcacttactggcagaggtgattcttcatctgtgcaacgggtacagcatcacgagcctcgtggagggaaatgaccttatgtccatgagaggcattcttcagtgagtgtggaccatattgttggactctaagatctggattattagtccagatgcctgcacagtacatatcagctgtgtgacctaggacaacgttatttcacctgctggagactcagttttctcatctgtaagttgggtggtaatacacgtacaagccttttagggttgtcatgtaggtgaagtaggagcccgccgtgggaagtgcagtgcctggtgcagcaagcagatgtcggctctgatcctccccaggatgaagggcccgcggctcacacaccctgagtcccgagcgcaccaggctcttccgggacactcgctcagctcatcctcccacagccttaggagtgcctgtgccacgcagatccaaacatcgaggacctgggaggtggagtggctcacgcggggtcacccattagaagaggcaaaggcaggattagaaccaaggcccgtgggagtccaagtgcgtcctctacccgctgctcagtgtccactctccagctcctcgctgggaaccctggagccacagtggggagttcagggatccgcccagccattcccccgctgtgtgaccccaagcacattccttcccctctctgtgcctcttggagttgcaagagagttgggaggggtgattctgcatcatgagcaccctcctttctccccttctgcagagaagagcgttcctctttgcatcctctatgagaaataccgtgactgccttacggagtccaacctcatcaaggtgcgggccctcctcgtggagccagttatcaacagctacctgctggctgagagggacctctacctggagaatccagaaatcaagatccgggtaagggcaggctgggcaaggggcagggtcccagggcagctcagcgctggggagagggcagatccctacccccaccccacacacctgcatccctgcaagctccagacctttggtgccttagcgatcctcaaatcctagcctcatcgaagaaaagcatcatgaagcctagagaattggggactcgtagcctctaggaatgaatctgaaaatcccagagtgttagggtcatggaatttggggatcttagagtcatgaatccttcaaatgctatactactaaggctggaacccccaggcactgggcactggtggggcagggtggggtgggggagtgaagggcacagactagagtctcactgcctgaatttgtaccagggcagccctgggcatgtgagtttgcccctctgtgcctcagtttattcatctgtaacatggggttaataatagcactgaggggtgttgtaagaattaaaagcatatccacaggaaacacatagagccatcctcagcacatgataagggctcactgaaagctaactatccttatcatcgccatcatcatcattatagcccttcacttagaggagccgcagcccacaacccctaagggcaacaattacacttaaatggtaaacagcagagggagcggcagtgagcagtgtgtcagacattctgctggaagcttgcacatattagctcagttaatcctcacaagaaccctcagtcaggcatttctctcccatgaagaatccaaggtgtacagagtggggagtaacttccccaggtcacacagtgaagaagaggcagagatcagcctggctcaaaagcctgtgatctttcccctccagaccctgggacaagggaggcactttggacatcccctgggtcacgtggagcctcattgcagctccatgcaggagacctgggccggtagcacaatcggtgttttcccgatgaagaaactgaggcacagaggtggggggagggggggtgatcgtggcagacctgggtacagctttgttcagcaaatattgggccaaattgcagtgaatgcagacagcccagcctggatcccacctgcccttgacatctgccccatgccctcttccagatccttggggagcccaagcagaaacgcaagctggtggctgaggtgtccctgcagaacccgctccctgtggccctggaaggctgcaccttcactgtggagggggccggcctgactgaggagcagaagacggtggagatgtaagtgctggctgctctagctttggggcctgggggaagcgggcagatgccggtgggggtagagactg

SEQ ID NO: 26609 - DNA, 2300 bp, Homo sapien
ctggaaagggcacagcagcaccagcacacggtggggccctcactcctccctgagtgcgagtgctaagaggcgtggggaggcgagaagcccgggacctttcctgaacaccttctgtcccaggcagtggtgtcagccctgggctcgggggttcctgtgtccctgacacctcggtggtgtagaaaggacccggccctcgctgctcatccaggccccgagagtccgagacaggatccatctctacaggcgtgtgggggttcaggacacaaggacacccaagttctagttcctgctgcctgctgcctgctgcctggctgtgggctcctgggtattcctctcctccagcaaggctatgggttccccattcacacaaaggggaaggtgctttcctcttttaagagcccttccagccctgttttgtgtgtgtgtatgtgtgtgtgtgtgtgtgtgtgtgtgtgtatacatttaggaggtccaagtgcggttttgttacacggatatattgagcagtggtgaagtcttgggcttgacattggagacccagtcccatcgtttcagtgcacacccaccagctccttctcgtgctcagagctgctccaaggggagaaagtgtctgtcctagaatgagtggcatgaggtgaactccaggcctgggccagacacaccaaaatcacttcctcccaggcctctgtggagtcagccctcacctctaagtcaccatcgggaccctgagagcattgttccgcactggcatcagccaagcatgctgacttttctcatcctcccaggaacatgctcaccacagagggtgagcagcaggtccctcctgttggggatccactggagacatagccttcagggagaggaaggggaggacagaaggtcctgggcattggcctctggctggaaagtgaggctggtccaagtcccctgttggaacctccaatgccaagctcaagctgagatgcgttccctctaagcccccatactgtggttgagttacttgttattctttgatgataagatctggggaatttccgtgtgctggtggacaggaagccaggccctggatggctgaaaggaatccagttgcccccacccctgcctcctttctctgctgcttctttctcttctccttcctgcctccaccctttcatgctctctcctccctcatccctccaggtgggtcacaggaatgcagccaatgtggcctcggtgactgtccccagagtaaccttctagaacagggcaaattgtctaaagaatggttgagactgaccatacaggtttcctcttcccagccagcatctggcccaagaccaaggccgtggccactggcttgtggacggagactttcaaaggtccagccctgccctggcctccacctcctagaatagtcgacagttgggccacatcctccaagcccccggaggataatgtttttcttctttcctgtggagctagctagaatttccactctgcaccaccaggtcttgacctagtaattttcaccctcttttgtcctttttggcacaaaagtttggttttcttccccagatcacatcatctgatgagaggttggagcagatccacccagggaatgaaaggccaaagaggtgggcaggtcggggcagcattttccaaagaggaggacgcagaccaccagtgttcacggtcaaaggttcaaggtcaaagcctgaaccttgaatcccacagtgagaaagtgactgtctcctcgggtctcaatccgtccttctggtgacctcctggggaaagtctctgagggtgctgatttgcctctggcctcctaagccttgccaatctccctctttagcagtagactcaggtctgaaactcagagtccacagcacatcactgtatctggccagaattgaatatgcatgactttgtttgtattttctctctttttttcccccttgagacagggtctcactctgttgcccaggctggagtgcagtggtgcaatcacggctcactgcagcctcgaccttccaggcccaagcgatcctcccacctcagcctcccaagtagctggaactataggctcaccccaccactcccggcttgaatttttgtattttttatagagacggggtctcactatgttgctcaggctggtctcaaactcctgggctcaagcaatcctcctgcctcagcctcccaaagtgctgggattacaggcgcgagccactacacccaactacttgtatttatttactgctcctccctgcctcctacaaacagaccccaggtctgttttcttaaatgctaaactacatgaa

SEQ ID NO: 26610 - DNA, 2300 bp, Homo sapien
caccactacacgatctgggtgacagagtgggaccctgtctcaaaaaaataaaatacttaggtggctccctgtcttctagggagctcccaggctgagggttttaaaggaaaaaatacctggtagaaaaggccaaacccatcctttcatctggggcagggctaacgcctgtggaaacacagcctttgttctgcagaactgactgtccccatgcctcccgtctctccttgaggtcccgaaatagccaggtgctgggatacttgatatttccatgccaaatctcagggccccagttattgcatgctcaccacgtataaggcacccaaacttggtcatttagattgagtcttactcaggcctgtgagggagggattctttcccccattttgcagaggaggaaactgaggcaaaatcctgcccatggccacacagctggtcaggggcagagtgggaacttgaaccccggcctcttgaccgacttccctctcggtcgggtgattctcctcacgctgctctttcctccaagctttcaccagctgcagggagcagtttctgcaacaatctctataaaatggggcaattacgggtcagctgggcccaacactctttgtgggtttgttcactgagactccagccagagcccgtttgacccagggagaaatatccactgaagcaacacgggttgttttccctgagccatatgtcacctaggaatggagacgggggctacttctatcttccaaattcatcaatagatgtagagcttgttccggaatgtacagcttgttctggaatgtagagcttgctccggaatgtagagcttgttttggaaaaagtgccagggaagccccgtgggcctctgtctctccgggaacccttcccgctcagggctcacagtggatccggaagcacaggagaccaagagaccagagataccaggatgagagataggacccctggttgccaggttcgagaagtcctaggctgagtccctggaaagttagtcttgctcctttctggcacacagtggggcctcaagaaagctcagtggatggatggattgagggagggagggaagagaaggccgagggagggatggatgaagggatgagtggatggataggtgggggggtaggtgatgcatgggtgagtggatggatgggtagatggatggctgattagatggatggctgattagacagatacaaggatgggtgagatcggaggattatctgggttttgctacaggaagggacatgggtgtgtctgtttttgcaggtgtgtctgcatgtctgtacctgagtccatgcctgcatgtgtgtctacctctgagtagccacatctttgtgtgtctgtgggtgccctctctgattttgcgtccacatctgacagtggcattggtgtctaggaggtctgtgtgtgtgccaggtgcctctggacacctgctcatctgtgtccacagctgtgtgtggctcgcggtcaaggctacctggctgtgtcaggctgtatctatgtcctggtgtgtgtctgccattcgaatctgaatttgtatccatgtcactgtgtctgcgtggccagccgtgtttggtgtatctgtgggagtgtatctgtgtttgtgtgtgtatctccacagccctgtcttggtgtgtctgcgtctgctctctgtgtatgtatatctgagtatgtgtgtgagtgtgtgcgtgtgtgtgtgtgtgtgtgtgtgtgtgtgttgggggtggggaggtgttcttgatcccagatctgacctaagagtccacatctgtgtgtccaggtgcaccccggttccgttgtgtgtttctatgagggtgctgcgtgtgtctgtatctgagtgtgtgtgtccaggtgtctgttctccaaggtctgagtctgtgggtccaggtgtgtctgtatcctgggctagttgtgtgtccctgtccgctcccccagggggcgccctcgtccggccgccgtccctccctcgggctccggtcccctgggtgagccccagcgctggcggcgtgggcccgggactgggcaatgggtggcctcccaggtcgccgccttcccgcggggccccgcccccggcccgccccaaagcgggctataagttagcgccgctctccgcctcggcagtgccagccgccagtggtcgcacttggagggtctcgccgccagtggaaggagccaccgcccccgcccgaccatggccgagggtgagtatcagagtcaccgcagccgccactcaggggccccggggcattgggggtcaggacccggtgggagctgaatccctaagtcctgat

SEQ ID NO: 26611 - DNA, 2300 bp, Homo sapien
tgttggttgcactcagagtctgactttgttggcctggggcagggcactaagatttgttaaagctcccagggcaggttataatgtatagctagagttgagggccagggcgttagatcatttaatccttacaaccatgctatgaagtgggttctgtgattatctccacctcacagaataaaaagcagagacatagaaaggttgagaaatttgcacagagcctcctactagaaggcagcagagctgggctttgaacccagatctgtccggccagcttcattcccttctagggaagggggagggtcagttcacttcctactgtgttctcttgtcctcccagtcccatggaagaccaaggctgaggcccttggtgaagggcctgcccacagtcacacagcaagttagctggaaacccaggctggggccacagagatggaggggcaggcctatgcgggacagaagtacagcagggtgaagagggcaacagaggccttttctcacctccgcccacctcccaggagccatctggctgcagccactgccttgtacagccttgtggacgagcagcttcatgttctggtcaccgcttccaacagcctcctggggaagctggagctccgtgtccgcctgggccgcctggaagctgccattcaccaggtgaaaggggtgtctggcttggggtgtgggggttctgcctggccacattccacaggaaagccccgactctgggcccgtccctagtcaggtgctttgttctggagaaaggacaccaagctggcgatccttcaaaggccaggcaggcatccttggggcgtagcacatgacctggtgctcaataagtgctcagtgggtgaaaacatagccccaagagctgcacttattgagcgccaactctgtgccaagccctgggccagagccgttgtgaacatcattgctttctgaactcatggggaaggtgctaggatttcatccactgcacagatgaggaaactgaggctgggagacattatgttacctgcttgtggttgcatatctcggggtctgattctggaacctgcacctggtgtggcttcatctgactgccggtgccgagaaccaacacattcctgtcagcctggagctgtggggcacggcacactcctgcatcagacagccctggttcattcctggctccagcacttactcgtggtgtggccctggacaagatgtttaactcttcagtgcttcagtatcttcatttgttgaatggggggtaatatcagtacgtgctacattggatctgtgaagataaagtgagtgaataggctctttaagatgccccagaataagaaaggaacttccactcggggttgagagccattatataccctctatccctcattgaatcttcatgtctaccccattttaccactgagtaaactgaggcccagaaagggggagtggcttaccatgttcacatggtgagttcccagcaggcccatggactttcctctgcagcctgcagcttcttctccagcactgtttgcatgtgcacgcgcacacaaacacacacacacacccgaacagggagctcatcacccctgaggccaccccttttatgatccggcgtctctgagtggttagagtagcctgaagttcaccaccctgtgccttcattcagataactgtgcactgagggcgttggccaggccagatgccctccagggtcccgctttgaagaacatgaccacacactccccctccccaagtcatttcttcccacgcccagaattgggagaatttcagtccaagccagtggtcacaggcctagccactgaatgagtgaagacagaagacctcagcctgcaaggaagtgggggagctggacaagggaggtctcctagcagcccctcatgtccaaatctgcctctcctgccccaggtcagcgactggatggagcaggaaggaaggcggtgcctgcaatcactgacccccaaggatggaagtttggagacagtggagaaagcccacgcagaatttgagaacttcttcctccaggctgcagtgcgttccagacaacagaggagcaggactggagcagatggagagggcgttagagggggtggcactgccagggcaaagctgtggaggtgggaaagagcaagaaaagttccagagacagtgagggaaccagcttggattgcagagttcagctgagatgttatctcccccagagattcttaccagatggccaagcccaaagaatattctgaatcccccagagggtttcttaaaatgcagtttccagggccccatcctagacc

SEQ ID NO: 26612 - DNA, 2300 bp, Homo sapien
ggatcacatgaggtgaggagtttgagaccagcctggccaacatggtaaaacctcatatctactaaaaatacaagaaagaaaaagttagccaggcatggtggtatgcacctgtagtcccagctactcgggaggctgaggcatgagaattgcttgaacccaggaggcagagattgcagtgagccaagatcacaccactgcactccagcctaggtggcacagtgagactctgtctcaaaaagaatcttaaaataaaataaaataaatttacaggcacttgctctatggacccacacaactcaggaagctcagggtctggttccctcctataagagggaggaaataaggcagccgccagtgttgggctcctttcctgtgtaatcacagtccctcctccccacaaccccaagagggggcatttcatacccaatttagtacacgaggacacatagggcgagggtgcctttcggtgggcttaaaccacaccgaaaccgatgcccatcaatgcccgccccgggtcctctctagaccagggttgctcaaccttaacctattcacatttggggttgagcaattctgttttgttgggagctgtcttgtgtattgcggcatgcttggtaccagccctggctctacccactgtttgcaccccacaaattatgacaattaaaaaagtctcctgacattgctgaatgtccccgggggcaaagtcacccctcattgagaaccgccggtctatactaacagtgtaacatggtggcttatttactttttgcccaagtgatctttttaaaattgtgtgtttttgaataggcagtaagtatattcacatttcaaatggtccaaaaagatacctactgaacaatctccttttccgcttgtcccccagggtcctagcttccctttccagaggcctccaatgaatccactggtttttgaactgtattttagctttaaaccctttcctttacatgaaatcttacctgtagacccactacatggaagtgagaatgatgataaacacagtatgggctgggctctgttctaagtgccttgcatatattaatgggtttaatcctcacacaaccctataaggcaggaactactatgatctccattttaaagaggaggaagcagagacacagagaggttaagtaacttgcccaaggtctcacagcttgtaagtgatggagctgggccgaagtgggactcagctgaaaatgttcccctaactctgccctcttcctttccttaccaatcatggtatccccactggcctgggagtcgctcaggcctgtctcctttcttctccctcactcatactcaacaccagtggttctcaaagtgtggttccccaggccagcagcatcagcaacacctgggaacttgttagaaatgcactttctaccatgcctcgccccagaggaactgaagcagaacctcaggagcagagcccagagcctgtgttttaaccagctctccagatgcttctgatgcacctggagttggagagccactgcctcccacctcccctctgtgctcctgagatgcaagaggcatcctcctggttggcctgggctgacacctgccctttggtcctctgtcctgcagaagctggaccctttccttgctgacctccaccaggcctcttccctgctacaagcttccatcgaggaattcgagaaggccgacccccctggggggatgcaggtgagcctggagcatggtgactggggaagctacatcacaccccagaccccatggaccaagggcttcgagaaggggacggcctggggaaaagggggaggacattattcctgtttttcatcattcatttgactcatatttgaggggcacccactttgtaccctgcactggagaccagcctggagcaaactgacttatccctgccctcttggggctcgtggtgctgtggcagaggtggtagtttaaaaagcaaactattataaatgggtatgtcattccaaattgtgtcaagtcctgtggaagtaagattgggaataatgagggagggaggagggcctctctgaagagctggagtttaagttgaggcttgaagtttgagaaggagcctgcctttgtggggggctgtgctccaggcagggggcaaacacatgtgaaggccctgaggtgggattatacctggggtgttcaggagtagcaaggaggccagtgtggagcagaatgagtgggaaagaagcatgagtggagcttctagatgcagcaggagctggaccaaggaagagttgggctgggattcagttcgaagcctgcagggaaag

SEQ ID NO: 26613 - DNA, 2300 bp, Homo sapien
gcaacacaacttgaacctgctgctctcatgacttctaaccaatgattcacggtccaaacgtatcacacaaagattccagtcatggagggaccccactctgtccttgtgacccatttgcctgcatcttacaggggatgaaggaggaaatcaaagtgtgtgaggcttcatgaagccttgggcagagcaactctgcagtggttgtctttgacaggctcaggtcccagcctctatccgggctattctcttcctgggggagaaggaggcggctctccagctgcagacattacctgacgtccaggtgagggggactcagggtcggcggttgaggaagggagttgttgggctcgagctgagctggggttaaggagagggagaactgcagaattcatgagctagaagaggcctggaggtaatctagtgtaaggcaataaatacgaggcctaagcgctaccaatccccagtatagatccgtggcaggcattgtcaaatcagtcacagagtgatatctctctggcaatcctagcagctcctggtgggtgctgccacatgatcgagaattgcacatggcatagaacctatttgaaaagcttcatctggtccatccctcctccctttgttttcagagggggaaactgaagcctaaggccacacagcaagctagacgcagagctggagtcacctgactccagtgcctttttcacactgcggtcacacctgctcttcctgtatttctcgccctaattaatacagatgtggagctgaagcgggactctgcaggaaagagccctgcagctccctttaattagtgccatacaccacagtaatgagtaagggcagtcagtcctctgtcctgcttcgggatgtgattttaaaactctccttcctcctggttagtgaagaggcagattgtgggctggaggtgtgctgttccaactttaatgtgcttactgatctcttggggaaatacattaatgtgcaggttctgattgagtagttctgggtgggtcctgggactctgaatttccaacatgtcctaggtgatgccggcgatgctggcccatggaccacactttgagtagcaggaatatcaggtgggtccaaaaaaaccacagaatccaccaaatcccaagcctaggtatctggagctattcccagcataaacctcaaatttctctgcctggcagaagcagtcacctagttcttccatgtcttagaggacactgttgggatttagtgacttttctcaccagccccaagaaggaaacagctcttggctcctcagggaactgtgcaaagattacaaagaagtttcatcacaagggccagcttccatcagtttgtatgattgcccggagagctgtactgggaaagagccaagctcagagggaacgagtgctatgattgattaatgatgtctgccttgggcacaagctaggagagtggcagtatgagtgctgtttatttgccattccctaaccagggtctggttctgaattttgatttgtcagagtttccagagaagattggttgctggcaaagcaacttttaaagctggagtcaaccttacttgtgggaaatgaactggtgctggggcagggatctgggcaggaccttctaaaatgactgtcctcactttgagtccctggttctcctgattctttggtctgcaggtggaggtgctgacctcattgaaggccctcagccaccatgtggaccccagccagctgcccgcagtcctggaaggccccttcccctactgccacaccgagtgggttcatttcttccaggtgtttaccgtcacagcctttagcccctgacccccactccttctcttcttctcttcactcttctgtcccatggatccatcaaccctgctatgctaaaaaataaacggtcactcaacaaatgtttacagtgaaggtacagagtcaaatgattaagagctcaggctctggggccaggctgcctacattgcaatcccagctctgctgtgtgattttggataagttacttaccttctctgagccttggtttcctcatcagctaaacaggggataataatagtacctcctcatggggtttttgtgaggattaatttagttaatacgggtaaagagctaggtctatgttaactgaaaataaatttacagggccgggcgctgtgattcacacctgtaatcccagcactttgggaggccgagatgggtggatcacatgaggtgaggagtttgagaccagcctggccaacatggtaaaacctcatatctactaaaaatacaagaaagaaaaagttagccagg

SEQ ID NO: 26614 - DNA, 2300 bp, Homo sapien
gttttcagtagagacggggtttcaccatgttggccaggcaggtcttgaactcctgacctctggtgatccgccagcctcggcctcccaaagtgctgagattacaggcgtgagccactgcgcccggcttagttactttctatttatgacaatggatactgattttttcatggttgtgatataaaattttctatttaaatatatttttcagtgtacaaagtaagttgatttaaagaaaaatattgagcaaataataagtagtagattttatcattttcttatatattttatccagtaagtggatgtgtaaaagttgtttcagtgatactaacatttgggaaccatgggacaggatcaaccctaagcccctttgccataagattctctgacatgggggtgcccccaaacactagacagctgttaatcaaatgccccacaaaaattacagctatgatgggttatcataaaggaaagatacatgacatgctagagtaagagtcagggaaatcagggaaggctttcctgaagaggtgacatttgggtgaagatttaccgggtaaataagaattcattaggtgaaggtattcctccaagcaggaacagcatgtgcaaaggccctggggcagcagggagcgtgaaccataagaggctcgcaagcaaggctggagtggctggagcacagaagtgaggccagggaggtaggctggcaacaacctttattctttaaaaaacaggcaagggaaggaaatctgcacattgttcccaatctggaaagagttgctcaccctttgacagggggcagaccagtgcctgacccttgatctgaggatctggggttcaatgaggggtttctaatgactaggttaggtgtgaaagcaggagaggcttggcaaacaccaggtgcacgctgtggccctggagtgaccatgaccgccgagtgcaggctcagaattcagactgtcctaacttgcactttctgggtggggtgaccttgggcagctacttaagttcccagagcctgaggtccccatctgttggagatagccgcaggtctaatcttagagttggtatgagttactgactcctggatgtaaatcacctagcacagggccttgcctgtagggagaggtgaataaccactggcttatgagagtattttcaaacagctccaagagccatgtgtgtgtacacctgtccccgcagtgcatggatgtaggtgcccggttttgcaatatgtctgtggtgtgtatgccaatgtatgcccatagtttagcagtatgggggagcaggtgcagaaggcatgggtgtatgagagggtgtgaacatgtgttcagctgtgtgagtcagtgggagcattcaggtgtgctctgtgcgtgcatgtgtatgtgtgtgtgcatgtgtacgtgtgtgtgcatgtgtacgtgtgtgtgagtgcctgcgtgtgtgtgtgtgtgtgtgtgagagagagagagagagagtatgaacacctctatatggaattcttctgcttgtggagatgcatttgctgtgagtgaaaacccacacaaattcaacatggttggtcacagtcacagggttaaagccttggcctgtcttcacagcttttttcaaaatccttacagcccctgtgaatctgcctggggctcttgtatctgtctggagctgggctgaaatcctccaaaaacagacttttctttcattccctgttgccagatactggcacaaacgcatccctgccaccaccaccaccacacacacacacacacacacacacacacacacattctcccagaatgtctcaacttttttcaaggttccagctccaaaagtcccttcctcttccctctccccagccaattcccatggaagcaccctgggtttcaatgtgtatatctgactttccatagctgagtctaaaacagcaaaagcatcccaagttttggtaagcagttctctccttttcaccctggacccttaaccctcctcgccctgcactgcctggctggcctgggaggggactttaacccccaccaccactcttccccatccaaactccctgccgggacaatgtgcatatcacagtcagttccaaaacaaacatgcaaaaccaccccgtttcagccctcagcctcagggctgagattcaggctcaggtctaggggttggggaatattaaagtttacaagtacaatcttactccatccatacacacacatggagaagccaggagaggacgcggccagagatgggctcctgcccttgaacccctgctggggtggaagcaggtaagcacaaccctgcca

SEQ ID NO: 26615 - DNA, 2300 bp, Homo sapien
aaaagttgggataggatggctcctaattcaggttttctctgctaaaagactgattaacctatgtggggtgggagatgggctgtgaataaggcttgggtctgaactctaacccttacaactacactcgtctttttcagttcttcacttactccccagctcctttaagcttaatattgcctcagagcctttgcatatgcggttctctctgcttagaacttggttcctctgcgtctccccatctccactcttctaattcctcccctttcagatctaggctttcagacccaggcttcctagaccaccagctataagttgatccctctactgttcccaatgtcaacatttgtttgtttccttcttagcagttaccacagttattatttttttatttttcctgtttatctgctccttgcctgtctcccccactagactgtacattacttgagggccgggactctcaagtaatgtatagtctagtgggggagacaggctgactcagtgcacagtgtttgataaataaatggacaaaaccctgagccatctaaccaggaataactttggtcactgttttagtctgggctgctataacaacataccttagactgaggggcttatacacaacagaaattctcttctcacagttctggaggctgggaagccctagatcaaggcacaagcaagttgggtgtttggtaagagccttctttctggaccttatgtttctgggcctttctggttcatagacagccccttctcgctgtgtccttccatggtggaaggggcaaggcagctagctctctggggcctcttgggcactaagctgggcatggtggctcacgcctgtaatcccagcactttaggagggtgaggtgggcagatcacctgaggtcaggagttcgagaccagcctggccaacatggcgaaatgcagtctctactaaaaatacaaaaattggccaggtgtggtggcgggtgcctaaaatcccagctgctcgggaggctgaggcaggaaaattgcttgaacctgggaggtagaggttgcagtgagctgagatcatgccactgcactccagcttgggtgggcaacagagtgagactccatctcaaatatatatgtgtgtgcgtgtgtgtgtatatatatgtatatatgtgtgtatatatatgtgtgtgtatatatatgtgtgtgtatatatgcctatacatattagtgcctatatatgtatatatataggtgtatatatgtatatatataggtgtatatatgtatatatataggtatatatatgtaggtgtatatatatatatagagagaggcactaatcccattcgtgagggctctgtcctctcatgacccaatcactttccaaaggccccacctcctaatgccatcatactgaggattaggtctggacatacgaatttgggaggggacacacacatatagaccctagcggtcatctagtttcttagtctcactccaaagctgaggctcagtaggaaataccgacttggccaaggtcattatctgagagtcaagaacagaactcgcacacagccatcatcacctcaaagccttgaattaggccgtcatgatggggcataatgtgggagaattcaagggcgctgggacagatgcttactcctcatcaccaaatctaagcagcaggcactatcatcatcatcatcatcatcatcatcatcatcatcatcctcctcccaccccattttacagatgaagaaatcgaagcttaagagagtctgtgactccctgggaagtgtaggaggaggagactcgaacttgggcctgccagcgaggtccgcgggcgcttaacccggctgctgcggctcgaggcctcgctctgcgggtctgtacaatggggctgtccgggccgggtgcgccgtgggaagagcgaggagcggggaggaaaacttggcggggcggactcgggttcctcgggttccagctggctgctgagggggtggacggagggaagggggggcggtgggggcggggcgcgcgggctgggcacaaagggctcaggcacaaaggggccgctgtcccgccgcgccccgccccgccccgcctctgctgccgccccccgtctggtggcccgacccgcgccgcccgcggctcccttatgtctctcgccgtctccagcctcagtccctctctgtctctctctcagtctctctccctgtcctccccggccgctcctccgagatgacgccggggtcggtgccccgggcctgccctatcccctggctccagggctaggcgggaccgagggctgccccagacag

SEQ ID NO: 26616 - DNA, 2300 bp, Homo sapien
tttttcaaaaatctaatttttgtgacaagtcatcaatctatgtgttctggctgctacttagagcaatcttcctggtacagatgcagacatctgagtctgggggctcaaatcacttggaaaaagggagagctggggtgagggcctacagtcatgagtcctcctggcacctgcctcaggtaagggaaaatcttctctgcgtgaaaggaggaatgaccatgacagtgatgtgatcgctgcatctcagtttccttgtttccaaaatggtgaagaggtcaggcacggtgtggctcggccttaatcccaacactttgagaggctgaggcaggaggattgcttgagctcaggagttcaagaccagcctggacaacatagtaagacctcatctcaataataataataataataataataataataataataaaacaaaatggggaagaatcatccctctctcagggttgttttttggcttggagatgatgcatatgaagcatctggcacacagtggatgcttcacacacggccactgctttcattctgaagcaagccagaagaattctagttgctgcagatggaagcaggaggggagactcttttagaaccaaacgaagagaggaagaaaaaaacttttaagaaaaaaagaagaaaacttcagaaggtctcacgtcctccgagctcagcggacttcattagactttcataaagtccaaagtcggggagacagggcactagggggctgatgaggacccagcgggagagaagctggctgccccttctgcagccccgcccctcctctcatcaccatggagacggagcaggctgcccagtggggttcctgcccacccgaggcctgaggctgctgcagagggaggggcaggggctgagcagacagggacctgtctggaaagctgggttggcggtggggagtgtctacatccccccaactcccaaggcgctgagggattcgggctggtgtgggatgcatctggagggctgtgttttgatcctcgctctgctagcagcttgctgagtgaccgtgggaagaacgcttcccctggtgaagcctcaggttctacatctgccaaaggaaggagtaaaaatgtacaaaaacagaagcttggataagaaagctgtgggatgaggaagcaatgaaatatttaatgctggagaagaacatttgctacctattgtttctcgaaaaaagggaactttaccaaactgaccaggtgatcccatattggttaacaaacaaacatggactctctacctatgcttaccaacaaaagagggagaaaagaaatactctaaaatacactttggcttgtctccggaagagggagttatatgtaatttgtattctcttgtttctttctcaaattttggccaataaacatgggttacttttaaaatcaggataacattaatagctagcatttggatatttattttgcacgggcagtatgctaaatgctttacgtggttttaagctcattttatcttctccacaatccagagagggagcagtactatgtatttctcttctgcagaagagaaaaccgaggttcagagaggttaaagggcttgcctgaggtcggaccactagagaatgacagggctaagatttaaaaccatagccaagatactagactctaaaatgtgagcattgaatcattaccactactgcctctcaggacaagaaaacacgaaagcatctgttttcttaaatgttttactatcaaaaatacaaaagaaatcaaaagtagaaagaaaaatatgaatccttatgtctgtgccacccaccttcaagggagtctgtagatgggggcatttgggtggggacacagagcggggaatggggtgcctagggaggggaaccaatctacacacacacatacacacacgcacgcccgcgcacacacacgcatgcatacatggacatgcgagcctcccaggctgcacttctccctgcctgtggggccctaaccacaatggaaaaccacagcggccctccctctttcccaccctcaccaggttccttcctcctttccacattctactgacttgcatttccccagccgactcttttatagctccctggttcaacctcaaggccttgaggttttggcagctctggaggatgagagagaacatggccaggggcccttgcaacgcgccgagatgggcgtccctgatggtgctggtcgccataggcaccgccgtgacagcggccgtcaaccctggcgtcgtggtcaggatctcccagaagggcctggactacggtaactggatgcctcccttcc

SEQ ID NO: 26617 - DNA, 2300 bp, Homo sapien
tcacttcaccctgccaaacctcagtttcttcatctcaagacaagactaaaatatccacctggggttgctgatgcaaggatgagaggagacgtgcagcttaaccagcacagcgcctgcacatagtaggtgctcaataaatatcagtttctttccaattcctgctgggtgctgcaaggatctcaggaaatggaagactcagccgtgcctgcaaggagccatcagactggtggtgtggggactgaggggagggacggatgaggatcccaacaaacctcagccccagtgacaggagcaacacggtacagaggagcagagaggcctggactgtggggttccctgtgcttaacgtgggacattctgatcttaacctcagtgcctgccagtgctgtttgtgacctattgggagtcaccctgttaatcccaccacattcagttggttgaggccatcatgaaaacctgcccaatttcaagggaagggggcagaaacattaccttttgatggaaggaatatcaaagaattcgtgggcatatttttaaaggaccacaattatcaaaaagcagagtggttaatgctgtggtggggaaagcgcaaagggttctgggacctcagaggggaccctttctagaatccagagaagcatgggagtggtcagggaaggcttcctgggggtgagggcaaagcagaactcacaaatgtaagcagggctggggcaaaactctaaaaattaaacacagtctgtactataaattttgttttccagaatgaaattttactatctttacttactgcgaatatatgcccgggaccatacccccaagaaaataaaaattttagaggctgggcatggtggcccaagtctataatcccagtattttggaaggccaagcgggaggcttacttgagctcaggagttcgacaccagcctgggcaacatagcaagacctcgtccctactaaaatacaaaaaattagctggacatggtggctcacacctgtagtcccagctacttagggggctgtggtgggaggatcacttgagcccaggaagttgaggttgcagcgagcgatgttcatgccactggactcctgcttgagcaacagagtagactttgtctcaaaaaatgaaaaaagaaaaaaaaattgtacgtatcaacaagcaaaaacttttttaacacttataattctacccccacaaccagagacaatgcctcatgactccttgctaaatattttccagattgttgaacatagaagcctattttgaaccccccaaaatagaaccttactctatggtgccattggaaacggatgcctcatgacatccctttccttgccaagaaatacctttatttctgcagcctcactttaagggacatgtcataattcatttaaccaatgcccttctggtggatacatgaggttgggtctcacttctcctgtcctgtttcccacagcatagcagtggtatcttggagcagtgatttactggcacactgactcaattatgtatttaagggcaagtccctgaaattgaattcctgggtcacagggcatgcaactgtttaaacatttgccaattgccttccagaaaatttcaccaccagcaaggtttgagaaacactgttttcccattgggggaaacatttattttttaaataaacgagccaatatattttaaaaaagagagtttggttggtgccagatgtagcttcactctcaaccctgccgtctgctgggggtgagatctcaagggagctatgtggcttttttgaacctcagtttcctcatctgctaaaccaggccttcctagccgagctcttaagagactggctgagatgaggcaagatgaacagtgatgaatatggggtctttctgtggggagggtggacagggatgatcataggagtcaggcttcctcatccactgatctaggcagtgaaaactggcttctaagtatgaccttatgacttcagtgatgtcgcaagcaggttccagtccctgtgcctccccttcccgctcccaggaacccatccagcctcaggaactgcccccagccatcgagccttggctacttaagggacctgggcccaatccacagctgggacagtcctggcccactgcactgggaatctaggatgggggccttggccagagccctgccgtccatactgctggcattgctgcttacgtccaccccagaggctctgggtgccaaccccggcttggtcgccaggatcaccgacaagggactgcagtatggtaagaagccacatctgctggctggacttggcaaacccacg

SEQ ID NO: 26618 - DNA, 2300 bp, Homo sapien
atgggtgcctctcgccactgttgcatgtgaggcaggagccatcccaggtcttaagggcctgaggaactctgagaagagcagtccattaaccaaggtggcccaagagccaggattaggtcaaggaggcgtggcccttgctgggatatgtgcccagtatgagggcctgaggaagcagctggttggagactccacagcagaactgacagccaggagaatggagagctgggagagtgaggctcattcactcaaaaagcattgtgcatttacttgggagccagacgctaagctggagaaaaggatacaagggtgagtaaggcagtttgtgtcctcaaggagatcccagcccagataaatatatgtagctgtgtttcagaggcttggttccagaccactgcaataaagtgagttgcacacattttcttgtctcctagtgcattaaagttattttagccaggtgtggtggcacgtgcacctgtagtcccagctactccagaggctaaggcagaggatttcttgagcccaggagttcaaagccagcctggacaacctagtgaagacccttgtgtaaaaaaatcaagtttacactatagtgtagtttattaactgtgcaatagcattatgtccaaagcaatataaataccttaatttaaaaatattatgaaagaatgctaatggttatctttaatcctagctgcttgggaggctgagctgtgcaccaacatgcccagctaatttttttttttttttttttttttgagacagagtcttgctctgtcacccaggctggagtgcagtggtgcgatctcggctcactgcaacctccacctcctgggttcaagcaattctctgcctcagcctcccgagtagctgggattacaggcacccgccaccacgcccagctattgtatttttagtagagatggggtttcaccatcttggccaggctggtcttgaactcctgaccttgtgatccacccactttggtctccaaaagtgctgggattacaggtgtgagccactgcgcccagccactaatttttttttttttttttttttttaagggataggttcttgctatgttgagaccctgtctggtctcaaactcctcctaggctcaagctatcttttcacctcagcctccaaagtactgggattacgggtgtcagctaccacccctggtcccctttgtggaattttaatgcttccagtcctttgcctccaaagctctccaatgcctttaaaacgatggttttctattttatccaccctttccagttcttagcagaaacattggcctgtcaactactcccttctatttagaagcagaaatcttgacattagcagattttacttaaaaaatgtttttctctctgtttggagaacggattataccagggcaagagtggaagcaaggtgaccagttggaagattatggcagttgtctaggtgacagatattggtgacttggagtagggagatagaggtagacagcaagatagatgtctatgttccaagatagaaagatgaagatacaattttaggcaaatgaagcttagagcagggaagtatgtaaaatgtgatataccatttttttggttaaaagaagatttattcgaaatcagcctggacaacatggtgaaaccccatctctactagaaatacaaaaattagccaggcttggtggtgggcgcgtgtaatcccagctgttcaggaggctgaggcaggagaatcgcttgaacccgggaggcggaggttccagtgaactgagatcgcgccattgcactccagcctgggcaacaggagtgaaactcctattgcccaggagttttgagagtgaaactctcaaaaaaaaaaaaaaaaaaagatttatatgtatatatgcaaattggggtgattttttttttttttattttaacatgcttttctcttttttctttcccagaacatcatagtttctctaatatatccctggcatccttttggctagggggagatttgaatgccaaggaaggccacagtgttagtcagtctttgtcattcaaaaataggattatgcagcaggacagtagccttgcttgcaaggcaggattcttcaatatttttttttaattactcctttataccagtaagcaaacttggagaatctattcccaaaaattttacagggatgtggagtagacacttttgtctaccattaaggcttagctggagtcagaaagaaagatataattaggggtcacaaaaggtttttacctgatgctcttttttttgttattgttgttgttttgtttttgtttttg

SEQ ID NO: 26619 - DNA, 2300 bp, Homo sapien
aatttcaacaagccctggatctctttctgcccctgtgtgcaaagtgattacaggctgcttgtgtcttggttattggtaataaaggaaaagttacaaggttttcctcttgtgtagaggcaccattgtccatttcagacgggatgacctcaggggactgtgtcagtgaccaggatgggctagacaagctgtcagtacattcacctcctgagacactgattcccctggtgtgttttctgtgggtgaatatcgtggtttcctggacttgccataagcagtgccaagtgcatcagtcacatcttggcttcttgtgccctgcaggagtgtaacatgactgccgccccatgtgtgtgagaggcgtcctctgggagagcatggatcctgaggtcccaggtaagtggggtcctgctcagtcctctagagctcaagttctctgcaggttgtgaggccagaggtggttgggtgctgaggagtggggagtgaggacaccggtgaaggctgcttccctttgctcctgtctttgctccttcagcaggcagggacaggcctgggccctcttctgccttcgtggggctgctgccaagaaggtgctccctgagcttgattggggctctgagagtccctgacaaagaacctgtcatgttgagaggaaaaccatgtgttggaatggacagaggggctgcgtttcagattcaagcctggattcatacccagtgcccggctgagcggtcttatgtaagcctcagtggaacagatagccaatattgataccctccagcccagtctgttatttatttatttatttattttttgagacagagtcttgctctgtcgcccaggctagagtgcaatggcatgatctcagctcactgcaacctctgcctcccgggttcaagtgattctccctgcctcagtctcctgagtagctgggattacaggtgcccgccaccatgtccagctaattttttctatttttagtagagatggtgttggccaggctgatcgcaaactcctgacctctggcaatccacccgccttggcctcccaaagtgctgtgattacaggtgtgagccactgtgcccggcctatttttttatttttatttttattttcttttgagacggagtctctgttgcccaggctggagtgcaatggcgtgatcctgactcactgcaacctccgcttcccgggttcaaatgattctcctgcctcatcctcccgagtagctgggattacaggtgcctgccaccatgcctggctaatgtttttttgtatctttagtagagatggggtttcaccatgttggacaggctggtctcaagctcctgacctcagatgatccacctgcctcagcctcccaaagtgctgggattacaggcgtgagccactgcacccggccagcccagtctttgagaagagccccaggattctcaatatttctgcccatgtttgccttcctttctgcttctggcagggagtggtaagtgatctctgggagtcagaagcagcatctgtaatcttaggctgtaagtctgctcattgccctgtcagctgttctgttccaggtgagaccattgcccggaatgccagcattggcctcctttctgggcttgccctctgccctttctgcccctgcattcgaaagtgatcatgagctgcccgtgccctggtcattggtagtgcagggagaggaactgccgagagcacttccccgtgtttggagggtccactcctgtctcttccaaaccctggagctttcccacacctcctccctcccaccacgtcttagatggctcctggtgcctggcatcatctagtgggttgtgttgctcttctccctggcccagggcagttattgtgagacatgagggaagggtgtggggtgatgggtttggcctcatggagcagaagggctgggtgtggagctgagatagggctgccctgctccttcctcccggaagctttctctgcctccacacctctccttccacgtccttatccagcccctgcaccaagctgaacctgtggaaattgttgcctgacttgtttcctggctctctttgctgtggtctcaagggcagtgtctgaattttgttccctactttgttatgtctgccagatggtcagtattctgacagtgtgggacaaaggaaaaacggcagcctgggcaaccccgcctctataagaactaaaaaattagccaggcatggcggtgcatgcccctgtagtcctagcttctcaggaggctgaggcaggaggctctcttgagcccgggaggacaaggctgcagtgagccatgacca

SEQ ID NO: 26620 - DNA, 2300 bp, Homo sapien
tctccatgttggtcagactggtctggaactcccagcctcaggtgatccacctgcctcagcctcccaaagtgctgcgattacaggcgtgagccaccatgcccggccttgtgttatatttctattggacaatgctatctttcttcttctttttcttttttgagacagggtctcgttctgtcaacctggaatgcagtggtgtgatctcagcttactgcagcctcaacctcccaggctcaagtgattctcctgcctcagcctcctgagtagctgggactacaggactgctccatcacaccgggctgacaatgccatcttagacttttcaaacacagcacatttcctctgcttcataaagaatcccagagtccttacggtgacagaagccctcagctttctcagaaatactataatatagcaactactaggccttggatatttgttctgtgctacggtcttgatataaatcattccatttaattctcacagcaacgctatgagcagggaactatgactgcctattttccataactggaaactgaggcggggcggagaagttaggtcacttagccaaagtcacatggagagtaacagcaagagtgggaggcagaagaggacaccagggctgtgtggccacaagtgggcacacctgaccaccctgcccagtgtcctctcagccacagcatctgtattagtccatcctcacactgttataaagaactgcctgagactgggtaattcatgaaggaaagaggtttaattgactcacagttcagcatggctgtggaggcctcaggaaacttacaatcatggcggaagtggaagcaaacatgtctttcttcacatggtggcagcaaggagaagtatagagcaaaagtgggtaaagccccttataaaaccatcaggtctcatgagaactcactcactatcagaagaaccgcagcatgggggtaaccacccccatgattccattacctcccacgacaggtgggaattatgggaagtacagttccagatgagatttaggtggggtcacagccaaaccatagcagcatcccacagcccctccccatcacagagactcccagtgttctcacagtctgggaatcccatgggcctctcccaggtacaaaatatggagcagatctcacctcagggacccccatttccctcatggttgcatagatcaggactggattttcttgtccttctgacctattgagtaccaagaatctgactggagcggggcggagggtggggcgtgggctcctcatcaggcccaagggtgggctgcttgcactccagaacatgggcagagtcagtagcagggctgtctcaggccgaagaggcacaccctgcccagggtgcaggcagtgccaatgcttatgaggatttgtgggccatgagtcccctcccaagattgtctccagtatgttgcagggaacatgggacatctgtctatagtctctgtcactgtgcaaatctgatcaggttcctcagatgccagtctggtcaggtctcttctgcttcagagactctttccaccctccatcccgtgtactttgaggctggagtttagcaaagcagttacccgctgtgcatctctcttggctcatcttctcacgctcacattccagtctcaggccatgactcagtcatctcggtctgacattgttcagaaaaaaaggaatggggcgggggtagaattcattcattcaactgtgctagtcactgaactaggtactgagtacagtggtgaatcaaagacagatgcctttggacccttgcagaaagaagtccaaactaagcacagtcccctcatcgtagtaacagctcctatcatggaaaattggccattcctacagattaataatgaatcagtgaccaaggaacatcttcagaacaaacagaaaagcaaagcaagtgggagaagtttacttctaaacttccagatagttttcgaaaattatcccaagtcctccagagtctggcgttgagcctccgctccgccaggggacgctgcaggactgctcgcgtcggttcctaccgctctaggccgcagctcgcgctctcgtctgtatttccgccggcgcgaaacgagcgtagcttccttgtcgtgtggcctcagtccttcgccgtccctcgccgtccttcgccatcgcacgccaccgcaccccatctctcgaaatctgcagacatcttgatttttcccacgctgtctgtcaggtctccgccgccactcgacgccagggcgccgggtgagtccacagcagggcgcatggtcggctccactctcaccatcg

SEQ ID NO: 26621 - DNA, 2300 bp, Homo sapien
cctctgttgcagcccaccctccaacccctaccacatacactgccatgctggatagtgcctgccgggtgagcttactcaggaaggagtggggactcagccaaggatcccatgaacaagcaaagcacagacaccctgaggggtgtgcagcctcaacaagtcctaacccacactcaagacaaattagatgagggacctcagagatgggtgactcctcccagagctccagaaagggtggaagtgcctatccttggcccagaaggtaattttgagaattgagagcttgagtgtgaaaggttgtaaaaatcaggccgggcacagtggctcacacctgtaatcccagcacgtgggaggccgatgtcaggcagatcacctgaggttgggagtttgagaccagcctggccaatatggtgcaatctactaaaaatacaaaaattagtcaggctgtggtgatgtgcgcctgtaatcccagctactcaggaggctgaggcaggagaatcccttgaacccgggaggcagaggttgcagtgagctgagatcacgccactgcactccagcctgggtgacagagcaagactctgtctcaaaaaaaaaaaaaaaaagtttgtggaattcagaatagcatttctcagaaagccccgctactgcttgcaaacctttttttctaatgaccgtgcacaggtttcactgtcacaggtttaattaaagtcttctgcttgatctcaagtagcgtggagaaaaaattcctcaaaagtgttgccattcagagatattttcaagggactttattagaaggaccatcatttaaggatgagatggtatgacagagggtgactctgctacaccagggaagaacatgctagggaaaacaccttctttcttttaagtcaagtgttttctgtgtcatcagattgcccaatcatccctggcatctctgcttctcaaccataggctatgatgtgtatggtgctcccatgagttgtgcagtacacgacctgcacaaccatatgtggcagtcctgcctaccctcaatggaagcaggatggagatgttcccctgggtaaacgtggcatatgtccctcactataagcaaaaaatcagagcaagtgtgaagtcagaagtccacccagagagagaggcagagttgcaggacagggatggaattccagttctggtgtttgttgtcttggaggcccagcttgacctctgcccttcccttcgcttgattatataagttttccaataatgtattttatttttaaagcgtaagttaggtttctatcaccaacacattctatctaaaagcccaagtcttttccttaacttgtcctaaatggccagttattaagaaattccattgagggtttggctgttgcatacagccttgtgggcattttgcttatccacgttgactttctcatctgggacactggcctacgtagtacgtgattccagcaaacagggcagtatgttgagctcttgaaataagtatgttgtgacagcctttgttacagcattaaaagaacagtctactctcaatggctgaccctttatttgtatgctgacgtcaaaaacaaaacaagactgcagacacactcttgccaatgctagaaaggatgcatgtttgaagtggatttttttctatttttttgcttggagaggagggtgtgtggacaccaagctggccatggtccaagctgacctatttgccagccgacccctgtctgggctgccataacaaagtgccatcatgaactgggtggcttataaacaacagaaatttatttctcacagttctggaggctaaaagtccaagatcaaaggcaccagtagatttggtaaactaggaagcggtgagggcccacttcctggtttatagactgatggctgtcttctcactgtgtcctcaaatggaagctgatgtttcacaaatattttctgggtaaatggatgggtgagtgaactcatgaagggatgctccattagatgaacgcttggataaagggcgttagtggagggacagaattgcagctccgtcctcccagggggcgctgcaggcacgtctgcttgggcaggggcccggcggaagcgccgctctaggctgcagccgcgcccccagccgtatttccgcgggcgctgagcactagagagagcgtcttgtggctgcggcctgcccctcagcctcctccgcgcggttacccctgtacccgccgccatccgtcctggcgctccggatgagtcaatgaggggcagggcccgaggagtggtcttcccaagaacccctggtggcctcccaaggccgg

SEQ ID NO: 26622 - DNA, 2300 bp, Homo sapien
ggcacagtgatgtgtgcctttagttccagctacttgggaggctgaggcaggtggatcgcttgggcctgggagtttgaagccagcctgggcaacatagcgaggccctgtgtcttaaaaaaacaaaccatcatttagagaaccactcacttgcatctctcctccaccaacttgcacctaatattaaatcttgtctttctgtccagagcagtaagtcttactgccttacatgttatgtaaaaaccatattttaagcaaaattatttgtttgtataattttctgttgcatcaatatattttttctgttaaaaatatttaggtgccttaggctggaattgaacacaattttgcccattttaattaatgggaaaaatttaacagctttccacttagaagcagaatttcaggaatgaattgaaaccactagaagggtgatagctgtattttcatcatctccccaagggctttgggacagctttcccatcctctgtgcctgtcacttttccaattcccatcacccgttgttcttccagttagtcacccctcccttgtctgttacaggggttcagtattaattgtgttagaatgcatctggttgcaagtaacataaaactcaacaaactctggtatatataagatccctcatcccgataagacaggaaggtagtacagggtttgtgtagctgcttgagtatgacttaaacaaacaggctcctgtctttctgctccaccttcctcagcacagccctcctcatggcctctaggctgctgtgctcccaggtgttacccagttccaagcatgaagcaggggaaaagtgaaggacacaaacttctccaagggaagaaggaagggaaggtctcctttgatacttctgcctacatctcagtggccaggactttgtctcactgccacccttagcagcaaagaaagttgagagttgtgtgctttgcttttcagcccctgtagtatagaaaggcaagggagtggttgaaatagatcttgagttagccaactacataatttgtcacactgtgtttaattgaaatgtattgcttggatccagtgtcctggacatagcctcgttcctgtcctagcacattcttaccctccttttccctcttccttcctgtagctatttttctggggggtgaggtgtggtcttgaggaaacactcttcagttttaccctttctgtgaggatactagttcccttatcactcattcctccatagtctcttctaactgaggtgaggagtcagaatcttctttgctcccttctgcttttcagacaaccgtgccttcacctctactcaacaccctgacccctcctccctctctcaatacccaaggtcagtctcaaggccaggtcctccgtgaagaattccaccatccctccctcctcttctttctcagtccaagtttcctcctttagattctcaaagcacttaagctgtacctctccaatggtattattttcttcgttgaagtgaaagcaaattattgaaagtggtactgtttacaaaatgtctagcgcatggcaggtgctcgaagtagtatctcttagtattattactactgtcttatctcgatcagattcagctctttaatgagaggctctaaatcttatgttcgattcacctttgtaacccacaccgggcctggaatagagcactgttcataattaatgctgtgcccgtgtaataagacggcggcgagcaaagggcatcatttcagaggaagagtgctgtaatggtgggatgggagaaattcctagaacctaggtgggagccagaatcttgcagagaagccccttatccgtctgcaccgaaagcaggtagagtggatgccgtaagattcctaaggacgcaggtagagcgcctcctctgtgccgcgatgaggtaggtgcatccgtcacttcactcctccctctccacttgatccggaatgggaggaacgcaatgcgtcccgcgcggcgatctgggatagctgcgcaggcgcagcttccggctctgtgtctcgggaattatttgacgccaccggttcagccccgtagaaagctctgattaggcgcaccgcgcacgcgcagtggcccacttggctggggagttatttgacgccgccgcccctggcagtcggaagttgcctgagcagatcccagccggctggctcgagtggccttcgtcgtcccttggcgccctgggagagtcgctgacgggtggactgacggaccgcctgaggacggccggccagggcggtgaaagcgccagccctatggcgcgggtcgcgtgaggcggaaggccgag

SEQ ID NO: 26623 - DNA, 2300 bp, Homo sapien
aaaaaagtttgtcagaaggatttaatagctattaaacctattttgattggtctttcataaggtatactcctctcttcagaattgggagggtagtggccatttcttaaaaatgcagattctcaggccccagctcagacctgcagaattgagctttttctgaatggggtctaggagtctgcattttcagctagaccctttcctcccctgatgattcttaagtgtacagtagagtttgagagctagtttgtccttttttttcttcttaaaatctgttttcttccaataatatgctgtgatggatcctgaatattaaatattcatttagtatttggaaaccatccaacttttatttttactagtaattagcttcaaacaagtgaacatttttaaatttttatttgaatataacatacaaaattttggacacactttagtggaatagagggaataccttctgatatcttcctttttcccactggtaaaccttgacactctcaaacacatggtcaatgtccactgtgtgctagggactcagaggttcaggaggcaaggtccccacccaaaaaaggctgacacttttgtggtgaatgtatccgtacaccactaatgaatgagctaatggcagctttatatgaacatccggtaataggcactcagctgagaggagttggtctaaggagtcaagaaaggttttaccaaagagaggacatttgagttgggctttgaaggctgagtacttcataagatggatcaaggcagggaatggcagttcagtcagtgggagcagcatgaccagtgacttagggtaagaaaggatttgctgggcttgagcaatcatcagtagttctttgtggccattgcttgggatgtttgtgggaaagtggcagtagaagatgaggctggcaaggtagtgtatgcaattcccattagaattgtagcaaggctttattgttgatttttttttatttggataaaataataaatcgtatactgaagaataaatgtctagagaagacaataaagttttggaaaaaacattctataaagccactgaacttaaatcattatgggttggcatgggaatagacaagtagttgagtagaacagaagtttcatagattctagaagaaatgaaaatttaatatatgacagaattagtatttcagtttagtgcgaaaaggatgtatttttaagaggtgatgctgacacaactgaccatacatttagaagaaagtaaaatcagacctttcctacaccacttacagaagtaaattccagatgaatatacaagttaagtgaaaaattatgcaattatcttgcaggaaaatctaggagactacatattcacattagggttatgttttcaaatttttggactaagacctatcataacaaatgtattttccgctgggcacggtggctcacacctgtaatcccagcactttgggaggctgaggcgggtggatcacctgaggtcgggagttcgagaccagcctgaccaatgtagagaaaccctgcctctactaaaaatacaaaattagtcgggcatggtggtgcatgcctgtaatcccagctactcaggacgctgaggcaggagaattgcttgaatcgcggaggttgctgtgagccaagatcacaccattgtactccagcctgggcaacaagagcaaaacttcgtctcaaaaaagaaaaaaaatgtattttccattgtgacccagaacatatgcatatattacaaaggaaacaagtttcacagaaacattgcttgcctttattatgtgtgatgcctttatcatacatcctataccatctaattaaaacaagtattatccataacatttatttcatgacccatagtttgaaaaacattgatagtttcatgacccacagtttgaaaaacattgatagaggcaagatgtttgcagcattctttatcatgccaatagtctatacatctgttttatttatttctgttaatttccaatagtataatttgacatgcatttctgttttgtcttttcaggtgccatttggattgtactttagtggcacgatgtactctgagtggaggtcactgcatttggtgattcagaatgatcaaggccataccagtgtgctgcacagctatccagagagcgttggacgagaggtggcaaatgctgtagtccgtcctcttgggcaggtgttaggtaccccttcagtggctggtagtgagaatttgttaaaaactgacaaagaagtaagtgtttctaaatttcattctcttatatgaaaatgtacatttgttcttgaagaatttg

SEQ ID NO: 26624 - DNA, 2300 bp, Homo sapien
gcactttgggaggctgaggcaggatgattgctttaaaaaaattatgaatctgtttttaagtaatgcttttatcttgattataatcacagtacatgcttataatagaaaatttggaaaatgtagggacagatacctatcattcagagccaacccatgttaacattttaatgtattttttccatttagttccctttttaaaaatgccagtttgaaattattctatataatattatctacttttttcatttgatgtctgattcttgtcactttagttacacaaactttttctcattaaatagctgttgagatcatatttttaatggttttgtagttttccattatataattggaattataattcatttaataatttccttgttattgttgttgttatttttgtttttttgaggcagggtcttgctttgttgcccaggctggagtacagtggtatgatcaggactcatagcagcctcaacctccccaggctcaaacaatcctctcacctcagcctcccatggcagctgggagctacaggttcatgccaccacgcccagctaatttttgtattttttgtaaagatgaggttttgcatatcgcccaggcaggcaggactcaagctcctggactcaagtgatccactagacttggcctcccagagtgctgggattggagtgcaggcgtgagccactatgccagcgttgtttttttgtttttgtttttcttttttttttgagatatggtcttgctctgttgcccagggtggagtgcagtggcgcagtcatggctcattgtagcctcgaactcctgacctcaagcaatcctcccatcttcccctgctgttttgatatttatgttgttcccattgttttattttaaaaatattggtgatatgaatgctttatacatagtctttatatgtgagaatattatctctaggtagagaataattgagttaaagggctttgaatagttttaatacatttagaatattaagtaattaagttgttgagttatttttatggtatgtcataaattctaaacttcatgtaaaactattataacttagttatatggcagaaatttgcagtgagatgaatcttttaaaaaatttacatattgtatgattatataattatataagtataattacatatataaatagctataatttataagtaatatgcaatgtgtatatgtcaaacatattacatataaacatataaatgtcacagaaagacatttaaaaactaagatcactgacagctgaaaaacacaaactataactacaaaatgggaagaaatgataaaaaatgattaacatacctaacctataaaaaggtcataaagaataattcagaatcactgatacacaagtagaaaaattaggctagtcaaaccagaaagagaagagatgcaaggaaaaactttaagaatcagtttacaacagaataaatgtcccacagagcacatggatgggcctggaagagggacaagtaaaaagtgatgaagctgaactgaagagaattactatataaaagatagggacagcaggaagtaacagtattttaatactaattattttaaattatttaagtatcttaaataatttaaaacactctttttttggtatacttgtttattttacccaaaaactcatgtatcttgtaaagaagatgctgataacaacacgtgtattacatataaaatatatacaacagcatatactcttcttcccagcttctttccattagaaatcatcttgaaagtctccaatttgttttcaatgtaaaacttctttttaatgaacgcataatagttgtacatatttgtggagtacataatgatgttttgatatatatataaaaaatgtgtagtgattgatcagagtaattagcatatccatcatcccaaacataaaaaaactagaaatcctctttcagtttgtctgttttataaatgagggtttccatatgtcttgttcacgtatgtgaggtacacatgtttcatccattttctctgtcttctttctatgcttgagtgtatttttcaatctgttaagaaatggactcagtggtgtgcatttattttctagattgctacgctttacatatggtccttcatttcctgcatttaaagttcccgatgaagatgccagtctgatccctccagaaatggataatgagtgtgttgcacagacatggtttcgctttttacacatgttaaggtattgttattttattatttcatgtgccatttacctagtaagtatcttagggcaggaatcatgctgtaagtctctt

SEQ ID NO: 26625 - DNA, 2300 bp, Homo sapien
atcagggaagagcaaggagagaagggagtagttagagggctgaatgctttcaaaaggcagaatgagttaagacttagtcatgtctcttggatttggcaatcgagagcccattggttatttgctagtatggttttagttgagttctagggagagagatagattgaaatgggttgagcagtaaccagtaggtgatgaagttgtttctgaagagttttgcagagaagagaaactcacctcacaatagaagagtataacagtgcagctgctgttgaataacgggagattgaatgcttagtaagttgattagaggttgggggtggagttaaaaactaagctatattcaggtatattcctaaaaggaatcttattcaggtgaccttcatgatgaatacagatgatcgaatgcaggtttctttctttcattgtccccccaaaaataatggggaagggacaaaaatgtaaacacacctttttccctaggaattactaaatgttgcaacatttttctcttacggaatttaactcagcagttcccccagtttattgaaaagtactgcagcctgttgttttgttttgttctggttgccttatttgcaggcccctagaactttgagttgcaaggcttaaggtttgagaaggtgcaacagacatgaatttttttttttcttcattaagaaagatgatttgggtcttagtgtatatgattcagaattgttctaattccagtaatatcctttaaagggtaaaattccagtaattccagtaataacttttaaagggtaaaattctaataaattccagtaattccaataatgtcctttctttaaagggtaaaaatagtgatgagtggaaatagactttcagttaactatgtagcaaataataattatgaaaacttttgatcagcagtttgtttaaaatttttttcttgctttcctagattttacatgcttttaattcaaggtttgcagataaatgattatgtgtgccatcctgtcttggccagcgttattctaaactctcctcctttgttctgctgtgacttgaaagggattgatgttgtggttccttactttatttcagctcttgaaaccattttgcctgacaggtaagctatcattctctgctattatatcaactgtctgatttggcctggtctgttggtgcttcctccccagtttcctaatgtatcctgtccagttgtcttcatagtccaagagaactcaggcgacattaaatgagtgtagtgtgtccaaacccacctcatccctgaaatccttcagttctcatttgtctgtgggcttgttgaatcgtttttggcctggtctagaagggtaagaacaactccaacacagaggtcttacctttgtagagtaggccttacgttttaggtaaagaaatcaatcaatcaacttctagtttaattcagtaacagtttaacttagaaatatacaatatacaaatacacaatgcttggatttggaaaaattggcattatatgtatttggcagtagctaaaaatgtgctttagttcaaaaatactaatagctttttattttttggcagagaactctcaaaattcaaaagctatgtaaatccaacagaattgcgaagatcctccattaatatcctgctttctttgttgcccctccctcatcattttggcacagtcaaatctgaggtaatgttttgttaaagtttttttatatcctatattctgttttttgtactaatttaagtcaaatcgaatgttaaaaatgaaacaggagctttttttatttttcaattcaagttatttcatcaagttatttcaagtgaattaacaaagttgacttgtgattttttttttttgttctgtcagtttttctaccagttttcaagcagttataggctaaggacatctattaacatattgttagtgacagattcagcacagtggctaatattagactgaaagcctttctcattatactgatccgttcctccatctagctgttcccacatgggcatcataagctgcaacagctgatgttaaatattatttgttttttccataggtggtcctggaaggaaagtttagtaacgatgacagctcttcttatgataaaccaataacttttctgtccctgaagttgagacttgtgaatatattaataggtgccttgcaaactgaaacggaccccaacaacacccaaatgatattaggtttgtattcacacgttattttgtaagtgaaaccaaagtactgttgactacaggcctgctgaggaggcggcagtcggtaatgggagcctaaacct

SEQ ID NO: 26626 - DNA, 2300 bp, Homo sapien
tttaagaagtcggggacagaagtatgtcaggacatgagagaacagaagagcaggaatggaggaagggctacactctccaatgctggagagaccagggagaagaaggaatagaaaaagtcccctgaattttggcatgaaatttaggtgacctttgagaacaggtgtgtacagtaggagggataattcaaagggctggggagtgaatgtattgagggacaggcagtgaatagaaactacactgttaacagtaaaggcaagggtacagaatgggtaatattatagcttaaggaaatggcctcgttaaggaaagaaaaggctgatttttttttttttttctgagatggagtttcgctcttgttgcccagactagagtacagttgtgcattctcagctcactgcaatctccgcctcccgggttcaagtgattctcctacctcagcctcccaagtagctgtgattacaggcgcatgccaccatgcctggccaatttttgtatttttagtagagacgggatttcaccatgttggccaagccggtctcgaactcctgacctcaggtgatccaccctcctttgcctcccctcaaagtgctgagaattacaggtgtaagccatcgcacccggccagaaaaggctagtttttaaatatttttttacattcaaggatgtgaggattatgaacatgcttatagattgaaaggaagaaaccagtagagaggagtctggctaacactgtaagatgggcagtgggacttacaagtaatagaggcagtagggtcaagagtctagtctagaaaagagatgcttctaagacagaaggagagagtaggtgaaggttcagagacatttagagaggaaaggagggaaattgaagaagtttatgaaaattttaatcctggttcttggcagtgtaataggggatcccagacagttcttaagaattgccaggcagtgcagctgaggttaagtagcattatctatagtgaagttatttaactcactctgctgactttcttcaaaagtccttgggatctggaagcataagtaaagaatttgactggtgtggagattgacaggtgtggaaatttggaaggaggttcaacacagccatttaatgtgcttaaggagagggtatttagctgttagatgtgggggcttcagtttagttgggaagcagataaagccagaaggatgctaatggagtgggaaagcagggggagggattgagtgccccaccgcaatagtagagcacgagctcaggaagtgaagggataggagttgcacaagggggcttatgattggagagggaatttcagacttacagccctggaaagcagggcacatatcaggttcaagtttgttttcatggatggccaaaattgtgaaggttgaggagcttgtagaattctgagccaggttgttagaaggatcgttactcacccgggaatggaactttaaacaaggattgatcagaaggaaaggtgggagaagtctctaagagtacagtcatgtcatccatacagatgaggaattaaacacagggagcacgtcagggtgaagatggacagtgatctgcaagcgaggggtgagagtgacaactctgccccctttcttgcctatttgaagggaaccagagactgaatgttttcatttacagtgaaaacatgaaggagcaattgttgaaggtatagggaagtttttttggcatttgttttaaccttggaccatgtttgcttaatggcatactctacattgaactgaatcacaatgttgatcactgaaaattatcttcattttctttgttgcttgtagctttattttcattttaaaattaagattgacttagctaggtgcagtggggctcatgcctgtaatcccagcactttgggagcctaaggcaggaggatcacttgagcccaggagttcaagaccagcttggtcaacatagagcccagtctcaaaaaaaaaaaaaaaaaaaaaaaacacttaagattggccttactagtttgataatagtttcaaaaaatgaaatatttggtttattacagttagaagagagacacgaaaaattaaggagtggcatggcccagcagattgcttatgaaatacaccttgagcaacagagtgaggaggaattgcagaagagaagttttcctgacccagttacggattgcaagcccccgcctcctgcccaggaattccaaacagcccgcctttttctctcacactttggatttttgtccttagaagcactgaaggtaattttcatgaacttttatgaataaatatattcacaagttaa

SEQ ID NO: 26627 - DNA, 2300 bp, Homo sapien
cctgtctctctggcccaactcccttctgagggactgggatggtcttccttttgattatttatttactggatccaaaggactgctcccttaatctgcttcatacacttgaattaaaagccctgctaatcagaagtggtctgatatacagtcgtttcagaaattatgaaattaagattttattatttaaaaataaagacatctaataagcattatattttattctttcatactaattggttcttgttgaaaacatatattctatttatcactttattaaccagttaacatttcatgtagcaagatgatactggttttttcctactttttgaagcggtaatgtagtgtttctttttcccagaagaagtgatttcctctgaagatattggagctagcattttcaatggacagaagaaggtgctgtattatgctgatgcccttacagaaattgcttttgtggttccttctcctgtggagtccttaagtaagatgatttttgcatggtcctgttttaggatctatttttatattcctgggttgtgtgatattactgcattggaagagattttgaagtgatctaaggcattctttagcttctaaggcattataacaatatgcagaagcacaagatgtcttctcttaacttttttatggaaagtagttaaagacaagcagactgaccctctaataatctttaaatagtgaaggaatcccatttcaactgatattttgctttctttaatctaattaatcaatacataggcttattttccagttcatttctttctctaattacgagtgatccctcacctacttttctattcccatatgagagcctttgcatggaaccacctagaatcctacaactggaagtatctcatgatagcatatggccattcttctaacactgagcaagagaaacttcagcagcctagaaaagatggtggtccaagactttttaagaattgggagtaattattacttcttagtctgaactcacagttttattttgcccagaacctttgctctttgcaaattaagcctgtttgttcatgcctgaccgagtaggtggtctggcagtaggtgggaaacttcaccttcttctttgagatcatttgtaggatgggatactatacatcacgatttcagtcttatttccagactaatgacttttgttgtgccctaccttggtagctgcctaacctttgtacttggacccttgatttctcactctaggcccctccctgtcttactctctggggccggctgtgttcctggaaggttggaccttccatggtttaggtttgaattataacagctgttgggcttcccgtcaaggttctggtttactacttataattccagaagccagaacctgtccgtcctctttggggacatacctgcctggtttctctggcccagcctgttagtaccagacaagtcctcccagagctagagcctcgtccttattctatagctcctgcaattgggtctttgtctcctgttgtgaaacatctcctatgccaactgtgcccactccaactcagcttcctcctatttctgatatttggggatttttttggatggggtggaggataactttctgtgtacttatctccaaccagattgctcttaatcacagagactagatcttctgtagcttctggatgtcccagtgcctatttggcacaatgctacatgattgaatatataatctaaataattcagagagtaataatggcatttattatattctacatctgaaacgtcaaatattttctagtcttattttggttatcctttagagcaggagctggcaaaccacagtggcacaagccaaatgccgccaagaatgggttttacattcttaaagggttataaataaaatataaagaagaatatgcgagagatctgtatagccagcaaagcctaaaatacttagtacttgatcctttacagaaaaaagtttgtcagcccttgctctcgaagcaatgctttgtttaagtgatttaggttagactggtgagcataattagttttaacagccttgctccaaataagtggtatgtattatagttgctttttttcctttaccccatagctgattcattggaaagtaacatctcggaccaagatagtgattcaaatatggatcttatgccaggaattctgaaacagccatccctgacacttgagcttttccccaatcatacagacaatcttaattcctcacagagggtaagttactttgttgataggtctccaaaattttgtagtgaaatcagggtaattatagaatcctg

SEQ ID NO: 26628 - DNA, 2300 bp, Homo sapien
gaggctcacctttcaggggctgcgaattgctgaggagatagatgcttatgttacgggagcaagaaagtgccagctgtgccctctgcttgcagaaaatttgagccctagtaggactagacagtcaggaaaggggggaggtgcagagatcatcccctgccgcccactgccccctttgtgaagggcatcttggagccagatgagtgccttcaggcctggatcacacatagtggagtgaatggaccacttgaaacaatcatgagaaccattgtggccatgcctctgccaagagctgctgacgtgtgccctctgaactgtgcctgggagctgcctaccttgcactgtgtgttctgcctgctctgcccacgcacaacaggacctccagctgggcctagtggccagagacgctgactgcacagtagccctgttttggtgtctggaaaggttttgtagccagaaaaaaaatgtgtgctcaagcctttcccagctatgctgctcagctctctctctgaccgcagccccttcaggacccagttccagggaatcacccccaacccagaccacctgctcctccttctcttggcctctgggccctgcatcaggagcaccctgccagagcactgctcctcttggacactcattctagtccattttcccagacttcctcttgtaggaattctggccttcccacagctgggctaggactcttgaaaccatgccccagctctcccagcccctcccatgctcttattttttcctgttgctggccccatgcgcccttctccttgaatcggtgtcttttcctataagggggttttctactccatgtttttccctaagtttaccacccccttcctgcagctgctcccccgcctggacctggtttgccttttcaacaggtgcttttaagtcatgagatgctgtagtctcaaaatcaagcctgcatcagaatcattctagttgcttatcagtgtgttgaatcccaagccacacccccacccccaagaggtctgaggagacgaaggtgagcctgggaattggcatgtttaataaatacactccagcacccacccacctgctggcagtcacaggcaggtggtccaagggtcctcttggagaataccatgcagcagccactccagtgggaagcccgaagcctcctttctgccatggtctggcacatggaggtttactgaatacttgatgagtgaacggatgacagataggagaagatgaggatgacatgtggaagtgttctggccactcaggagataaaggaacaagattcaagtcgttagaagcccctcactgaaaaccctaataaggagaggcacaagctttcagattaagtaataatcatttatagtcatttaatctagtaataattagaataatctactatgtgttagattttaaaagttttcagtggcagcccagtgaccaatccagcctggcagacgttttgtttagccaacagtgctttgacaaggtctgatccgacattttaaacttgggagatttcacagaaatccagactttttgcctgtcttgggaaagttaggagtcctgcaataatggacctgcatttcacttgtagcagttattggttggagctgccatcactgcatgcttaggatgcagtaagctgcatccagtttgccgcagtccccagcacccccaccaagtgtggacgtgggcacccacagctggtattacaggacctggggacccagctggctcctggagggggtctgtgacttcagatatatgaacaccgatcctgggggtaatttttgtcccatctatttttctaacttaacagaattatctccatcttacaagaaaaagggtcagaggggtgtcatgaacccaatagctactggactgagattcaagcccaggcctgcctggaaacctgggctttttaattctcagccagactgtctgtctcactgcctcacttcccaccctttcatccagaacagctctccctcaaagtgtcccctgcatgctttgcctgaagtacactgtgacttctttgttatgtcacagcttagtcacagttgggctgagagcagagcatggcccagcctgccaggtcccatggggcagccctgccagcccagcccaggctggcccagcttagccacacatgcgccatgaagtaccctttgatgccgctggtgaacgacctcacattttctttcctggttttctggttctgcctccctgtgggtttgctgttgttattgatcatctggctacgcttcttacttagccaaggtgagcttcttaccccgtcc

SEQ ID NO: 26629 - DNA, 2300 bp, Homo sapien
accccatctctcactgatgaaaaaacgtcacagcccactttagactcacttgtcagagaaggcatcagtggccatcctaaggtctgggtgtaatgctgtggaggaggcactggggaatcctacaaagacccagcctctgcccagatcatctcctgtgggccaaagaatttcaccagaaacagaaggggagaggatggcaattaggatgtggagatctttgtctataggaatctgtagggaaaattctctctctctgtctttcctgtatctgagaattggggtgggccgaggctctccgtatagggcaaatttcggatgggggatcgcttctatttagaagcctccttggaggagaggatctctgtgtttggaggaagaatctctttcctgtctttgttctgggtcctgtcatgacttggagtgtctgtatttggaggacggttctatagaggggtctttttttgttttgttttttgttttgctttgttttgttttgttttttggtcttagtagctggaggctaagaagaggatttctgtcttggtttccaccaggcaggagctaggggctttccagagcttctggggaaattaagggggtacctggggagaggttaggagcatctctgtccaatgtggtggaggttccctatctggagagaagcctcctccgggagactgggaggggcttgggatgggaggaggtggcaggaggcgggagggtgtagagagggaagcctgtcttgtcctggcagctccaactctctggccaaagccctcgggccgccctacttgtgcgctgacgtgagctaatctagaaatactgcagagaaagagtggctggggttcccagggagaaagggcctcgagagaggggagatggggagctgcttccttttttgtttccttcggtttttccgtccgcccccgcccccacttccagtcacagccgctacttctccattcaggctgggactgccaggtggagccctgcggtttactgctcaggaggagcccggccaggacatcagctggggacttacgcagggacccattcagagcagcggaccctcacggagactactacaaagggactaacacaggcacgaacgcaggcaaccccattcgggaacacatacgtaatccaacacactagctctggcacacacactggaatgcgcgcaaaaccacacagacacagaacacacgcggttaccaaacctcattctcagaggccacactgatccaacctcaagcagagtctgatacagcatcggtctttgtctctgggtctctcccttactcgcgctcacacacccgtaccccaatcaacacaaacagcccaagctttcacagcctggaggcggccgtcggagcagggccccagcgcaccgcgagcctctgcttcctccgccttgcagcgccgcgagcccttctttcctccgcgcctggccccgtctgcgcccctctcggcgtgggcattcgcagacccgctaggaggctgacgagaggtgtcctcatagagtcctgccttcttccagacccccaaacgaaaagaaagagaaaagccaacctttcgcctccattctgcacgcatttggagagcggctggtggcgagcgatccgcacaatcgcttccctcgcggcgtccctggacgggcggagagaacccgggtgactgagcctgaggctgagcttccttgggagcgatccatgccagccacttctaccttcaagggggactcgcggccgggtttacgcgcgaaggatgggtgccagggaaactgacttatagacgacccgctccgcgagagactgacaactcagtcctgcgggctttcggggcgcccagaccagtccttagccagaggatctggggctgcacagctcccggaccctggagggggtggtccgggggtgggagactgcgagcatcagcccacgccggccccctcccaccctgcggcggcgaggtgggaagggccaggatgcgagcttagcacctcccctagaaatgcagcacttcgcccccccacctcccctgccctcggcgctccctctttcacgcgctccctcccgcctccttcccaagggcgcccttcttctgcccccagctcacgtctgaatccctcggcgccccctttctcttctcctagccccttcctcacgtcccctgcctccgggtatttcctctctccaatcccccacccccgcaccgcctgattccgaggggcgggagcgcattgggctgcgcacgggtgggggcgccgcgccagcttcgcgtagctgctctgacgccgc

SEQ ID NO: 26630 - DNA, 2300 bp, Homo sapien
ctggagagaagcctcctccgggagactgggaggggcttgggatgggaggaggtggcaggaggcgggagggtgtagagagggaagcctgtcttgtcctggcagctccaactctctggccaaagccctcgggccgccctacttgtgcgctgacgtgagctaatctagaaatactgcagagaaagagtggctggggttcccagggagaaagggcctcgagagaggggagatggggagctgcttccttttttgtttccttcggtttttccgtccgcccccgcccccacttccagtcacagccgctacttctccattcaggctgggactgccaggtggagccctgcggtttactgctcaggaggagcccggccaggacatcagctggggacttacgcagggacccattcagagcagcggaccctcacggagactactacaaagggactaacacaggcacgaacgcaggcaaccccattcgggaacacatacgtaatccaacacactagctctggcacacacactggaatgcgcgcaaaaccacacagacacagaacacacgcggttaccaaacctcattctcagaggccacactgatccaacctcaagcagagtctgatacagcatcggtctttgtctctgggtctctcccttactcgcgctcacacacccgtaccccaatcaacacaaacagcccaagctttcacagcctggaggcggccgtcggagcagggccccagcgcaccgcgagcctctgcttcctccgccttgcagcgccgcgagcccttctttcctccgcgcctggccccgtctgcgcccctctcggcgtgggcattcgcagacccgctaggaggctgacgagaggtgtcctcatagagtcctgccttcttccagacccccaaacgaaaagaaagagaaaagccaacctttcgcctccattctgcacgcatttggagagcggctggtggcgagcgatccgcacaatcgcttccctcgcggcgtccctggacgggcggagagaacccgggtgactgagcctgaggctgagcttccttgggagcgatccatgccagccacttctaccttcaagggggactcgcggccgggtttacgcgcgaaggatgggtgccagggaaactgacttatagacgacccgctccgcgagagactgacaactcagtcctgcgggctttcggggcgcccagaccagtccttagccagaggatctggggctgcacagctcccggaccctggagggggtggtccgggggtgggagactgcgagcatcagcccacgccggccccctcccaccctgcggcggcgaggtgggaagggccaggatgcgagcttagcacctcccctagaaatgcagcacttcgcccccccacctcccctgccctcggcgctccctctttcacgcgctccctcccgcctccttcccaagggcgcccttcttctgcccccagctcacgtctgaatccctcggcgccccctttctcttctcctagccccttcctcacgtcccctgcctccgggtatttcctctctccaatcccccacccccgcaccgcctgattccgaggggcgggagcgcattgggctgcgcacgggtgggggcgccgcgccagcttcgcgtagctgctctgacgccgctgccgccgccgccgccgccgccgccctccgcagcccagctcgcgccccgcggcagctccgcagtgcactagccaccaccgccgccgccgccgctccgccagacctgctgccagcttgcccggtccagccctgagagagcctcgaacgccagctgcgagggtcatgagccagagagccccggggcgccgcgcggagagcaagcggagatagcgactttgcgccccccagccctcgccttcttgcatcgcgttccccgcatcctcgggtccttctgtcctttccgctgtccccaccgccgccatggccaccttgctccgcagcaagctgtccaacgtggccacgtccgtgtccaacaagtcccaggccaagatgagcggcatgttcgccaggatgggttttcaggcggccacggatgaggaggcggtgggcttcgcgcattgcgacgacctcgactttgagcaccgccagggcctgcagatggacatcctgaaagccgagggagagccctgcggggacgagggcgctgaagcgcccgtcgagggagacatccattatcagcgaggcagcggagctcctctgccgccctccggctccaaggaccaggtgggaggtggtggcgaattcgggggccacgacaagcccaaaatcacgg

SEQ ID NO: 26631 - DNA, 2300 bp, Homo sapien
atatataatatatatatttaccttggtgcttttctttttttcttttttgtgagacaaagtttcactcttgttgctcaggctggagtgcactggcgtgatctcggctcactgcaacctccgcctccagggttcaagcgattctcttgcctcagcctcccaagtagctgggattacagacacctgccaccatgcccagctaatttttgtatttttactagagacggggtttcaccatgttggccaggctggtctcgaactcccgacctcaggcgatccaccagcctcggcctcccaaagtgctgggattacaggtgtgagccactgcgcccagccagtgctttttcatattaatatacatagacacaattcttaaattaacattcactaacttacatttactggtttctgtgttctgctggtccccctcttaattaacttaacgatggttacttcagatatctgaacaatggacgtgtgttgaaagacaacacaacctgatttttgccactgggctggctcccaatctggtttaggtgtgttaacaggctgggcccgtcgtctcaagcctgtaatcccagcactttgggaggccgaggcaggcggatcacttgagccaaggagttcgagaccagcctggccaacgtggcgaaatcccgtctgtattaaaaataaaaaaaattagctgggtgttgtggagcatgcctgtaatcccagctactcgggaggctgaggcaggtgaattgcttgaaccggggatgtggaggttgcagtgagccaagatcacaccactgcactccagcctgggtgacagagccagactccgtcttaaaaaaaacaaacaacaacaacaacaaacactgttaatagaggttcttgagataagttaggagtttcatttctcgcttacaatatcttttgtaactaatttgattttatctctcaaactgaagtgttatagacctggtagagtagattcaaggcagctgctctattctttttcttctttcaaaatggttatggccagcatgggcaacatagtgaaatcccttctctactaaaaatataaaaattagctgggcgtggtggtgcacgcctgtaatctcagctacttaggaggctgaggcgggagaatcacttgagtccaggaagtcgaggctgcagtgagccgagatcgccccactgcacaaaaaaaggttgtagtaaaacaactgctctaattcttacccccttagctagtgaaaagatggaaatgcgacaggatagagcgcgacgagtgcttttagggctaaaactgagtgggtcacacacatggcctcctctcccacccgctcctggccagaatttagtcacatgagcgcatctagatcgcagccagacggatggccacgtgggagtgggaggtgatgccactaaaagagagggaatgcttggggaacaatcagcagtcttttctcagggtttgagaaaacactgtgtcttagtgagaagacacagtctgtgcgagttagtaaagtgaacagaactgagtagtcagctccctagtcaagaaattgaacagtcggcagagtttgagatttcttaacgtaaaggaagcgtcaaaagataaaggacccttctagccaggacgcaagactgagggcgagacagccacgcggaggcggggccgccggcggtcgaaggtgcgcgcccggccgacggtgcgcgcccggccgacggtgcgcgcccggcaatggggcgtggccaggcagagaggcggggctccaccgagcgcggcgctgaagctggcagccagaaaggggcggggcctggcggcgataggctttggggcggggcttccaaaccgggcgtcccggctagagtgaaggggcgtgggcactcataggctattgggggagaggttaagaaacgtagaatttcgcagccagaatgggtacgtctcagcgatcctgaaagcagccttgacagccagaggcgagtcaagtggaaaggctggccgggcttcgagaagggagggggcatcgaggtacttaaaggcctgaatcgcgcggcgtgacgtcgggggcgcggtttcgcggcgtctgggcggacactgcgccgaggggcggggctggacgcgcgctccaagatggcggcgaacgtgttcccgttccgcgacgcccgtgccgcaccggacccagtgctggaggccggcccggtggcacacgggccactgccggtaccgctggtgctggacaacgggtcgttccaagtccgcgctggctgggcgtgtcccgggcaggacccaggtcccgagccgcgcc

SEQ ID NO: 26632 - DNA, 2300 bp, Homo sapien
gctccaccgagcgcggcgctgaagctggcagccagaaaggggcggggcctggcggcgataggctttggggcggggcttccaaaccgggcgtcccggctagagtgaaggggcgtgggcactcataggctattgggggagaggttaagaaacgtagaatttcgcagccagaatgggtacgtctcagcgatcctgaaagcagccttgacagccagaggcgagtcaagtggaaaggctggccgggcttcgagaagggagggggcatcgaggtacttaaaggcctgaatcgcgcggcgtgacgtcgggggcgcggtttcgcggcgtctgggcggacactgcgccgaggggcggggctggacgcgcgctccaagatggcggcgaacgtgttcccgttccgcgacgcccgtgccgcaccggacccagtgctggaggccggcccggtggcacacgggccactgccggtaccgctggtgctggacaacgggtcgttccaagtccgcgctggctgggcgtgtcccgggcaggacccaggtcccgagccgcgcctgcagttccgcgcggtgtgcgcccgcggtcgtggcggggcacggggcgcgtcgggcccgcaggtggggaacgctctgggcagcctggagccactgcgctggatgctgcgctcgcccttcgaccgcaacgtgccggtcaacctggagcttcaggagttgctgctggactacagcttccagcacctgggtgtctcctcacaggtgaagggcggagtaggctgggctgggctgggtttgaggggaggggtgcggtctcgtctccgctcactctgctctcggagaggtaacagtcacttcagtagctccgattgtcttttagtcgaccagatgctaggcgctgtgggtgtagcagcgaataaaatgctgctccttgtatcttggagcatacctttgggcatatatgcttgtttgttaagaagcccatttattaacaaatacgtattgagcacttactctgtgtcaggcactttttaggcatttggagtacatgtgtgaacacaaaacttcctgtgcttatggagctgttaatactatggaaagatattctagtatgaaaaggcagacagtaaacatagaaatagtagattctacgccgtgataggagaggagggagttacattttttcagtaagatggtcagggtaggactcgtgaaggtgatgtttgagcaaggacttgaaggaggtgattcaggtagcaagccatgtgaatatctgaaggaaaaacggtccaggcagagggagcagccagtaaaaaggccccgaggcaggagtgtgccctaatcctaactgcaaggctgcctgtgtgagggggagagtagtacctgaaagaggatgtcagagaggtagtggagaggcagatcacacaccttataggcttttactgagtgaaatggggagccatggcagggtgttgagctgaagaaggacctgacttgtgttttaaaaggatcactattactgctgtatggagaatgaattgtcttggatcatagggtggaaacagggacgagttaggaggctgttggaataacccaggtaagggatgatggtggcttagatgaggcagatagcagggaatgtcattagaagcagttggattctggaaatactttgaagatagagccaacacgatttgctgacagtttggatgggaccttgacttaataacttaaattgactctactttcgtattttcaagtaaagatgagatgggagttttataatcgcctctgatcaggtttttgattaagaagccaaaagcaaattcagtcctgcaataaggattttgggttcttttatgcttcaaaaagagtattctgttaccactcatttatttgcccttttctttcaaagtagggctgtgttgatcatcccatagttttgacagaagctgtgtgcaacccactgtattcacggcaaatgatgtctgagcttctttttgagtgctacgggattcccaaggttgcctatggaatagacagcctcttcagcttctaccacaataagccaaagaactcgatgtgcagtgggctaatcatttcatctggataccagtgtacgcatgttttacccatcttagaagggaggtgagttgcacttgtggcatttgagtgcgattttgagaagcattcaggaaacatttatttactgcgtgctttaaaggcagagtagaaagagcaagtactagcctgtgaactgagccgttgggcttagctttgaactacctcactgtgtgactgggtaagtccctttgccca

SEQ ID NO: 26633 - DNA, 2300 bp, Homo sapien
tctcagctgaccaataatgagctcctgaaggacaaaaactgcatcttttttttttaattgtgaaaaccatataacataaatttgccattttaaccatttttaagtatacgtttcatgtgtgaagagctgtgttttaattaactttagaaagcatttattaaacatctgttattcctgggatacaaagaagttgcgggagacagatagggaaataaataattgatgaggacactcagtccggagagttagaggcttgccagaagacacggctgaggcacacagctctccgtgctcccacttctctgttctccagttgctctggtattgactctttttttttagttaactttttcttttacaattctatgatatgattataaagagagagcatgagggaattttttgggatgatgaactcttccgtatcctgattgtggtgttgattacatatgctttctctttataatcatatcctgtttttatccacaataaacaggaacaaactactgatacactcaacaacttgaatgaatctcaaaggcatgatgttgagtaaaaaaaaaaaaaagtttcaaaaggtacatactatttgattccatttatgtgacattttgaaaagataaaaccatagtgatagagaagaagtgagggaaagattgcctgggcttgggatagagacaagcttttgggtgaacttgttttcatttctccagagtaaatagattgctgggtcatgtgcttgcatggtatgtctttccgtccttctacttttaatctacctatatcattatattcaaagtgaatttcttggtagttggatgatttttaaaaaaaatctattcagtcaacctctatttaattgttagactaaaccatttataattagttttaattattcatatgcttggatttaggttcaccattttattatttgtttttgttccttctgtttattgttcctctgtttctctctcctgcctccttttaggttattcgagctttttttttttttttttaaagtattttatctgttgtgttttttactctacctttttattgtagtttttagtggttgctttagagattacagtaaacacaacttttcacagtctacttagattctgtatttaccacttcaaggggaatgtggaaatgttagcaatgtacagactcctttatttcgcccggtttatcttaaagttgtcttatttatttcatctgtatacattggaaacccatcagacagtgttgtgatttttactttcagttgtcaaataggttttaaagaactcgtaaggagattagtctgttatgtttaaccagatttttatcatttctgttgctcttccttcattcctgatgctccaagcttccttctggtgttgtttctcgctgaagaacttacttagcagttcttttagaacaggcctgctggcattatgtccaggtttggtagctgcttttagttgattgagtggattcagggattggatggagtgtattttctccatctgacctatgtctgaaatgctggtactgactttaaaaaaaacaatggagtcggccgggcatgggggctcatagctgtaataccagcactttgggaggccgaggcgagtggatcacgaggtcaggagatcaagaccatcctgggtaacatggggaaaccccatctctactaaaaattcaaaaaaattagccgggcatggtggcaggcgtctgtagtcccagctactcaggaggctgaggcaggagaatggcgtgaacccgggaggcagaacttgcagtgagccgagatcgcaccactgcactccagctaggtgacagggcgagcctcccgagtacctgggatcacaggtgcccgccaccacgcatggctaatttttttgtatttttagtagagacagggtttcactgtgttagccaggatggtcttgatctcctgacctcgtgatccgcccacctcggctccccaaagtgctgggattacaggcgtgagcccctgcgcccagctggtattgactttaattgttgtgttaatagtgtttccatttcataactttcaaaattgtttctttgaagaattacacaaatggcggtgtcctgattattatgagaataatgtccacaagatgcagctcccattttccagcaagctcctgggcagcactctgacctctgaggagaaacaagaaaggcggcagcagcaattgcggcggctgcaggagctcaatgcccggcggcgggaggagaagctgcagctggatcaggagcgtctggaccgactgctatatgtgcag

SEQ ID NO: 26634 - DNA, 2300 bp, Homo sapien
ttataggtgtgagccaccaggcccagccataacttttcactttcttgatgatacccctgaaagcacaaaagtttttaatttatctatttttttttcttttgttgcttgtgctaatatctaagcaactactgtttaatccaaagtcatgaagatttaggcttatgttttcttcagagagttttatagttttagctcttacatttagatctatatgttgcatatagtatgaagcagggatccaaattcattcttttgcatgtggatatccagttgtcccagcaccattttttgaaaacactattctttccccattaaattgtcttggcactcttgttgaaaatcaattggcagtaagtgtaagggcttctgtctggactctcagttttattccattggtctgtatgcccatccttatacccgtaccaccctgccttgatgactgaagtttcctagtaagttttgaaatcaggacttgtgagtcccccaacttattctgaatttactttaacttttgataccgaacacagtgtgagaggtgaatgaacagcatgacattggagttgggagccccctccctccaaaggccttattttaggaacacaggccccaagtgccacacaagccttggagagatgggttcccatcctctcagcccatggctcttcattatcaatcaatggaaacattcttcggagaacaatgattcccttgggttattttaaacatggctttaagtcttccccacatgctctactgtctaattgcttttcctgaaacagtgtcattcacaactggattattaatgaactgagagggagccagggagccaatgaagggggcttacagagttcctggagagggcctgggggcctggaacaagttcaacccacagattttctctcccccaagaaaggtgactgagcaaacagaaaatcactaaactcaggtgatgctggtggcctcaaaagaatattgccagtgaaaaaaaaaggattcgggcgagttcctcaaacatgacagctgagaatcaaattaactgggtaccatccccaaactccccaaacttaaactctgaatttccccagctggctggccctggggtgcctagggctctcatctgtaggccgggaaagctcaggaaacaaggcctttgtggagaagagaaacctattgttctaaggccagggttcagcaaatgtggattccagagaatgtttggggaggttttctctgctttgtttatgaactttcttttctcttcctggggtggtgatggtggggggtgactctcagcaacttaaatagttaaacccattgtgttgtaaagaaaggctggtgcacagagtgcagaggccttcagccccagaaagaggcttgaatgaggtgacagaagccaccgggtatgttttgctttttatttttagcgttaaatctcagggaagcagcccctatcttcatcctgcacatctcaaagggcgtcagacgtcagcagaggtacgaccacttccttcctccagcgcttcacctcccttctttccagaaagaggaaatgatgcgagtccacaccgcaggccacagcccccatgtctcggccccagcagctgggggacctggccccacagatctgtccccagcgcaaggccagggccggcccctggacctcctgggaagccttcagactcaggccgcgcaggccttcaagctaggaaccctgagttcctggccctggcattcattctgtgtgaccttgagcaggttaccactcctctctgggcttcaggattcccgtctgtcaaatgggagcagggataccgtccttggcttccctctttccatggtcggggtgggggttaggaaaactattttggaggagggggcagcgttaggaaaactattccgaagcctggccacgtcccaaccggtttcaacttcctgcagctcagaagaggggtccccacccgagagcgccgggaccctgtcccgcgctgcctcccaagccggatggggttgagcgcgcccaccccagtcccaggagctcaggccccgccttgggggaggagccgagaggcggcgcggaggctcgcggccgagcagagccagctctgtcgccgctggagcagctgcggctcggggacccacagacacagccggggtcgggagccgcccggggcagggctcgggagagcgggtgagttccccggcggcgccaccaccctccttgcgctctgcggcttcgcagggcgggggatgaggatggggcggggaggtggtcccagcctgctatcacctagctgggggcc

SEQ ID NO: 26635 - DNA, 2300 bp, Homo sapien
tgacagggcaagactccgtctcaaaaaaaaaaaaaaaaaaaaaaaaaagaaggtgctctcttgcagcctcccggaccctggataccagcgcagggacacatggaagtccccacacttattcttgagaaacttcacaaagggatggggatggggagaggagaggtagagagggagaggcgtctcaacagcggcaggcattcatccatttaaaaaggttattggttgctaaataataatggtaacatctcacatttatgacccacttttcatttacataaaaaagatgacgactgaaaattgactgttggatttagctctgtggaactcatgatgaacctgacaagaggttttggtaaagcagtgggggttttagcctgattgaagagggctggaagggaactggagacagcaagtatagacaactggtttgagggtttcttttcttttcttttctttctttctttttctgagacagggtcttactctgtcacccaggctggggtgcagtggtgtgatcatagttcactacagctgcaaactcctgggctcaagtgatctcttgcctcagccttcccactggctgggaccatcatgagcactgccatgcactaaaagttaggcgcaccaccatgcccagctaacttttgtatttttttgtaaagacagggtctcactatgctgcccaggctggtctcaaactcctgggctcaagtgatcctcttcccttggcctcccacagtgctgggattacaggtgtaagtcaccatggccagccacatctgagattctatgctgcaaaaataagaagtgagatggggagctttagaggaatgtagggtcaagagagggttgttttaagatgaaaaatatttcagcatgcttgtaggctgatagaaatgaatcggtaaagagggaagctgatgttccaggagaaagaagaagattgctggagcgatgctggtgagtagtagaggggctggaaatgcccaggcagaggggttggggttggatgggcacaggcacagttcatcaatgcccagtatacgggcagagatgcagacaggaaggtagactagatggccgcacgtggacgttcccttcttactgtttctgtgttcttgctgacatggaagacaagctgtcagagaggaaaaggtagagagaatgagggaaatgcggcctaccaggcagtttttttgtttgtttgcttttgttttgttttgttttgtttttagatggagtttcgatcttgtcgcccaggctggagtgcagtggtgctatctcgactcactgcaacatccgcctcccgcgttcaagtgattctcctgcctcagcctcccgagtatctgggattacaggcgtacaccaagacacctggctaatttttgtatttttagtagagacggggtttcaccgtgttggtcaggctagtctcaaacgcctgaccttaggtgatccgccctcctcggcctcctaaagtgctgggattacaggcgtgagccaccgcgcccggcctcctagcaggcagtcttacggattatgaatttaaaacatgaccagtcagtaagcatggttacgctctttttgttttttcttcagccctgtagggctgccggggtgcaggtggaaagtagggtataaccacggttggttggggttttacaaggcaaaaatcgatgaaatgagagaagactacccgagggtgtaatcaaaggagcagtcctaatacgatgagccggtattctttgaatgaatgaatacatggttaaaggcaggtgataaaggcgatatggttggccatgccaaagcactgagagcctaggagcagcgtggccagagtctccgggagtcggcacctgcctctcctcgttgtctaggcctgactgtccctggccttgcacggccgcgcagcggggcgaccggcagggggcgcgctgggatggccaggagctcggctctccccgctctgtccctgctctgcggcccgcctcgcccctgcaagtttaaattcctcttagcaagcccagcatcgcagccaataacgcatcagggggcggagccgtagaggcttgcgccccgcctcgctccgctattggaaggaaagcagccaatgggagagccgaggcggggaggtgcggccaatggcgcgggcctgtttgattcaaaggttgcctataaagcgggactgcacgccggtttttgtccgagggctgtcgagtccgagcgccgccatggctctgctgtccgagggcctggacgaggtgcccgccgcctgcctgtcgccgtgcgggccgcccaac

SEQ ID NO: 26636 - DNA, 2300 bp, Homo sapien
ctaaaactaagcctaaagcatgatgtttatctgtatattactcaataggcactgctactgggctacgaatgtgaatgtgccatggtcctcgtcctcagtaagttccctgtgtaatagtggcggcaggtaaaccacagatcaactaaaactaagcctaaagcatgatgtttatctatacattactcaataggcactgttattgggctacgaatgtgaatgtgaatgtgaatgctgacatggtccttgtcttcagtaagttccctgtgtaatagtggcggcaggtaaactacagatcaactaaaactaagcctaaagcatgatgtttatctacactcaataggcacttgttactgggctacgaatgtgaatgtgacatggtcctcgtcctcagtaagttccctgtgtaatagtggcggcaggtaaactacagatcaactaaaactaagcctaaagcatgatgtttatctacactcaataggcacttgttactgggccacgaatgtgaatgtgacatggtcctcgtcctcagtaagttccctgtgtaatagtggcggcaggtaaactacaggcaactaaactacaggtcacttttctcacaaaagtgagaatacagttcctagactacaagggggaatgtttaagttggatagataatttagagctagccctttaagggataaagataatttaaaggatggatggagaattctaggccgagggactaacagatattgagtccctacattaattactataaaaataaatcaaagaagattcttacatgaacctatgcaggtaaattcagatttttttccccctggtggatttgctctgagttgaggtaatgagagctaacattgattcagtgcctgctatgttttgcactgttaggtactttacatgttatctcatgtaatacctctttaaacctcattttacaactaaaattaaatgacagctaggagctaggaaatggcaaagttacgattccaagtctggactggttgtccacaaaagcccctgctcttgccataatgatgccacttctttcaaagaattcagaattttcttcacagctttaaaaatgcatagattctgaagcctctcacttccttccaattagttgcctacctagaaagttatttcctccacttgagctcatcaccccttcttagcgctcctttggattactgtaatttctttttctttgacctcacctttcgtctgatggattagtgtaatctttcccaaatttgttaatctgaagaattcaggagcttctcaaaatgcaggttcccaagccatgctccaggacatcgattcagaattggatcaaggcctagaatctgtgtttttaacaagcatttgactcaagggtatcaaattggaggaagcactgagttggtggactaccttaattgatctacccattttcagtctcttctgccaacccattcgctccaccccacccccagtccgtttttccgttttgccctcaaggtccctgaagacttccatatcatttcgcattgttttatttggggcactgtgccgcactacctgggcccacagcaggcgcgcaatatttactgacaaatacaacccacgaggtagttcctattattacccttcaatttgaaattgagaataaaacagaagtcgacaagttgaggtagcttgtgacatcagtatttcgtatttaatccagaaagcactgcttcaacgcccagtgcgtgcaaggttccactctcgggccagcggtcctctcccaaagcccgttcttcctaagtgtgcggccgccatccaggacacgccacgctcgtaaaaggtcacctgaagcatctaccctccacgctcaagaggtaggcggaggagcgcgcccttttctccaaaatggctgagcagggtcacgtgggctcgggggcggggccggtgcgctcgccggagcctggaagtgggtcacgtggctcagacgggggcggtagctgtgggggcgtggccgtcacacggcgcgatccgtctgggcagcggctcttcgggggccacgccctccgggccctgggggcctagcgcgcgacggtggggtggagctagcctcgtgaccttttaccccaacatggctgcgcccgtgggaccggtgaagttctggcgacccggtaaggcccttggtggaacgctgggcagatgcggcggcctgacttcggtcttggcgccgcggccggcgccctggggccagcagacctgctcgcaggcctgacctcggcgagctgggcgctgccgcctctgtgcggggggagctc

SEQ ID NO: 26637 - DNA, 2300 bp, Homo sapien
tttgtatttttagtagagacggggtttcactaagttagccaggatggtctcgatctcctgaccttgtgatccgcccaccttggcctcccaaagtgctgggattacaggcgtcagccaccgtgcccggcctgttgtgaagattctaaacctgtcccactgaaggatcactttgacagtagttatcagatcaggtgacttctcttttcttctcttctgccttcctaatatttcccacgacacatgcttactttggcttaagggattgtttagggggattgaggtcagtcaggagcaatagaaaaattggtacacatggtttctaaataatttgttttaagtatcagcttgcctattttaaagggccaagtttaaatcaattaattcaaggtgtggcttaaaaatgtttagccttgaagtgagagtgaggaagggtgtggtggaaagcattggtttgaaggagctggcaggcagccagtccacctgggcctgactctgccttttcctttcattagatgaggactgcacagaaccagcccgaggacagcttttactgtagtagctatttatcaacagatggcagagaatagagcaggtgagggatggtctgaggatccactcccaatttcagaccacctggaagagggtgctcagccccttgaccattgggatggagcaacatgagtctgccctgtcaaacattaattgcagccagccaatcaggagacctggattctgcccctgagctactatgtgccttgggacaactgacttaacctcgaatctgagtttttgcagctgtaaaacgtaaataataataactttcagataggtggttttatagcataacatcttaatcccaactacataaaaatattagaaagattattttataaaatgatcatttataaaataatttttataaaatgatttataaaatgtaaagtgcctgaaaaaagttctaactgctatatatatgtgtcccctgctacttaaacccttcaggggcagctcccaatgtactgggaataaaattcaaatacctcatggtggcccagagaccacatatgattgcatatctgcctccctctgcaacctcatcttgtactttgtattttggctgcactggctgtttctccttcctttgaactgtttcttattcttggatctctatagggttggctgctgcttgttactcaggtctctgctcaaaatctttcacagaggctctgcctggccaacaaaagtaaagtagcatgccctattattacaataatatataatatacatgttatatactacatcatatcatattgcctcattgtgttaatattttctttatagtatttgttgttctctgaaattatcttcttgtttatgttcagcatgtcttcaccctaaacactcaaactagaatgtaaactctggcagagcaggggccttgtctgtcttgtttatcctacatcccagcaccttgaacagtgcttggcaaagtgcacaccctcagaaagtaatcatgatatgaatgaataaatgactatacctgcgcaagatggagggtgatttactttggttatgccaaagggaaaaactaacaaatgctaggctctgatcactttatatattaattgtatatagtcccttcagtagccctaggggaggtggtaaatcttattatgtagatgaggaaacaggttcaggaggttgagtaacttgtccagggtcacatgattagggagaattcaaacccagggcaccccctgacttggaaactcacagtctttctagtatattaaactgcctctcacagattctgcaatgttggaaatgttaaatcttttaggatttttacgagtttgttaaaagcaaaaagaataaaatgagttttattcttctttctgtggggaacgtaggtgatagtggccaccaatgtggcagaaacctctatcacaatcagcggcattgtgtatgtgatcgactgtggctttgtgaaactccgagcctacaatcccaggacagctattgaatgcttggtggtggtgccagtctcccaggcatcagctaatcagcgagcaggacgtggtggtcgtagtcgctcgggaaaatgttatcgcctttatacaggttagtgtggctttccctaagggtttttgactttcttatagtcagcctgggcaacagagtgtagcaaatgtttactcctaatggtagaacttaacataaaatacaggccttcctcacaaggccctgtgtaatcagatccccactgctttcctcactctaaatatggtgtttctttgtta

SEQ ID NO: 26638 - DNA, 2300 bp, Homo sapien
cctgcctccaagaaccagtttccacccctttggaagtgatatcacccctgtttagagtgcatattttacatggaaatttcttatggacaataggagagaagagactggatatcggattagatcatatttagacatgtagatttgagattttatcagctcagtgcttaggaaaaatacagaaaatcatggagactaaataaattacatgcaaatttaaaacatctaagggttaaaaaatagaaagcaattagtgaaagatactttcagcagtcatgagataaatgataaagattaaaaactttattatagaatgattttatttaatatatttaggaaaaaacagttttcaggttgataaatgggctaaggattagaacaaaaaattcacaaaagaagaaatatgccgatagtaatcaaataaatgtaatataaaagaaggtaacagaaggtaacactttttgccaaaacattgctagtaagaatgcagtgaaactgccatttttatatattgttgatggctttggaaatagtaccacctttatggaacttacttaccaacatgctttattccattggatctaagataccatcatgtgtaagaaacatcgttattttatgtgtcaccaaagaaaaaaaatgctgccagttatcattgtaaaatgctgtcctaatttcagtgaattaaagttagaaaaagagcgagtcttaaaattgatgagatgtgatatgtcattaaccataaaaataacattagccttttgcacaacaatttggaatgtatcctatggacatcatctaatagtggggaagctttattcatggaagatgttagctgtagcaatagaaacaccagttaaaatggaacatttgaaaaatttgaagaattacttcaattttcaaacactagctcataaccacagaagtaacgttgtatactatctccagtttgtgttttatagaaagaacattgttgccatatgacactcttttacaaaggagttctgaggtcactgaccagcctgcagagcagcactcttaggttctggtgcccagccatggtccagtcatctgtggcttaggggaggttggaggggtcccaggttcaaggagcagaccagcattgttgtcagcagcagttgtggggagtgggacctccttagatggtgctggggcaggcatccagcattgggaagggtagggctggagccatttcaggagagggtttccaggtgtcttgaagcagcctggggtggtgctgggagtggatcctgtgcattagagcacacggagcctagggcaggcaagggtttcacccgcctctctgttggctgcctatgtaggtgacccggatctggttctgaggtgcattgtctccggcttcttcgccaatgcagcgaggtttcattctactggagcttataggtaacatgatacttggtgaagtcatttgttaaaggaacaatcttacaaatgacccaaaccccacagaaagctgtgcagagatagtaattgcataattatttgtaatttctaccatgtctccttccaaaactgagttgaggttagcgacatagctttaagcaaaatatcttgactttctaaaaatgattctcacatattcagctcatctatatgttgtatgttttagaaggatgacaattatacatcttgaggctggtaatatttcaattctaatgacagaataatatgacctgaagaaactattaaaaataatgtttctcagagaagttattttacaattggctagtttattatgtctttagagatctgcacgactgaagtcccctcccaccctggtatagtgtggccacgtctggtgtctttggaggtagccaggtgtttctcatgtgctggatgtgcctcctgctacataacctgattcttccagttccattttctaggcataggaaatcactcattgatgccttcctaatggtctttactatattcaaatgcagtgaaaactaagcatagcttaggcatactgtagcctgtcagtatcatgattctccaaactaatcattccagtgctttgaattgttacttttattctgtcttttctgtctttggctcattttagtttcataacctcagtgtagcctcctaaaagtgtagctatcatcattttctgttctttaataagagaacactccaaagaatttctccccagctcttctatgtattattttgtcattaattttttttcccagagaaaatattactgccctgttatcttgaggtcagccaagatatcccttgtcctgggctcctgttaatga

SEQ ID NO: 26639 - DNA, 2300 bp, Homo sapien
cagagaaagaagactatacaggacaagctaagatatgcctggtaatgaagggcttctgtttgtaatcctgaccatggcctgcacagcaggacccaggggactctatgccctcatccagcattggggctgtttaccagctgagcattcactcgcactggcagaaactcagaaggcatttttaaaatcaggtatgcagtgacctctcttgaaacaagtggaaattatagacacccagtggtcttttcgtatttgcaaaaccaagaaacagaaatacctccacccgcgctagaaaagctgaattcaggtcatcagcctgcccaaacctcaccagaagcctcaggcttgtcacttggcctctaaagacatgtaccccagtgagagttaatactctattctcagctcttgattttatcacaatctgccttggcacatggctgaccaactctgtacatgcccgcctcttttgctagagcataaactccttctgggtagggtctgtgcccaggtggccactgaggaaatgtgtgctgaaggcaagcataccacatatgacttactgctggtatctgcatgtggaaactgaggtgaagaaagcccagggatctcagccagactactacttctgcataacaggtgggcgctcagactctgcaggggatggacacatcccagctccactgcttacttagctctgtgacttggcaagtgacctcacctctctaagccccaagccccagctgtcttgttcacctttgtattccagtgcccagcacatgtctggcacatagaatcactgaaaacatgcttgatgcatgaatgaatatactgttgaatctgtgcagtggggacatgactatttcccaccttttagcgttattgagagaattcatggaattgggtcaggaaggtgcacatcgcagacactcaaaacgagtctctgccttatttatgtattggacagtcccatgtggatgacagagggaatttttaagtttttgcttgtgctttggcagcgtgaagagaatctgatgctgggctttgttaattagtgatcagttctctggtagatcaaggaggcagaacaggattctgctccctctggtggcttctgaacttctttgttcctcagaattgccctctcctttcccagaagggaactggtgggcaggaaccatgccacaccctgcagaacaactcccaaggcctcttgaccttggtccacggaccctcaataatgaccctgaccctggaggtccgttttggtccactgaccctcaagaatctccactgaccctggagagtcagctggggagagtatctggtacttttccttcagcagcaaaaaaagtgtcaagaaagcagctactggcacccatggaggtggctttcttccttcttacagaccacagggccaggacaggaccaaggctcaacacactgctggactcctctgctccctccgcaggtgtctgagcacacccagcttcaatccattcttcccttaaaccctcagctaattactctgagtctcagtattctcctccatataatgggaagaaatgaggtctacctaataacgttgtgatgaagattaaatgaaataatgcctgtcattgattattgattttgatcaatggatgttgggctcaaatgaaccaagcactcaagaagtggtattaatcatgcaattgggtattgtcattttaaggattctttctgacatcaatacatggcaaagaagacatgcaacaaagtttaccaaaggaaagaaggaaggatccaatacatcaacataaaacagaatatactgtttgagaaatagaaataaaaacagtattaaaaactaggaattattcagtgtgtactacataaccggcaaaaatgctaaaaccacttaaatatgctatttcatgtaatccttaaaaataatctcattagataggcattattgtgattccaattttagaaatgaagaaactgagacacagaaaggttaagtaactcacctaaagccacacagctagtaagtggaggggctgggattcaaactcacgtctttctgacataataaagtaagccctgggccacaaagttatatcactcagttctttagaacagctaaaactgcatccaatcactgtctcttgtaccaatctaaaatcagtgcccagaagactcaaattttactggaaaacaaaagggaagccaagtgtcctgagactgctaaattccaccaaccaccagacagctctctacaacaaagagttaattggcagctgtgagacttgaggcaggtgagt

SEQ ID NO: 26640 - DNA, 2300 bp, Homo sapien
aaaacccagcagggcagtcactaaatcttaaagtttcaaaatgatctcctttgactccgtgtcccacatctttgcatgtgcactctcatgcaaagggtgggctcccaatttcttgagcagcatcacccctgtggttctgaagggctcaggtccccccagctgcttttaagggctgaagttgagtgcttgtggccaagtgcagagtgcaagctgtcagttgatctatcattctggggtctggaggatggtgaccctcttctcacagctccactagacagtgtcccagtagagactctgtgggagggctccagtcccacatttcccctttgcactgtcctagtagaggttctccatgaggactcctcctttgtatcagtcttttgtctagacatccaggcttttttatacatcctctgaaatctaagtagaggttcccaagcctcaactcttacactctgcatgccagcaggcttaacactacatggaaactgccaagggttatggattgcaacctctgaagtagtggcctgagctgtacctgggaccctttgaaccacagctggagctggaggagcaggggaacagtgtcctgaggctgtgcagggtgacaggtccttgggcctgatccacaaaaccattctcccctcctagggctccaggcctgtaatggaaggactactaagaaggtctctgaaatgcctttgaggcctttgcccattgtcttggctaccagcatttgccttctttttagttatgcaaatttctgcagcttgcttgaattcctcccctgaaaatgagcttttcttttctaccatattgcctggctgcaaattttgcaaacttttatcctcttcttcccttttaaatataagttccattttctggttatttatttgttcatgcatgtgagcataggcttttagaagcagccaggtcatatcttgaatgctttgctacttagaaatttcttctgcatgataccccaaaacatcactcttaagctcaagcttccacagatccctagagcaggggaactatgcagccaacttcttcactaacacaaacaaatgtgacctttgactatagtccagcactttgggaggctgagtgagcagatagcttgagctcaggagttagagactagcctgggccatatggtaaaactccatctctacaaaaaatacaaaaattagctgagcatgatggtgcatgcctgtagtcccagctacttggtaggctgaggtgggagaatcactgaatctgggaggtcaaggatgcagtgagctgagattgcaccacttcactctagcctgagtaacaaagagagacattgtcaaaaagaaagaaaggaagaaagaaagaaagagagagagcgagagaaagaaagaaagaaaaaagaaagagacatttgctctagtttccaataagtttctcatttccatgtgagacttcctaggctgagggcctagactttactatccatatcactatcagcattttggtcacaatcattcaacaagtctctaggaagttctaaactatccctaatcttcttgtcttcttctgagccctccaaaatgttccaatctctgctcattacacagtttcaaagttgcttccacattttcaggtatccttatagccatgccccactcctcagtaccaatgttctgtattagtccattctcacactgctataaggaaatacctgaaacttggtaacttataaagaagagaggtttatttggctcaagttccacaggctataatgaaagcatgattctggggaggccttaggaaagttataatcatggcagaaggtgaagagggggtcagcacttcacatggtcagtgtcaggcctctgagcccaagccaagccattgcatcccctgtgacttgcacgtatacgaccagatggcctgaagtaactcaagaatcacaaaagaagtgaaaaggccctgccctgccttaactgatgacattccaccattgtgatttgttcctaccccacattaactgagtgattaaccctgtgaatttccttctcctggctcagaagctcccccactgagcaccttgtgactcctgcccctgcccaccagagaacaatcccctttgactgtaattttccattaccttcccaaatcctataaaacggccccacccctatctcccttcgctgactctcttttcggactcagcccacctgcacccaggtgaaataaacagccatgttgctcacacaaagcctgtttggtggtctcttcacacggacacgcatgaaatttggtgccgtgac

SEQ ID NO: 26641 - DNA, 2300 bp, Homo sapien
cgccctggccgcctgaggccggagccatacatagtctgcacagatccgagacacccggtcccgagtgatctggaaacgagtgtgctctcactgcgttcaaacaagacgaggacatttacaaggtgcgagtccccaacccccagctactggcaggggctgcgcagcggcaccgcccaggctctctctccaggcggccgactcatttctgcggagagcacgcttctcgaagagggttgtagacgcgctcttccagcatttaatttgccaccccacaagattgagttaagttttagttaaaatacactcattttattaaaaataggcggcccaataccacgccgtaccccagcctctccgagggcgcaagagaatagagagttttcagattaattggaggcaaatattttaccttctaacatttaaaaataatctaggcgcgtctgcaccggtgtggctcacgcgacccctacgcgcgaggtcagtcgggctggtccagcgcagacagcggccgggactcactcacccagtgcgcgcctctcctgcctttcgctgcgcgcgcccaaagctagaaagaagaaggtgacgcgggaggcgggtcgggtctccgggtccagcgaattcgcgatctatccggtttcggcgcctgagccgaggtctcagaaagaacccgttaattctagccatcctggatctgggtagggagggtgcgcggctcccaagcccagtctggatgcctagtgcggtgtgcttcggtctccccgtctgccctccggggaggtttctcacccggtggccctgggccgcttcactgtggcgcttccacttttggctaccggccttcctccgcccaggaccttccggcccagggagcagccgacgggcacccccgaacgctggggcacggaatttcaacggggcgaccagagcggagctcgcggctcgaggctcgcggctgagtacgaagacgggacccgaggacctgtacatcgctcgaggggaacctgtcctgggctctggtgcacacatagtatgcgttctgggctggcttgggttgggccaggtaggggagacctggctgggtacgaggcgccgtccaagccttccggccgtgggccgggcggtcgcggcgcctttgcgcacagtggccacttggggtcgcactttatgcctgtttgagcctctccgcggcgggctgacgccgggatctgcttaatcgttacaaaacgttcaaacaaaaacagggccggctccccagcagtggagagctactcggagcaccgtcccgggccggcctcggccccgaggctccgggggctcaggattccgtgcgtgtggcggggaagaggaattcagagcctttgggctgctgcttttcccgtcgccttcactgtgaacattgtgcggtggggtgaacgcggggagcggcggggccagtggagtcgaacctcagggctctgcgactgcacccgccaggaggggccctcgcttggcctgagaaaggtcccctgaggttaagagttgggtctgaacacaactctcggagcctcgagcccgccctccccaacatacaaatacgcgcagatctccagaaacaggaacgcacgacacacacggccagaagccgcgaggacacacagagcgtcgcccactgggcgggggccgcttgggaacaaagggcccaggaggcgttgtcccggcgctcattctgagcctccttgggggtgacacgggatgggggtggggtgcaaagggaactgagggaggagagtgcgcgaggaggggaaagcggtgatttggcctagaggtggggcgcgcactccaggcgagcgtgcgtgggccgggacctgcagggtacgggggtgggcccaggctggccgtcccactccgctccagcgctccgccaggcctccgccgctccggggccgctcgggccgccagtcagctgacgcggggggcgggggagctgtcaggcgcgccccgccctgcgccgctgggccgcggaggccgtgcagctattggcccgcgcaccgggccgcccgggcccccgcaccccagtgacatcaggaggcgataaaaggctgcggcgccgccggatccagcacagctgcaccgccgagctgcgagcggctgcgagcgagagagcgtaagagcaagagagctagagagcgagcaacgggcactcgccccacgcctcccctcagccccaccgcgcgctccgcttgcctctccaccccgcccgactctacccggcccggtccctgcgcgggcacagcccagagctctggggcggtgcaggcagc

SEQ ID NO: 26642 - DNA, 2300 bp, Homo sapien
ttctctgcttgatcgattcaggtattaagagactctggtacattcttcagcatgtcaattgtatttttcaactctagactttctgcctgattctttttaattatttcaatctgtttgttaaatttgtctgatagaattatgaattccttctctggtttttcttacatttctttgagtttcctcaaaatagctattttgaattatctatctgaaagatcacatatctctgtctctccaggattggtccccacgggcttatttagtttgtttggtgatgccatgttttcccggatggtcttgatgcttgtggatgtttgtcagtgactgtgcatttaacagttaggtatctgttgtactcttcacagtctgggtttgtttgtacttgcctttcttgtggacaggtacaaacaagcccagactgtgaaggacaagtattgtggaaggacaaggctttccacgtattcaaagggacttgggtgttgtgatctaagtgtttggtcactgcaaatgcatctgcattaagggacaccccaagcccagtaatgctgtggttcttgcagagttgcagaggtaccactttggtagccttggataagatccagaagaattctctggattactagagattcttgttctcttcccttactttcttccaaacaaatggagactttctctctctctctctctctctgtgctgtgctgcctagagctgggggagaagtgacacaagcacacctgtggtcaccatcactgggactgcgctgggtcagacctgaagccagtgcagcattaggtcttgcccaaggcctgctgtaactgccacctggctactgcctatgtttgctcaaggccctagggttctacaatcaggaggtggcaaagccagccaggcttatgtccgtcccttcaaggcacccagttcccccaggccccaagcaggtgcagagatactgtctgggagccagagactggagtcaaaaagcttagaaatctacctgctgttctattctactgcagctgagctggcactcaaaccacgagacataatccttcccacacttccctcccacttccataagcagaggggcctcaacctgtggccatcaccacgacaggcccataggactactgccagtctaccaccaacgttcactgaagacccaagggctcttcagtcggcttgtagtgaatgttgccaggcctgggactcatccttcagggcagtgggtttccttcccacccagagcaggtccagaaatggcatctaaaaggcaaggcctgaaaccagggaccccaagaaccctctttatggtctagtctactgtggctgagctagtatctaaggtataagacaaagtcccctttactttttcctctgctttactcaagcaagtgttctcactatggttctcaccatagccaccacagctggaaatgtgctgggtctcacctgaagccaacatgtctcagagtctcaaccaaggcctatggtagataccagggtatcgctgctggttcttcaaggtcccaggactctttaatcagcaggtaatgaatcctgccaggactgagtccttcccttcaaagcagtaggctccctcctagcctagggtgtgtctagaaatatcatccaggagctaggccctggaatggggaccttatgaccctaactggtaccctatcctactgtggctgagctggcatccaagatgcaagacaaagtcctctttactcttccctctcctctcctcaagtggaaggagcttgcacagctgcaagctgtgctacctggagttggggggagggtggtgcaagtactcccttagctgcctcagctagtgtctcagtaggtcatgtgcccccaccatgtccactgactctgagcccagctcagcactaggacttgcctaggaactgcagtccttgtgaccttgactgccattcaagtttatttacaacccagagcattttacccccatggtggtaaggcttgctgaaactcaagttccatccactgggttgggcaattcccttgggcaattaccctctggctagggctggtctaaatactctctccatcatcagctgtcagctgagttcagttcggttttgctttcactgtgacaaagcagcatcaaattcaatgcaatgtctcacaatagctgcgctctccctcttccaagcacagagattctctctctacgccacaaagccactgccatgggatggggacaggtggcatcagcaactcaagactgtcttccctaccctcttcattgcctctttcaacagtatgaagt

SEQ ID NO: 26643 - DNA, 2300 bp, Homo sapien
tcggctcactgcaacctctgcctcccaggttcaagcgattctcctgcctcagcctcccgagtagctgggattacaggtgtgaaccaccacactctgctaatttttgtatttttagtagagacagggtttcaccatgttggccaggctgttgttgaactcctgacctcaagtgattgatccacattgacctcccaaagtgctgtgattacaggcgttagccaccgcgcctggcctataaggcacccttggtcagccagtggaagcagggtcagtagtgcgccggagagtcactttgaaaaagtgatatttaggttgatcttgaagcattcacaagatgtggtaaacacatctaatggtaaacatgtgatggtaaacattagatgtgataaagatactgatggtccactggatgaacagttttcatatttacttccaaatgatttcatagatattatttcacagataacacttaggatgaaggtaaataaaaaggagatcaattaaaatatgaaataataatagtgaaagtggtaatagatgtggcaatatccacaaaggagtaatggttagattagcatattgagaagatcactttggcaattgttggaatgcagtttacgagagggccaagaatggaagcagcaatccctgttagaagtgtagtgttttggagtgcggtgttttttgttggtttgttttttgttttttttaaaccaggtctcactctgttgcccaggctggagtgcagtgcagcctcgacctcctcctcgggctcaggtgatcctcccacctcagcctcccgagtagccgggactacaggcacatgccaccacaccccgccagtttttgtatttttttgtagagtcagggttctgccatgttgcccaggctggtcttgaactcctgggttcaagtgatctgccagcctcggcctcccaaagtgctaagattacaagtgtgagacaccacccccagccagcacattgtattaatccaagcaggagaacgcagacttcaaaggcttatgggcagcagagagaagtagatgaagcaaagagatgcaatcagcgggactagtgggaaatgagggaaaggaaggtgtcaggatggggctttttctagctgagtggagttcagttcattcccagagaagcttgagaggtatccaactatagatgcaaggtagctggctgttggtcccttgtctttaggacagtttgacttttgtaatacaggcgacctcacagagctattgtgagaattcagagctgggcacagaatagatgctctataaacggtagttctattccccatttgccccgtcctcccagcatgccagggatacaggggcggatagagacaggttcagttccctttggtctcttgcattcccccttccctcagcacaattcctgggctcatagcggatgctcaataagtatttgtagaatgaaccaaagaaatcagacccttggtgacccagggctacatgtactcggcggaaaactggggttaaaccggacccttggttggttgaaaaattaaaataatttttaaaaagtgggcgtgaaataatccagaagttggagggcctggacaaaggctggggaggggactcctcccaccaggcggcctcagggtcggcttagcaagaaaggaggcgctggggagacctctggggtcccagctgccaaggtactcgccgctccaaggagatgcggacgccggataccagctctgcccaagattgctgggtcccgccgcggcctttaaaggcccaccacgtggctgcgcggccagccctggtccggaggcggtgcccgggtggcgcctgcgcactgcctagcagaggggctggggttccgagaaaaagcgtctggagaggaaggggaggctgcttggggtgggacgccgtgggaggagtcggctccttatgcaaatcacagcggagcgcgcacggtccggaggcggggcttgcgatgcaaagacaggtccgtctggcgaacagcgagggggcgggccgcaaccctctgcctctttccgcgagcgctgacgtcgccgacgtgttgtttaaaagcggccgcgcaggcgcagtgagcccaaatgcgaacttaggctgttacacaactgctggggtctgttctcgccgcccgcccggcagtcaggcagcgtcgccgccgtggtagcagcctcagccgtttctggagtctcgggcccacagtcaccgccgcttacctgcgcctcctcgagcctccggagtccccgtccgcccgcacaggccggttcgccgtctgcgtctc

SEQ ID NO: 26644 - DNA, 2300 bp, Homo sapien
cctccaccagaataatacaccctttttccccttagtagaagtccaaatgttaatcttgctatcatatatgtatgaatgcccagatttataaagctttgtaggtatattactgattgtgcaggagactaatctaggaggcttcaggatcattgtcatttgtggatctcattggctaagaccttttacttaacctgactccagtaaggtagcccctttgtttccttgtagttgactatgtgagctcttgccaagcagcagaagtgggatgaagggaactaattttgaaaacttattaggcaccacatttttatgtgcattaaatctgaattgaataaagataatatagattgcataggcttatggggagaaccagagaccaggaaaggaaacgtttttttctttttaccctttatgccttttcatgtcccctttttgataacatgctgccttggtccagattctggaaaccccactcaggctgtaattggtaagcttctagtacagatgtcagaacctgcccttgattatctgctgttagagatagcttggaccctttgtatgtggaatgttaggtctaggggaagagtgggggtgtgaggagacagctgtggtaaaatagaaaattggtgtaggattccgaaaaatcgagataagtccctgttcttcctatgaaacatgatctgaccactgaaccttgttttcttatccataagcaaggataatatttatgtttcacaaactgttgagaattagataagtatatgaaggtgcctctctgtcctcattgtaaaatgtaaactttgatgagacagcctctattctcaactggatctttattttgaatgttaggtttgaaatagtgattgatgttggggagtctgtctttcattggtattccctgttaaagttttaaatcttcttgacatttacacagtgaattgtaacatgtaactagtgttgttgagtctttacctaattgaatcagcagagcctacactgatgtcttccagttacaaagcggtcactgtaaagtaaaaggtgtcttcatatctaggtttgggctgagaaggatccaattgtatatctagttcctacttttcttttttttttttttttgagatggagtctcactctgttacccaggctggagtgcagtggcgcaatctcggctcactgcaagctccgcctcccaggttcacgccattctcctgccttagcctcctaagttgctgggactacaggcgcccgccaccacgcctggctaattttttgtatttttagtagatacagggtttcaccgtgttagccaggatggtctcgatctcctgacctcgtgatccaccagcctcggcctcccaaagtgctgggattacatgcatgagccaccgcgccaagcctaattcctacttttctaagaatgtttacagcaaagtggtcattgccaaaggaacttgtagcagtacagaagatgggctcagaaatgaaagaagtctattgatgtgactaatttctcaaccatttaatagaattatggattttctattaaaaataacttgacccttttcgatgcatttaataaaatgccaagttcattatttgttaattttttaaaaccacaaaattcaatatgtcttgtgtcagcatattttttcaaaggccactattttacttctcccccaaaacgtttttaaattaaacagagaactctcaaagcacctgagaattacttcagtttttcatttattcaaatagttgcttaaagtgaccaacttggttttctttgaaatagtaattcttgggaataagaataccttaaataatataataaagcttatgtgtgagaatttagtaccaaatgccgtgttaacagttatgcgtgagtataggcatttgggagattccatgaaaaaatttgataaagtcagtagaaatttcagtaatggctcataagtctagctaatgctgaatattgaattgccttgaatttgtttttttggaagtgttacttaaaggaaataaacaaaagtcatttaaggatgtgttcactagtgttcattaggtttaagccaaatggatcttagtagagatcttacgccattcagcaaaaggattatcacagaagcatcacaacaggcgcagacttaaattcaattaaaagtaggcaggaggacataattttgttgtatagaaattatggaatagggcctaattttaaagagtcttcaaagataaacatatcaggaaaaatatagctcataaaatatggggaaaaaaatctgggaagatgagtatttgttaat

SEQ ID NO: 26645 - DNA, 2300 bp, Homo sapien
ctttgctgggcaccagcaaaagtgacttgagacaggcaacatggcacatgcctgtagacccagctattcagaaggctgagacaggaggatcactggagaccaaaagtttgaggctgtagtgtgctgtgatcacacctgtgaatagccactgtactccagcctgggcaaaatagtgagaccttgcctctcatattaaaataaataaaaataaatgacttgaaagaggggagaggtattatttgatatcttgtgtacctccttttagtcactgttccgccctgtgctaccttcctggtaaggagtggccttctcctatagcagtattcaatggagcatgctgtagaataggcccttagagcaaactcagcatatgatttaactatatcttagtatcccctggtcatgtggtacatttgtcacttttcatctttgctcagcctttctccaactcctgactgagtgaaaggttaatgttagtccccagatctctgagcccatcactgaagagggtactatagctctgtagtcccaacctaatcttttccatagtattgggcttgaaccagagacttacagtgtgcaggatcctaataatccagcccaccagcagtcctcttcttataaagacacctcttctcataaggacaccataatcagtaatcaggttttgctggctgtggaagtactctggacagattagataacagtatgtatcaatgtaaatttttgaagctgatactgtgtaaatgtaagggaatatctatttttagaacatacacactgaaatgtttaggaccatattataagtaagtacttataaatgtactttaggaccatattataagtaagtacttataaatgtactttaggaccatattataagtaagtgcttataaatggctcagaacaaacaattatgtatatatatctgtaaatatacacatggagagagtgagcatacatgcacactgtgcaaatgatgaatggggtaaaatgttaacagtgaatctcggtgacggatgtatgcgtgttccttgtgcctttttctttgcaagtttctttaagtttggggttatttctaaagttaggatttttttcaagagtaataattaggattcacttatatcttttaggtttttaagaacctacaactatttatggagaacaagcagcccgaggatgatctttttgatagactcaatgtgagtagatgaagcacacaatgttgaagggagtcccagccagagcctcacagtacctaaaggggagggttgctggcagatgacttgggctctccctttagcctggcctgctctgtggcatcccatacactctctcttcctccctctgagtccacggtgaatctgtagtcaagagaagacacatctgctgcagaacaactgctaaagcactcagggtggggggtagatgagccctaccttttatccttccctgctcctgcagagctttcccttcactgaatgcccagccacccctgctggagacccaaaacctgtccctgatatcttaatagggaaggaaaaatttgctttattggtttgttaagcccaccaacctgggccaggcttggtggcttacgcctgttatcccagcactttgagaggtcaagtagggcagatcccttgaggtcaggagtttgagaccagcctgggcaacatggcaaaaccattatccaggtgtggtagtccacacctgtagtcccagctgcttaggagcctcagaaggattgcatgagcccgggaggtggaggcagcagtgaaccgagattgtaccactgcactccaggctgggtgtcagagtgagaccctgtcatacacacacacaaagattgaaatacttcatagagaggcatcatgtaaccctgtattctggaattcttttcctctttccctaacttcccacttgtagggccataaacttgacaagattgtgactgcactggcataaattactcctagggctgccagaaggagcaggtagtatagctttgacctaaatctgttgctttgtctcctccagactggtattctgaataagcatcttcaggatctcatggagggcttgacagccaaggtattccgtacatacaatgcctccatcacgctacagcagcagctaaaagaactgacagcccgtaagtattgcttggccagatagggcccacacccctactaatggtatccggtgaccttgcttatctaaggcctagagtcagttctactttttttccctaccattgtggtcagacactttttccctttagacctctagtagcgaga

SEQ ID NO: 26646 - DNA, 2300 bp, Homo sapien
accgctccttactccacagaggctggctaggacaaagggtctcaatgtcatgctgaattctgagcttcttaggggacgcacttgaggaaatcaacgttaacacacaagtttccactacagcaagacaaagtcagaagcagcagccccaggtcactatccagctgagtgggttgcctgagcacacgctcttacaaactctagtctagtcctactatctcacaattcccaggaagcctggctctttctctggcatcagctggaagctctgttgggcttctcacctctgaaatgcagtaagttgtcctgctgtgcctggcagccgacccactgcctggctcaacatgtcagacaggctccaccgcgaccgtgggtgtcctcaattttggcggtgctgacaagggtagatagattgcaggggtgagtttcaagaatggcttcagaaagacaaagagtatgaattatattccataaccagaaaaaggccttgtggctggagaatggagagtgaaggatcacttgtgagagatgaaactggtgagatgggcaggtcatatagaacctgctaggccaagcagggagtgtggattttaggtgcaatgggaattcacggagggttttagcctggatgtaggggatcatgatttaatttcattttaaagatttaaagcatgataaatccaggcaaaaccaaactgatagatccaggcaaaaccaaacaaggtgagtagtctgggtgacaggagatggggccttcagcttgtgggctgagtgacaaggtcttgatggattggaggtgaggcaaagggaggaatcaaagttagctgcaaggtttttgaccttccaacttagagaagtttagcgccgcgttctgagaaagtgaagactgtggaaggaatcgtttggggagggaaggcgagctgtctaagggggggggatgtggaacatgcagtgggatgctggggcctggaacgtaggggagatgcaggtttggagtcaccggtgcctgtgttgttgggcaaagccaggggaaaggtcaggtcgccttgggatctggcctagcactgagtgcagaggaagagaagcttctgagatcgagaggcagcggctacaggaggaggaagaaagcaaggcggggaaaaccaaagttcaggagagcatttgcaggagggcgctgcggggtagggtctgagtcggagccccgaatcggactcgagtcctgtcgcgtggggacggagcgtgcagaggcccatgcgagggacagacacaaaggccctgggagctgcaggtcagaccactggacagcgcggccgcggacctaacgcccctgtaaggggtgctcacgcttggggggaactctccgaaagagaggaccactgaaagccaccctggcagcaggggcggaacagacagacgtgggtctggccgtcgccagaactgcctgcggaccagccccgcgctgccgggggggcgggacatgtcggctgtccatcagtgcccgcgaccaatccgcaggcagccccgcccccgcccctcccgggagagggcgcgcggaggacccgccgccgccggtgtgaggcggcccgtcctggctcccttgtccgggaagcccgcccaggtaactgagtttggccgggcattcccggaggacgcgccatcccctcacgtcccgtcccggtcgctgcatgggcggtgttcgggacgcgggggctgcgtctgtgcgggaccgcggggtagcggccgcccgtgcgagtacgcctgactgacgcgccggccgccgggcctgcggcctgtgggcggggctgccgtgcgtgacagggccgctcgtggccgccgggctgtgtccggggccgcgtgagaaagctctgcgggactgagggctgggtgggtcgaccgggaacggcgcgcgctcccgccgccatcgcgcctccgtccccgcctgcggcctgtctgggggtcgcggggcgcaggcgcggcgggccgacgggcgggggtcctccccacgggtgcgcgggcgcctttgttcccggcgccgaagcggggtggggcctcagggcagccccgccccgccgcgctgaggccccgccccgtgtccgcctgcaggagccgccgccgggtcccgctcgtctgccgcctcagcctcagccccaacctcagccgccgccgttgcgcttgctcccgggcggtcctggcctgtgccgccgccgcccccagcgtcggagccatggcgggcgccgcgtccccttgcgccaacggctgcgggcccggcgcgccctcggacgccgaggtgctgcacctctgcc

SEQ ID NO: 26647 - DNA, 2300 bp, Homo sapien
cctgggtagggggttatcaggtcctctgtatgcctgcctccatcccccaaatacatgaggcatgataaatcatcccctctctgcacccctcttttctgttcaggccccaacttacaaacaagaaaggtcacacccaggagtcaaatgtgcacaactgcaaacactttctctacagaaacactgttctacatggtgggtgggtgagtgggcacatgggttggggcaaaacaaaactgtttcctgcctttttctgagtagcaatctaagtgaaatgtgaatttggtcaccgtcctcctcccttcctgcaccttcatcctcacctatagccacacctcaccccctcaccattcccagttcagggtcttgaagggcagccacggtctattgttaatgttattgctaataacagctcatatttattaaacatttatgtgtcagacaatgctagatgttttatatgaattgtctcatttgatcctggagcaaccatatatactggatatattattacccccattttacacatgaggaaatcaaggctcagagaaggtaagtaactggccgggaaacacacaatgaatatatgggcttcaaatccagacttgccatcaaccactgtgctacatttattgcctgctaatatgcgtggtttaaaatgcagtctgttacccaggagatctctgagaacttccagccagtgccaccaactcaacacagcatagggagtaaggaaggggaccatgcctggagcctgatgcctgagtgatgttcccagggttatctcagctctttgcagtgtcgattcttcctttactttggaatccacaggctctcaagtcactaaaatgttctcccaatggctgacagggtcagtgggggcactgaggaagggggctgccatttctaagttgagcagctgcattagatctgtgtcagatctggagtttgtagctgaggatggttggctgcctcaccacaagaccttccttcctcccaatctcctcaactatctacacacatgcacaccatacccaagaaggtttgtgggacccccccttggggtgtcacttcctgatctccctccttcacacagacctggttctgagcctgggtctctctaaccctagtctccgggggtccctgcaagaagcaacccagtctagagttgcagacacaccatctcttcacactgagaggcgggggaatggagggcagagcagagtgcccatccgaccacagcacaggcacgcgctaagtggaacaactctcaaagatctggggtttttcaaaatcccccaactccctcctcccactagagaccagcgcaaaagcagccaagctcaggcctgggaaggcgaaaaggcaggaaactaagagaagccgctcccgctccctgaagccaccggacagaggacaaagggctagactcacaaactagctgcactcctgagaagaatacctgactccaaggcgctggggcaggcctttatggggcccatctcctgggaacgtgcttcccagggcaaggggagtccctgccctggcattgagtgtctgcccacccacataggcctccaaaacccagctttgggacaaaagtagcagaaaaaaaaaaaaaaaaattccagccactggcttctctcaggcttctccaaaccaaacaagaccaccttcctccctctcccccagagggagatgagtaggcccagctctgctccaagaccagccctacccaacatctgcctaagttctacttagggaacccaaagattcctttgcaaataagagcccagcctgggggcccggagagtttcacagactgctctttctggataaagagtgggcggggaccgtctggtcaggccccaggttcccgtgcagggtgggggccactgccttagctcccctcgccgacgccgccaccactcccagggtctggggggcccgatgcctgcaccgcaggtctccagcccgcgaggatttttaggcctcagggcaaagcgcctggaacactccccccagctgggggagggggggtgtcctgtcaggtgaccgaggacccggatgccccccgcccccagtgaccacccgagacgaagcgggggcggggcccggagggagtctgggagggcccgaaagtttgcccaagtcgctggggcggccggccggggtgcaagcagtcgggccgggctcccacgacccccgcgcggggcgggcccaggcaggaagtgggcgcacttactggccccctcgatcttgtcggcgccccggctccacgtgatctggcgcgtctccagctt

SEQ ID NO: 26648 - DNA, 2300 bp, Homo sapien
cctttggtctttgatgatggtggcgtccagatggggttttggtgtggatgtcctttctgtttgttagttttccttctaacagtcaggaccctcagatgcaggtctgttggagttttctggaggtccactccagaccctgtttgcctgggtatcaccaatggaggctgcagaacagcaaatactgcagaacggcagatgttgctgtctgatcctccctctggaagcttcatctcagaggggcacccagctgtatgaggtgtcagtcggcccctactgggaggtgcctcccagttaggctactcaggggtcagggacccacttggggaggcagtccaactgttctcagatctcaaggtgagaccaccctttgagtggtcgtacacagaaaatgtatagcttgctgggccacaaactggttctgtggattccctgaccctctgacctttggtttcatctcagtaacagtggtccgggatacataacagccagtaactgtaaggtgatcgcttttctgtggcctggaataagtgcggcaggcaaggaaaggctacagaggcctggctcttacagcagccggtcttcctagccacccccgcccaccccaccccttccgttcacacactgcagctaacttggtccctgggcctggcttgggacagacagaggcgtcatcttgttctcatatgcgggaaggctatgaaaagaaaaccgcgtgttggtccaaaatgtaaacaagaattacactaggatcttttgttctcactctgacatggtcagaattaatttggaggtccaaaaagagggcgttttgttttttaatctgaattacttaatgcagggatatgtagggggtggtggggaagaaacaaaaatacgttgcttaagtctatcagttggtattggaccatccccaggtcattcttcagggtccagtttttgtcattagggggttcctaacttagacttcatatccaagttgctgattaaacttactgtgaaaagacctagatggtagaaggcaagcagtggaatgtgtctgggtatccgagaaatatacagaaagcacttaagagaacttaatcatttttttctccctttccttagattgaatagggaaaacctgctttctgcaaacaactgaaaaagctgcatttagaaactgtttctttggccctcatcgagaagctggaacttgtattgttaggccccttatgggacaagctctcaactgctgatcacccagtgattgtcaccatggccagcaagaggaaatccaccacaccatgcatgatcccagtgaagactgtggtgttgcaagatgccagcatggaggcccagcccgctgagaccttgcctgaaggaccccagcaggatctgcccccagaagcatctgctgccagcagtgaggcagcacagaaccccagcagtactgatggctctacactggccaatgggcatcggagcactttagatggctatttatattcctgtaaatactgcgatttcagatcccatgacatgacccaatttgtgggacatatgaactcagagcacacagactttaataaagacccaacctttgtatgcagtgggtgcagttttctggcaaaaacccctgaggggctttccttgcacaatgccacatgtcactccggggaagccagctttgtgtggaacgtggccaagccagacaatcatgtggttgtggagcagagcatccctgagagcaccagcactcctgacctagcgggtgagcccagtgctgaaggggctgatggacaggcagaaatcatcattaccaaaactccaatcatgaagataatgaaaggcaaagctgaagccaaaaaaattcatacactcaaggagaatgtccctagccagcctgtgggtgaggccttaccaaagctgtcgactggagaaatggaggtgagagagggggaccattccttcatcaatggggcagttccagtcagccaggcatctgccagctctgcaaaaaacccccatgccgccaacgggcccctgataggaacagtgccagttttgccagctggcatagcacagttcctctccctccagcagcagcccccagtgcatgcccaacaccatgtccaccagccactgcccacggccaaggcccttcccaaagtgatgatccccctgagcagcattccaacgtacaatgcagccatggactctaacagcttcctgaagaactccttccacaagttcccctaccccaccaaagccgagctctgctatttgactgtggtgaccaagtatccagaagaacagctcaa

SEQ ID NO: 26649 - DNA, 2300 bp, Homo sapien
ctacatgaaaaagagttcctgatactgttctgcgaagtctgttaaacaacttaactcttatcagtgaacaaataagcttcgtgcatctctgttcctctactgggaactgaagataatgaaacttaattataaatcaggaaaatgaaaatccttaagttctgaccttttccatagcccaaagcaaacaaaacagacgttacataatttaccttcattctctggagtatgaattttggattaccaatggcaagtataaacttcatatttgtgacatactccaggatattagtaaattaccatagcgatacagacagctaaagaagttagtgtatcaccttatcaaggacattttaaaataaccttaaaattacatcatagaatggaaagacatccatggattagaatacttaaagatggcaatactactcaaagtgatgtaaagattcagtgcaatcttgaccaaaattccagtacctatttttgcagaaataggaaagctgatcctaaaattcatatagaattgcaagggaccctgaatagtcaaaacaatcttgaaaaagaaaaacaaagttggagtattcatgcttcccaatttcaaaagatactacaaagctacaataatcaaaataggtataagcataagaatagacatatagatcagtggaataaaactgagagtccagaaataaacctgtacatctgtgacctttgagaacagtgccaagatgattcactggggaaaggacaatctctttaacaaatggtgcaggtacaactggttatctacatgcaaaagaatgaagttggaccccacacatattaaaattaactcaaaatggaccaaataactaattataagagttaagactataaactcttagaagaaaacataagggtaaatcttcatgaccttggatttggtaatggattcttagaaacacaccaaaagcacaagcaacgaaagaaaaaatagacaaattggatggcatcaaatgttaaaattttgcagcaaaggatgctatcaagtaagtggaaaggcaacctgcagaatgggaggagatatctgcaaatctgttaaaaaacaaacaaaacaaaacgaaaaactcttaacaactgaacaacagaaaagataacccaattaaaatatgggcaagggacttgaatagacattttgtaaagatatgcaaatggccaagaaacatatgaaaagatttcctgggtcattggtcattaaggaaatgcaaatcaaagccacaatgatataccatttcacacctactaagatgtctatactttaaaaacaaaacaaaaacaaaattacaagcattgatgagaatgtggagaaattagaaccttgtactttgctggtgggaatgtaaaatgttgaagccactgtgggaaacagtgtagtagttcctcaaaaagttccgtatagaattaccatatgacccagcaattccactcctgtttatatgtccagtaattgaaaacaagtatcagacaaatacttgtacactcatgttcatggcaacactattcacaatagccaaaagatggaaacaacccaaatgtctatcaatgaatgaatggatgagcaagatgtgcatctatatacagtggaatatttttcagccataaattggaatgaagtactgatgcatgctgcaatgtagatgaactttgaaacattatgcagagtgaaagaaagccaaccgaaaaggtcacatattgtttgattgcatttttagggaatatccacaagaggtaattttatggagacataaagcatattagtggttgtcaggagttggaggaggaggaggaggaggaatagaagtgactgcttaatgagtacaaggttcattttggggtgatgaaaatatttcatcagtaatgtaaggtaatggtaaatgtgatggttgcatgatactgtgaatgtgctaaatgccactgaattgtacatttaaaaatggttaatgttatatgaattttcaatttttaaaattacatcatataatttctgtgatctcacagataactgtggctttgctgtcatagttaccttgtgactgttggaacccatgtgctttgtacattgggaagttctttccagctctggacaggaaaacatgaaaacagatgatcccaaggaggtttctccctaaactaacaattaaagaatatagttttactttttcatttttatttgttgaaactggtaaagcttctaccttgagtgggtctgggttgttttaaaatttatcagaccacattggtctgatattgtttccttcatttaa

SEQ ID NO: 26650 - DNA, 2300 bp, Homo sapien
tagtgagacccaggaaacatcccactgggagggctggaaaacctgggctctgaagaagttgatttgaggtaaaccgttgggcacggggttggaagagcacttgcggtggcctgttcctttttttttttttttttttttttttttttgagatggagtctcgctccgtcgcccaggctggagtgcagtggcgcagtctcggctcactgcaagctccgcctcccgggttcacgccattctcctgcctcagcctcccaagtagctgggactacaggcgcccgccactacgcccggctaattttttgtatttttagtagagacggggtttcaccgttttagccgggatggtctcgatctcctgacctcgtgatccgcccgcctcggcctcccaaagtgctgggattacaggcgtgagccaccgcgcccggcctggcctgttcctttataggtaactcaccctttgcctgcatctgctggatgggaggtgattttggggtgtgtgggtgtttatttgcacaaaatggtggagggagctctgagaagggtgaggcaggacctgtgcaaacacaggagggaatgaagaggctcctgcctcgatggacagagcttgggaagggcttgggggcctaggactagttcctggtaaaggaggaagggcaaaaatcctaaggcaggactgttcttaatgaattcaaggactgaaaggagaccaggttggtacaagactaagaggaggagaggtgtatgagaagatactggagcgcaaagcaggtcccatatcactcaagaacttacagggcatagcaaggcattaagattctattctaaggtcagtgagaagccattgtatattttgagtatggggtggtatgatggcctgatttatagtttaaaaagaccacccagactgttgtatggagaatgggtagtggggaggccagaatataaattgagtgtagtcggtgggggaaaaggaggaattcaagaggagatgaaagtctggagcttaaagaagaggttcaggctggaaaatacaatttgatccagtatttcctgttagctcactccctgttcttagccaggcttcctgcgagtagccttatccatggtctctacttcctcacctcctgcaatttaaccctctgtactctggcctctgtcactgccacttacttccctgaaatgtctcaggcaaagggcaccttaggccctttgtggttacctaagtctaggccttttagcccttgtctgacttggtttgcgttccttcacactgtgagcgacttctgccttgaaaggccctcctccttagcccttctgtctttctggcccgtctgtctttctgacccatcattctgtggcccctttctggtccccaagtccttaggccagccctgaaatgttagcattccccagtcttctgggtttccagttggtcctcctggcttcccctgtgcccctctgcatagaataaaccctatcctgcccattaggccaacactacttgcctttccagcttcgtctcaggtgcccctcctccaaaagccttctctgacccctcgggctgggtaggtgccacttctccttttccatttctcctggagcataaagtagattacctctgtgatagcacttagcaccctgttgacttgtctccccagtctagtagtgcttgagggatagagttacaatgaaatactgcgtgatctaggacaaagattgctttctccagttcaggtgaaagccacactttataatgaaggtatctatacttgattgtatatcctttaatagtgcattcatttctcactgggtctgaaggctggaattctggtataatatattctatgaacagattaatttaactagaaataatcagtgtctcaattttctgaaaggaaaaaaaaatgactaagaatctgaattgcttcaaaagggcttctgaagccttgaatttcttgcctggtaatttggatctccactcctaccctcccatcccaaagcctgttacatgtgtctcatattttgtgattccacagttctgggtttgacattacaattgcctccatggtgatgagcactaacattcttgtgtgctgaattgtgatagccgtcaaaggcagcaaatagactgaatgaaagatgagcttctgcctttatatccttctctcctgctacccaactcattgtggtgaaggaaaaagaaaacgcgggtggagactgcactatatgcttaggtatacaaatcatacatctggagtttcaggaaggttttgggtggttaatgtcactaaactctcatg

SEQ ID NO: 26651 - DNA, 2300 bp, Homo sapien
tgaggtgggtggatcacgaggtcaggagatcgagaccatcctggctaacacagtgaaaccctgtctctactaaaaatacaaaaaattagctgggcatggggatgggcccctgtagtcccagctactcaggaggctgaggcaggagaatggcgtgaacccggaaagtggagcttgcagtgagcagagatggtgccactgcactccagcctgagtgacagagcgagacttcatctcaaaacaaaaacaaaaacaaaaaaacagagatggggtttcaccgtgttggccaggctggtctccaactcctgacctcagacgatccgcccacctctgcctcccaaagtgctgggattgcaggcgtaagccacctcaccccagccgcaaatgcaatttctgcaacaacctttatatcaactttttttcctctaacaatgaacaatgaaaacaatttgtgctccatctttaaaaatgtgtgacacaaaaattttttaaataaaaataaatatgtgataaacattcctgaatgcctagtgtgtgccctggcgctgtgctctgcatttaatttggatcagcagttctcagccttgtttgtacattacaaccaactggagaggtttttaaactcccagtatccggggcatcagtattcgtctagggcacagtgattctaacacacagtcaaggttgagaaccacttatttaattcatcctgtaaatcctcacaatagaatcctgcaaggtagcttttatcaccacctttgccgatgaaattgaggctcaaagaggtaaattgatttcggcatctgtagccccaacctgtgacctctccttccttccttctcgggctcccttcagggatttcctgatgttacagaaaatggtatgtatgacgctgccctcctggccaccttgacatagctctgctcccaacagggctcttctgagatagcagccagacactacctgggatcaggactgatactaaatgacttctgccaaaatgaggacaactgaggccagtcacttccaaacaggttctgtcaccctgagtcagaataatggcagctacctctcctcctcaccgcccagtcgtttctaagcctggctcgtcgccgttgctgctccgccaagcctttcctcggtgccctctctcttttagaacaaattacttcatctccaggcccttctcagggcagcttctttgcaggggccatagggcgtcggaaaggtctttggtccaggaaagccgcgagccacagatccaagaggaaaaagccgttcccggcccgggccttgcccaaggcacgagagtaaatgcaccttccgcgtgcctcggcgcacctgggctcacctgtcccctcccgcagtgcctgcagacagggagggagcgcggctgggccagaaggctgatcaccgcctgccccctgctggccagtgtcagtattgagcccgctgccgctcgaccagaacgtcccagggatggaatgaaggtgcgggcatttatggagcgcctgctgtttgtcaggcgaggtactgataagcgctggagtgtaaggatgtacgtgacctgctctcagagttcaaatttaaatgaagagatatacattaatcaagtagtcattcaagcaaatatgaaattacaactgtgggctatgcgaacagatgacgcgaggggcctgtccagtctgggagatacgggtgggttcaggaaaagctgcccccaggaggggacgtttgagcgccaggagccgcgcaaagtcatttcatgtcatctctaaaatcctgcaaggcggctttcccccttgacaaaacaggaaatgggatcaaattgaggaaggaattcacccaagatcacacagcaagctggaagcaaatctgggaggagctaggtccgccccgttccgaaatccacacttttctggaggtggggcaggcggtggcacagggacttggggcggggtctggtgggcggggcatgaagtctggccccgcccccgcctccgaggccaaagggcgccctgggcggggatcggagcaggggcggggtctttccagggagtggagcctgggcagattggggcctgtggaggccgcactaggatcgtagaaggagtggagccgtgctctcaccctgtcttagaggacccggaagcgccaagtgactgagggccgaagacactcacctgtggagcctgtgcacgtaggtagaggcggcggctctgagtccaggagctccagtgggcagctccccaggtagggcccaactcggggggagaagagatgaccctctcccctcccgccct

SEQ ID NO: 26652 - DNA, 2300 bp, Homo sapien
tggcatgatctcggctcattgcaacctccacctccagggttcaagtgattctcttgcctcagcctcccaggtagctgggattacaggcgcccgccaccacgcccggctaatttttttatttttagtagagatggggtttcaccatattggccaggctggtctcaaactcctgacctcaggtgatccccccacctcggcctcccaaagtgctgggattacaggcatgagccatcgcgcccagccctgtctcaaatttaaaaacacaaccagaaaggcagggcgcggtggctcacgcctgtaatcctagcactttgggaggccgaggcggacggatcacgagatcaggagatcgagaccatcctggctaacacggtgaaaccacgtctctactaaaaaaaaaaaaaaaatacaaaaaaattagctgggcattatggcgggcgcctgtagtcccagccactcgggaggctgaggcaggagaatggcgtgaacccgggaggcagagcttgcagtgagccgagatcgcgccactgcactccagcctgggcgacagagcgagactctggctcaaaaaacaaaaacagaaagaagaggaaaggacacagatcacagtcacagagaaaaaaaggtcacctgaagagggatatgcggagggaaagtagaggctggagtgatgctgctacaaagaatccttgaccaaagaacgccagagattgccaggaaccaccagtggctggaagaggcaaggaaggcttctccccagagccactggagggggcattgccctgctggcccatggattttggagttagcctccagaaatgtgcaagaatacatttctgtgtgttaagccactgagtctgtggctgttaccacagccctgagaaactcacacaacctacacctggaagctggattccttcagcttctgtgttctgattccaaagcctgggggaaagcaggatgggcctagctggggtcagatgtccgccccacagaacccaaaagccactaaagctaagggcaggaaatagatgtgggtttcggagctgccccttccagtatccttgataaccatcaccctatccaaaaggcattaattcatatctcaaggtcaatttggagggaggtctctccaagcaagccccagagttctgtacacctatcagctcctggggcaaagacacagacggctgtagccaccggtgtggatgagacaaggccaggaaagtaccgctctgatgacagaatcagaaggactctgtgcaggttagagagttagcaaggtgatactgaatgaggacgacgataaaacccaactcttgggttccaagagtcaacttcacaagcaaaatgtggacgacgcctggcttcaccgcggcagtgccttgtgagaaagacctgaggattttctctgaccagccggcttagagcttcagttgcacgaaaagcacagcacttttggctgggctggggcggtgataggcctttcgggctcggtgcaacccatacctaagacagagaggcaacacaggcgcctccagagaaccagaggtgcaaccgggccaccaggctacgtggcagaggttgcggggtaagggggaggtgggatgcctggggagaggtcagcggagttatcaaactaaggttcccgggcaatgatggggccaggaggcagagcgagcaaacggggatgatctggggtctattccaaagaggtggcgggggaggtggtgctgctgtgcccccagtcacggccatctcggctccagagccctggagagcagttcccgggttcacacggactctgaagacaagcgtatcctgagggtggacgactcctggaaagtccacgcccaggctggcctcaggggtccgcttctctgcgtctcgccccgtgcccgcaggcgacagagtggctggtgtgctcggggggcctcccagggcgcggcggcctgcgcccctgccacctggggctgctccctttggaacctcctgttcgcaggcggctcctcggccgtccgctcggagctggggcgaggggctggcggcggcgagcggcgcggccccaagtttatgctaatccgcaaagagcccgcctcccgcctcccctccgcggccccagccgctagcagcgccggccactccgcgggacgcagccgccgcgaagcgccaggcggccgggccagcgagctcgggggccgaaggggaccccgggaccctcggggcgggacccgggccgaccagcggcgggggcggcgcggcgctgcaggcggacacccggcggggggcaccgcgcgggg

SEQ ID NO: 26653 - DNA, 2300 bp, Homo sapien
gccctggatccaaaagttcctatggaggaagcagtttcctcccagggtgtgtgtgtgtgtgtgtgtgtgtgtgtgcacgcacgtgtgtgctgggtttcagggagttgggctgtcagggagtgcaagccctctcccagcctcctgggtttagcctggcattgctcaatctgcatcctttgtgtacatctctaagtgtctatgcatgtgtgtgtacgtggtggtgtgtgattgtatgtatgagcatgtttgtgcatgtccctgcagctgcaggtgcgactgcctagtatgtacctgtgcatatttctgtacacatcagcacatgcttatacacagtcgcaagcctacgtatctgtgtaacttgtgtctgtgcccacatgcgtttgggggtgtatgcatatgtttcatgtgtgtgtctacatgagacacctggtaccaggtccctaactctgctgcctctggctgtgcctccccacaccctctgctgctgtgtgggggctctgcagtatgcaagtcctcctaaaatagccccctttcttcttcccaacccccggccccgcctctgcatttgtctgggaacaacctggcctctttcagctctgggaggaagacaggtttgtacagcttggcttggcccatacactttccaaaactctctggctcccagccaaactctttataaaaaggctcatggggaatagcctaacaggaaggtgggaactctgcctggggggctcaggaaccctgctccaagccccaagattaaatgggagcatcagtcagctgaacttcagccagagacggccctgcagcctgaaggtgaacttggtcaatggacccttcacccccaaagatggggacacagcatctcaaggtctcatgtccagggtggcagagctcggaggggtcccagggctcaggcagctcaactccccatgggcacactggagggagaggcccagagtgatgccccagaccaggcaggagctgagccacttcctagcatcctgcagccccaggccctggtgaccctgccatggataaccctgggtctgcctcttctgcagggaggtgggtgccactgccagacttcagagtagcaggctctgagcctggctggcccttttgctcaaggcctcctgagtccatatcacaaagtcagtgtttgagcacagggttggtttacccagcacttgccttacttggggtgcaggggacctcaagctgtttctcctagtcccactgaggcacaagagaggggctttctgtactgctatctcccctactggggctcaacccagtcttttttttttctttgagactgagtctcactctattgcccaggctggagtgcagtggtgcaatcttggctcactggaacctccgcctcccgcgttcaagtgattctcctgcctcagcctcctgagtagctgggattacaggcacgcaccaccatgcctggctaatttttgtatttttagtggagacggggtttcaccatgttggccaggctggtcccgaactcctaatctcaagcgatccacccaactcggcctcccaaagtgttggaatcacaggtgtgtgccaccgtacctggcctccactgggtcttaagggtgccctagggtgaagatgggagggcagtccaatgggtaagaccctatctcaagtggatgctcagggcacaggtggcacccccctcactggtctgtcacaggagacacaggggctgctgctggagatgccacagccgtgtgggaggggcaggctggtggggcaactgaggaagaggatcccagaagcctgggttcagacatggctccagggggctcctgggtgctggaaacagacgagacaccctcaaagaggctggttccttcagtccatccccactgaccgctgccaaccacccctttcctcttcccttcagaaacctttttccaggcgggagggatggtagctgggaagctttgctcttatctggcatgtgcccaggccaggcaccgaaactcaaaagccaagcagagaatctttttttgtctgcttccgattgtcgtaccttgtccctgagagacactcatggaccagcccagcttgaaaaggagccagagaacacaagaaacaaccagtaactccaaagaaaggtcagggtttcaagaacattgtgcccccccggttgactgtgcagagcaagtacctctttggatggaggttttatttctttgaactcttgttccttacagaggctgggagtggttgggcccacagggtgggggtggtggactccttgtccttgggcctgt

SEQ ID NO: 26654 - DNA, 2300 bp, Homo sapien
ccaaaccattcccagctttgaattgctttttttaacccttttagaaatagttctgaacaagaaactcagaaatgtttaatacctttaaaagatattagttatgtagcatttgaacattaaagatacatgcgcttaactaattcgactgtaagatgaaggtgtcaaattgtcctcttatttatagtacgatggctttaatttgtattgtccagactatgatttttattttaagccttataaagtgagtatgtttgagtgtgctcttttcttatcgactccttctggtgaaaagcttaacccttgatctcaaaggattttgtgaatttaggtaactcgatccttattcatcagagctttatccttttttctaggaccgcgtgataattaaccgcctagataatatctgccacgtggtgttaaaggggaagtggccctctagccagcagtatgagccctcaggcacactgcccaccccggtattaaccagcagtgctggttctcgaaccagcctctcagagccggaagcagcagaacacagcttcagcaacggcgcagcattggcggcccagatccacaaggtgagccggcaagaatggagtgaccacaaaacaaagaatggtgggcgtgttccacgtctctgttgagttcattcattcagcaagtatttactgagtggataggggtttttttttgccaagccattagtgttgattggggaatttagactttatcctgtatgtagtgaagagctagtaaaagtattggagcaggagaaggcatgatgaaagcagaggtttgcagctcacttggagtagaatacagcttggctaggggggccaagcaggaaactgataaagagaggttctagaccccggttgtttcagagtggatacaaagataggggggaactggcaaagatgaccccatgactaataaatatataaggaaagggaagcatgaatggaacagtgtggttgacccttagagaactgagctctaacaatggaagctgatagaaattagggaaatcaaggcaggagtgagcgttttggtgggggtgatgagttttgagatacattattaactagctggttctcatgctcaactgcacattggaatcagctggggaccgtgacaagctaacgatgctgacttattcagtctggagtgtgtcctgggtactgagttgttttaaacttcccaggtgattctgatgcacaggtgaggttgagcatttctgagttatcatcttgcaacaccaaatgtagttcacggactagcatagcagctttagcagcacctggaaacctgttaaaaaagcagattctcaggctctacctcagacccactgaagtagaatctgcattttaacaagctgttcaggtttgaggaggcctgagttagaagaactcctaaaaagatgattggaaacaatatgaggcctagggaaatcaggcctggagaaagagctagcattcagccacttgtgtgacattcagacctctcttgctgtttgtgtgttcacaggagagcttcttagctccagtattcacaaaggatgaacaaaagcacaggcgtccctatgagtttgaggtggagagggatgcaaaggctcggggcctggagcagttctctgccacccacgggcacacccctatcatcctcaatggctggcatggggagtcagctatggacctctcctgctcatcagaggggtccccaggagccacatcccctttcccagtgagcgccagcacccctaagattggggctatcagttcacttcagggagcccttggcatggacttgtctgggattctgcaagctggcctgatccatcctgtgactggacagattgtcaatggaagcctcagaagagatgatgcagccacgaggaggcggagagggaggcggaaacatgttgaaggagggatggacctcatctttttgaaggagcagacacttcaggcgggaatcttggtgggtattgaggtcattagattaaaaacatttacctttctacactgagaaacaaacccttcttcctcagacgcaaaataatttgtggatcttttatctctatttcggttgtcctgctttattttctctcattataagatgccctccatcttctgtagaactagatagttactaactcattaatggcgcttaatctgcttacagcctggagaaatgagccaggaggtcttgccatttcaaataggaacaaccccgctcctccagggtttcagaagagccactgttgacggcacggcagagcaagatggcagggttgagtg

SEQ ID NO: 26655 - DNA, 2300 bp, Homo sapien
ctgtttgcaaaataaagcatgttcatcattgtctaaaatgtgcttttgtaagtaactcttctaaatcactctctgtaaatcactttatatttcttcaggaagcaatctcgcagcacacaacttgtttatgcagagtctaccccttttaaatttttgaacagccgtttctgacttgaaacgtgatttcttttgcactttcatcttcccttattttgttttaccatcagagttaatcttaccggtatcatgttttagctccaggttaactcaggtactttgactttgaatccctcagtctgtcattgtctcactgggagggggaacaagtcaccttgctggtgcagtcagttgcataaagatctgctgtccaggcctgtgcttttaggggaagaacagacaaattgtagcaaagaacaccatcagacttaaagtgcccctgatgtgacagattccatgatagagtagatgtcacctataacattagttctttacatactgctacacccaagcatgtatgctgctattgttacttaaaaggtataggaggaattgttttccagatcatctctacttcttactccattctctcagcgtctaagtttccttgtaatatatcactcatacctccgaacataatttaaaatactcttcaggtaattactgtgcatgtggtgtgtgtattagagaaagaatgacagagagacatgttttctccatcctagagaataggtactcttttatacctttctccctttttatcttctgagattgccactagattctcagtaattgcttgtgaattaaaatcatatcccttattccctttcagtactattataaactctccattttcaggggtcgatcataatctttcttttagtctactaccacagtactatgggtaaatgttcaagaaattagagtgaaggttggaataccccagtaatcgttaacttgggattgaggcaggtaactaggtctcatttccctggacaggtaaagaaactgcagtctatcctaaaaccaatgatgcttcggcggctgaaagatgatgtggaaaagaaccttgctcccaaacaagagacgatcattgaggtggaactgaccaatatccagaaaaagtactaccgtgccatcctcgagaagaacttttccttcctgaccaagggggcaaatcagcacaacatgcccaatctcatcaacaccatgatggagctgaggaagtgctgtaaccatccctacctgatcaatggtgagtcaggggcactaggaagtaactcaggactgccatgacctctgcgagaagctaatgataatcaaataactcatgtattgaattttcattatatgctaggatgtacgcattctcacctttttacagagtataaaactgagattcagagagcttgatgaatttgcctaagtggtatagctactaaggaccaagagccaaggtttgaacttaacttctgccaacaagctgcctcacagcatgtactctgccgggcagaagatggatatcactcaccagtttgctgccctttatttgttcaaagtctggcccacactttctacttggggacagggaaatgtgttacttagttgaatcagtgaaagtgctgcaatgagattaaaactctctgtagacaaattaacagttaaccaaactagttagagaaaatgttgggaggatttttttttactatgaaacttttggagaaattttaaaatcaaaatgtggcttggattatcttacagtctttgtgatgtcaagaggtatgaaagtccttcttgtctgggaaggtttctttacttgggtgagtcagcttaggacttggtatctcagatcctctctctacttggtgagacttcccaggagagtggagcacccgcattctctcctgctgccactgcagagccctctgctgaaggcacagaccaaagagtgcacccagcatctcctcactggactgctggtctaggacctaagaattcacttcatttttcccaggatctgtaaagcagagtacaacctttatccttatattctgtccgaggaatagttttgttccattccttttcaggagcagaggagaaaattctagaagatttccgaaaaacccacagccctgatgcccctgactttcagctgcaggccatgattcaggcagcaggaaagcttgtgttgattgataaactactccctaagctgattgcaggtggccacaaagtactcatcttctcccagatggtgcgctgcctcgacatcctagaagattacctcatccagagaaggtgag

SEQ ID NO: 26656 - DNA, 2300 bp, Homo sapien
ttgtgtaccacggcagccagatcagcaggcagatgatccagcagtatgaaatggtgtacagagacgcccaggtgagcctcacgtgagatcagagacccagggactgcctaagctcagaacagcctttctgtcacttatcttcagaagttccagtgccctgcatcttgtattaatgtggaatgactttgtaatatgtttgtcaaggctgactcctgctctccctggtagctcgttttaatttatgatacaacacaggattgtagggcatgctgtctaaactctgagatataccttttttaggacactgaaagtttgacttacttattggtttatgaagttacttttatatgcagaagattttatctgaattgttatgtgttcagtgaagaaagtgagcaaaagaattactatacagagaatggattcccagccagggagtttggagaggaggttaacagatttgacagagaaggataaagagaaaataggtttcaaatcattagaaacccaacagcaacattttctctttaagtttttaagtgctgtcacttagctgaatatagttgtgtgtttgtcctgcacattggtttttataattaaggtaaaaattaaacgatttcaatcagaggaaagccagtggtctctccagaggtttcaaaaacagcagagacacttggaagacatttaagaagtgctctaacatgatgcagctctgctcttgaaatgtgatggcaacaccaagacagtctgaaaaacaaagctgtgtcctgcctagtagcgcttgtcttaggtgcatcagaatcattaccttcaatctgtgctagaactcaaattataaggtgaaattaagtctgaaaaatagcagagagtttcctttgggcattcaaactatgcatggtttagatggactcctggctggggacttgtgaacaacacctatctgatttccttatcatgacagctaataaataaaaatgctcccttgctgtgccttccatattgcccatccttctcacctttgtgagggcagatgttgtctcgcttctgtttcattgatggtgtgaggccttctggctaactagctcgttaattcttatattctcttttctcacatgaggaaaagcagtgcttgtcttctcacctaggccccagcatctgtagtgctgcctcctgtagtccagcagatattagcagaattctatagccatggtgtaaagctttgactttggttgtgtcatcctcagggaaaccccctttcaggagtcttcaagttccacgtcgtcatcacaacatttgaaatgatcctagcagactgcccagagttgaagaagattcactggagctgtgtgataattgatgaagcccacagactgaagaataggaactgcaaacttctggagggtctaaagcttatggccctggtgagagttagcatctctttacataaacacaggttccttttgttcagcttggaggaaacactctttagccattctgcatgtaacttatttctgcctagtcgttttacattagattttcttttttggtctctataactgcaatagtataggaattaagattttttggttacaaactgggtcaacaatttgacctttgccacagattgatttccatagacttaggaggactcttaaataccatgaaatatatgacttggaaatgtaaggtgttttggctggtttccaggcccctaaatgaactggtaccaaagatgatgcccttttaacattactgccttggcacagtgcccagtatctggtggggaggcactcaataatatttagtgaatgagtgaatagttgctttaattaacatgaacgtgctgctggaatcagtgatgtgaaaggaaggttgattcgtttattgactgtacccctatgatggcatattatcttttcattaaagcagatcagaattgccccaaattgagcactcaatgccctggcttaattttccccacgaaaatgcactattttgatggctcaagcactgtccatcatgtatgtttaatttgcgcaggaacataaagtgcttctcactggaacacccttgcagaactctgtggaggagctcttcagtttgttaaattttctggagccatcacagtttccttcagagaccgctttcttggaggaatttggagatctgaaaacagaggagcaggtaattagggacccaaagaattgaggagacagtgtgatcgttatcttcatcaagaaaagagcaggatgctatggggccaggatttagcaagttgtcacgttcctggtaaaatgagc

SEQ ID NO: 26657 - DNA, 2300 bp, Homo sapien
cctgtagtcccagctacttgggaggctgaggtgggagaatggcatgaaccgagaaggcagagcttgcagtgagccgagatcgcaccactgcactccagcctgggcgacagagcgagactccgtctcaaaaacaaaacaaaaaaaacaacaactctgctcccaaactctttcaagacatgagagccaagactcccatgggcactgttgagagctttggaacctgtgattctggtgtttgagctggagaggttgtggctaccagctgcctggtcctacctcagcttcagcttcagctcctgaagcagctggttcagaaggtcaagcatgctgtccccaagaggcagcagcaggcgagtagccctcagtatactcactcaccagcagcttggcaaaattggagatcctcaggatctatgcgtaactctctatctcaccctcaactggattgtaagctccttgagggcaaagatattatttgtcttgtttaatgctgcattccttgtgtctagaacaatacctggaacatagttggtgcctaataaatatctgtttaagggaggaagaaagacaagaaagaaagaccataagacatcttggccagccttgagtcaaatgacagaaatgcacacagatgagagagataggcagcagggggctgctgcctctgttttcaagctggagaaatctcttgtgtctgccaagaagtgaagagtgttactcagaagagagttagggccacaggctgaaagccatcagaaaactgggatttcaaagaagctaaaaatattctctctctggagttagtaagcctctgctaaatcattatcatggcccctgacacagtcaaaatgtgcttatcctaaatgtatcccacaaactgctcttagaatcatcagactcagatcatttctgctttgaggtagaatgagcctctacagtcagaatccaatcagttttttagtgggtgcttagaaaacacgatgggcaagcagggcgcgaggagggctggtgactgccaaggttagggtgggagggggcagtaatgagacgccatacagagtattcagccaggcagggcaaactctccatacctcctttcataatttaggaatttcctaattcctaaaccctggtctaatttcccttcttcttccatctattttctttacagcatttatcactacctaccccttgtatttagtctttcgcctattccatgaaagcaagggctttgtcttgttgaccgcaatatcccgttttatatcaatgtctggaatttagtgggcactcaaagattacctgctaacgaatgaattcgagagtgtaacaattagttgaatctctgccaaacactgggccctgtccttgaggatgctacaaggatggtaggggcgacaggcccgaaaataaatgcaccatagctcgacacctgatttcacggagatctatccaaggcgctgcagggtccccggggctggaaaactcccgggtgcgctgggccttgggaagaagcccgttgggagccaggagtaccagggagccgggctgagcggcagaagacgcgggtggaggctgctccgttcgcttggccactcaggatcttcttttcctgacctgcgggtccctcgcttctccttgcatctgcccgcgtggcctcggcccctgcggaacccctgtgtcgcgggaccccagccacatcctcccccacccccggagacgccagccccgggtcttccagatcactagccagctacctgagagacctccacctgggcgctgaacccccgccggcgcccgagcgcgccaggtccccgccccctgcctgcgatctgcagcgtgcaggaccccgccccgccccctcggcccgcgggaccccggccccgccccgcccccgtggccctgccgctagtcccgggggggcggggccgagcgcagcggcgtctccaaggcggggggcacgaggcagggggcggggcggtctcagcgccggccaatcaaggccgcgatcacatccatgcaaatacgagcacaatggagcgagcccatcactcgcccctgcaagcaagcttgaaatgggcttctgtctgagcggcagccgggatgaccaatgggtctgtgttttggaccggcgaagcccaatggcgcgacagggaaggcgggcccgagatgggttagggtgtccttgcagggtgtctgagctaaacttcaccaaataatagctgtttgtattttggctgctgcaggagccattttaggtaagttcttctcttaactttttattttcctccctggcctcggcg

SEQ ID NO: 26658 - DNA, 2300 bp, Homo sapien
agaggtggtgtctggggagatggaggagtctgactgcagagttagccctggggtgactataggattaacacgaggctctccagtaagggctcattaccccttgatgaaactcaaatgtcatcatgggcactctgttcttacaggatggtagctcttggaatctcagaagttggtagagtggatatctggctttggaaggagaaggtcctttctccttaggggagacagccatgcacatgatccgtagaacacggagggtccagagatctgagaactaaagtttatgctttgcaaactgtaacagtgtgataaatatgaattattatcaacatgattcttgctattattaaatcctcacactgcaatgttaactggttcatgtttcagccccagctcagccactagttggctgtgtgatctcagacaagccaagctccatctctgagatatagctgcttcatttgcaaagtaagaaggtagacgtgcatgatcagctgaagatgcttcctgcctcaatccagtaagtgtgatcaagatgttgaaattagtggttgaacaatcagtaatcagaagctcacctttcaaaaagaaaaaggccagctggaaaatgacataattaaaagaggaaaagaaaactctttctcaagaggctgctctttcacaaacagtcagcatgtctgtgatattccgtgtagcatattccgatgacagggaaacacagtggatgtgctgaaagatgagcagcaagtggtaagtggaggtgtttgaaatagaaaagtctattttaaaagacgactaataaagctggaggaggcggcccacactgaagcagtctgagccaacatcctgttgccaagactccagtccccgctgctgtgcccggggccctgggactgtccttggcacagcatgtgagccagtaggaaggagcagaggctagaagcaggggctgggtttctgtctgaggaaaggggcccatggagaggggccccagggaaggggctgcctgtggctttggcagaggagacccctgcccttcctgtgaccccagccagctccaggcatggtagggggatgggtacatttctctaggcgcatgcaggagctgcaccggtgctgggaagaagcaacaacacaacagttaagagcggagacctagagccagaccgagtttgaatcccggcttgtatcacttaatagctgtgagactgtaaacaagttacttaacctctctgtctgtcatcttttcttgtctataaaacttaataatattagctaatcatagggttgcagcaaggatgtaagttaattttgtaaaggatttgggacagggcaaacagtacactagagattgtgtgtattttatatacatataaaatatcttatgtttattatatataatatagctattatatattacatatgtaatacatatataatatagacattatatatatgtattatatatataatagagggatatatatgtatacatagatgcataaaatgtggcctatgagttgggcccacccgtttcttgggcagaggtccaaggctaatcagtgcccttggtcttcaagtaaataatgaagctctgaaagctaatctatgctaacaccctcaaggtcccggtaacccctctctggtctcctctgagcattaggccagatctgcaggaggagatgctcaggcagccccaagccacagcttaggactgaccagacttctccctgagctccaggcccatatacccaactgcccagtgaatgtttctactgggatatccacagacatctctactcatcatgctcccaaacctactcatgacccaattccttccagtgcagacctttccttgtttccagtctcagtgaatgacaatacctgtggggaaaagcaagagagatcagattgttactgtgtctgtgtagaaagaagtagacataggagactccattttgttctgtactaagaaaaattcttctgccttgagattctgttaatctataaccttacccccaaccctgtgctctctgaaacatgtgctctgtcaactcagagttaaatggattaagggcggtgcaagatgtgctttgttaaacagatgcttgaaggcagcatgctccttaagagtcatcaccactccctaatctcaagtacccagggacacaaaaactgcggaaggccgcagggacctctgcctaggaaagccaggtattgtccaaggtttctccccatgtgatagtctgaaatatggcctcgtgggaagggaaagacctgaccgtcccccagcccgacac

SEQ ID NO: 26659 - DNA, 2300 bp, Homo sapien
ttttcctgcctcagtctcccaagtagctgggattacaggcacctgtcaccacgtccagctaatttttgtacttttagtagagacgtggtttctccatgtttgccaggcaggtctcaaactccttatctcaggtgatccaccctcctcagcctcccaaagggctgggattacaggcttgagccaccatgcccagccttcaattacttttaactaaaccatgcctatttttcttttcaaaactgcttcatgacgacttactttcgtgtagcacagggctaggcacagagtagatgttcaatgctgattaaactttctacgatttatgcgcaacactgttttcatacaataatggactgaggatcaaaaaggactaccttggggccagggttcaagctttccttgaccttggcttaccactagccagatgtgtgactctactcaatcttcatggtcctcaaatttattttaccttgacaatgaaagattcaagtcataaaagtccctaaattttctctaccaagggccacagggattctatgtgtactgaatgactaccctaacagtgagcaatcggcagtagcccagccttctcattcttccctggcttgggctcacagtccttggacacaacctaagtagatatagcatcaaatcctccagtaggtgccaatcagaattagtctttgttggctgggaacggtgactcattcctgtaatcccagcacattgggaggccaaggcaggaggatcacttgaggtcaggagtttgagaccagcctgaccaacatggtgaaaccctgtctctactaaaaattagctgggcacggtggtaagcacttgtaattccagctactcgggaggctgaggcaggagaatcgcttggacctgggaggcagaggttgcagtgagccaggatcatgccactgcactccaacctgggcaacacagcgagactctgtctcaaaaaaaaaaaaattagtctttgtgccctaaccaaacatacagccagtggtcaataaatatctgatgtcttacttaaatgggtagaaaaaatatttgataagttttcccaaagtgaaaggttgagggtggcaacaaagagatgaaaaagaacaagaagtacgatgttgtagagaatactgaatgcacctctaagcaaaggattggaagtatttagagagaagacatcaaacaactgacagaaagcaacaatcaaagacatatgtaaagaaaacttctctgaaatacccaaaggcctgagtttgcagactctgaagagcacagtgggttccaggcaaaatcaatgatgagacttcagcttaagtacatactggcaatatttttgaaatataaaactaaagaaaaattcccataagccttcagaaaaaataacagatatctatcaaaacaaaataaaaagactaaaaactctggttccagactttatcattacagtttcaaacactgggatgtgatgaggaagaggatgatgagaataatcacaaataacaccatggggcagctcccatgtactgcacactttcagacacctctgactgcccttagtgttctacagtattgattcatttagtcttcacagcaactttatgggtgggtagatacccatccaaagtcaaacagttagtcattcaaaatccaggactgaggccaaggcaacatgcccggggtctgcactcctaaccattatgataaagacaatggtacattatgataaagacaatggtatacacaaaaggtcttaagggggatgtttccagtcccaagagttttataggaggttagttgtggtgcattttcaaagccagcagaaaaaatgctctcagtttctgaagaacgcagagaagaaaatgctatgtgcatgccttcccttagagaaaaactgcttgaagatttaccctagtccgccttgtgatgaatcaaaatcatgacctctagcataggggaattgtgatataagaatgatcagtcctatgagatggttagctaccacaagaccctcctttctcagatgtgagtctagaagaggagcatgatcttgtgccagactgaagtgaacacatagcccaatctgtaagaaggggcagaatggcatgcctttcatccacacagcatttagggaatgcttaaaaacaagcaatttcattatgaacggttaactttagcttcggccatcatcctgaaaagggacatcataaattcctatgaaaaagtctctccttcactttgctgaactaaattcaacaaacaaatctcatctacctaagcttaaaacatctaga

SEQ ID NO: 26660 - DNA, 2300 bp, Homo sapien
aatcacatgtgaaccacatcaaaatggtgctgcttcccccgcaacagagttctgccaacattattaacggcagctgggcacaaacaaggaggaaaaacaaaaatagagcaaggctgtagttcattccattgtacgtgatcatcaggcagagaaaagttcgtaaaaatcaaggagaaatttcttcagaaaatacattttccttaagagattgtttcagtgtacctgcggaactgtcagagaaaattagattctccgcaaataacagtcacttgcatttctactttatttctaaagaattcctccactttaacttccatttgttgtgcttttacaacaacttctttaagagaggcatttggtctggtattatctactcatcagactttggaaaggcacctcgggaggtgatatgactctttagcagacgatgagtttattcaagtttgctgtgacatttgtgcaagagcccagcccttcctcttgtagctacttaaagacaccctgagaacaggaactgctccatccctttggtagctgcagtgggttgagtggtggcccccagaagataagtccatctcctaatctcttgaacgtgtgaatctgaccttatttggaaaacgggtcttagcagatgtaattaatttaaggtatttaatttaattatttaaggtattgagatgagatcatcctggtttaccaaggtgggccctaaatccagtaacgagtgtccttataaaaaacagaagaggaaaagacacagacacgtggaaaagaaggccagaccaggtggagatcaaggcagagagggcaatgatgcggccacaaagaacgctgacagccaccagaagttggaagagacaaggaactgattgtcccctagagcctccaaggaagtgcagccctgctgacaccttgatttcagactgtggaccccagaactgtgagagaacaaatttgtgttgttttaagccaccaaatggatggtaatttgttactacagccctacgaaccgaaaacagtgaccaaccccattcaccagccccctaatacctttgtggcatttgtattcccccacccccacatgctgcctccttccctcctaggctgttattcaaaccatcgcagcagcctcctcattgccctcgctgccttcagcctcgccctctccaagcccacccccgctaccagatgtcaggaagaaattccaaaactcaaaccaaaggctgatacgttcttgccctacacttcactcaatgctggcaacccaatgagggacatcaggataaaatcgagaatgcgcggtctgtgcttgtgaattcctaccacctggccccagctagcctcccatcccttatatctgccaagacaaattcccccaaatcccctctcccctggccagaagtgacctccacattcagccccgattatggaaggctgtcacaggctattccttttgctgggtaagcccttccccctttcaagtctatgttcaactgtcatatcctttttgaggacttcctttagctcttccctccacctctactgccacacttaacagagcggagttgtctcctctggcatcccattgtcgatagcccactcctgagttacagcaacaacggccacctgactccactcatctgttgacctgtccatttctccattagcctatgatctcctttagggcaagattcatccttatctgattcatctttgtatcccagatcttagccaggcaaacaacagggatccagtggagagagagatggataggtgggtaggtgaagacacagatgtacggttgaacacacaaactggcaaagttccaaatgaactaataagtggacacctcactgagagacttaaatgcagaagggtgccaggacataagaggaacggctgcgagttatgaaaatgggctccatggggcaaatcaaaagtccactgaaggcaaatgcatcataacaagactggcatttcctggagtttccgggctgatcaatcactttcatatgcatcattcatttactcctcacaatgacctggtgaggtaatgagttactattagctcaatgcacaaggaagctgaggcttgtggacatcagctgaagtctcacagccagcgaatggcaggccagggcaccagggcctaggtctgcctgcctcttccatccaccttctgtcatcacaagccttctgatctccagccctctgatctgccccagtgggaccctcctgcgtctctgctctagttgtagaggacccatcaggcacttagagagaaatgagtggtgttgtga

SEQ ID NO: 26661 - DNA, 2300 bp, Homo sapien
ctccaccagctcagtgactactgaattttttttttcccctcggggccacatgaaccccattcagacctgggggatttgtctgcagtgatatcacatccctaaagcaggagtgcaggggggtgccaaagggcgttgctctgaggatgctgtgagaactgctattttatagttttccagaaagcttgagagaggggatgaattggcaggagcccaagaaagtggcaacaagttacaagtgtgacaccaagctctttagtggcttagaaatctccccacccgggtcatcccctgggatctgccatgactggggtcgcttgtggtggtcttgggtcaggcctctcctcgcacacttcctaactgctcatctgcccaaggcagggttagaatgagtgagtgatggagcaaacagctggaagctcagctctgagcagaagggatctttccattccaattgtccctaagggctatagcattgtggtatccccagagaacagcacagagtaaggcacacaattaaatgcaccataaatattggtagaattattaatctccaaagcagcttgtaaaaggttcaactcccaggccacccccgacaggcctgccaaattccactctccccagcaggggtctgggaagcaggacttggagaaatcttcctggtagttctttgaccaggcaagtgtgggaggcactggctggtccaacaggctagtccaagcacgtcagcttttgaaagtggtcacggtcatggtggtggtggtgggagtcggggtccggagaggggtggaagaatttgcctgggattgtaaattgggcttccatgccagggaactgggccactttacctagtggggactgggaactggggactgacagagtgacgccctgtgttctctgccatgccaacttgggtccagagcctggggctccccacttttggaaaccctgccatgcttgattttcacaattcacttacagtctccccagtccagtccctggtaccccaacaaggatgggggtggggggctgtgctgacacagaagaaggagggctttggccaggtagcaaagtgttcacaaagtgtgaatcccttaagcatttctgggtatccctgcccctggcttttacatctcagacccccagccaagactcaggtaccagctgcctcccaggacagcagagagccaggctgtgggccgtgggctgccagggacagctccaaccctgatctatggttttaggctttcagccccaaccaggtctttgttaagaccgagaagaaaagggaaaaagctacaaggttctgtctccctagaaaaggaaagggaaggctgccagggaaaaattgtagggggtggggggatgcctcatgccccttctgcgcccccttccgcgtggtggtggggacaagagagagatgtgggtgaagaagaaggtggggtgggcggctaattgagggggacgacgattgtggcgcggtcagcgatgcgcccagaagagtgtgagtgggttgtgtgtgtgtgcgcgcgcgcgctcttagatgaaattctcatctcagggtgtgcccgagaccctggccagcagccgcctgccccagctttgggcagacgcccccacccgctttcgcaattcacctggccccttatcttgagttgcgagggctgctccctccctccctcttctcgccaccgaacccccattcacctgttccccaccccgagttcaaacggctgctgcagcttcctcctccccgcaccgcccccgtacctgcgcccccacagggcagacgatgcttggctgcgcggcgcggcgcggggcgaagaggcgaggaccctgcccggcgtgtgggtgcgggggtgatgtgtggacgcgcgtgactgtgccagcggcccgagctggtcggccccggagagggtgcgcgggggagcccgcgtgtgccagccgcgggcgtgtgccaggcgcgggcgtgcgcgtgagggtgtgtgcacggccgaggcggagcgcccgggcgggcggcggcggcggcggcggcggcaacggcggcggcgttaggactcgggggacaccgccccccgccccccgcgtcccgcccccgcccagcctcccgcctcagttcgcgccgcgcctcggcttggaacgcaggagcgccggctccgggagcccgagcggagccagccgcgcgcacagccagcggccgcgccggcgatgcggggccaccccgcgcccgccccagtcccggccccggcccccgcgggaaggggctgagctgcccgccgccgcccggatggcgagcctcgccg

SEQ ID NO: 26662 - DNA, 2300 bp, Homo sapien
gttgcagtgagccgagatggcacaggtgtgagccacagagcctggcctgggctgcgttctttcaggaggctctggggcgaatctgttccctcgtgtcttccagcttccagaggctactggcaccctttggcttatggttccttcctccatcttcaaagccattaacttcggttgtgactttcttacagccaatcactctgaccccaatcccagcctcctttgtcacatctgcttctctgactgtggctctcctgtccccctcttgtaatcacccttatgatcacatggggcccacctggacaatcccggggcatctctgcatctcaagatgctcaacttaatcagatctgcaaagtcccttttgacatacaaggtaacatcttcacaggtttcagggattaggattaggattaggacatagacatctttagggggaacccttattctgcctaccgaggtgaagaggtgaagccggctgggcttctgggttgggtggggacttggagaactttcccgtctagctaaaggattgaaaacacaccaatcagtgctctctgtctagctaaaggtttgtaaacacaccaatcagcactctgtaaaaacggaccaatcaacattctgtaaaatggaccaatcagcaggatgtaggcagggccaaataagggactaaaaactggcggtccagccagcagtggcaacccgctcgggtccccttccacgctgcggaagctttgttctttccttcaggcaggttggagtcttgctttgtcacccaggctggagtgcagtggcatgatcatagctcactgcagcctcgaacacctgggctcaagagatcctcttgcctcagcttcccaaggtgtggggattacagactcgtattttttatttatctaactttaagcacggcctctacctcccccagtcgtgacaaacaacgtttccctctagacttccaaatagctccaggaggacaaaacccccctttttcaacccgaagcttaaggatattgaggttgcaccactcaaaacagagcaggaatacataaatatctaaagagctggtgttatctcagtgatatccctttttttttttttttttttttttagcttcggcggtgacacctactctcctggtcttctccctacctcgctagtcactcctcccagtctcctttcctgcgcttaaatttcagagtaccccaggcgttggcctgggtcttccgctctccacttaaacttactcctttgaggttttcaatctggttctacagctttaaatagcatctccattgataaactcacaaaataaggcactttcaagtcagtggaggaaatgatagtattgggacaaaggactttccatacacgggagaaaaaaaatcgttcgtcgctgtgggagggctgccgggtctcgtccacgctcccttttgagcacctacagtgagcgtaggattgccacggatagcccaatccacaagtgagtcaagctgccagggctccaagaaagacccatggagggagaggggaacgtccggggaggcgaaggctgcgagtgagacccggagaggctgatgtcggcgggtctgcgcgctcgcaacgcgacctccgcccggtcagcaagacctcggcgcgcgatcctcagattctgcgaaacaagacaagcgactgggtccgagaccgcggtccccatcaaaacgagcatcaaccaatcgctgggagaaatccgcagcctcgttttaagccaccaagcagagaccgcggcgacctattatgataacctcgagaaccaatgaaaaacggggattcgctcagcccgcctcccgagcttcaaccccgaagagatcgcgcacagttttataaaaggtacaaattagaaagcagttctgcggctggattagagacattgtgttttcaaagacggtggggagggctagagaaaaatcctagaagctagcaagaccgcactacaccgaaacgtcgcgggcaacggactcgccagtcaccatctagcccagggacgacgcgggacggacgtgccgctgcgcgctgacatcacgctccaggccccgccccaccggccgcccatatagcgaaagcctggcgcgcgcgcgcgccattgtgtggctggactcggccgcccctgtggtgtgaggcgcgtgttcgggctcttgccgtccccgcacccgcaccgcggttactggcttgcggtccgccgttcgacaaccagcccttgggtccccgcccgccacggacatgccgcgcgtctacataggacgcctgagctacaacgtccggga

SEQ ID NO: 26663 - DNA, 2300 bp, Homo sapien
catgcccagctaattttttctctttttggtagagacggggtttcaccatgttgcccaggcttgtctcaaactcctgacctcaagcgatcctcccaccttggcctcccaaagtgctgggattacaggcatgagccactgcacccagcaagaagtgtggttctgccaaggcacagtggctcacgcctgtaattccaacactctgggaggatcctttgagcccaggagtttgagaccagcctgggcaacatagtgagaccccatctctacaaaaaaattaaaaatcagactgatgctgcccacctgtcccatctgctcaggaggctgaggtgggaggatcacttgagcccaggaggttaaggctgcattgagccaatcatgcctctgcactctaacctgggtgacagagcaagaccctgtcttaaaaaaaaaaaaaaaaaaaaaaacatggttcccaaccagcagcatcaaaatcatctccgatgttagatgttacaaatacagtcttcaccccagactctgaatcaaaaactgtggatagagtcaggcacagaaagacaaacttcacatgttctcacatatttgtgggagctaaaaatcaaaacagttgaattcctggaaatagtaaaaggatggttatgagaggctgggaaggggtagtaagggggtgaggggtaggtagggatggttaatgggtccaaaaaagaataaaatatagtatgtgatagcacacagggtgactatagtctgtaatttaattgtacattttaaaataaagactatataactggattgtttgtaacattaaggataaatgcttgagggtatgtctgtgtagtgtgggtaattaaaaagaaaaaataaaaatacaaaaaaatgcttgagaggatgaataccccattttccatgttgcgattgttacacattgcatgtctgtatcaaagtatctcatttactttatgaatatatacacctactatgtacccacaacaattttttttttttttttgagatagagtatcgctctgttggcccagccaactttttttttaaacaaataaattaaaactctgggccgggcacagtggctcactcctataatcccagcactttggtaggccgaggcaggtggatcacctgaggtcaggagttcgagaccagcctgagcaaggtcgtgaaaccccacctctactaaaaatacaaaaattagccgggcatggtgtcgcatgcctgcaatcccaactacttgggaggctgaggcaggagaattccttgaacccaggaggtagaggttgcagtgagccaagatcgtgctccagtatggggaccgagtgatactctgtctcaaataaatatttaaaaaataaaactgggtagagcgcagccataggtgttttttaaagccccttaggtggttctggcacatactaaaacttaagacccactattctagtggttttgtcaaattccaattttaaaaaaaaatttgaataggatgtgcaagtgcaggtttgttacatgcatatattctgtcggtgagtctgggctttcagtgtgcccatcaccacctttatttttgtttcaaaacttcttgggggctgggcatcgtggctcatgcctgtaatcccagcacttttgggaggctgaggtaggcagatgacttgagcccaggaattcaagaccagcctgggcaacatagggagaccctgcttctacaaaaaaatagaaaaattggccaggcatggtggcaggtgcctgtagtcccagctacttgggaggctgaagtggaggatcacctgggccctggaggtggaggctgcagtgagccgagatcacgcctctgcactccagcctgggtgacagagcaagactgtctcaaaaaaaagaaaaaacagaaaactacgtgggggcgagtgcggtgtcccacacctataggaagccaaggtgggaggagttcaaggagttgaaggccaggagttcaagaccagcctgggtaacttagcaagaccccatttgaacgtcttttttgtcataatggcaaccattgattatttttgcctagatacattaaaccatggacttgtggctttaaacatttatttcaatccattgcagctcgtcttatcaatgctacctttttatttttttcttttttgagttagggtctcactctgttacttaggctggaatacagtggcatgatcacggctcactgcagccttaacctcctggggtcaagccatcctcccacctcagcctcccaagtagctgggactacaggcacatgccaccacgcctggcta

SEQ ID NO: 26664 - DNA, 2300 bp, Homo sapien
ctgtgctgtccaatacaatagtcatagctactgtcgctatttatttacttatttcttgtcagagacagggtctcgctatgttgcccaggctagcctcaaactcctgggctcaagccatcctcccgtgtcagtctccagagaacttgggactacaggcatgcaccactgtacctaccttctggtcactatttaaatttaattaaaattaaataaaataaaaaattcagttcctcagtcatagtagcccatttcaagtgctcaatagccacatgtggctagtggctacggtgttggacagtttaagtattggacattctcattatcacagaaaattctactggacagtgctggtaaggcaagtaggacagtggtcagtacattttaggtgctgagtaaatagatattaagtatattctttgtatctctaggtctttttctttatgtctttacctgttgaatgaactctgtgaaatgcttctactgcctttgcgttattaaaacaaaatcacgtactgacttgactgcgtcttcgtacactatgtctctgctcttcagatgcatacatttgttcagcagatgcttgagtgcccaccctgtgcttggggttggagggagtggtggacagggccataaaagaacatgatcaggaaagatcccacctcccaggaagatgaaccctgtatgggtgaaggaaaacctggtacttgaggtctctgaatccccagagggaggagggagtgattccagtggggatagaggtggggtcaagaaaaaggtgagtttggatgtggcctgggctatgtcctggagacaactggccacacagaaccttgacctgagtcatgctccccagagtcagttttgtacatcacagtttacaaagtaccctcacacatgccaccctacccatccttaccatccttacagagactggggaggtgcagggcctggccagaacaggagccagacctgatgctggtctctgaagacaccctactccccacaggactgaggcctttctctgcaggtcacgggtttgaaggtggctagcttctcaaagaagccccatcccttcacatctccattgctgctgtaacaaaggtccccacctgatcaccctgggggctatgtttggcttgtaggcctgccaggatggaggggcatgctgggatggaggggcatgctgaaatggagatgctgaggacactgaaggggccttccacaggggaggtcagcatgcacttggtggccggagacagccccggttctggtcctcacctgcccgcaactgccttcatcattccaggtgagtcaagctagggtaggagtctgggaaggaagagcatctctgtacctgctcaagcaagtgtggatcctggagaggggatgaccgttttcactgtcctccacctgccttccttcacatgcctacacatgcatggccggattgaggtagggccactagactcacctgtgtcgtgtctatttgtatatctgtttacagccagttcggccaccctcggcctgcccagcagtgccctggatgtgtcttgctttccccgggagccaatccatgtgggtgccccggagcaagtggccggctgcgaaccagtttctgccaccgtcctgccgcagcttagcgccgggccggccagctccagcaccagcacagtgcggcttctggaatggacagaggccgcggccccgcccccagggggcggcctgcgggtcagtgtctgtggggattggctaagcctcgtaaaccgcagccatggggcggggcttgcaggcccggaggctggacctgagacggaagtgggggaagctggctcagatgatgggccctaggggtgggctttgagtgagggactctcggggcgtggcttgagttgaagcactcctaggccctggggactatgggggcgtggcttggagtgaggcactctgggactgggcctgtgggtgtctgggggcgtggcttagactggggcaccctgagtgggcctgtgttagtttgggggcgtggcttagagtggggtaccgtgggactgggcctgtgggagcctgggggcgtggcttagagtggggcaccctgggactggaccccgcaggtgcttgggggcgtagcctggagtgagggtttggctggtgtagcttggagtgaggccccctggcgtggagtcttgaggcctgctgagggcgtgagctggcatgaggcgaagagagggccatggcaccgactccgagatgggtcaaggacccgtacgggagtcgcaatcctcagaccctcccgcgctcca

SEQ ID NO: 26665 - DNA, 2300 bp, Homo sapien
ctgcctttccattgtcaatacctgaaataacagtggttactaccactgcttactgagcatctactatgggccaggcactatgccaggttctttacacatactgtgtctaactctcacaagagttctctaacatgtatattgttcttctgtgagaggaggaatgtgagtctcagagggtgatgtcacttgcccaaggtcattcaccttgtaagggggagagctggcattccaactcggatctggcctgactcctcctgctgcatgctgctggtataagagacataaagcacctaacccaaatgtcagttcacttctcactccccttgcactagcgtgcttgctgctgtaacaaaaataccatagactgggtggcttacacaatagaaatttattttccacagttctggaggccagaagtccaagatcaaggtgttggcaggcttgatttcttctgaagcttccctccttggcttgcagatggctgccttcttgctgtgttctcacatggtctttcttctgtgcacaagcattcctggggtcccatgatgtgtccaaagtgtctcttcttgtaaggataccaattgaattggattagggcccatcctaatgacttcattttaacttaatcactctttaaaggccctttttccaaatgcagtcccattcagaggcactgggggttagggcttcagcatatgaattttgcggggacacattttagcccataacatacttcagcgggaggggcatagtggctgagccctcccctaggtggtgaattcatcttacatcttcagccactagtacagggcctgatgcacagcagggacgcctcagttgaatggaatgcatgtcattttaaggctaaaagagaccttgagaaatcacctggtttagtgcaccttggcgagacccaagctgtcccaattcttcaagaacagtctctgtaacctgggcagtaagtaacatagtgataaaaagcatagccctgaagtcagactaccttttacaggctgagagatcttgggtgggtgacactcctctctgagcctcaccttccttatctgtaaaatgctgataataatcgtacccaccgtatgatgtggtgagaggcttaactgagatgttccatgtgaggtgcttagcacagctccctgccagtattattagtctgagtctcttgcctcacttcctcttgctgtcatctcatactgtttcctctttgtgggaacagaagcagtttcttcagcctcagacctgagtgatgagggtcttggccagcacctagaccctcagagtaaggactcctaaggatcaaactgcagtgggcacctcttgtacccatctgtggtacccatggtcaagtccactgcaggaccaagttctgaccaccagagggcacttgcctactgtgttcatcccagaattaggctgtagaattcttgggaagctacatctttccagaggctgagactatgtcacggaactggcaaagaagggctcacccagatccttgaggcacttcaaggatagagcaggggtcattgcccaggtctcacttccacagggcacccctgctcttctagctggcctgtcacccagaagagccactggtcactctgggttttgttccagaggcaacttcttacatactggtgggtagacctccttagtgtaggctctgaggtttgctggtgaacaattccataggaagatctgcccggagaggacagggcttggctgggcttagtctttaggcctaggagtgtcagctactgaaggaactgaggagccatgtctgacctgcaactggatggtctgcagttagataagacactgtaactgctggtaagcactcctggcctgtgctcttccctgtgctctggggaagaaagataaggagaaaagctccctacaaacttgatgttgtctcccaaaccccaccccagggtatgaaacccagatacagggtttcagagagggagtacctgggtgtaccagaggccaaacctgtggccaggtagatgaggtgctagtggtgctagctgtcatgagagatgctgagtgtgccccagacgggccatgagaggagctggctgagcagggagatggggctgtctggggtatgggcaggtattaggatttcgctgatgaacagagagagcagcaggaaggcagtggcacagaagtgtggttggtagggctgaggatggaatcccagaggctttgtgggtgaatggaggtggaaaagccaggctgaaaggctgacactcagggagagagggcaggacaatctgtga

SEQ ID NO: 26666 - DNA, 2300 bp, Homo sapien
tccacactatgaagtgtggtgcagctgcttaaaagatgtatatatgaaaaaaagtgaattactgatggcccattttctggaaaaaaaatggatgcagttatatagattaatacatatagattaagattaatatacatatagattaagacatagacaaaaatctggaaggattgtcacccttttttttttttttttgagatggagtcttgctctgctgcccaggctggagtgcagtggcatgatcttggctcactgaaagctgcatctcccaggttcatgccattctcctgcctcagcctcccgagtagctgggactacaggcactcgccaccacgcctggctaactttttgtatttttagtagagatggggtttcaccatgttagccaggatggtctcgatctcctgacctcgtgatccacccacctcagcctcccaaagtgctgggattacaggcattagccatggcgcccagccggattgtcaccctttagttaacagcagctgcctctggaaatgagattgaagatgggctggagggaaagcttttactttttatttgacattcttctgtaagttggaattatttgatacactttatgcaaccaataccagtatgtggcgtgtttgggggttttttaagcagctctggaagagcagaggagagggagcttggtggcacagcagcagcagcagcaggagctctggaaagggcaggaccttgtgcgctgccctgatttgctctgtgcacttgggccagctacctcccctatctggaccagggccagacacatgctgctatgtgtgttggtggaggtggggtgtgtggccatgcagggctcctccggagcacagcagagcagccggtgtttaaggcaccagaattaccagaaagttgttgacattttaatggaaaggcaatggaggaagcagtgtgaaagtcagcctgctcaggaggggtcactgggcagagctttccttacctgtccaggggtccaggccctgcctgtgccctgagttagaacccagggccggccaggcgcggtggctcacgcctgtaatcccagcactttgggaggccgaggcgggcagatcacaaggtcaggagatcgataccgtcctggctaatgcagtgaaaccccatctctactaaaaatacaaaaattagctgggcgtggtggtgggcgcctgtagtcccagctactcgggaggttgaggccggagaatggcgtgaacctgggaggcggagcttgcagtgagctgagatcacgccactgcactccagcctgggtgacagagcgagactctgtctcaaagaaaaaaaaaaaagaacccagggcctgggaagctttgggtcaacccccgagaaagccttccctgttctccagggtgaactcatctctggttcctgagcctcaaatctctgaagggcagagtggggcataggtttcaactcagctgtgattctcccagaacggtgccagggcagtgcttggtcgggtaggctgtgggtggcagtcttcggcttaacacaagaaattgccagaggctggctcagggggaaatgagctgcccagtcctggaagtttccatgaaatgactgaacataggggctggtggcccccattagggaaggggtggaggagggtgttgtgtgagaccaacctttcagttgctggttcactaggttccaagcgaaagggaagatgactcagcggagggaatcagggaaggctgtgtaggagtcagcacttaagctggaccttgagagagtgcggcagttccagtgttgaaagggacttcagaaaccgtccctccagcaggacacaccatccgtcaccaattcacatgaggctcagggagctgaagtcagttgcccatggtcacataacaagttgtgctttaaaaaattcagagagtcccccaggcagggcccatccaggagccagtgtgtgcagccagcttggtaattcaggtccagtggttaattagtaactggaaggccccgaagccagcttccagcaggcagggctgggaggttgaacttgagccggtttgggagccaggagcgagtgggtgacaggtcattcctgactgggaaggttgcttgacaagtcaggattgtgcctccagtcagaaggaccatgaagagagagaagagggcagagccgtgcatggggctgctccccaggacctgagcaggaacctggagttttcaggtgagaggctcacctgtgagcaggatacctgcctgctcgcctattggtctccagattgactagttacctagctaacatcttt

SEQ ID NO: 26667 - DNA, 2300 bp, Homo sapien
gtaatcccagctactcgggaggctgaggcaggagaatcgcttgaaccagaaagcggagcttgcagttagccaagattgtgccattgcactccagcctaggcaacagagtgagactctttcttaaaaaataaataaataaataaagattgagatgcctctagacatctgactagtgaattgtcaaggaagcagttaaatatttaaatccagagttcaggagagaatcagaactaggctgggcgcagtggctcacgcctgtaatcccaacactttgggaggccgaggcaggcagatcacttgaggtcaggagttcgagaccagcctggccaacatggcgaaaccccatctctacttaaaaaaatacaaaaattagccgggtatggtggcgggcacctgtagtcccgggtactcaggaggctgaggtgggagtatcacttgaacctgggaggcagaggttgcaatgagttgagatagcaccactgcactccagcctgggtgacagagcaagactctgtctcaaaaaaaaaaaaaagaaagaaagaaaaaaaaagatttgggaactgacaagtatagttggttaaaccactaaaatggtagtgatcaactaaagaacaagtacgtgtagacagaagcccaaagactaagccctgggataggcctgtgtttaaggataaaaagaggaggaaaatccagcacaagagatggaggaagagcagtcagtgagctagaaggaaaaccaagagttcctaaagccaaatggggaacatgagcacaccaaattcttcagagaagttgaataagatgaggatgaggaactcatcactggctttggcacatagaggtcactggtccacggtttcattgaagtgttgggatgagagcccatttggaacgggctcaaaagagaacaggaagaggactggagacaaggagtccagacaactctttcaaagagtttagctgaaaaggggtacaaagaaatgggaccatatctggacacggtatatggtcaagagagggagctcttgcagctggcaagtgttctgaagtgctctgtggtgggacacttaggttactattagcacaattattttgctgttataaatagtgctgctgaatgaaggccacatcaggatcttgtttttgaaaataaatgtccttgttctgggtatgtgttttgtcaacatgacatcctgctgatcatgaattggttccacatttctattttgttcaagatggaaggctttgatactgtgcactcaggttttctctggtcaacacttccagatcctccgcatttcagaacccacagagaacccctgaggcccctgggctcagttccctccctgaccaactttctgggccctagccccatgtgtccctcccctgtagtatactgtagccacacagaaagtttgagaagggcaggggctgtgggcccatcaactcctttattcttgagaacatctgcctacccctcgggatcctggggagaggaagggaccctgtgagaacctaatgaccgccccaggcagcaaggccttcatgagccagggtgctctctgggaccgtttcttacgcagcaggagagtcgtgggccaaccaggcctgccctgaggactgggccagagcccttgaggggcccgcagggaaaggccaaaaggaccaagtgctcattaaagaccaaggcaggctggactgagctagacacccaggctccaggttccttcctctgaaacatctgcaggtttttgggaggcgaagggctctcagctgccatggctgatgtctggggactttttcttcagctccagatggtctacacagggttcgtatacacaggccccctagccgcacgcatgcgtgcatgcacgcgcgcacacacatacacacacacaccccagagtaaattcactgatatacaccactatgaacacacacaatgacttacctatacacacatattaatagacacccatactgctcttaacacacaccttcagacatccacacagactcacactcacccacatacacacacactgacacagcatattcacatacaaagatacacactgatatgtaccacacagagacacgctgaaacacatccatatgcacaccacacacactgagatacagtgacacacacagtcacagatgcacagacatatgctgatgtaaatgtacaaatgtggtcacactgacacatacatgcaatcatctacgcagactcatagaaaccgacacaaatacctgaaatacacagccacagacagacacacacggaagcactctat

SEQ ID NO: 26668 - DNA, 2300 bp, Homo sapien
agcctgggtgacagagcaagactctgtctcaaaaaaaaaaaaaagaaagaaagaaaaaaaaagatttgggaactgacaagtatagttggttaaaccactaaaatggtagtgatcaactaaagaacaagtacgtgtagacagaagcccaaagactaagccctgggataggcctgtgtttaaggataaaaagaggaggaaaatccagcacaagagatggaggaagagcagtcagtgagctagaaggaaaaccaagagttcctaaagccaaatggggaacatgagcacaccaaattcttcagagaagttgaataagatgaggatgaggaactcatcactggctttggcacatagaggtcactggtccacggtttcattgaagtgttgggatgagagcccatttggaacgggctcaaaagagaacaggaagaggactggagacaaggagtccagacaactctttcaaagagtttagctgaaaaggggtacaaagaaatgggaccatatctggacacggtatatggtcaagagagggagctcttgcagctggcaagtgttctgaagtgctctgtggtgggacacttaggttactattagcacaattattttgctgttataaatagtgctgctgaatgaaggccacatcaggatcttgtttttgaaaataaatgtccttgttctgggtatgtgttttgtcaacatgacatcctgctgatcatgaattggttccacatttctattttgttcaagatggaaggctttgatactgtgcactcaggttttctctggtcaacacttccagatcctccgcatttcagaacccacagagaacccctgaggcccctgggctcagttccctccctgaccaactttctgggccctagccccatgtgtccctcccctgtagtatactgtagccacacagaaagtttgagaagggcaggggctgtgggcccatcaactcctttattcttgagaacatctgcctacccctcgggatcctggggagaggaagggaccctgtgagaacctaatgaccgccccaggcagcaaggccttcatgagccagggtgctctctgggaccgtttcttacgcagcaggagagtcgtgggccaaccaggcctgccctgaggactgggccagagcccttgaggggcccgcagggaaaggccaaaaggaccaagtgctcattaaagaccaaggcaggctggactgagctagacacccaggctccaggttccttcctctgaaacatctgcaggtttttgggaggcgaagggctctcagctgccatggctgatgtctggggactttttcttcagctccagatggtctacacagggttcgtatacacaggccccctagccgcacgcatgcgtgcatgcacgcgcgcacacacatacacacacacaccccagagtaaattcactgatatacaccactatgaacacacacaatgacttacctatacacacatattaatagacacccatactgctcttaacacacaccttcagacatccacacagactcacactcacccacatacacacacactgacacagcatattcacatacaaagatacacactgatatgtaccacacagagacacgctgaaacacatccatatgcacaccacacacactgagatacagtgacacacacagtcacagatgcacagacatatgctgatgtaaatgtacaaatgtggtcacactgacacatacatgcaatcatctacgcagactcatagaaaccgacacaaatacctgaaatacacagccacagacagacacacacggaagcactctatgcacaaaacactcacacagtacacaccatgctgcacataccctgacccaaacagtctaacaagccctgagggtctccagggctgccctggggctattgcccacccctcccaccgtccccgctagggtgagatggtgttccccagggaacagaagtctccagtcccatcttaagctctgccggatcccgcgtgacatcagctagccccctcgcggctgccgggagctgtgagctctgtgctggggccaggccggcaccaggcacagacacttaggcccttgttgggagaacagagagaggctctcttgtccactgcctgtcttcggttccaactgctggttctcctagaggcctctcctcagactcgcaggtatgtgggaccagggaggccgggtcctggccaaagggccactggggtcagcccaggagagggtgtggcagtgttgtgggccgtttgcaggagcacacacgtctggcattggctagggg

SEQ ID NO: 26669 - DNA, 2300 bp, Homo sapien
ccctcccctgtagtatactgtagccacacagaaagtttgagaagggcaggggctgtgggcccatcaactcctttattcttgagaacatctgcctacccctcgggatcctggggagaggaagggaccctgtgagaacctaatgaccgccccaggcagcaaggccttcatgagccagggtgctctctgggaccgtttcttacgcagcaggagagtcgtgggccaaccaggcctgccctgaggactgggccagagcccttgaggggcccgcagggaaaggccaaaaggaccaagtgctcattaaagaccaaggcaggctggactgagctagacacccaggctccaggttccttcctctgaaacatctgcaggtttttgggaggcgaagggctctcagctgccatggctgatgtctggggactttttcttcagctccagatggtctacacagggttcgtatacacaggccccctagccgcacgcatgcgtgcatgcacgcgcgcacacacatacacacacacaccccagagtaaattcactgatatacaccactatgaacacacacaatgacttacctatacacacatattaatagacacccatactgctcttaacacacaccttcagacatccacacagactcacactcacccacatacacacacactgacacagcatattcacatacaaagatacacactgatatgtaccacacagagacacgctgaaacacatccatatgcacaccacacacactgagatacagtgacacacacagtcacagatgcacagacatatgctgatgtaaatgtacaaatgtggtcacactgacacatacatgcaatcatctacgcagactcatagaaaccgacacaaatacctgaaatacacagccacagacagacacacacggaagcactctatgcacaaaacactcacacagtacacaccatgctgcacataccctgacccaaacagtctaacaagccctgagggtctccagggctgccctggggctattgcccacccctcccaccgtccccgctagggtgagatggtgttccccagggaacagaagtctccagtcccatcttaagctctgccggatcccgcgtgacatcagctagccccctcgcggctgccgggagctgtgagctctgtgctggggccaggccggcaccaggcacagacacttaggcccttgttgggagaacagagagaggctctcttgtccactgcctgtcttcggttccaactgctggttctcctagaggcctctcctcagactcgcaggtatgtgggaccagggaggccgggtcctggccaaagggccactggggtcagcccaggagagggtgtggcagtgttgtgggccgtttgcaggagcacacacgtctggcattggctaggggcaggctgcgcttccttagcagttctgcagcttgctcttaaggcttggcagggctgggcctctcagggaagcctgggctgggggatcctctcagttccccttcactttctctgttcccaagaaggccatgaggttggtgcctccaggacccccccttgtaaagataggaaatctctactcagagaggctgggctgcagcccaggccccacagtgggccaagactaaggtcttgagatgcgcggcaactgggctttcaggtgagatctctgctctcagcctttgccaagcaaggatgagactgtggggccccaagcaatctgtggcagggcctgggcaccctggccccgtctcccctgcagggtggaagcaaggaagacactattcctggccacatagatcagctggtcacaccttctgttgtttggccccgaatagatattggccagtcttgggtctctctgtggccccagcccaaggcttccagggcagctgcctttcctgaggcattgggcagaattccttgtggcaaggagatcgtagcacagagcccagctgggactgcgcacagtaattcagggttgccattgttcctctatgggagtccggagagcccagcctgtgcttcacaaggctatgtggccctaggaaggtccttttttaggccacaggccttccatctgtgaaatgggggatgggttcagactttatgccctgaaaagatccttccagccctggccatcttggacttctggagctaccctggctcacaggggtcttgttgccctgggtgtccccagttcttgaaaagaatcagcctgggaggggccacaccctgaccatccccctttatcccttctgagatgtttgttaggaagtctgggtccaggggat

SEQ ID NO: 26670 - DNA, 2300 bp, Homo sapien
gcaatctcagctcactgcaacctctgcctcctgggttcgagtgattctcctgcctcagtctcccaagcagctgggattacaggcggccgccaccacacccggctaattttttgtatttttatttttattttattttttatagagacggggtttcaccatgttggtcaggctggtctcgagctcttgacctcaagtgatccacctgccttggcctcccaaagtgctgggattacaggcgtgggccactgcacccggccaaaactcttactctttctgcaatctctaacagtgggagaaatgctctgggcaggtgctgtagcaaacactgactgcatatcaggcagaaagatcccaagatttgtcccagccttcaaatgggacggcctactctctcttcagtgagaatacttcatttccattattaccctaactgcaaactgtattcacccaattctgcaccaaaatacagcatccccaagaagagaactttttttttttaagagacagagtctcactctgttgcccaggctggggtgcagtggagcgatcatggctcactgcagcccgaactcctgggttccagcgatcttcccacctcagcctcccaagtagctaagactacaggtgtgtgccaccatgcctggctaattttctttttttatttattattactattattattggagagaaaaggtgttactgttacccaggtcccagactcctggcctcaagcagtcctcccaccttggcctcccaaaatgctgggattacaggcagaagccacttcatctgaccaaagagaattctcaaatcaccctgttctccactttctttttgagacaaggtctcactgtgttgcctaggctagagtgcggcggcaccatgacggctcactgcagcctcaacctcctaggatcaatcaatcaatcctcccacctcagtctcccaagcagctgggactacaggcgcgcgccaccacgcccaggtaatttttcctatttttagtagataccgggtttcgccatgttgcctaggctggcctcaaactcctgggctaaagagatccacctgcctcggcctcccaaagtgctgggattacaggagagagccgctgcgcccggcccgtctccacttttaaaatttccagtgacagaaattgtggaaagcaacacgagttgtatgtgttttaatatcctagattcgaagacaaacataaatgtaaataaaaactgtcagagctctctgcaatcttcagtttgggtcttccaggctgctgcagcgttgttcacaaatccacacacctctaaaggcaggcacagagcgctttcctgggtagtcgggtggcctgttggtagttgcaggcttctggtttcccatcttaatggcgatggcagggcaacctgtattggtggtgcttttgcacaagcagttctttctgccgggaacgcccttccccagcctttgccttaatgaataccactctctcttcaaatctctgctcaacaggggcgcctttttgaccagcttagtcgttagactccctaatacagttcatagttttcacatttttgtagaatctattcaagttctaactccccgccatgctcgccggcgctcaagcctagtaccatggcaagcaaagatgcggagttaataaaacagaattatacggtttatcattctcaacactaaacctgcgcacccttttccgttaagtagttcctaatagtccagcacagccttccgcccggccccgccctcgcctggctccactctgctcctgcgctttgggaatcgaagctggggcgttctccaacccccccgcgctggaagccttcactattctcctccctgtgggtggagcgaagtttgggcacttgggtcctaccgttgttattagtctttactcgtaattgatactaaagaacaaaattaaatgggtttatttttggtgaaaagttaattctccttatgtttggatttgcccctcatgcaccaaatggtacagccccacatcagtcaggctgcctacccctgacgcctgcgacggagaggcgccttccgtgctgtcgtcatcacgtcggccggagctagcgctgcgtcctgggccacgcctcccggcgcaccgacgcgcctctccggttactaagcggccttggatacctggccgcgggatgctgggcggcgtcaggtgagcggtggtcgctgggcctcaggtaaagggcgccaacagtggtgggccggctggggcgttggtgcggcctgggagctggcgagggactcgccgcactcttcgaggc

SEQ ID NO: 26671 - DNA, 2300 bp, Homo sapien
gaactaggatgaaacattgatacagctgtgggtttgaatgtcttagtaaaaaacatacatttctatcaaaacttaaaatgcaaatcagagggagaataaattaattacagctgggctcagtggctcatgcctataagcccagcactttgggaggccaaagcaggtggattgctggagctcacgagttcgagaccagcttgggcgacatggtgaaaccccgtctcaaatacaaaaaatcagccaggcgtggtggtacacacctgtagtccaagctacttgggaggctgaggtgggaggatggtttgagcccaggaggcagaagttgcagtgagctgaaatcatgccactgcactccagcctgggtgatagagccaaaccttgtctcaaaaaaaaaaaaaaaaaaaaaaaaggaagaaagaaattacagtataatgtgagaagggcagtaatggctgtctatcctacatgtagggctccagaggatggcttcacagagctatgttgttggtggaattatgggtgatttttttctttaattttctttctataatattgtttgttttttggggttttgttttgttttgttttgttttgagacctaattttgctcttgttgcccaggctggagtgcagtggcacgatcttggctcaccacagcctcagctcactgcaacctctgcctcccgggttcaagcgattctcctgcctcagccttcctgagtagctgggattataggcatgcaccaccacgcccggctaattttgtatttttagtagagatagggtttctccatgttggtcaggctggtctcgaactcccggcctcagatgatccacctgcctcagcctcccaaagtgctgggattacagatgtgagccaccacgtcccccaggctggagtgcaatggcgtgatctcagctcactgcaacctccgcctcccagggttaagcaattctcctacctcagcctcccgagtagctgggattacaggtgcgcaccaccatgcccggctaatttttttgtatttttagtagagacagggtttcaccatgctggccaggctggtctcgaactcctgacctcgtgatccgctcaccttggcctcccaaagtgctgggattacaggcgtgagccttcacgctcggctgttttgttttgttttgtttgagatggagtctgttctgttgcccggggtggagtgcagtggcgcaatctctgttcactgcaacctccatctccccagttgaggtgattctcctgcctcagcctcccgagtagctgggattacaggcctgcatcaccacatctggctaatttttgtatttttagtagagatggggttttgccatgttggccaggctgatcttgaacacctgacctcaagtgatctacctgcttcagccttccaaattgctgggattacaggcatgagccaccacgcccagccaatacaatattgttttagtaaatgctatttttaattacccatatgcttctctatagtcatctttgttgcattcagggaatgataatttgatttcctactgttgcacctgttctttctaatgtaggaatactagatctgaggaataggaaagccagtaccagtccagttttattctgattaggagtgcttttattataaaagcagcacattagagagctctagggtttttcagtgttgaaatcctgtagtcacattactttaggaagaggtgagtgatcttaggaaatgtggaaacatgacagggcatacctgaaacacactaagtctgtactttgggaagggcagaagttaagaattaatctaactactactccaactgtcttaggtactgaagaagacctggaattttatgtcaggaagtgtggtgatattcttggagtaaccagtaaactaccaaaggaccaacaggatgccaaacatatccttgagcacgtcttcttccaagtggtggagttcaagaaattgaaccaggtacagagcctacaaggcacagtgtagtgggagcccctccagtactggtatcttccatggactgtgcttgccatgttttatgacgttgattcagcctgtaaatatttattaagcatctactaggtgaacaaaacagacaataaaccctgtacttatggaacctatatactagctggaggatgtagacaataagcagtaaacataagtgagtcacataggatgctagaaaatggtaagtgctttggtataaaagaagtggaggctgggcgcagtggctcacgcctgtaatcccaacactttgggaggctgaggtaggcagat

SEQ ID NO: 26672 - DNA, 2300 bp, Homo sapien
ccccaggaagtttggctgtggaggctgtgctttcaatgaagtgggcatgtccacattaattactttataaggggagtgggcgggagaaaccctgaattaagtgatgtggaagcttctagcacttaagatgtgagttagtcttccttctgtggtaagtgaagtttgcagcagctggtggctggactgtccccaggtggccagcagcttctggaagggggctctgaggcctgaacaggggctaaaaggctggggtttgatttggtttcttcagcgtcctgtctcagagctcatttatcttcctctcagcactgctcccaggaagtccagtgtgacttgatccttggtacttggtaaatgtcaatctaatatagaaaacctttgctaaatctcaaggaaagacagtctcactgtctgtcgcccaggctggagtgcagtggcgggatgacaagggcttgagcccctcgaactcctgggctcaagcaatcctcctgcctctgcttcccaagtagctgggattacaggcattcaccaccacagccaggtaatttcttaattttttgtaaagacagggtctcactctgatccccaggctggtctcaaacttttggactgaatcagttctcccacctcggcctcccaaactgctaggattactggcatgagccactaaatctgggctaatctctgggagtttaaacccaaggtaaacaattcaatgcaacaaacctttgcctggggcttcttatgtcaggtcttctactgggccctggagatactggtgtgcattgagaggccacctggacctcaggatgctcccagttcaaagggggaaatgcagaagtctacaggcagattgtgggcagtggaccccaaattaaataggaatcagccacgtgggaggggcaggaagtgttcctgccctgggtaatggctcaggcaaaggcaaagaggccgtttcttttggccagggctgggtggtggtctggaagatcagataaatgtgattgtggagtaaggaatttaccctgagggagaggaggatggttttaaattctggaaagagctcacgcctgcaatcccagcactttgggaggacaaagcggcaggatctcttgagcccaggagtttctagaccagtctaggcaacagcaacatagcaagacacccccttctcttaaaaaaaaaaaaaaaagcgcagtggctcactcctgtaattccagcactttgggaggccgaggcgggcggatcacgaggtcaggagacctataccatcctggccaacatggtgaaacctcgtctctactaaaatactaaaaaaaaaaaaaaaaaaaaaaaaaaattgccgggcgtggtggtgtgcgcctgtagttccagctacttgggaggctgaggcgggggagtcgcttgaacccgggaggtggaggttgcagtgagtcaagatcgcgccactgcactccagcctggcgacaaagcgagacaccgtctcaaaaaaaaaaaaaaaaaaaatcagccgggtgtagtggcgagtgcctggtcttagctacccgtgagttgaggtaggaggatcgcttgagcctaggaggtggaggttgcagtgagctatgatcgcgaaactgcactccagcctgggcgacagagcaagaccctgcctctaagaaaaatgaacaacaaaaaataaagtctattaaggagggtctcttggaggcaggagaggaagcagggagaggcacaggtagggtgaggagccgctttagggtgcggctctagggacccagtagtggcttggactagcgtgggggattccgccctggcgctttccctggctggctctcccatgctcgcgcctcgctccccttcctcggtcttcgctatgtgggatactcctgggccgccccggactgacacgtgagccaggcctcggtcacatcccggcccgctccacaactccgaagtagcggccgccgcccctgtcctgcagccggccctggagggtctgggcaggtgccgccccgcaggccccgccccgccccgccccctggctccgcccctcactcaggcccctcccccggcgcccgcgcgccaggactgggcggcgccgacgcgcttggcgggagatagaaaagtgcttcaacccgcgccggcggcgactgcagttcctgcgagcgaggagcgcgggacctgctgacacgctgacgccttcgagcgcggcccggggcccggagcggccggagcagcccgggtcctgaccccggcccggctcccgctccgggctctgccggcgggcgggcgagcgcggcgcg

SEQ ID NO: 26673 - DNA, 2300 bp, Homo sapien
gtgatgtttatcatttcctggtggaagctcgcgcatgactccccacatcctcttccttcttctagaaggaagcaagtgttgctatggaggctccatcagcctggctccattaaccacaaggagcagatccccaatacccctccccaacccagaaacctgctttagacttgaaagtgactcataagccttcgttgttttaagctactgaagttttggcactgtacgttattgcagcctaaccttgcctatcctgactggcacacccagaataaatggtgtagttatgaaagatgcctttttttagaatcctttgtctaatcttttgtctatacctgggttcccattacaatttcttactatgacatcagtgagtgtcatgttgctaaattgtctgcatgtcatatgatagtaacaagacatcccacatgtatgatcagttgcaattatgtaacaatgtagacaaagccaatcacttcaattctcaaaaaaggctgaacaccatagctaggatgtggagagatggaaaaagtgtcatttacaatgacaaaaaaaaaagaaaaagaaaaaaccataaagcatcatagattaatttttttttaacgtgcaaaaaatagaaagaaaactacaaagcctacctgaaaagacaccatcaatagagcttagtaaataccaggaaacacacacacacacatacacacacacacactcacacacacaccttccccaaggtcacatggctggtaagtggcaggaggtagaatttgaatacagtcagcttccttaaccaccaccaagaataggatgggtgagctttttctataatgggccagacagaaaacattagaggtttctaggtcatctggattctgttgcaactactcaaatctagctcaaaagcagccaatggacaatatataaacaaatgggtgtggctgtgcttcaataaaactttatttacaaaagcagatagccatctggatttgaatcatgggcccatagtttgttgacacatgatctagaataacaaatccttgaagatagtcaaggcttttggggggaaaactaataacaagcagagacttgctctatcagatatcagcacataaagctacaaaaattatttggaattgcattatatttatgtatcaatttaggatgactatgtaatttatgtaatttagtttacagagaatattcatttatgattttgagtcttcctattcaggaatatggtatttctctactgtcactcagatcttgagaaacaatttaacagggtggggggtgggaaggagctccaggccaatttttagaagaaatcctacctaacaccagacatgtaaatagaatgtcagaggaccaaaaccactaacaccctgagatatgtgtcaattgcgtccattcagactttggtccagttctgtgagggacaacggcagggtcgacctaagatggggcgttttataggaaatgtttcccatgttaagctgaacaccaaaaggcttcaccttctgcgatatatgaatagatttaaacccttcccccacacccaaggagactaggctgctgtgggcctcagcagagcagaagggtaaagaaagacggccctgagaatcacatccaaaaaccagccctggcaaagcgcaggggctcacacctatcatcccagcactttggggggctgaggcgggtggatcacctgaggtcaggagttcaagaccagcctggccaacatggtgaaacccgtctctactaaaaatacaaaaaattagccgggcatgatggcaggtgcctgtaatcccagctactcgggagcctgaggcaggagaatcacttgaacctgggaggcggagattgcagtgggccaagatcgcaccactgtactccagcctggcaacagagcgagactctgtctcaaataaaacaaaaacaaaaacaaaaaacaaatacgtacagttaaaagacttaagtcacaacatacatccatgagcaattttagatggcagcattcccaaagccatccacccctcccaagcagtgcacaatagcctcttcctgatgacttaggctgcccattgtgaccaccggtgactgcagcttgacatcatagtatatccgtgagtcaagcggctgtgggtttttggctcttgcatctgctatagttctgtctcgggtgccatttgctaactctgttctctgtgtagctgcttttggcagctcctcatctctcttctaatccaccactcacagtcctagagaacagaccacaagttaagaccgtcacctacagaatcccaagg

SEQ ID NO: 26674 - DNA, 2300 bp, Homo sapien
agttatctttcacatccatgtttttgtattttttcaagcagcgtagtttggtgtgtttttttttcaatttttttattgcagtaaaatatacataacataaaatttaccatcttaaccattttagtatattaagtacattaatttaattactcacctaattaagtaattaaataatttggtatatgaagtccatttagcatattaagtacagcgatattaagtatattcatattgctgtgcaaccattaccaccatccacctccggaagtcctttcatcttgcaaaactgaaactcagtactcattaaggaatgacacttccattcccccagctcctgacaaccaccattctactttctgtttttatgaattttgctattctagagacttcatgtaagtggaatcatatagtatttgtctttttgtgtttggtttatttcacttagcttaatgtcctcaagatttatccatattgtagcatgtgtcagaatttctttcctttttaaggctggataatattccatttttgtgtgtgtatgtagatacacacacaccacacacacacatacatatgcacacatacatacggtaccacattttgtttatccactctttcatcaatggacactcgggtttcttctaccttttggctattgtgaataatgctgctgtgaacatgggtgtacaaatacctctttgggacacggctttgaattctgggtatatatccagaagtctaattgctagatcatatgtaattttatgcagaactgccatattgttttctacagtggctgtatcattttacattcctaccaacagtgtacaaaagctctgatttctctgtatccttaccaacacttgttttctctctctctctcttttttctttttttgagacggagtcttgctctgttggccaggctggagtgcaatgacatgatcttggctcactgcaacctctgcctcccaggttcgaagtttcaagtgattctcctgcctcagcttcccgagtagctgggattacaggcacacaccaccatgcctggctaaattttgtatttttagtagagacggggtttcaccatattggccaggctggtcttgaacccctgacctcaggtgaagtgctgggattacaagtgtgagccaccgcacctggcctctctcccctttattaatagtagctatcctaatgggtgtgaggtggtatctcttgttttcaatttgcacttccctaatgattagtgatgttgagcatcttttcataggcttattggccatttgtatatcttctttggacaaatgtctactcaagtcctttgtctgtttttgatttgggttgtgtgtttttgttgcttactgagtagtgtgtttttaaacattactcttaaagtatcacattgtgcatattttttctgcattttctttttcacttaatattctttttaaatttttttcaagacaatgtctcgctctgtcatccaggctggagtgcagtggtgcgatcttggctcactgcaaccttcgcttcctgggttcaagcgattctcctgcctcagcctcccaagtagctgggattataggtgcccgccaccatgccaggctaatatttgtatttttagtagagttgaggtttccccatgctggccaggctggtcttgagctcctgacctcaagggatctgcccgcctcggcctcccaaagtgctgggattacaggtgtgagccaccgcacccagatccacttaatattctttacttaatttattttaactgctgtataatactctactgtgttgcatacttctcttctccaatcttctattattggacatttaggtggtttccaattgttcagtatgacactgcttcagtgaacatcactacttgtttgtgtatatttattttttatacagtcataatattgtttttcagttggttctcttgtgttctctagaaagacaatattatcacaaactgaaaataatacttttgttgctttctttcctgtagttatgattcacatctatttctggtctggtacattgcttagaaatttcagaacagtagtaaacagcagtgggaacagtgactatccttgttttgttcttgacattaatgaagttgcctcctgaatttcactgttaaggatgactttggcatttggtttgaaatgttaatttttatttatcatcttgaggtattatttttcatttgaatttattaaatgaattttatagactaatttaaatattattatagtttttttcttctacaaattgttatagtaatagacttct

SEQ ID NO: 26675 - DNA, 2300 bp, Homo sapien
tccaagagaccgtgactgtgggcagatcctagacccctcttcagagcttcgggctctaggcattcctgcggccctcccctccctatcattaaaaggggtggggtcctgctgccttctccaagtggtttcagctctggatcctttgggggcaacggagcccacccgcctggagctccattactgatgctgcaagtttttgactcagtttccccatatgtgagtgagagtttaagcgcggcaatctccagggggggctgtcaagctgactcagatcagtgagacgaggagggggcgggcatgctaagagcatcctccggcgctggcctgcgtccccccaggtaaggcagcacccatctccaaagtggtcctgtcaccaccttcctcttccccccgcacccacgccgcggggcggggactagcgccgcctcaaatatttagggcaagggagtgtcccacttctggggaggggtgccgttcgggcttctctcctcaccgtgggtggcgaaaggcgggacggaaaagcgccgtctggacaggcgcgcccccctcagggatgcagggccgggcgggggacccggcggcggcccagcccggaggaaggacctccacgccccggcccgggcccccgggcccccggccctaggcagcgcccgaggccggaacaatagcgcgcgcgggcggggcgggggcgggggcggggcgctcctctgggcaccgcccccggcccgccccccgcgctcgcagtcccgctcgcacactggctcccacccgccgcccgcccaggcactgcccgcgggagccgccgccgccgccgccgcgcccgccatggacgtccgcctgtacccctcggcgcccgcggtgggcgcgcggcccggggccgagccggccggcctggcgcacctggactattaccacggcggcaaggtaggcgggggcgggcgggggtccccggcgggcggggccggagtcacctggcagctcgggactcaggcgctcccggggtcacacggggccgcgcacatcagccccgccgacgggcacgggcggctcacatcgatcccctcgcggccacgctcacgccctgagttgttgggatcgcgggcagaagtcatcccgacagccacccgtgcgacgacacagtggcccctcactcgcgtccccctgacagcctcgcagtcattcacaagccgtcacagtgacccacagccacacgcaggcggccaggcactgcttacacggtcccgccgtcccacgcaagtcaccctgacagtcacttatacacaacgacacgcaaccactcacccgcaaacagcctcaccgccacagacgagtcacccacagacgctccgatgccccacacaccgtgacatgcccccacccgctgtcacacccaggcacaacgggggacagtcacacaaagaagtcgcccgacagtcacactctcgcagccacaacgcctcacccaggcgcacgctgtcacacacagccacccccctggacggtgagcctcagacacagatcgtcctgacggccacacagtcacacgcggtcacacccagggacggccacacctcggtcatccacactcgcgcgtcgaggtttaacttctcagcgccgcagcacactaattgggcagtttactaattggccgtcactgcctggcggggcctcggattccgagtaggctgcggccaatcgaggcctgtgtcctcccgggagcggtgagccggcgtccctccaggctggggctgtagtgccggacaccctccctcctccatgtttccaggatctatccccccaccccagccaggtcccagctgcgctgcgccgggcgcattcccagtgatggaggcttgcgtgcctggaaccccgaacccgaggcgtcaggtcccactgccgggtctggcccagcctggatgggttgggtgcctctaagcagtccgcgtccccttcggtcgccggagagggaactttcaaacttagttaggaagccagactgtccgcgcgtccgccagtcggtgcgtcggtcccgggccggctggagccaagcgcgggttttcgtcactcggagcccggattgaacagcgcgcgtgggtttcccgcagccctggcgcagacgcgtgggctccgtggcgatgcggggtgagtgcgcgtccagtggctggatcggcgccccccagggtctctccccaacctcgcaggcttttcgtcaggcccctggtagtggggatgaggcaggagagaggcgtcccggcgcggatcccggggcctcccgggctgggcctccctgagtgcgccct

SEQ ID NO: 26676 - DNA, 2300 bp, Homo sapien
gaattatgacctatgtgaagtagggaggaggcagagggaacaacaaaaaaaaagttttttcagtgaatgaataaataaatgagacttgaaagatttttacctttgtgttttctctctgacaatcaattatacctttcacttatctcttgtttctgatgaacaagtttaacattcaacaagcaacatggcttcttgcaacatcaacaaatgcccatcattttcaaggccgcatagtattccattctatggagagccatgatttatccaatcctctatcgatggactttattgtcattttcatcttcttataaataatgatgcaataaatatccttgtccacacgaatttgagcctagaaagttctttatcatcctaagcttatataaatattcatggacaatttcctcttgcatgcttacagctttgtgtgtgtgtgtgtgtttctaaatctttggtatgtctgaaattttcatccatctttgtatcgcggtgcaaaatgcacctctcttttgccttgagacgagtgtcatgtgccttggatctatgggttgtgtgcactttctatctggtgagcacgcactgtgtgtcaggccccatgctgggagccaggacccagagatgagcaagacagacgatcctgaccatcaagaagctcagagcctagagaagaacaataaacacagaaacaaaagccatcaaacacatgaacagaaacgattggctgcaggagtgtgctatggacaaagtaactcaggtgcaggtgagattagaggagctctctttggggaagaaggagatctttgagcagagctggaaggatgagaagcagtcagttgtgtgaaggtcaggggaagagcattccaggcagagggaacagcatgaaaaaggtacagaggcagggaagcaagacttttttcctttctggagccttttgtaatcccccttccagcctctccctcctcctgcagacacgctgggcaccagccccctttatcacatgacatttgctattcccaggccgttctctctgtcacttactttagtattgttacaagtgttcaggaataggatgattccccagagcgcttcctgcttagtctggatcctctcagctctgtggtgcttcctcagcagcctttgctgctactgaaatgtccaaaaaattaaaattagtttaatagcacctggcatagtacatgacacttaataggtactattatccccattttacaggtgaagaaactgaggctcagggaagttagccattccagcaggcagagctaggattcgaacccagctctgtcttatttcaaagtctgccttcttcatggagccctagtttaactgcatttgtgcgaaagctaatgagagactgctggttaatccttagtgcccggggccagctttatcccaagcccgatcaaggcttgtggtgggtgaccttggcctttggcctgatggcttcagaagagtggaaaggaaccaggggaggttcttatttttttgttttaaattacaaatgtaatacacgcttgtggtaaagaaaaaaaaaatgaaacaagaaagaaaaaagcagccactgaaaatatctcctcctccctagtgtaactgctattaacagcctggtatcttttatagtgcatgttcaaacacatacatatacaccgttattgtttttataaaaatggaaccatgtccttgactttttcttgcaggcagttccaagtcagtacctacacaccttcctcattccatcagatgtatttcagtgtattcaaccagaccctggctttcgacatttagctgtctctaattctctctgtaacaagcaacatccttgggcatgcatccatgcactgagtacaggtatttctgcaggatggatgctcagaagtctaattgctgaatgaaagggcatgcaagtttcacacgttgacaggtgctgccaatttgccttccgaaggctcttccagtgcaacacccctcccaaggcagcgtgtgtgagtggggaaggctcttaagccacaaatgacgtggagccgcgctgtacttaggggctgcctccccttctgctccccgagacctggcgtggagaccgccaccaggagctccgaacacgcaggcccaaattggaataggagatggattttgataaaagaggttaaataacaggtttttccatttcaccttatacgaatgggatggggggtgggggtgctgggcctccagccaatagaggaccaagagttgtcaggagggcttataaagcttgctatttctggcattttttcctctttctc

SEQ ID NO: 26677 - DNA, 2300 bp, Homo sapien
agaactgcctttcagcagcactgctgtgggaaagaaagaccaggactgtggcccaggtgtgtgtgtggggtgagtgagggcagatgtgagctggaggtggctgtgtaccatctgagggaacacaaatttccaaggtgacatctggagctaccgaagggagagggaggggttggggatatatttggggaggtcagcaggacataaatggcagtttaaaaacactagatgtgcagtcatctagagagaataggagaaggtttttggatgagccctggggagaactacatgtcaggatgggggtgaaggatgaagttattttggcagctgtgtatcagcttgtcatacaactcaggtgacctcacacgtgagcacaactttgtagaatcacagtatcacacacatatctttgctttcagagtttttcggagacattaactcatttaaacctcaaaaaaaaaccctaggaggtaagaggcagttattacctctggcagataaggaagctaaggtacagggaggttaagtcagttgcccaaggtcacacagctagtaagggcagaggcaggatctggacccagggagcctggctctggagtttgtgctctgaaccactactccctgctgcctctccacacacataagacttggatggctgctaacataaggcatcttaatcccaggagctcatggacttgtgtacatgcagggcctaagttgccgacaccttgtacacaccactagccttcctccatatggtttcatacggtctcagtgtctcggtttcactgatgcccatcacctcacacactcagcctggagtgctacatattactttgttctttggcactctgatagccttgcacactcagaacctcatacacatccataatgtcaactccgtgagatctcaggcactcaccccactgtgcacacactaccctgcacactcatgatttgtgtgtgtgtgtgtatgtgtgacagggtctcagtctgtagcccaggctggagtgcagtggcacaatcatggctcactgcagcctcgacctcccgggctcaggtgatcctcccacctcagcctctctagtagctgggaccacaggtgcatgccaccacgcctgactaatttttttgtagagagaggtttcaccatgttgcccaggttggtcttgaactcctgagctcaagcgatccatccgcctccaccttcccaagtgctgggattacaggcgtgagccacctgcccccacctcatgatctcatatagtcaaaagacaccgatatgcacgcccacaagtgtcttgtacgcacgatcttgcacaaatacacacacaagcccatgctctccaacatttgcactaccatgcgaactcactagcttatccgttcacgacttgtgaccttgccatgttcccaccaacgtattcctaccatcgtgcaagctcctcctggctcacccactcgtgttattgcacactcgagtagactcaaacactcatagcactgtgcaccctgaccctcagacggccttgcgcctctcggtcccaccccgccttgcccactcccgcccttgccctcccaggccaccgtgcacacgcggggacccgtcgtgccgcctactgacgcgccctctcctcgcccgcagggacgtaccaaggccagttcaccaacggcatgcgccatggctacggagtacgccagagcgtgccctacgggatggccgtggtggtgcgctcgccgctgcgcacgtcgctgtcgtccctgcgcagcgagcacagcaacggcacggtggccccggactctcccgcctcgccggcctccgacggccccgcgctgccctcgcccgccatcccgcgtggcggcttcgcgctcagcctcctggccaatgccgaggcggccgcgcgggcgcccaagggcggcggcctcttccagcggggcgcgctgctgggcaagctgcggcgcgcagagtcgcgcacgtccgtgggtagccagcgcagccgtgtcagcttccttaagagcgacctcagctcgggcgccagcgacgccgcgtccaccgccagcctgggagaggccgccgagggcgccgacgaggccgcacccttcgaggccgatatcgacgccaccaccaccgagacctacatgggcgagtggaagaacgacaaacgctcgggcttcggcgtgagcgaacgctccagtggcctccgctacgagggcgagtggctggacaacctgcgccacggctatggctgcaccacgctgcccgacggccaccgcgaggagggcaagtaccgccacaacgtgct

SEQ ID NO: 26678 - DNA, 2300 bp, Homo sapien
cctcaacttcccatgtagctgggaccacagatgtgtatcaccacacctggctaattaaaaaaaaaaatttttaattgtagaggcggggtctcactgtgttgtccaggctggtctcaaacacctgggctcaagcaatcctccagccttggcctcccaaagtgctgggattacaggtgtgagccactataacaagcacttacagtgtttttaaccagagatgaaaatcagattcatctgaggagcttttaaaagaattcgactgcccaagtcttctcccaggacaatctaattctgtaggtctcgggtggggctctcggatctctttatgtttttaagtctgtaagtgattcttatgtgtagtaaccctgggtagacagctaccctagggagctgctatggatgaacagtggttaaattcccataggtagaacaccctgctaagatgtagcaatggctgcctggcataaacatatgattacggtattgaatctgcagctcaaactcccctagcttccagtttgagatgctcttcccttgacagcagagctagaaagaagtttgtgattctccaaagacctagtgagaagtggcgaaagcagaactccctgggagtagccctgagatgttcttagaagtgaattgtgcaagcaggctgtcagtcagcctggccagggctcacacctaaccacccagaggaaacagtttttatccactacgtgctccctgtcagcttggcaaacagacggtgacagtgagcccaagaggctgggtgcctctacctggtggtgaaacgcagatatagaaggggctcttgaaggtcagcggctgtgaccaaggatggaaccaagtcctaagaacaggtaacccactggaaggaaagcagggaacactttttacccactccccaaacaggaacaagacttccgcagtgacttcacgtggcctaagttatcatggggtttggaaatatgtcagataagttcaaagtcagataattgtctaatgttctctagtaccttctgtgcttagttctctctttctcttctgtccccatcttcacacacacactcacacacacacactcacacatggaaacacacacactcttaccacacacacatacaaacacacacactcttaccacacacactcacacaaacacacacttaccacacacacacaaacacacacactcttaccacacacactcacatacactcacacacactctctcacactctcacagacacacgttcacacacacgcacagacacacacacacacagatcttcctagtcttggtggctcttacctttcccagaattcctctatactcccattaaccttgggcttagctgggatttacaatcattagctctggccacagcttcttgccatggagatttatttgttctttttactggagtttggtgggaacctgagtggctgggaatccacccaggcccttctctcctggccctgccccaagagctttctgaagtctggcctcacaggctcctaggacactagagcaaaagacagctcagaaagggaaattttaaaaaatcatgacccttgagaatttctgagaggacctcattacaacacaaccctgtgttgacaggaaggggactcctttgaccttcagggtctgctgggtctgcggcagggggcagggagggcgccgaggcatcaaggggtggggagaggaagctagcgggacgcccagtctgtgtctcaggcagagaggagggcaggctcctctcccttctctttgcccttcaggagaaagagaaagggaatagatggttgcttcttgcaccaagttctccccggcttccaggggtggagggagctcagggtggtgagtgagcactggactgagattctgtgtatcttccagaccctgtttccacagcctcccctctctttctgacttccctcctctgctttcggaagcacatgtgaaactgtctccattcctttctctttaggtcactggattccttgatggggctggcagtggtgctgtaaccccaggtccccttagggcatgtgagtggtgatggggctgagatctgccaacctcctcgctctgggggattttcagtgttccaggactgggtgttctgctggtctccctctcccctcccttccccgattccccggtgccctccctgcgcgcagacccaggggactctgagaatggaagggagctctcattcccgggaggaaaagacaccaggttccctgggctgcctgcactcagttctcagcctccttcctcatgcctccagcca

SEQ ID NO: 26679 - DNA, 2300 bp, Homo sapien
ctctttagccctctctggaaatcagtcagcatttacgtacacatcacatttaagtatacactgctgaaccctacaggcagaaattcatttctttcacaaatatttacagaattcctaccacgtgcatggcactagaatgaatgctagggatagaagcccaaactccatttccgtaaggactagaatctcattcctgccctccaagagcttacaatgtaacactgtgctaagaggctctgaacctacatatgtaacttttaattataccatgctgacttaatagcatggcaggtgatcaccctagatgttaatacaaactttacattcctgttgacacactaaaagatctatcatctaaaaaccaaaacaggccagaattaaaatctggctacagactaaaacttcaggaatgaagttctgtctaaaccattttcagacttccagcatttttttactactcactttttttctcagttattttagccaagagcaaatgagcgttaggcataaccttaagagctagagaagagcatgtttgtaattataaaaggctcattatgctcctctgcatccccagatccccattcaaagaaagggctgtacaactaactccggacaacagatataattggcttgcctttcttcattaatattaaatttgtgggagacagtcttggcgttttcactgcagtgaactcgtgaagttgaacaatctccaaagagatgaaactttaaaaagcctattcgaagttaaagtcaaatcacaccaggcaatttaactttgcctcggattttccacaaccttacaaaaattacaaagttcttctaagttcctccatcaaaaggccaaattcctggttttttctttcaacaaaatggatgcgtcacaatcttatttacatcttgccgttttaaccaagacctccttgaatcccaagcctaggtctacacttccaggcccctgagaagacctaagaacgatcaagaagggatgcgcgggtaagcgttgtcatcacaacattaaagatttcgaaactcccagaccaccagaaagcgtagagtatggggaagaaaaccaaacccagcaactctaagaggcaaactagaccgggaggaaacaatcggcccccaggacaaaaagcacattcacacctctccgtgcaacccactcatccctttatactcgcagcgctgcagccaaagcacaaagttctttcttttcacccagagtctgtgcctgtcgcggttaaacatgaacggaggaaaattcctagtcagaacccagaggggtaggacggggcttggagtgtggggacaacgccaagcagggagctgtccaggggcactgcccgcccggggtctccagctgtgaagttgcgctcctcgggagattcctggggtcagaacgagaggctggagtcggagcgaggcacaagggatgcgggagaagaaaggagtggggccgaagaggtagccaaagagaatggggctccgaggcgagagagaaaggactggaaggggcaaagggcggccaaggagggcgaaaaggggaagctgccgctgggcgggagacggcggaggagcgagacggggcgggggaccgcgggaggacgggaaggcgggaaggggagagagcgtggagctcggagctccagcaggcacaggccgcggcagataagggggcgcggagaggcccaggcccggcccaggcaggaggcgtcgggagacgacgcgacccaaggcgggcgggcccggggaaaaccgcccgcggccagaccggcagtggaagctgagacgcagtgctgcggcccctccccgtcacgtcagggcacttacctcctcgcagctgggacgctccggtgatgcggggcagtcagttcagagcgtctctcccaaatctcggcacccgactgacccggatccaaaccagccaagggggcggcccgcgcctcgggagtcgcgttgcgcctgcgcactccggcatgcacccctccccctgcttatgctcctcccaccccagtgactcggcagcgcggcagccgacgactgcgcagacgcagggcggcggccgcgcctctccaacgccccgcacccgcccccctcagaagcacgtgcgccttacgtaatttcctgttattcttcggtttgcctcctcccagtggcgtggatttgctcccgacccgcttttggggcgtgcctgcttcctcctctctgttaggtgagtgagtaggcgtcattcttcacagtagtcctctgcctccaccgccccgggatctccttgcgctcggtcctctacgtgg

SEQ ID NO: 26680 - DNA, 2300 bp, Homo sapien
taaaatgaaatactgtaactttttagtttttggtatttaatataattagggatggaaagcaggtaaaatgagaattcaccaaaactgtattgagcatctactaatccccaggaagtgtgctaagccctgggaattcaatcacgatccagacaattctttcccctcaaggatatatgagattttttttttttttttgagacagttttgctctgttggcccaggctggagtgcagtggcgcaatctcggctcactgcaacctccgcctcccggcttcagagattctcctgcctcagcctcccgggtagctgggattataggtgcatgcgccaccatgcccagccaatttttcatatttttagtagagaaagggtttcgccatgttggccaggctggtctcaaactcctgacctcaagtgatccacccgcctcggcctcccaaagtgctgggattataggcatgagctaccgtgccaggccttctcaaggatatatgagattttatcttaagttatattttgaagtggcagcttaaaaagacatgtttggttttgatacatttcacttggcaaggtctgagaaaataaatacatcatatttcccgctttttcttgtccaagagatgttgagaagggcagtttaaatcctgacttactagcactgtgagacaggacaaaggcagctagaacaagttatctgatctctaacataatctaatgctatctaactagcatcattaggttacaatgaacagttttctttcaaccggtcagttactgagcctctggtatgaacgacgagaatttaaaatgttttatccagggccaacatcatgcttcatgtttaacaacgttatacaataaattgttagatttcatttacagacataggccaggcattccaaagcctggctgtagttaagctggacacagttaaaccatcttcggcagcctatctagttgactacaactaaggtattggggaatgacggtggatggggccagttttggttcagggaaaaaccctcactctaggggtgggccacaatcaacgccatccaactcaattgcgcaaaatcatctgttctcacgaagctttgagcagtgcagacgtggagctggagattggcaggcgaggagaggcacagctagatcagcagaaccagtcctggtgatggagcgggtggcagctgttgcacagatcaccttttcccgcctaccatctgagcaacattcagaatcagaaaaatgtaaagaatcctaaaattcatctcctttggtgaactgcctaaatctttttgcaaaatttggtgtgtaggtgcatttctttggcaagaggatctacagttctcaccagattctcaaaggagtctacgcctgaaaacacgagattcaccgataaggttcaacttcctcacttactagatggaaaactgagaggcccaaaggaggaaaagcagttgcctcaagacaaacagcagagatatcaaaaccgaaggcatttcaattcaattctaattctggcttcacactattgaccctggccacgtccaatacctcttcacttctctgcaggacctaaaagatcaccaggaggcgagggctggtgtccgagtcccggagaggtcgcaggcagtccagattctagcatcacagaaactctggccaagcgctcagccggggattgtctgccataaagacccccgcaccctgtcctcgcccccgccccgtggaattcctctgcataggtgactccacgtagaggaccgagcgcaaggagatcccggggcggtggaggcagaggactactgtgaagaatgacgcctactcactcacctaacagagaggaggaagcaggcacgccccaaaagcgggtcgggagcaaatccacgccactgggaggaggcaaaccgaagaataacaggaaattacgtaaggcgcacgtgcttctgaggggggcgggtgcggggcgttggagaggcgcggccgccgccctgcgtctgcgcagtcgtcggctgccgcgctgccgagtcactggggtgggaggagcataagcagggggaggggtgcatgccggagtgcgcaggcgcaacgcgactcccgaggcgcgggccgcccccttggctggtttggatccgggtcagtcgggtgccgagatttgggagagacgctctgaactgactgccccgcatcaccggagcgtcccagctgcgaggaggtaagtgccctgacgtgacggggaggggccgcagcactgcgtctcagcttccactgccggtctggccgcgggcggttttccccgg

SEQ ID NO: 26681 - DNA, 2300 bp, Homo sapien
gtgatccatctctgcctcatgcagttatcattatctctatttcacagatgatgagccgaatctcagggagggtaagtgacctgtgagaagtcacacagccaggagccctatcttactgcctccaatccagggatctttcctctagctcagtgtttcccagctgtgttagaccattctcacattgtgataaagaaatacccgagactgggtaatttataaagaaaagaggtttaactgggtaatttataaagaaaagaggtttaattggctcgtggttctgcaggctgtacaggaagcatggcactggcacctgcttggcttctggtgaggcctcagaaagcttccaatcacggtggaaggcaaaggggaagctggcatatcacatggtgagaaaggaagcaagacagagtaggggaagatgtgccacatacttatttatttatttatttatttttgctttcttaatctgttcctgaccacatacttttaaacaaccagatctcacaagaactcactgactattgcaaggacagcaccaagccaagaggggtccacccccatgatccaatcacctcctaccaggccccacctccagcactggggactacatttcaacatgaaatttggtggagacacagatgcaaacagtatcaccaaccttgcatctcatgagaatcacctatggcacttgttaaacctaccagattgtgaccctgggagcatacaggattgaattttccttcaagacataccatgcccttttttgcaaaattgaacagtgaacaacatcaaaaatttcacaagagtgacaaaaaaagtatgctgaaccagggaggctaatgtagcaactgagacttgatagaaaatgtagctacaggctttgtggcagccaaggcaaaaagggaaacccagggaccacagagcatctgttatctggtagaaggaggttcaccggttccttatgagccaggcttacagcctgggggatgaggtacccaggagtccttagcagcatgatggatgggggtgggcggtcgggggtgagagggaggactgagcttatcttcctagtacatctatttgcatctgttgtcccagggtctgcttctgtatttcctcaatggtaaataaattaaaacacagtatttatagtaacggaagtataggtgtattaaggaactttgctgaagttcttatgtatgtttagggcagactttgtgacagcaaaggcattatgggctttctttgggctcatctggttgtgccttggtagaagatgcaaccttgaacaaatgacttgacatttctgagcctcgccttcctcatccgtgaaaaatgattattgtgcagatgaaatgagatgatgcatgtaaggggctcaggttgataaatggttgctgtgccattgtttatattcttaccatattatcatgaccttatggctaggagcacagactctggagccagactgcctgtgttcacatcagctccaccacctaccagctcgatgaccttgggcaaggtcacttagcctctctgtgcctcagtttccttctctgtaaaatgaagctaataggactattgtgagagctaaatgggctgatagttgtaaagctcttagaacagtgcctgggcatacagtaagtgctatgtaagtgtctgttaaataaatcatagtctgttccctctgcccttcgaggcccttcaggggaaaagttagaagataacagcttcaaagcgagacaagtaatttccagacactaatttctaaaggaatagctctctagaatcccagttaagaagtatttgccccttagaagactgagaggcaggaaagcgttgatgagggtggaatctttggcaggtgcctggcccaatacactgagctgtttggggggcacgacccacttcctcgggctccttccacccttgcagggagcctgacactgagggctggcggcttttctggcgcgggccagggggaggaggagaaaggagctcccgggatcccctcgccccctcccccaactgcccggtgagtaatgacattcacggagcggggagggagggaggagaggggcaggctcggcgaggccatgtgatgctgggcgagagagagccgccgcgccggagcctccttctttcctgcctctgattccgggctgtcatggcgacccccaacaatctgacccccaccaactgcagctggtggcccatctccgcgctggagagcgatgcggccaagccagcggaggcccccgacgctcccgaggcggccagccccgcccattggcccaggg

SEQ ID NO: 26682 - DNA, 2300 bp, Homo sapien
ccactcacagtcctttaaggctaacttccttccaatctcagttgcttttaaaaatgacaggaaagtgaggcttcttgaaaatggatgtccgcataaaaatcatggtaacatatctatgagcctttgtgtgtgctgtccccactgccttggattcccttctctgcctaactgcttgaactcctcctcatccatcaaaacccaaagaattgctgccttctttgaaaatattccctgactctccagggcctctggttgttccctgctttatgttcttggccctgaccttgccccagcactcagaaccctttatggcaggattggttcttctccatgagagtgaaaactcttccaaggcagagatggaccaaattcatctttgcaacaccagcacacagcttaagctacaaaaggatggactttgaaccacaatctccacgcggaggggagtttatcattccaccccagctcccagctcacagtgtgagcccaagaagggtttgttgctgccaaaggaatctgaacagggaagttctgcaacaggaggggattctgatcctggagccacggagctttcaacagacacttcctggacgtgccaagcaggtcaggctgacaaacgagtgggcactaaaaggcacaagaagctctcacatgtgtacaggcctccaggactacaaagcacttgcaaaggtgacctcatctgagtaaactttgaaagtgctcttcagtgttgcttctgtgaggcctacttcactttttaccaagagaactgctcccaagtctggctgatcctgacctcaggactgtaagacatgaaggtggcacacagggaaggagtaagtcaagctaataaatacatgtctgaacatgcatttatattacaagacatacggggaaaaacaggagcaactctagccataaaataacccgtatatgacaagttaaattgagaaagaattacctactttcacgaagtgcgctgaggtttattgggctctgcgcttccttaagagtattagaaaagaacacacaaaatgctgaaatatgggatttcattatctcagtttactttaatttgcttgtttacacacacgatctgtgtgtacataacagtggcaagagccattctctaaatacaatctggtacccagactatgacagatgcacgtggaaaatgaggcgtcagtgaattaatctcaacatagaaaggcaaaataagcatggcagtattctatgatcacagatgcccccagagcctgggggtaaccgacacttttcaacataatacaggacaattttaacaaaagacccagactccaaatggcacccaaaatatattcgtttctctgccttctctagaggagtcagaaagttctaaaggcttactcaagaaaaaggaggcagggagactatggcctgctaagcacagatgctgagcactttacatgcaccatttctcttcatctccacctgacagacgatgaaaacgaggtttgccatgatcacacagctatcaggagtggtgccaagatatgaacccacatctcatgtttgcttgagcccaaatcctttcacttatgtcaggctgtttcacataggaatagaaagcatgctcccaaggaagaggcaagggggctaagcatggacaagtggcggaagcctcatcgatacagaaggctctgcaattgacactttccacatacagttaatttagtgctgagcccgcatcagacccacgtgggataaatatctggagatttaagtgtcacaaatgaacttctggggtcaccctgtgcctattcccttttggtgctgaacatgacactttggagagccttttttttttttgagacagagtctcactctgtcgctcaggctggagtgcagtggcgtgatcctagctcactgcaacctctgcctcctgggttcaagcgattctcctgccccagcctcccgagtagctgggattacaggcgtgtaccaccacacctggctaatttttgtatttttagtcgagacggggttttatcatgttggctaggctggcccaacctcaagtgatcctcccatctcagcctcccaaagtgctaggattacaggtgtgagccaccatgcctagcctaggagagctttcaatcccttcaacaagcccctgccatctactccatggccactcccaccactggtttatgggcataggcaacagagggtcacatcttaccaacgcctccaaagcaccatggtgccacctcccatatctcatcacctgtgtttctgctccttttgggtgcaacaaatca

SEQ ID NO: 26683 - DNA, 2300 bp, Homo sapien
acatggcgaaaccctgtctaaaaatacaaaaaaattagccaggtgtggtggcatgtgcctgtagtcccagctgcttgggagggtgaggcaggagactaccttgaacccgggaggcagaggttacagtgagccaagatcaaaatagcttggcctcccaaagtgctgggattacaggcgtgagccaccacgtctggcctaaaatgcccatctcttgatatgactatatatgtgtgtattggctgggtttgtggcttttggaataaacttctgttgtttaaaacaagtttagggttgggcacggtggctcgcacctgtaatcctagcactttgggaggccgaggcaggaggatcactggagcccaggcgttcgagatcaacctgggcaacatagtgagaccccatctctatttaaaactaaagaaaaaaaaaggaataaaaataaactgagtttatagtaatttattagagctgccacaggaaactaacattggggtaagggaatgagtccaaggttgggaactgaaatagacacccagccctaaccaggggtgaggggttagttttgtgataaactgagcaactgagtctccaacaacttcatgtgatctccccattaacccccagcatccagcattttcatccaacaggcatagatagctgttttgtgtttctttgtgtgctttttaagacggtctcgctccgtggcccaggctggagtgcaatgggaccatcacagctcactgcaacctcaaattcctgggctcaagcaatcctcccacctcagcctcctgagtagctgggaccacaggcctgagccaccaagtcagctagtttttaaaattatttcttatagatactgagtctcactgtgttgcccaggtgaaaataaatttagaaatttaaactttaaatgtaataattgcaccaggtgagatggctcactcctgtaatctcagcactttgggaggtgaaggctggcagatcacttgaggttaagatttggagaggtcagatcacttgaggacaggagttggtcagcctggccgacatggtgaaaccccatctctactaaaaatacaaaaattagctgggtgtggtggtgcgtgcctgtaatcccagctactcgggaggctgaggcaggagaatcgcttgaacctgggaggcagaggcctgcagtgagctgagatcgcgccactgcattccagcctgggcaacagagcgagactatgtctctaaataaattaattatattaattaattaatttaataactgcagagcgtggtggctcacacttgtaattgcagcattttaggaagccgaggcaggaggatcgcttgagcccaggagtttgagaccagcctcgacaacgaagcaaaaccctgtctctacagaaataaaaataaaaaaaattagccaggtgtggtggtgcccgcctgtggtcccagctactcgggaggctgaggtgggagtattgcttgagaccagaaatttgaggttgcggtgagctgcgacggtgccattgcactccagcctgggcgacagagagggacccccccccaactaactaataaataaataaatacaataattattcctaaggaaacttcatctcatgtccctctacgtgtgccaacgtaatgaacccctgagctcataaactagcttttgggaaaggttgatctcctcttgtctctcgcattttacagatgagaaaactaagactcagatggcagaggtgtctccgaggctccaagaaagatcaaatgatgctgtgactactgctccaattctccagggctacatttatcctcttccagcctccagcaaatactttcacaagcgctttttcccagaccagagcaagacgcggaggctcggggagaggaggcggccaggagagcgcagaggagacgagcgagttcggggaccgtcacgcgccagaggcagcagcggccacgagggggagcgcgcgggctccggagcccaagcacgcctcaagctgtgggactcgcgggcagtgcgcatgcgctcgaagggaggtggaggcgcaggtccgggcgaagggcgatacggtggccgagagggcacggagaggaggacggtggctgacgagatccggcatggagcatctggagcgctgcgagtggttgttgcggggaacgctggtgcgggcggccgtgcggcgctacctgccctgggccctggtggcctccatgctggcgggctccctcctcaaggagttgtccccgttgcccgagagctacctcagcaacaagcgcaacgtcctcaacgtgtgagt

SEQ ID NO: 26684 - DNA, 2300 bp, Homo sapien
cattcacctggggacacatttgactcaagaacactcaaacacacacacatgtaagtatacttgcacacacatacacaagtgcatacatactctcacaagtacacacgtacacacaaacacattcacacacacattcctagagtgcacacagtgtgccagccactgtactaaggctccacaaatgttcactcatttcatcttcgcagtaatgctacaaggtaggcaccgctatttctcccattttacagatgaggcacacaatggttgagtaacgtgcccaacacctagttagtgagggggtgggataagggaaatttgaacccagatttgtgggcttaattcatttgctaatgaataggctgtgtttgagtggcatcataacgaacatcaccctaggcttttttccttatgcatctatatttggtttggttagaaaatggcatctttggctgatacaaaaaaattagccaagtatggtggtgcgtgcccgtggccccagctattcaggaggctgagatgggaggatcacctgagcctgggaggtggaggttgcagtgagccgagattgtgccactgcactccagcctggacgacagagcgagactctgtctcaaaagaaaaaaaaagaaagacagcctgtccaatatggtgaaaccccatccctactaaaaaatacaaaaattagccaggtgtggtggtgtgcacctgtagccccagctacttaggaggctgaggcaggagaatcgaggttgcagtgagccgagattgcgccactgcactccagcctgggcgacaaagtgagacaaaaaacagaaagaaaaaaaaaaggaaaggaaaaggaaaaggcatccttttagatactaaccaggcctggggtcagatctggacttaaatcctggcgtgattgcagactggctggcttgactttgggcttgttctttctcctctctggggctcagtttcctcatctatgaaatggggagctatagtacctgcttctgaaggttggctgggcttttgtgtaaagcactcagccctgggcctggcacatagcaggggctcactagatgggccatattaactgtctgctccaaggctggagggtgttatagggaaaacagtcagaaaatactctccagatgcaaggtggccttaatatgtcaggatgtggaaggcagagagaagcctcggggtctgggatctcccataggggatgagtattttttcctggaatccctgccctgttgccacatcactaccctgaccatttgcccagcccagccctacatgcttcaggtgaaagcagagagagaggggcgggagagaaaagcccatcaagcagcaggcggagcctccctgcaggagtctggcctggctggaaggggagggggctgtggggccagggacgtcagatgccaacagcaccaggggaccgttaaagttgctgcgccgccaggtgggccagggtgtctgcagaggtccccggcctcctgggctgccgcctgccaccgcttgggctgcccgtcctgggtacgcaccgttggagcctcctgcctggtctctcgtgcttctctgtctcttctctaagtcgatttttcgctctttcttctgtttgtgcccctctctctgtctatttctgtcctcccccagccacattgttgcctctctctcattctctcttatctctttacctttctatttctcattcttttttctctgtaactctttttttctgtcccctttttggtctctcttttttctctgcctctttcattctctgccattgggttttctctgtgtctcattctcaattcctaaattgcagcaaagcagggacaaaaggaccttgcaatatgacttggggtaaggtgggccctgccctccgagggcattgactgagcccgctccagcaggattggtgaagaggatgtctagactggagagggctgctgtctgtctcctgggctggagggacagagcactggctttgaagtggtggcaccatctcaccccagggccatgtctggattagccactgtctgggcatttcttccccttgcccaacccactcagtcccctggggtggaaaggaaggggtgctgggcatctggaccagagctgcatctggaggtctttgccaagttcccaggaggcagcatcctctgggtcggcactgttggagaacgctcagggtctggtgctctcgtgcctgccccttccaggcagccggctctgattgcacaaggcagacctgtgactcctccatccagctatgcccctgctgcccagcaccgtgggcc

SEQ ID NO: 26685 - DNA, 2300 bp, Homo sapien
caggaggcggaggttaaagtgagccgagatggcgccattgcactccagcctggacaacaagagcaaaactctgtctcagaaaaaaaaaaaaaaaaaaaagaacagatttaatgaaacttcttgaatcccagtttttacatctgtaaaatgggaatattgacagtgacaattcaatgacgttaagaatatacaatgctgacaaactaaagagttcataaatgccagtggttgtcatcctcattatcctggtgctcaggaaggcaatgtgagacctgttgaaatagcacgggctttggggtcagatgatgctgaattccagttctgtgttggctccttcgtagttatgtgacctcatgacgccacttcatgcagggggttacgtaccacttaaatctccagaacattttgggaaattgacatagggttagcaaacctcccccacccccatataaaaatattaatactttttttttttctgagatggagtctggctctgtcgccaaggctgcagtgcagtagtgcaatcttggctcactgcaacatttgcctcctaggttgaaacgattctcctccttcagcctcccgagtagctgagattacaggtgctcgctgccacacccagctaatttttgtatttttagtagagatgggattacaccgtgttggccagcctggtctcaaactcctgacctcaagtgatccacctgcctcagcctcccaaactgctgggattacaggcatgagccactacacccgaccaagaatattaatacttttttttaaaaaatatcgaagttatttatttatttatttatttatttatttatttatttattttgagatggagtctctctctgttgcccaggctggagtgcagtggcacgatcttggctcactgcaacctctgtccccctggttcaaacgattctcttgcctcagcctcccgtttgccaccatgcccggctaatttttttatttttggtagagacggggtttcaccatgttggtcaggctggcctcaaactcctgacctcgtgatcggtgcgcctcggcctcccaaaatgctggggttacaggcgtgagccactgcacccggccccaaaatctaacgtttgttatcactgttgttttagaaaagaaaggacattttaatgcaacccatgcccatctgtaggggctgaaggtccctctgaggtgattgataaagctgaaaaaagagactatgggaagagaagaggaatattatcaattagctattttagaagcagggcaaactatgagctaggtattcctataaggaaatgaaataatttactaaaaaacatacagcaagaaaataatagagctggagttttctgatttttctgagtccagaatttgtttcactgttctcatttcagctctctctaacaggatgaatgaccttgatttcagaatccccaagcaggtggtgagatccaaaactgagacaaaagaaacggggctgttccaaaaaaaaagctaggtggcaggtgtctaacatgccagggagctaaaacagagtgtgtgagtttcagcagcaggttgaatttagaatggggaaggagaccagaggagacgccagacaggatgactttgtcccattggcctggaggcagccccatgtttctccacccctcatatcactcaccagtttgtaatagtatctttgaatgacgatctgattaaggtccgtctcctccattagtccacaagtttcgggggtacatctactttgctcatttccatatccccagagtctagcacaaggcctggtacatagtaggtgctcaataaatatgttagatgaaaggaagataacacctctatgtactagcagtgagactccaggcatgcaatttctctctgtccttcagtcccttcatctcaaggtttaatttaaatatggtaacgcctgtatgcaactcccagcatccagtaggcactcactaaacacagttctccaccctccttttttcctctgcccctccctcggttttcccactacttcctgcatggtgacacacccatagtttggagccataaaacccaacccaggttggactctcacctctccagccccttctgctccggccctgtcctcaaattggggggctgatgtccccatacacctggctctgggttcccctaaccccagagtgcaggactaggacccgagtggacctcaggtctggccaggtcgccattgccatggagacagcaacagtccccagccgcgggttccctaagtgactggttactctttaacgtatccacccacc

SEQ ID NO: 26686 - DNA, 2300 bp, Homo sapien
aaaaatacaaaaatcaaaaattagctaggcatggtggcatgcccctgcagtccaggctacttgggaggctgaggcaggagaatcacttgaacctgggaggtggaagctgcagtgagccgagattgttccactgcacctgggtgacagagcaagactctgtctaaaaaaaaaaaaagaatgttttcttcaggggatgaagagacgttggttcatgggtacaaaaataagtgagatagaaggaataagatctagttcttatagcacagtagagcgattatagttaacaatcatttactttatatttcaaaatagccagaagagaagatctgaaatgtacccaacacaaagaaatgataaatgtttgaggtgatggatatcctaaatactttgcatggtatgcatgtatcaaaatacatgtgctccatatatatgtacaattattatgtatcaattataaaaagtttcattcccttcctccaagggattttttttttaactagtggaaaaaagaaagcaacttcataacgccctccagtgaggaagaacattatcctgacaatgcttaggtgctttcatatgagcacataataaatacaggaagtcacagagcaaatgtcacagtattggtttggtttttatttctatgcttataaaaaatattaagcttctttctgtggactgagtgggtgttagcctgtgggtattggtctctggtgcctgtataccagtgactatttatattccaagcccagggccagctgtctgcacaaggcaagtttttatttcgaagccttggttactccttctgtacaaggggtctaacttgtcgtttgtcgtgaagattaaatgagagagtagataagcttcttagcctctcttcccctgacctctctttaggggaataaaccacagaccttgtgggtcagatagatctaggttaaaatccaggcagtgccaatgtaccaaactctgtgacctcaacttctacttttctcagccttagtttaagcatcagaaaaattgggttgataccttctttgtagggatggttcaagcattaaatgaccacgtgtaggcatacagtacaatagtagcaatcactgtcattggtcattgattgcatgacacactggccacataatcagttggaatcaggacccctgctcaggacagctccaggtaccacacacccagccatgaacaagcactagcctcaatgccatcaatttagcagctgttctttacctctgctcacttgctgtcgggccccagctcaagaggcagcagattccaggggatagcagaggacctcagagcccacagagagacccagttgagacgggaagggattgccctgggcaacctgcagttggggaggcatgtgtagggagcttgtgcctctgctgtggacggtggtaagggagctgccactacgaaccacattgtttctcttttacattataataaggtctaatgtttacagagaaattttgtgctagccctggtgctaaaaaccttctagccttctcatattatctgcctgttgagataggggctattgtcatccccattttaaagatgatgaaattgaggctcagagaggtgaagtgacttgcccaaagccacacagctcgtaagggaggggctgttgtttgaacccgagtctgcctccagagcttgagggcttcacccctctacgcattgcctgcatcatgactcctggaatccctgaaaggacttcggaattctaaggcactggagctggtggtttcactgcctcagtcttgcaggggaactcaaggacctgagaagtaaagcaccttatcccggggtataggcaggggcaggggcatcctccacacgcctggccaccccagggctgcttggcatcttcacttccccttggcgctcaccacaccattatctcctatcttttcttccccacccaccactccgggagaggtgcagagaaaactgggacttatcaagacaaagaacaaaagtcgtggaggaaagaagccaagagccatctctactctggggtagggcccttcagttttgcccctttgaaatttcaaattccagtttgtggacaaagtcctaactatctcacaatataggtccccaaccactgaccaaactccagtccaggcagccaccagctggcctggtcttgctgcttcctttagcggcttccaaggtccagggacagggggtctgggccaccaagaggctctgctaggctgtccctgcagccacagccaccccactggacccctgcctcccatctgagaggacag

SEQ ID NO: 26687 - DNA, 2300 bp, Homo sapien
cccgccggtatttggtctctttcagccccttatcaagtctcatagtgtgggttgcagggggctgcctcttgctccctccctcagagtcttgtcctggctaacagaaaactgagccaggatcatctttctattttacagagggagaaattgaagccctgagaagagacgatgtaaataaagttatcggaatagtgactgagctagttcctaaccccaggtctcctgacatcaaatctagcctctcttgtcctccacaacagttgctccctctcccctttccctacaggcaatagcactccccagtcatctcagcttcagaggtcagatcaagtggacagaataaagctaagcagggcagagaaagggcttctagcagtggaaagaacatgaagatgcctcctcataccactcgaacacacatgccctgactcccgatttgctcactcattaatccacccacacattcactcattcactcactcattaattcacccacccattcactcattaattcacccacccatttgctcacttactcagtaatttaccctcattcgttcattcactcactcattcatgcattcactcaactcactcattaattctccctgtctctaattcactcactcctaattcacccactcatcaattcccccacacactcactcattaattggtgctcccactaattcgcccactcttgctcacaggtgtcaccgaggccctccaacctgcccttccagccagcagtggaggacaggctcccaggcctcccaagtctcaggcttttcttcctctgccctcactctctgccttctacatcaagactttacttccccagattgattggcagcccttgaaaatgtctgcacagaaggcaatgagggctggagggagtgagaagaacagagtgcaccatgagcttcagacagccaggaccagctgtgtaattttcagggccccgtccaaaacaaaaatgcacaatcccttgttcaaaagtcatgatgaattttaggacaaccacagcagagcactgaaccaggaaccaggactttctaagggttgggttgcctgtgactgcactggcgatacccccacaaagcccactctgaaggtaggagacgggtggagagaaacagggggatggcaagggggatacgaaacagggagagggaggagggggaagaggatggacgtctaccaggccccacttggtgcttgatttatgccatctcatttccttctcaaaccaccctttgaagttgattgtacattttacagaaaaggaaactgaggctcggagaggagaatcatttacccaaggtcccagttagtagacggtaggtgcctgaatgtaaatccaggtctctgcctgctccgggagggggtgggggtgagggaaacaggagaatgtgatgggaaaatccgagatggagccagcctgggccagaaacactgggagctgtgggagacggagaggggcagggtgggatcacagggagcaggagcggggaattggaggtgaatctggccctcccaaacttccagtccattctgctcccaggggaaccgggaaactgcgggggaactggaagggagctcccagaacaaggatccagaagattggcatctggggcctgggatttaggtttctaaatcgtgggccatggggcagccttatctctgcaaaagcattgagggtagaagtcaatgatttgggaagttattgaattaggggatctcggaggtaggctgtcagtgcctgatagtatcagttagaatgcctgacttggggtgacaatggcttggaggggtgggtgagtcaagggtcaaatgagtgcccgtgagtcatgatgcctgccttgtacaattgataactgaacatcggtgagttagggccccagcagttgtaattagcaccccgggtgtcagccagaaaccaacaaacagccaaatccctgcagccccgcccagcctatccaccggcgggggaccgattaaccattaacccccacccctccccggcagagcctccaccccttcacagaggctaggccaagactcccagcagatcttcccagaggacggtttgaaaggaaggcagagagggcactgggaggaggcagtgggagggcggagggcgggggccttcggggtgggcgcccagggtagggcaggtggccgcggcgtggaggcagggagaatgcgactctccaaaaccctcgtcgacatggacatggccgactacagtgctgcactggacccagcctacaccaccctggaatttgagaatgtgcagg

SEQ ID NO: 26688 - DNA, 2300 bp, Homo sapien
gtccacacacaccacacagttcccacacacgcacacacaccacacacaagcacacacacaccacacacaccacagttcacacacaccaagcagtcacacacacgcgcacacacaccacacagtcacgcacacacacaccacagttcacacacaccacacagtccacacaccacacagacacacgcacacacacacatatatacacacatgtgtacacatacagtacacacacatgaacacagagtccacacataagcacacacacgctccacacacatgcacacacatacacacagtccacacatgcacacagtccacatacattgcacacacttgcacatagtccacacacatgcatacatacaaacacatcaacacacacatatacaaatgtgtgcacacatacagtccacacatatacatacacatacacacagtccacacacacatgctcacatgcacaaacatacacacatacacagacacacacacacacacgtgtattcatagaaatcctgaatccaaccttggattcctcaggggcatccagttaagacccagagagggccatgcactgtaggtaacagcacagcctctgaagtccttctgcccagggttcaattccagcttgcccactttttagccgtgtgacattgactgtgttcgtttacttctctatgcttttgtttcctcacttgtaaaatggggaacgtgatattcccctaggttcgttatggggattcggtgaattctcatatgtgtatgtgaagtgcttggcacatagtaagcactatatcagtgttcatgaaataaaaacttttccacataggaaaactctcggagcagaggacttccaggctccttgcacaagcagacactgccgcatctcatttctgccatcgcagactcccaggtgtccccaggagtgcagccccctccacttggtgaattattcctggagatggggataattgttaagccacgtgggtgccctttctccctcggcctctcctcccccgacccccggggagagctgacccccacagctcctggccattcagcaggaggctggggaagtagctcccacctctgaggcaggatgggctgggggctgtcagctctatcatctcccctctgaggtcagccgagcacctctattccacagatgaggacactgaggcttagagaggaaaagtggcttcctggtgtcatcgcactgcttcccgtgaagcagagccatgggtttatggtccaggcttgctgggctactccagccagtgccacacatgttgaggtgtctgctgggcctctaatgaacaaggagccacccagggctgctgctccattggggtggggagaggacgggggagaaatatccttggagcctttcagacaccagcccaggatgtactcaaaacacttcagaggacaacttcacataaccccaattcagaccacttcaaactccagtgaggaatgtggggaccctgcttacagatgctcagagcccttgagatgacccatggtggggccaggccctttaccagggctaagcacccaggcacctcatcttatttatcctctggccagccctgggagacagacactattatttattcccattttataggtgaggaaactgaggctcagagaggaaattgccttgccacattcacacaggttggaaggatctatgccggatttgagcccagatctttctggttccagagctggaggtggtcttgtctttgggactcccagttcaggggcttggcctctgcctcaggagcacacagttcctgggcttggaaaaagtgatgggggcggggagcagcccagggcagggcagtggtcctcgtggggccacacaacactccacctagtgcagcagcagcttgtttgctatctctggtgtgtttttgccttgcgctcctggcgtggtcctcagacaggcctaaaagccgtccagccagcaggcctgggggaatgaagcctgttttgtagaagatacagaagccaggataggggaggtgacatgcccaaggtcacacgtgactggacggcaggggcaggtgagcacctgctgagctgacaacaagcagtgcccagcagctgcctcctcaccctagctgagctgaccacaagattccagacctcagctggagctgcagcctcatactggctgagtggctccaagacacagaaggaagcagggtggcaggctgacctcagccagctgcctgccccctctcctctgaggctggcctgggaccgatggggctcttccctccaggaggggt

SEQ ID NO: 26689 - DNA, 2300 bp, Homo sapien
cctaacctgagtcagcatggctgcttggaggtacagtatgtcctctctgttcccaggggccctggatcccagcctggctgaagcatttccaaaacagggcctggaatagtgagggaaacggaaggggtggagatcccaaatcccctccgtcagtaccagccacccaccgttgtattaaaaacgcccagcatggactgagttcttaccaggtgccaggtcccgtgctaagcatgtcatatgtattcacttaactaaccttacagagatgcaatggagtagaggctcttccatttaacaaaggagtaaacagactcagagaagccacatcacttgtaaatggtcccacggagatggaatttgcaggtctgtgattgtggaattctggagtgttagctccgcaaattcactacttcactcagccctcaccacaaacccccacccagtaaggtgctgccacccgcagtaaggatatgaaaaaactgaggctgggggtggtggacatgacttgtaagatgtttctagaaagctctgctgtgacaaccagtaactgttttttaaaagcccagtccaactctctgggctcggacctagttcgcggtgacatggccaaacctaccaagaaagtcgggatcgtcggtaaatacgggacccgctatggggcctccctctggaaaatggtgaagaaagttgaaatcagccagcaggccaagtacacttgctctttctgtggcaaaaccaagatgaagagatgagctgcggggatctggcactgtggttcccgcgtgaagacagtggctggcggtgcctggacatacaataccacctccgctatcacggtaaagtccgccatcagaagcctgaaggagttgaaagaccagtagacgctcctctactctttgagacatcactggcctgtaataaatgggttaatttacgtaacaacaacaacaacaaaaaagagcccagtccaaacccacagctgctaaaatttggccatggctacccaaaacccccacatttactattacccctatacccaccacattctcctaggatgggaagaggaagcaaagagttctttggtgaccatctccctggaagggtggaatggggtcatgggggctcttccatgagaggggccactatatgtagagaataatgtgtggccattatgagggggcccagtggtctcatgtgggcatggacatctagaggctgagagaaacgggctgcctggctgaactggtgaaggagccagtgtgggcgtgctaaggtaagccacattcccaggactttcggagtacaggctgctggctggagtgtttcccatgggccagtgttggcagagagcacctacaaggggtcctcttgggtcctgtcccctagagcctcctggaggggcagaggtgtggcagcagcaagaagcttgagttggatgttgggttcctaagggctgacgaaggacttgcaagggacccctatgaggagagatgcatcccccaaggttaagagtgagagggcccctgtgacagtggccatctccatggagcccacgacagaaaggggcagcttgaagccagccaggatggtggcagctcaagggagacccttcctctccccttgccatctccaacaccccccactgtaccccacgggtgggtgagggaaggagagatagagaaggagtcacccacaccacctccctgaagcaggcctgagggtgaggggagaaggtttaaacccaaatcaaattgggaattttggttagaagcttgactggacattctcatttctaaattgaggttgtgtttgtgacctaaagtgaccatagaattgcctgtttcctcagaacaagcagaagaataatggggagatttcacccagtggcagggaaaatgtttctctaccaaatacatcttagaaaggacactgggagatacaaattaaggtatgctttgattatgtcacaggctgggtttgttcaacatgctggtctcagtgagaaggaggattctccaaaacaagtctaggaagtgaatgttccagaatgttctagaacttgattcattaggcaggcaagaagtgtgcctctgggaacctcttgagcccttcatgggctagcacaccaacaccatccccccagatgcttcagttgttggcttcgaatggcttactatttccatttctacggagaactgccatctcaggaatcacctcaccctggagtttattcccctcacccacagggtggctggcagccaacagctgactcgtacagaggtacacaaagccagcctttt

SEQ ID NO: 26690 - DNA, 2300 bp, Homo sapien
tttgccacaagagctgccatttggcagggcgcaggagaatggcttgagcccaggcagcctcccaggtggctgggattacaggcctggctaatttttgtatttttagtagagacagggtttcaccaggttggccaggctggtctcgaactcctgaactcaggtgatccacctgccttggcttctcaaagtgctgagattataggcatgagccaccacatccggctgttttggggggttttctttttgagacagagtctcgctctgtcgcccaggctggagggcagtggcatgatctcggctcactgcaacctctgcctcctgggttcaagtgattctcctgcctcaggctcccgcatagttgggtgtgacagccggaagtgggggcctcggattacaggcgtgtgccaccacgcccaactaatttttgtatttttagtagagacagggtttcaccatgttggctggggtggtctcatcatactcctgatctcaagtgatccacctgcttcagcctcccaaagtgctgggattccaggcgtgagccactgcacccggccttaccttacgttttaaaagatctcacagatgtgattaatgtaaggatcttgagatggtaagattatcctggattatctggctgagcccaatgtaatcccaagagtccttataagaagagggaagcaggaggatcagtcagtagtagaggtgacaacagaagccagaggttgaggtgatttgaagaaggggccataagctaaggaatgcaggtggcctctacaaactgtaaaaggaaaggaactgatgcttcctccaaatccccaaaagaatgcagccttgccaacaccttgattttagacttttgacctagagaactgcaagagaatatatctgtgttgtttcaatccatgaagtttgcagtaattccttgtaacagtaacaggaaaataatacatagatttagcaaacaaaacaaaatccaggatgcccagtagtcatatttgaatttcctataaacaacaatttttaaagtataaatgtgtcccaaatgttgcataggacacacttatctgtgtgtatgtgtgtgtgtgtttggaaaggaacatgcttaaatgtttatctgaaattcaaactgtagtgaatgttatatattttgtctgtcaatcttagaagtgatgaaactgagagcaggagtcaaaactcatgattcccaggtcgcctccatactgctgccccctgcccctcaatctggcagaaactgccacgttcttgtggccctcatgggtcacttcccatcttcttgggactcctcttgcccctggggtaggaaaatgaaaagactgtttaaggtcgtttctttaggctcagagttctcctggaccaccagaggttctgcctcagagggacctaggagatttgcctcaaagttgcagttgcacaaaatacttgcgggcggatcttaatggactggggtgggagttagtaaagcctttgtctggagggaacgtaatgaaccccaaagcaggaaaaaagtaattattgaatcaggctccagagcaagaatcaggtttcaggtaaggaaacggaagcacaagaaggaatggggacttgctccaggtcactcagttaatgacagacagatgtcccctggtttggagtctccctttttggagcagctagtcctgatagcagccatagtggggggaagtctagaatgctaatcctgaggtccgggtttgaagccctttactgccttgattgccagtttccctttcctgaaataggggaattgcataaatatgaggagttaatgagatcatggatgttaaacaacaggtacatgttagcatgttcttggaaaatggcagcttctttccttccttctctgagcctcagtttccccatctataagccgggtttgacaagcggctggtgccccagctcctcccagccactccaggtccgcagctcggagctccggcagccaggtggggactgaacaccaacgccgcggggaggcgtcgcacatgcgcgctcctaggcggagccccgcctcccacgccctggatcgtcacttccggcgcgagaggccgggcaggccgggcagggagtgcgggtcggttctgcgtgcgctgccggacgaggctcccgccgccgattgacccgcgctccgcccgtagtcgggccggtgagtgcccgcgagcccatccgtgtgccctgggagctgaggagagggacccctgagagggaaggataaccggaagtggggaccagaggagcgagagaccccaggaaatggggac

SEQ ID NO: 26691 - DNA, 2300 bp, Homo sapien
acatcggggctcagagtgaggtattatagtaacttgcccaaggtcacatagctagtaacattcaaacctcaggtgtgtctgacttcagagtgcatacttttttttatatttttgagacagggtctcaccctgtcacccaggctggagtacagtggcatgatcactgcagcctcaacctcctgagctcaagagatcctcccacctcagtctcccaagtagtgagactacagccacaccccaccatacctggctagtgtttgtatattttgtagacatggggtttcgccatgttgcctgggctggtcttgaattcctgggcttatgcttaattcctcccacctcggccttccaaagtactgggattacaggcatgagccactgtgcccagccagagctcatgctcttaacctcaacactcaattgtatttccatcacaaaatgtgctgctgtttggagttaagaaaccagctgctgcttattgttccatttactaacctaaataagagtcatggctactagaatatctttcttttccattttgaaacaacagtgatagaaaggagataaatctttgtttgaccacttatttatattaacttctgtaacatactgtcaatctcttatgaccttagacagatggataccaagcaactatccaattactgaaaacatccgagccatatacttgaccttagaaaaactcattcagtctgaagaaacccaggtgaatggaattgtaattcttgcagactacaaaggagtgagtttatcaaaagcatctcactttggcccttttatagccaaaaaggtgattggcatcctccaggtaagacccgtatgtgtcctgcctgtttcgtggtggctctggctttccccagggcctgtccatttactgtgggtctcacatgatacacaaactgcacatcccacacctgcaatctgaaaaacacaaaagcattatgggaagaaatttaaaagtcctatttaccacttgttctcatcagtctctcaagtactctctggagtaggtacttcagtaagacaagagtccaaaaaactagagaatttgcttgttgccttttcttggtctggaaggcagaggaagaattctcataacaaacaaaactggctgggcgcggtggctcacgcctgtaatccaattctttgggaggccgaggcaggtggatcacttgaggtcaggagtttgagaccagcctggccaacatggtaaaaccccatctctaccaaaaatacgaaaattagctgggcatggtggcaggcacctgtaatcccagctacttgggaggctgaggcaggagaatcatttgaacccaggaggcggaggttgcagtgagctgagatcgcgccattgcactccagcctgggtgagaacagcaaaactctgtctcagaaaacaaacaaacaaaaaacctaagaaattatgcttctgcgtaaggtgctggagcccctcctgccctctgtggacctgagggatatggtgttctgttgggctgtattttggtcagatgcttcacacctcatgttctgtgtttcagaacatgagtcactggggactgtggtgctccctccatatctgcaccgtgtttaacagcttgcacagtgcttttacagtcatcagggcctattcagtccctcagcgaatcctctgagataggcaaggcaaaaactatttttcctttttgatagatgggaagatggagacctagagaaaatatagcctgtcacagctgtgacaggttttgattacttgttcattctgacccaccacgtggggtgttttcccttgtaaactatggggcaccggtggtatagtagctcttctcactgattccacaaatgtttcagcccctgtggtgcaccaggtttattatttaaataaatcagtgcacatttggacattatcaaacatttggattctggctttgagccaaccctggctttccttcgctggcactccttttgatgcctcctcctgaataccttgtagattcaagtgtcaggatcaagagtgtggatcagtgttagtaccgtaagatcatctggagaggagaaaaaattaagtaagtttgggaaatgctgtatagcatgtccctttcttgtgaatttcactgtaagaatttacatgttaaaggctctgaacaggaatgcagttaaggaaactcacttgattatgcttagtggactacgtttctcaaactcatttgcctgctgtggagccctgttttatataacctctaatagcctgagaaatatactttgggcaacactgatctggaagg

SEQ ID NO: 26692 - DNA, 2300 bp, Homo sapien
ttagaaaggggagggggagcctagctgaggcaatcttacagaagtaaaacaggcaaaaaagttaaaaagacaaatggttacaggaaaacaaatagttccaggtgcaggggctttaaatccatcacaaggtgatagatgtgggggctttgggtaccatcaaccggacaaaaatgcaggggcttagggtactatcaaccgggtgaattcctggaaactgcagctatcgcttgccacagtatcttatcagttaattgcattctttgatgtgctgggagtcagcttgcacaagttaaatccttgaggaagtgggatgggtaaggagcggcaagtgaaggagccaaaatggagtttgtctgtctccctcagctaagagagagtcaattcaggttaagacaaggtagggtatcacacttttccaaggactaatctagccttgttttaatccttcttccttctggataaaaatttgtaagatacctaatcactgaattgcctctactccttgactgtgtccaatccaaaactgttctcctcctccttaaactctccttagatttagttacccagcataaacccaaatcctaaaataagttctccccagtcacctcttaccaagacaccttatattttctctgatatgtgttctccctttctgaacaagctaaataaacctaattctttttgactacaggtatgtttctggtagaattcgatctgtaaaatttatcacagtcagctctcttaagtccagaccagcaatactcagacaggaagaagcaagaatgttaaggactacctggaaagttcagtggtcctgaagcaacttgacttgagctggtatttgtgtatgtgtggtgaggagagggatctgggaaaagagaggtaggaattattaaatgtgagtagttctctttcttctttcatcagcccttttcatggccttgggcaaactttgagcctcattccatttctgtaaaagatgaatttggaatacattttcaaggaatccaggaaataacatccccaaatatgccacactggtatgatgattgcttggggaacagcacatggagagaggggcttttcatgaatttcccttatcagactaaaggctgacaatccagaaggaattcaattatgaatccccttccagagagttttatctatcagggaagattaacacaccacaggagaagatattgaagtgtgacaccttgttgtccggacatcatcattgtttgccacattccacctaaactattatatgtgtaagtaaaaaatgttttcattttcttctttaagtgaactctcaaatttgacatgtattttgaaaggaatatttacatcactgcttaaatgggaaatcagcattgctcggaagaaatgaaaaggttattgctaacacacacctcaaaacaaaacaatattttaaaactgcaggcatggttgcctgtttgagagatctggaaaatgaaggctttactctgttagaaagggagataaatactagaaaaatgttaaataccatactggcctcaaacaactagcctgttggtttgaaatgggacgttctcactctgctgtttaatatcgcttaatgtccttcatgcacccttagagccattcatttttcccaaatggggtgcatcccacattttaggatacgatttccatcgtttctaggttaatttggactcatcctttagttcgcagattaaaaaataaatccttcagagaagccttccaagactactgcccagctaaattactttccccttacaataggaggcactaaatacacctttattgaaagcctattcccccatactacttcatcgtattcattacattggggcacggtgcatttatgttgtcagatctcctattaactagagaataaattctgagcgtactgtgcctctctgtacacttctgtaacttccagatctttgcacaatgaatacaaatgatgtaaggaatgacaccttcacagttcctgcaaccccaggatggtttagccccaccttccccctcagccaatgacaggcgcccccctctgccgctccggtcgcggacggtgggcggggccacgccgtgacgcatccgtgcgtctgtggaaggctgcgtttccggcctgagaaaccgtcatgtttctggggagtcacctcagctggcagttaccaccgtgttagaaagcagcctcaggaccggccacctccatcactggcgtcaccatgggggctgtgctgggtgtcttctccctcgccagctgggtgagttcggggtcccgagtcctcgcc

SEQ ID NO: 26693 - DNA, 2300 bp, Homo sapien
gcgggtgcctgtagtcccagctactcgggaggctgaggcaagagaatggcgtgaccccaggaggtggagcttgcagtgagccaagatcgcgccactgcactccagcctgggtgacagagcgagattccttctcaaaaaaacaaaacaaacaaacaaaaaaaccagaaattgcagagagtcaaagctgttttcttctgctgagtcagttcctggatgagggccacagaactggttggcaggtccagtggggccatctggttgttagaaatgcaaaaacctgaaaagacatctcaaaaggctgatcttaggttcacaatagcgattttacctcaagagtaattgggggccaggcacagtggcttacgtctgtgatcccagcactttgggaagctgaggcaggcagatcacttgaggtcaggagttcaagaccagcctggccaacatggcaaaaccccgtctctactaaaaatacaaaaattagctggcgtggtggcaggtccctgtaatcccagctactgtggaggctgaggcatgataattgcttgaacctgtgaggcagaggttgcaataagccaagattgtgccactgcactccagcctgggtgacagagcaagactctgtctcaaaaaaacaaaacaaaaaaatcttatgacctctagaataagaataatggtgggtactatttagaactccagcccttctcatcttggcttggtggctggtggcctgtggcctttcatttgttttacaagaacagtttagctttctggaaagggctattgtttaaatgatacactaaattccttcccaaggctagtttggcctggcttggcatggtggctcacacctacaatcccagcactttgggaggccgaggcgggaggatcacctgaccaacatggagaaaccctgtctctactaaaaatacaaaaaattagctgggcgtggtggtgcatgcctgtaatcccagctactcaggaggctgaggcaggagaatcacttgaactcaggaggcggacattgtggtgagccaagttggcgccattgcactccagcctgggcaacaagagcgaaactccgtctcaaaaaaaaaaacaaaaaacaaaaaaacaaaaaaaactggtttagcctatacccaggaatgaacaggacactttagaggttagaagcaagatggggtcagttaggtctgatatctcagttatgattttttgcaaaggtggtttcaggatgacaggtgtgagccattgcgcccagcccctgatagatatttagactggtcgcaacccttttgcttttacaaaaatgaattaatgaatatatcctttgtgctcaggtttcagcatatctgcagagttattccaagaagtgtagttgctagacacaaggaaaaataaattattcctcatattgaaattaaatctggtgatctaattctccatcaaagaaaccaatttattcactctttgccacaccaccccttcagagactataaaagagaggaatctgccacccttcccacatcagttttcttgtctttaaatattcccagtcttggcagggagtggtggctcacgcctgtaatcccaccatgctggtaggcccaggcggatggatcagctgaggtcggagttcgagaccagcctggtcaacatggcgaaacctcgtctctactaaaaatacaaaaattagccaggcgtggtggcaccttccggtaatcccagctactcgggaggctgaggcatgagaatcgctcaaacccagggggcagaggttgcagtgaaccgagattgcgccactgcactccagcctgggcgacagagtgagattctgtctcaaaacaaaaacaaaaacaaaataacaaaaacccagtctaccaagccaccacctgaggccctgtctcctcctcgcacggtccccatttgaggttacagagagataaactgaggcacaagcagcacccgcggcccaagacctccccttggcctcactgtccccctttccgtatcttccccgggccaagttccaacccggatccctccttcgcagctcagccctcgactcccacttcgtccctcctctgccccctccgcggctgcggaaggggacgcgaaccgtcctggtcccatccgagccgccgtagcgcgagtgccgcgggagttcggcagcccaggtcgccaaggcaacgggctccgctgcgggttgcgggctgcgggcgctaggctgccccggggaggcgctgcggaccggcggcccaggcacggagaggcggcgagaccgcaggtgagcaggagccggg

SEQ ID NO: 26694 - DNA, 2300 bp, Homo sapien
ccccactgacatcactatgccctacccagaccatggcagttgcctccttcctggtatcctgtcctccctcacccccgctggccccctgtaatgccctcccctcacagcagggagcccaggcttctcaaagtgccctgtgggtgcgaaccacctgggggtcctgtttgtataaaatacagattctacttcagtaggtctgggatggggtctgaaagtctgcatttgtagtcagctcccaggtgatgtgggtgctgatgatccctggatcacactttcagtagctggagaatattttttccaaataaaagggtgattttgtctcgcctccacttaaaacactccactgacttcctaggaatcccacaccatcgctgggtcccacatccctggcaggattcagctcccatcagaccttctagccccttgctctccactctcccactctctctttcccccttgtttatgggtttgttaatttatttatgatgaaatgaaatgaagctaccatccaccccagtactggaacattatcaataacctgtgtgtggccaggcgtggtggctcatgcctgtaatcacgccttgggaagccgaggtgggtggatcatgtgaggtcaggtgttcgagaccagcctggccaacatggtgaaaccccgtctctactacaaatccaaaacttagcagggcacggtgccacgcgcctgtaatcccagctactcgggacgctgaggccgagaactgcttaaaatccaggaggtggaggttgcagtgagccgagatttcgccactgcactccagcctgggcgacagagcaagagtccatctcaaaaaaacaaaaacaaaaacaaaaaaacaaaaaacaaaaattagccaggcgtggttgtgggcgcctataatcccagctactcgggaggctgagacaggaaaatcgcttgaaacgctgggggtgcgggggagcggtggggaggaggcgggccagaggggcagaggttgcagtgagcccagatcgcgccacttcactgcagcctccgcgaaagagcgaaactccgtctcagtaaataaataaataaataaataaataaataaataaataaataaataacctgtacccgcgtgttatttccctccgtccttacctcctcccggctccttccctttcacctgagataaccactcttctcgtatctatgctcatctttcccttgctttacattttttccaccgatgcatgtgtctaaacatacatacttttggttttgcttttacacattctaaaagttgcaccattgtatgcagttttccgcaacttagtttttttcactcaacattgtttctgagacattgtttctgttgttgtctggctgaagttcattccgtttcactgctgtctaacgtttcatggtgtgaatattccggtttatttgcccactcgcccgtggaggggcatttgagggtgtttccaatgttcctgttattcggaatagcgctggtgtgaacattctgcacaggtctctggctgcgcctgggcgggtttcttaaaggtgaatgcccaggaggggactgtctgtgttctccctccctccgagctccagccttcctcgcctcctttcactcccagctccctggagtctctcacgtagaatgtcctctccacccccacccacccctgatgaactcctgcaggttctgcaggccacggctggcccccctcgaaagttccttaactatacaattatggtgtgtgtttctgcgacgagcgtccgtctatccggtggaaggcacgccgctcgaggcttgcgatgctcccggggtccccgcttctagcttgggcctggcgcacagcagcgcccagactgcagggggacgcttgaaagttgctggaggagccggggggaaggcagcgcccagcgaggcggctggagcgcgcgcccacaggtgggtccggtcgggcgccgcggggccgtagttttcgggtcggcgggcgaggacgccgggtccagaattccaggaaatgcgcgatccaggccggcgggcggggcgggggctccggcgagagggcgggccccgggaacggcggcgggcggggcgggaggcggggcccggcccgttaagaagagcgtggccggccgcggccaccgctggccccagggaaagccgagcggccaccgagccggcagagacccaccgagcggcggcggagggagcagcgccggggcgcacgagggcaccatggcccagacgcccgccttcgacaagcccaaagtgagcgcgcgcgggggctccggggacgggggtccggcg

SEQ ID NO: 26695 - DNA, 2300 bp, Homo sapien
cctccacctcctgggttcaagcgattctcctgcctcagcctcctgagtagctaggactacaggcacgcctggcgaatttttgtaattttagtagagatagggtttcaccatgttggccaagctggtctcaaactcctggtctcaaatgattcacccaccttggcctctcaaagtgctgggattacaggtgtgagccaccgtgcccggcccccattttttttttttttaaggcagggtcttgctccattgcccaggcaggcatgcagttgtctgatctttgtacactgcagcctcaaactcttgggctcaaaggatctccccgtctcagcctcccaagtaatcaggactacaggcatgtgtctccacatgcaactaatactttaagattttgtagagatggagtctcactatgttgcccagattggtcttgaactcctggcctcaagccaccctcccaccttggcctcccaaaatacggggattacaggcatgagccactgtgcctggccccaaatttcttatggtcgataaagtttctttcagctttgcaacttattactggtacagtagccccctcttctgcaaggttttgcttcctgaggtttcagttgcccatggacaaccacagtctgacaatattaaatgaaaaattccagaaatcaacaattcattaagttctacattgcatgctgttccgagtagcgtaatgaaatttggtgctgccccactctaccccaccctgtcccaccaggggtgtgaattgcccctttgtccagcatcttcactacctgcccattcgtcaacttagtagttgtcttggctattggatcaaaaaaaacatagtctaaataggattccgtactatccacggtttcaggcacccactgagggtcttgaaatgtatccctcgaggataaggggggactactggaaggtcataaaattctaggattgttgtcaaatttggaagaacctctatcaagtttctttcatatcggagctgtaagatttccggacttattatgtttccttgatgactaatcttaaaatttttttgaattgatgctttctattacatcctttttgtagtggtgtattttgacttttgttattttcatcaatgtcagtattccgtgacaacttctccttagctagatcccccaaaatgccagaagcactggggcaatacccaaaagaaggggaagtatgacagagagggaagttggagtgagaggggcagcagtcttaataaattacagttaaaacatcttacattggcaaattctactaaagcatgtgatcctgagtgtgcattacttggcccctcccaggcccctggaaggcccctggcaagtgaggggctctaaggcttaagctgtgactttcacagtaagtttgctaaatccatttctgcctttccccagcgtgatggggagattctgtccacctccacttaagcgttgttttttacaggaagcctccagaataagctagttgcccctacccccaccccattatctgcgtcatgaggctggaggtcatgactacctggctccttctgtatcctaagtagactgaagagtgcctggtacatagtagaatcttaggctcagggctgaggtgagctgccagggtcatgcagataggaactgtcagagctcgggatcagccagaatgaatgagtgaaagaacgaatgaatgccagcttcccagactcagtcagggaaacctcatttctttctttctttctttttttttttttttgagacagagtctccctctgtcacccaggctagactgcagtgtgcgatctcagttgactgcaacctccgccttctgggttcaagcgattctgctgcctcagcctcccaaatagctgggactacaggtgcacttcaccactcctggctaatttttgtattttgagtagagatgggatttcaccatgttggccaggctggtctggaactcctgacctcaagtgatcctcctgcctcggcctcccaaagtacttggattacaggcgtcagccaccgtacctgactagaaacctcatttcttaccagaactcttgatggcctgcttcccatcctccatcctggaagactgatctgaaaccccaggaggaggtcctctgagccctgaggcagagatctctcacctggaagatgggtctaatgactgcgccccacacacaccagagaggactgcagatagtgcgggatgagaggaagatctctggccctggagacagcatcatcaagcggtagcttcatctttgggagctggggcctctgcag

SEQ ID NO: 26696 - DNA, 2300 bp, Homo sapien
ataagaaagagcttggctgaagtaatgagggctggccctgaagccttgcggcagtacagcccaggtaagctgctgggactgatgggtgtcaggatcggtccaggtaaaagcaaagagaggctgggacaaggggtgtaggagaatagtgaaaaaaagcattttaaagatcaagaatggaatagtgagttgtggaggaagatattgaggacaaaagagcgtacgggttgggcaccacagggtggataggcaaaacaatttggttgataaggcacagatcctgaactaacctgtaagacttgtccggtttttgaacaggtaaaatgggagaattgtaaggagagtttataggttttagaagcccatgctgtagcaggcaagtgataacaggatttaatccccttaaagcctgttgtgggatgtgatactggcattgagtggggtaagcgtgattaggttttaatgggatagtaatgggcatgtgattggttgccagggagggagtggaggtgtcccatatttgtgggttaaggtcgggggatatgagaggaagacccaaaggaggctttgggttgggaagaagggggcaatgagatgtggctgtagtacaggaataatcagggaagcagataatttggttaaaatgtctcagcctaataaggaagctgggcaggtggggataactgaaaaagagtgcataaaagaacgttgtccaagttggcaccagagtgggggagttttaaggggttttgaagcttggccatcaatacccacaacagttatgggggcgagggaaacaggcccttgaaaagaagataatgtggagtgggtagcccccatatcgattaaacgggatggacttaccctccactttaagagttacccgaagctcagcgtctgtgatggtccaggaggcttctgaggcgatcgggctacgtcagtcttcagctgctaagccgaggagatctgggaaggagtcggccaaggaacatagggtttgggctccaggggctttaggagtggcagtgatgtgagtcggacagtccgacctccagcgggggcccgcacagacagggcacggcttaggaggaatcccgggctgcgggcattctgaggcccagtggccaggcttttagcatttgaagcaaggtccacgaggatgttttgaaggagcccctgggagctgtggcttggatgttctgaagttcttgtatgctggagacgtggttgtgggctgtcttacagcggaggcgagcagctgtaactcagaaatgcgttgctgcctggctacctcctctgtattattgtacactttgaaggggaggttgattaattcgtgttgtggggtttgagggccggattccaatttttaaagcttttttctaatgtcaggagctgggtgataaaatgcatattaagaataaggcggccttctggcccctctgggtctagggcggtaaagtgtgtaagggttgctgccgagcgggccatgaactgagctgggttttcgtctttaccttgggtagtttctctaagtttgtcataattaacagctttgtaagctgcctttttaagcccttcaactaggcaggaaaccatgtaatctcgcctagccatacctggggaatctgcctgatagttccattgggggtcctctcggggaactgctctactgccttcctggaggtcaggttcatgaagccggcggttatcagcgtgagattgggctagagaaaaaactctttcccgttcatctggggagagggtagaagtcaggatgacatttcagtcactccaggttaaactgtaggacagagttagatatcgggattcctgtatatatttagtggggtctgatgagaaagagcctaaatgctggctgatttgggaaaggtctgatagagaaaaaggcacatgtaccctgactatgccttcagctccagccacctctctaagaggaaattgttgggcaggtgggggagagctagccgcagaacgaaactgaaaaccagactgggtgtggggagggcgggtaatagaagggttataggatgtgggagcagaggctgaagaagagttggaggctgattcagcctggtggggagcgagctgaggaggagcagtctgggaagaaggtgagacgtcagatggttcagtagaaaaggaagattcacaagactcagcgacgcttggggttgggactgaagggacaggtgggagggaaagaaggaggatttgggacgagtcgcattgggaacagagactagggagggaacgaagtgtgaaaaatgcctggacgtaag

SEQ ID NO: 26697 - DNA, 2300 bp, Homo sapien
tttatatatatacgctatttttatacttatgtatatatatacctttatttatttatttattttgagacagaatctcgctctgttgcctaggctcgagtgcagtggcgcaattacggctcactgcagcctccacctcctggaatcaagcagttctcccaccttagcccccttagtagctgggactacaggtgtgtgccaccatgcccggctaaatgtttttttaaaaaattttggcaatatgttgcccaggctggtcttgaactcctgagcttaagcagtcctcccacctcggcctcccaaagtgctgggattacaggcgtgagccaccatagccagctgtgcttttaaaatgtgtgcatgtgtgtatatatatatgtatatgcattttatatataatatatttatatgtatatattattttaaaacctttctatttaagtcaaaattatgttgtgtttttctggttagttattgctgatgtaaaagcgtcattgatttttgttgctgactgtgtatctggcaaccttgctgaactctcttatttgttctaatattttgtcagtttatttggttggtttttcaaggtagatgatcacaccatctacaaacaatgacagttttatctcttcccttccaataattacacctcttattttctttccttgtagctcagcccagctctccagctctatgtattaaacagtagcagtaataactagcattcttgccttgttcctcaccttaaaaggcatgtattatataaaacttttctccactagcaatattttctgtaggtttttggtattaaaaatccctactaaattaaggaacttctctcatgctcctagtttgctaagaatttttaaaaatcataaatacataaagaccttatcaaaacctttttctgcatcagctgacatcgttggatttttccttttgattgaatgatgtagtgagttacactggtggattttcagatgtggatacttttctgggataaacccttcctgatggtgatgtagtatcattattttaactctgctagactcagtcaggaaagattttgtttagtgttttcctatccatattcataagtgaaatggacctatactttcctttgtggtattgtcttatctggcttttataatcaagacaacacttttaaaataagataggttggtttttttttcttttgttttctttttaagcaacttgcatatgatacgaattaattgtttctaaaaagtttctgcaggctgggcgcggtggctcacacctgtaatcccagcactttgggaggcctagataggtggatcgtttgagtccaggagtttaagaccagcctgggcaacatagcaaaaccccatctctactaaaaatacaaaaattagctgggtgtggtggtgcatgcctgtagttccagctacgtgaggggctgaggcaggaggatacctgagccttgggaagcagaggttgcagtgagccaggattgggccactacaccctagcctgggcgacagaatgagaccttgtctcaaaaaaaaaaaaaaaaaaaaaaaggttcagcagtacttacccatgagaacatctaggctgatttttaggggagtgggagggctttgacaccattacagtttctgtaatactgattgacctactgaaattctctatttcttcttgggcccatcttttgacattttatacctttctattaatttctccattttcccagaattttcaaatttgtaagcatcataaatacaaaaggaacttatcaaaaaatttttccacatcaattgacatcatagattttcctttggatctaatgatgtagtgaattacactggtggattttctggaatgtttttccgggataaacgcttcctgatggtgatgtggtgtcattattttaactctgctgaattcagtcagcaaatattttgtttagtgtttttctatctatatattcataagtgaaatgggcctataattttcttttttgtattgttcataacagctcttaaattaacttcaaattccttggtcaacgttgttccccctttttactcggcatttgattttactcccttgcctcatacttctttcatcctgatcaatgtcatcaggattctctacctcatgttgatttcatcctagacatggcttctggttctgttcgtcttctgcagtcttcctttgttctccaattcattgatttgttcccagaagcttttctgttaaacgcagctgagcctttctttggctcttaatgactctgagtagttccatgtcttcggcga

SEQ ID NO: 26698 - DNA, 2300 bp, Homo sapien
tcctggatgcaggcaataacgggtggggggcctacagaatttaaagataaaataaaactgatgagaagtcagtctgcttttatgatcactgtgcaatggcagatctaaataatttcagtggtaaaatactttgtcctgaaaataccctttattgatctaagttctaacaattggtgcagtaactgttggggtttaataatgtatatgtaaagcttcaaatcagcacatttttattcttatcctttaataaacatattctacatggaagtcaacttgacttggagaactttaagaatcctatagttgcccccagagcatgtggtctcaggaacacacatcagttgagagtaagctcctcacaactctggaatcttccaagcttgctttgaatgcattcctgtctccaccgtccagcattcatatttctgcatttatttttattattattttgtgtgtgtgacagagtctctctctgtcgcccaggctggagtgcagcggcaagatgtcggttcactgccacctccacctcccgggttcaagcaattctcctgcctcagcctcctgagtacttgggactataggtgtgcacccaccacgtccggctaatttttgtatttttttttttagtagggacgggtttcaccatgttggccaggctggccttgaactcctgatctcaggtggttctcccactttggcctcccaaattacagacgtgagccaccggcccagctgtatttctgtgtttaaacagtagagtgaaatcaactatgaacgcagaatgatgggaaagatgacgataagggtatttcaattttgtcattttacgaaactacttggagttttgatttgtatttacagtttttaaaagagtaaaacagtgtgaactgtgaatggtaatgattttgtttggtaagtgcaaattttaattcatacatgaaaaatatttgttttgtttcatgattattactgaaaataattttgtactatgaaggaagaggggtgttaaaaatgatccactgtggatgtaaattattctaggcatgcttctgactaaaacattagcatttccacaagaatcccaaaaaataaaacaaaatttaaaagatcccttctgtttcttttcctccaagtttccagacccccatctccaccctggccacctcttcctgccataaataatcaaatcccacactttcatcttcaccttccgtttccattgcctcttccgatgggacagcacccgtggggaatctcctccatgctcacaatccccgtcttgccactatatcaagtcacacttcttcctcaccaatcgcccattctggaacctctgctatccagctagatcactttgaggtttggacaactactggtggaggtaatgggggccccagacagcccttgacatcacctcttttatctttgccaaattctacaaacaaagcccatgtctttctgtcccccgcccccatggctggcacatagtagatgtccccaaatcttggtgatgtgaacttgtgtgtctcacccttcacagacatcaccatttcccgttgcacagaaggctccactcataccaggcgctttggctcccagaataagcaggctatcatgctatgtccgacatctaggcgttggtacgtactgttcccttggcctggaacattctgccctctctcaccctctcttttcttggctttctgaaatggcacctccatcagaaagtgtccctcactcttggtctgagcaagggaccttgcctggtattcctgaacttccacctgttttccctctgttttctccctctctgggccttgtcctcaggtcagtgttgtgcctccagctcctgcagaggcgaactcagaggcggccgaatgaaaccaaatggatttggcttgaccccatcatctagcggtgcccagcaagcgctggcacatagtaggtccagcctgcccggactcgcccaccacgggcccccttccagagccgggaggcaggccaagggaggccccttattgccaagagcaaacaggccgcccagggaagttttgctctgggtcacacccacctctgggtggctgccaatctgcctgccagaaaccgcaggctgggccgcggctacccagagtcagggccacggagcttaggagaccttgggtcagctctgcaaaggggttgtttactgaatgcttctggtatctgcagccccgctggggttcggacagggggtctggaatagggcttcacaactacagcagggctaggaccctcttgggctggaaggagctggagaggcc

SEQ ID NO: 26699 - DNA, 2300 bp, Homo sapien
cctgcctcagcctcctgagtacttgggactataggtgtgcacccaccacgtccggctaatttttgtatttttttttttagtagggacgggtttcaccatgttggccaggctggccttgaactcctgatctcaggtggttctcccactttggcctcccaaattacagacgtgagccaccggcccagctgtatttctgtgtttaaacagtagagtgaaatcaactatgaacgcagaatgatgggaaagatgacgataagggtatttcaattttgtcattttacgaaactacttggagttttgatttgtatttacagtttttaaaagagtaaaacagtgtgaactgtgaatggtaatgattttgtttggtaagtgcaaattttaattcatacatgaaaaatatttgttttgtttcatgattattactgaaaataattttgtactatgaaggaagaggggtgttaaaaatgatccactgtggatgtaaattattctaggcatgcttctgactaaaacattagcatttccacaagaatcccaaaaaataaaacaaaatttaaaagatcccttctgtttcttttcctccaagtttccagacccccatctccaccctggccacctcttcctgccataaataatcaaatcccacactttcatcttcaccttccgtttccattgcctcttccgatgggacagcacccgtggggaatctcctccatgctcacaatccccgtcttgccactatatcaagtcacacttcttcctcaccaatcgcccattctggaacctctgctatccagctagatcactttgaggtttggacaactactggtggaggtaatgggggccccagacagcccttgacatcacctcttttatctttgccaaattctacaaacaaagcccatgtctttctgtcccccgcccccatggctggcacatagtagatgtccccaaatcttggtgatgtgaacttgtgtgtctcacccttcacagacatcaccatttcccgttgcacagaaggctccactcataccaggcgctttggctcccagaataagcaggctatcatgctatgtccgacatctaggcgttggtacgtactgttcccttggcctggaacattctgccctctctcaccctctcttttcttggctttctgaaatggcacctccatcagaaagtgtccctcactcttggtctgagcaagggaccttgcctggtattcctgaacttccacctgttttccctctgttttctccctctctgggccttgtcctcaggtcagtgttgtgcctccagctcctgcagaggcgaactcagaggcggccgaatgaaaccaaatggatttggcttgaccccatcatctagcggtgcccagcaagcgctggcacatagtaggtccagcctgcccggactcgcccaccacgggcccccttccagagccgggaggcaggccaagggaggccccttattgccaagagcaaacaggccgcccagggaagttttgctctgggtcacacccacctctgggtggctgccaatctgcctgccagaaaccgcaggctgggccgcggctacccagagtcagggccacggagcttaggagaccttgggtcagctctgcaaaggggttgtttactgaatgcttctggtatctgcagccccgctggggttcggacagggggtctggaatagggcttcacaactacagcagggctaggaccctcttgggctggaaggagctggagaggcctctgcaagctgtcacaggctcttggtgctggcactggctcaggctttcacacacacacacgcgcacacacacacacacacacacacggacaggcacccccttggtggccttcacagtttcaccttcaggtaaatgggctcatcctttgagccatgaggatgggaagcgaagcaaggaatgaaaaagctagtgtgtttgtgtgtgtgtgtgtgtgtgtgtgtgtgtgtgagcgcgcgcgcgcgcgcgcgtgtgtactcgtgcgtgtgcctgtgtgtgcctgggagtgacctcacagctgccggaacataaagactcacaggtccgcctcccaggctcaaagctggctctgcaggggacatgagaggcacaccgaagacccacctcctggccttctccctcctctgcctcctctcaaaggtaaggaggcccgggccctggaatgcactgctgactatttgggtgtggagggggtggggatgtaaaatcgcagccaaggacccccttggcagaattcctccagggccccacattgggcacagtctggccc

SEQ ID NO: 26700 - DNA, 2300 bp, Homo sapien
tgctttatttacaagtactgtaaggataaggagggtgattcgttacactgactgagggatgattgcttatgaaaatgtatctgaagaacaattgagataagtaacacttcgcttacaaagctgttatttacatttgctgtgacacgtgtaaacagcacccacagagtttattttacacttgcacagcccttaccacgtgtaagacactgagggtttcacaaatataaactcatttaatctcacaaccacatgaggtaggtacccttctcttataaatggaaaaaaggggtacagagaggctaagcaacttgcccaaggtcacacagctcataagcggcagagctgagatttgaactcagggagctggctccacaagctccattgctcaactgcctgacatgcagcagttgattagtacataggctgtgattgttaataactgtattaagggatttttcttattccatcttaattcagacttcaaacacctgcaggccaaaggcgtacttgggtccctggtccttcctgcaacttcccaccttggtctgtcaacatgatgggtgctcaacagtgtttaatgatttaaactgaatttagaggccgggaactggtgaaccccaaagagtccagctaagacatcacaaaggctcagtctagggctttgcagggaacatactgccaaaaacctctcccatcacttactcgttgaacgctcttctctaagggccaactctgagctgtgagatgtgctgcagattcaccatcgtgataacagcgcatccaatgccgggatcctgatcttccgccccccagaacggcctccccagtctgttgagagcacctccatccttctcatggctcagactcaagacctgggagtcgttctagaggtctctctatctctctctcttttttttttttttttttttgagatggagtctcactctttcacccaggctggtgtgcagtggcaggatctcagctcactgtaaccccatctcttgcgttcaagcgattctcacgcctcagcctcccaagtagctgggattacagacacataccaccatgcctcgctaatttttgtattttagtatttcagtagagacggggtttcaccatgttggccaggctggtctggaactcctgacctcaagtgatccacccgcctcggcctccctaagtgctgggattataggtatgagccaccacagccggtctagacatctctcttttctcacctcccacataccacccaccagcaaattcatcgtgtatttccagcatccgacactcccatcccttctggtctgagccccgtcatcattggcctggattttgcagtagccccataatcatctccctccttctgtcgttgcccctggtctattcacaacacagcagtcagagagctcctgggaagtcataagccagatcacctccctcctctgccccaagccttctggtggcttcccatctcagaggaaaagccaaagtccccacagtggcctacaaggccccaacaggatcctgttcatgcttcctctctgacctcctctcctcctgctctctgctccagccacattggccccttgctgttccttaaataccccaggcacactcgtgcctcagggcctttgcactggctgttccctctaccagcattatttctcagcaaggccttccctgctggaggattagatgagctaggggacttacagcattttgccccaagcctggcacatagcagatgctacgtggaagcataaccctctcctgtttattgagcatctgctatgtgccaggcttggggcaaaatgctgtaagtcccctagctcatctaatcccccagcagccctgtgagccgggtaccaaggctcagagaggcaaaataacttgccccaggccccacaagtgggagccagagttggaacctaagtatgtgtggttttggttctgaaacccctgtgtgtgtacagacctactggaaggttttctcagaagatctgggagaacttgtttgctaatgagtcctttccccagacgtagctcagtggccacccaggtctcacacacacgctgtttcccgtctgcacttcctgagcagctcacacgcttcaccagcgctcttacttcattctgtcttggagatgatgccctcacacccgtccccctttcccaagcccatgagtccctcaaggcaggaactgtcctctttctgtctgggagcacagtggttggcacacaggcgggaaacagtaaatatctctggaatgataaggagtagggctattttatcaggg

SEQ ID NO: 26701 - DNA, 2300 bp, Homo sapien
ggtcggtccatcagccactgcacttcagcctgggtgacagcgtgagaccctgcctcaacaaacagaaacaaaacaaaaaaacctttactgtggtttgttttagatttgaaaatctaagtgataggagtatagaggtttgctaaaccattctctctactttcatgtatatttgagaattttcacaataaaacacttttttttttttttttgagatggagttttgttcttgttgcccaggctggagtgcaatggcacgatctcggctcactgtaaccccagcctcctggattcaagcgattctcctgcctcagcctcccgagtagctgggactacaggcacacaccaccatgcacagctaattttttttgtattgtgagtagagatggggtttcaccatgttggccaggctgatctcaaacacctgacttcaggtgatccaccctccttggcctcccaaagtgctgggattacaggtgtgagccactgtgcctggccaataaaacactttttaaaagaacattttctctctgtccatcccaccctattttttcccctgctgtttatttggtctgagtggaaggtgactctgagagttagagtaaacgagaacattgattgagtagttagtatgatccaagcacaaagcaggcctcacttcatttaatcctcagaacaacagtaggcattgttaattccaccctatagatggggaaattgaggctcagaagtatgcagagatttttttcaaagtcacaattccaaggagagggggaaccagctgctgagctcttgctcttgacagcagcccttccctgccagtgaggagcttagcatggcagtgttacaggtggcagttgctgccatatggcaatttgagcccagttgctacagacagaggcctgtcccttttcctcctgccaaggaccacccctccctttcccagtcagcataatatgttggaatcaagagctgtctgtctgaatcaacgggggcaggacttgcatttcacaagacatcatgggctagaaagagtcaaggcaaagaaagagcctgagacgtgaagaaatacatgtgctaatgttagtgtaacacagagcttccctacccaatgccttagccagtaaccatatgtggccatttatagttaaattaattaaaattgaattaagttgaaatttcaagccaggtgccatggtgtgagcctattgtcccagatacttgagagtctgaggcaggaggactgcttgattcaaatacaggctgtctggttccagaaacctgcccttaacatttattcataatcttcgctttatataggctaaggaggcttttgagggaaggaaagctggtataatgtcctgaagaaagtcctgcaggggctgggcacagtggctcatacctgtaattcctctcaaagtgctgggattgcaggcatgagccaccgtccctggccaattctggtttctttaaagtggggcaaggacctgcagacatttgtatggcaactggagtgcagaatccctctagattcttgtgggtttttttttttctagatgttttgtagttgtttcttccacacctaatttgacagtattctttttagcaaccagtcttcattcagttttcagaaaaacaaatctcttccttttgcactcatatttcatcagtttatggaatatctaattcagttacattgttacaatattaagtgtgctgtgtgcaaactgatttgggaacagacccagcagactgttggcaagcatgctcttctacggccaagagccaaaggcgaccaggggcctagggaatggcttactagccataagcattcagtatgcctggggcagtagcgttgcattcagagagcatggagagcgctggttagcctggcaagctggttaaacagattagtaaagaggactttgtgcactaactctggaaaagactccatagtgtggaattgtctctggaagacatgtgccccactggagactacatttcccagcatccttggcatctaggtgtgaccatgtgactagtctccaccaatggaatgtgagcaggagtggtgagtgtcacttccaggcagggcctcgaggaagtaggtgagcttctccatccctgtctgtctagatgcagagaacccaaagccctgcaggatggcaaagctgcaacatggaagtcacccggatcaccacgtaaaggaaatctctccaaccaggaacaaacacctgccttgcaatattaggtaagagataaactgctattgtgttaagccactagatcttgggggctgttcg

SEQ ID NO: 26702 - DNA, 2300 bp, Homo sapien
ccctgagtgggccctgcccttcccctaagatcaggccattccccacatcccactgtctccacaaactcttttcgggctcttgttgggctgtgggtccttggagccccactcactccgactctgagacttcagcccaggtttctgctcctctgaagtctgagcagaaatcggaatattaaacttactgatgctgttgctaaaaatcaggctgaggtagtggcaccagcacgctgcttccagcccactgagcttcatcctgcttctcgggagaagaaggggtccaggccctctctaccaggtactggggcccaattctgcctgggaactgagtcggacaggcactgggttggacatccctacaggcccgggcgtctgctcacttgtgatatctgtaacagtggctcacacttctaaacaaatcctcagggccaagctcagctctccggctccacatctactggttcatttaatcctcacacccactgtattagttccctgttgccactgcaataagttattacaaacttagtggcttaaggcaaatgtattatcttctagttctgtagggtggagggctacacaggtctcactgggctcaaatcaaggtattggcaggactgagttcctttctagcggcttccatatggaagtatgtcctcctctgggacctggagggcctaggcggcaggctgggcctcaggggcttaacatacgtcagcgacttaatacaacagaagctcaaaactggggctcctgattgggggttgggggacaaccttgcaatgtgtcattcagccccaggtttttcccaccttgtgggctccctctcttctaaagactttagttctctgcattcagccgtctggtgggggaaagagatggagcacgtgtagggcagggttttatgggccaggcctggaagtggcatatgtcacttctgcccatgttccatgagctaaagcttggtcacatagaccctgctaagtgcaagaaaggctgggcaatgtggccagctgggcgcccaactccacctccccggtgcatcccggatcccctcatttctctccatcttcacacatttggactacactagccttcgaactggcctccactcctagccaccatcccttttccccatgacagccaggggctctttaaaaaatatgaatcagatcattgtggtggtgttgcgtgtgtgtttgtttgcctgtgtttgtaatacagcctttccatggctttcaataaacccacataagggcttgtaagaccctgtgtgaagttgcctctttgccttccttctgctcccccaaagtatctgccccccagttctctgggctccagcgacaccggctcctctgctattctggctgccaagtcatgctcagttctgttttaagcaccaccttagatggtggggttcaccttccccaagaaactatcccttttccttctttctcactcctgtcttaaattagtttcttgtttgttagctggccctcctcactaggatatcacttttacttacaacaggaatgttgtttgcaccagtaggtgcttggtaaatatttgtcagaggattgactgactgaatgaaagaaggaaggaaggagagaaggaagggaagaagagatgaagggacgaagggaggaagggagggacggagggaggaagggagggacggagggaggaagggagggacggagggaggaaggatgggagggaagaagggagggagggatggggaaaggagtgaaaggaaggaaggaaggaaaggagggagggagggaggaagggaggggaggggggaggggagggagggaaaaaggaaggaaggaaggacggaaggaaggacggaagactggcacgaggtcacaacatgagttagtggcgggaacaggacttctgcaggcccggggtttgggcctttgcttcagatctcactattcacagacacatgaaccccgggcaggcgagtgggaggcggacaggggagcggttcttccggcccccacccgtggcgatcccagcctccaggttcccggcagtcgccccgcctcgcccgtcacaaccctgccgcgtggggccggggttggagggggcggagcgcgcggtccgggcacacggagcaggttgggaccgcggcgggtaccggggccggggcgccatgcggaggccgagcgtgcgcgcggccgggctggtcctgtgcaccctgtgttacctgctggtgggcgctgctgtcttcgacgcgctcgagtccgaggcggaaagcggccgccagcgactgctggtccagaagcggg

SEQ ID NO: 26703 - DNA, 2300 bp, Homo sapien
gaagggagtggggagaactgactaaagctgtcttaggcaaaataataaaattatctttgttgttgctgttgatattgacttaacgtaaccaaaagatgaagtagcttgcttcaggcagagcttgatccaggagctcacacaatgctgtcattttgatggtttcattctcgggatccagatggtagctacatagcaccagaagctccagtcctgcatctcaggctcaagtctggtgggaaagagagcgtctcactccccatagttcaaacaaagcttccaggcctgattcttgttggctgaactgggctacatgcctgtctctgagctgatcactggccgaggggaagggatgccctgattggccaggctgagctggaggcccagtctcaggagctgttccctccaccccactgtgatcatgtgccacggggagggggttccgtaaagaaaatttgagatcttgttaccagaggaaggggaagtggatattaggtagccaagcagccgcaagaaatgcacccctcagagtctagagccgtttgcagtgcagctcacactttcacgtgcaagggcatcatctggggctcgcattaaaattcagattctgattcagcagctgggggtggagtgggctgcagttctatgtatctaattagttcccaggtgatgctgatgctgctggtctctgaaccacactttgagtatcaaggcactaaaccacatgagccagatactgggtaaaccttatctccatcccaagagggaagtttcagcatatccattgcatggaggttgactgcttgagtccagagttgttggtaaaccactgggaatgtgtgctttgtctcaccttttcctcttgcagccttaactatggaggagtttgcctggcgtcggacgcccagttcagtgacttcctgggaagcatggggccggcacagtttgtgggccgccagaccctggccaccacacccatgggtgagtgccccaaggctggtttcaaatggactaggggagttgggtgtcacaccagaagctcagcgtctctccctccttcccctttgcctgttgatccatcctctgcgcatgccgcctagagcccagggcacactctcaagccctcagcagagcctaggcacttggtgggagttggttctggtcttattctgggctgggagcaggggaagggggtttcagccctaagtaaaggagaagagctgagtccaagcttgagcttctgaaccatttcccagtctcatctcttggtgcctcttccaggggatgtggagatcggtctgcaggagcggaacggtcagttggaggtggacattatccaggctcggggactgacagccaagccaggctccaagacactgccaggtctggggcctaccttcccctgcaaggtgggggtggaggtcagggaggatatcctgatgggtactgagggccttgaagagagaaaattgggcccaactgtggggaccccctgtcccaactctgatgtcttatgtggaattggtagtttagggtttgtttgaagagccagttgagattgtctgttgaccttgttcctctcctccactggactgagctcctggaaggcagggaccatctttccagcttatcattataccccagtgcctagcagggttcttggcatgcagtaggtgctcaggcttggtgagtgagggggtcagcagatagatgcataagccagggagggggtgggcacattatggactgagagaggaaacaggtgagcacagagtgagcaaaggaagggtggagacagtgaggaccaccagaggaggtggggcaggctgcacccaagcccagctgtacctgctgcccccaaatgcccaccccccatgtgtcctggtgcgtcctccccagaccccatgggggcacacctatctccagcagagggtgggcagcctccctctgttgcaccctttgcccaccatttgagggccaaactagaactcacccctgctggcctctatccccagcggcctacatcaaggcctacctgctagagaatggcatctgcattgccaagaagaagaccaaagtcgctcgcaagtcgctggacccactgtataaccaggtgctgctgtttcctgagagtccccagggcaaagtcctccaggtgaggggcattgacgcgctcacgtgtgtgtgtgtgcacgagcacacatgcacagtaccagaatgagaggagggcacccctggcggggggtgtctctggagggcctcgcctggaggaaacaggcgaggccctcagttcactgtggctg

SEQ ID NO: 26704 - DNA, 2300 bp, Homo sapien
agggacatcatgcgagtggacctgatctaatcacacgagacctttaaaagcagaatctctcaggccagtaagcagaagccaaggtagaaagattctactgaaggatgagaagggcttgacatcctgaaactggccttgaaggtggaaggggccaggtgaaaggaccagaaagccacttctaggagctgaggttgacttctggctgacagccagcaaggaaacaggaacctcagtcctgcaaccacaaggaactgaatcctgccaacaacctgaatgatcttggaagcggattcttctccagagcctgcagagaagagcccagtctggccaatactttgtgaggccctaagcagagaacccagctcaggctgcccagacttctgacctacaggattgtaaatcactagattggtgtttttaagctgcttcatttgttatgcagcaatagaaaacaaacacctgtgttatcttacaggcagttcacaaccatccaaaatggaaggctcctgtccccattgtacagatgaggaacaggacccatgggataaagagttttgccataggccacccagaaagacagcaccacagctgagattcaaactctgggctgtctctttctgaggcctgaactgtttccatgtcgccagatggcttcataaagaggtgtgcgagcagctgagaaggttgtttgacatctggggcctgattaggtgggcagggaccctcacgtcccaggtcacatgcagggaatggaacacgggtttccgattcgctcgtctctgtcctggggctgtgagtgtctgagcccgtgtgtgtctgaggactgcgggtcgccgagggtgataatgggagagtctgtgagtgtgagcctgccaagtgtgtctcagtgtacctgagtctgagggtgtcagtcaatccgtcgggatgcacccacactgggagggatggagtctgtgtggctgtgtcttggcgtgtgtgtgctactctagtgtgtctgagggtgaaggtgtgtgcatctggccgtgtcagtcagagtgtttgacagtgctgagatgatcacagggggaggcgacacagagtgtgtgctgggtctgggcttgtgtgttcatctgagtgtatgaatgtgtgtatgaattctggggtgtctttggtaagtgtgaatgcatgagactgtgtatgcctacctgaacttcgtggggttttgtggcatctgagagtctccccgtgagggaggccgggcaccagggatgtcctgcctacctccctgagtgtgtttgcaggtctctgcgtgagtctgcgtgtgtccgtggacgtgtctgtccccgcatctgtgagggggtgggtctgtgggtgtatctgtccgggtgtctgcggggcatgttgcagagtgaatgtgtaggtgtgggtgcctgtttgagcttctctgtgggtgcaggtgtgaagccgagggtctctgtgtgggaggccgagtgccgacccgcctgggcgggaccctttgagcgcatcccctccgagcgcgccagtgtctctgggagaggcctgtctgggtgagggactggacgccggcctctccgcaagtcggccggctgagggtgggggccgaggcggggtcgggaacagccctcggaccagggcccagacaacctcgcccggcgcctgcctccccgcgcgcacctgccgggcccgggggctgctagaagaggccgcagcccgcgccctccgggctcccacgccccgcagcggcgccccctcccccggcggcacggattggctgcggcgccgctccaagcccgcctcgcgctgccggcggggggcgccgcggaccagagcgcgctgcgccgccaccgccgccgccaccgccgccgccgccgccgccgccagcagcacagcgcgcctcgggctccgcgcgccgccagctcctggcccgcccgccggccccgccgcgcccgccagccccgcagcggagcctcggcccggccccgggccgccgccaccacgccgcgcgccgtactccgcgtcaagaatggggcggccaagctgcccaagccgcccgccgccgccgccgccgccgcggccgaggcgcccggcgccggcgcgggcatggagcgctcgcagagccgcctcagtctgtccgcctccttcgaggcgctcgccatctacttcccgtgcatgaactccttcgacgacgaggacgcaggtaagcgcgcggcccgccccccagacccccggggtgtcccgggatccaggtccggtagccccctccccgacccgtgcgccctcctccccacccccaatcccct

SEQ ID NO: 26705 - DNA, 2300 bp, Homo sapien
tttgcactaacctctccaggattcaaatccaatggttttgacccaaaaccatgctgtttacgttacacaacacgttctcaatcttgttcaacttaaaaggtggcacagtacaggggtcactggcacacatgcctacatgacagataacataagtgacaaaagcagactcaggtcgagaagggtccctggcatttgggaaagtccatgcccagtctagaacaggcagccactccttggcttcagccaattgttgccacacagaaatgtggacacagtgttaccagacaaggcagagaggcagatttctgttcacacagaaacttttcagtttaaaaaagtgttggcaactaagtcaaactgcttagaaatactggagatggcatattgggagggtaaggaatcatccaattgaattggggtatttacgatgggggagaaatagcagctaaaggataagggcagcttttggagaaccctgattgtcacactcaaggaacttatatattgtcatctaggtctgagtgcacactaaataatttaagcaagaacaggacacgattagaatggtatttttaaaagatcacttggcagttgacgggcgaggctgagaccaaatggtgaattagaagtctgtcatttagctaagtaagggtaaaggcaagacggcaaaggcctatttacttggctttttctcctacccgactgcaaactccaagacagcagggccccacctgccttgttcattgctgtgtctccagcactaagcaaaaagcctgttcaacatttgttgaaagaataaatgaacaggagagagggaaggcgagaggcattttgaaggactgagtttaaaaatcaactaccttgaagccggtcgaggtggttcatgtctgtaatcccagcactttgggaggctgaggcgggtggatcacctgaggtcaggagtttgagaccagcccggccaatatggcgaagccccgtgtctactaaaaatacaaaaactagccgagagtggtggcatgcacctgttatcccagctactcaggaggctgaggcaggagaattgcttgaacctgggaggcagagattgcagtgagccaagattgtgacactgcctgggcgacagaaagagactctgtctcaaaaacagaaaacaaaacaaaacaaaacaaaacaaaatcaactaccttcagaggagtagaatgttggtaattgtgagagcagtcatggaggggaggggagccatggaggcctgtttccttccctgaacttcctcaacgagggggcatcttaaagaagaaatcatgtacacagatttttgtgggttttttttggagacagggtctcactctgtctcccaggttggagtgcagtggcatgaccatagctcactgcagcctacaactcccggcctcaagcaatcctctcacctcagcttcccaaagtgctgagattacaggcgcgaaccactgcgctcgaccctacacaggttttttaaaaagacgtttgtgcattggattcctggcacttcacgtggcctcttcagtctaccaaagaaggaaaaggtaagtaccctgaaggattgaaaggattaaatgaacattgagggatgagcaatttctgttcttccctggctccagcattaccaaagcacacagtaagaggactgacatcggcctccgacccagtgaggattactttcggggtggagggggaactgctaaacctcgaatctccgggactggccctggcgcgtttccagtcccagcagaaagggcaatccccatccagaccacactcctagtcctccttattcccacacagcccgtatcttgaccacccccagctccgccctctctcctcccacctccttttcccgctcccccgccccatttccttcttctccgcccacctcctcctgggtccctcccccggccatccgccctgccccggcccctgcaaccctgcctttcgctcttcttcctcctcccttccgtctgcgcccctcccgtggggccgtggcaaccccgtgcctcgcttgcccaatgagaacacggtttggggcggggcgcggccaggaccggagcggaagtggcgatcggagcggaagtggagctaccgccaccgccgccgccgattccggagccggggtagtcgccgccgccgccgccgctgcagccactgcaggcaccgctgccgccgcctgagtagtgggcttaggaaggaagaggtcatctcgctcggagcttcgctcggaagggtctttgttccctgcagccctcccacggtgagtgcggcgcggg

SEQ ID NO: 26706 - DNA, 2300 bp, Homo sapien
aaaaatgtaccatgttcacattgggggaaactgggtgaaagatatacagcaggccaggcatggtggctcacgcctgtaatcccagcactttgggaggctgaggcaggcagatcacttgaggtcaggagtttgagaccagcctggccaacatggtgaaaccctctctctactgaaaatacaaaaattagccaggtgtggtggcacacgcctgtagtcccatctacccaggaggctaaggcaggagaattgcttgaacccgggaggctgaggttgcagttagccgagatcgtgccactccactctagcctgagtgacagagtgaaactatgtctcaaaaaaaaaaaaaaagatatatagcaaccctctgtactgtttttgtaactttttctgtaaatctaaagttactccaaagtaaaaaggttattttaacaaaaaggctaagaacctcttccccaaattcctaaagaacttggcttggtacttagcagaggcgatagaagcttaccagaacaatgtgttgggttgagtcctggctaacgtatgaaccacaggctgagtgaccccagacaagtcactctttcgagtctctcttatcccggctgtaaagtgggagccgcgatgcctcccgcatcgggaggttgtacatgtgaggtgtgaagacatgtaaagtatctggcatgcagcaggcctcatagatgggggtgcgtgctgcatccctcaaacagctcagtaaacagggtgcacgctacatccctccatcactcctcagtaaatgggggtgcacgctacatccctccatcacagcttgctaaacgggggtgcacactacatccctcgaacacagcttagtaaacaggggtgcacgctacatccctccatcacagctttctcgcgggcctgcccagtgctgggcttagcccatggggaggagggaggcagcgcagccccaggagccttccttccccaccccagcagctcttgtcttgtcttgcttttaggtgatgacagagggtggccacagcaaggggtttggctttgtgtgtttttcctccccagaagaggcgacaaaggccgtgacagagatgaacgggcgcatcgtgggcaccaagccactctacgtggcactggcccagcgcaaagaggagcggaaggccatcttgaccaaccagtacatgcagcgcctctccaccatgcggaccctgagcaaccccctcctgggctcctttcagcagccctccagctacttcctgcctgccatgccccaggtgacggcctgcccgcaactcccaccgcagccttcccccctgccccagcaaggcagagcatgaagactagagttctagggaaatggaggtttctaacttgcttctgccgaggactcattaggaagtctttgtttccctctctataaaagggagagatagtgttagtcaaatggcatttcccagtgagagaagctcgtgaatgttgtgctgaaaaagactcttaatgatccagcaagtttgggaaatgctgcgttaagcaagacctacatttttccttcctcccttccttcccttccctcccttccctcccttccctcccttcccttcccttcccttccctccctccctccctccctccctcccttccttccttccttccttcgtggggtctccatgtcacccaggctggtgagcaatggcgtgatcatggctccttccttcttccctcccttcctcccttcctcccttccttcacggggtctccatgtcacccaggctggagagcaatggcatgatcatggctcactgcagccttgaattcctgggcttgagtgatcctcccactgtagcctcctgagtaggtgggactacaggtgtgtgccaccatgcccagctaatttttttgtttattttaaagaaggggtctcgccatgttgcccaggctggtctcaaactcctgggctcaagcaattctcctgccttggcctcccaaagtgctggcattacaggagtaagccaccgtcccccgccctacatttttttaaaaattaaatttttatttttttggagacagagtcttgctctgttgcccagaatggagtgcagtgacaccatcttggctcgctgcaaactcttcctcctgggttcaagtgattcttgtgcctcagcctcccgggtagctgggattacaggtgcgtgccaccacactcagctaattttttgtatttttagtagagacggggtttcaccatgttggccaggctggtcttgaactcctgacctcaagtgatgtgccctccttgacctcctaaagtg

SEQ ID NO: 26707 - DNA, 2300 bp, Homo sapien
gatgcctcccgcatcgggaggttgtacatgtgaggtgtgaagacatgtaaagtatctggcatgcagcaggcctcatagatgggggtgcgtgctgcatccctcaaacagctcagtaaacagggtgcacgctacatccctccatcactcctcagtaaatgggggtgcacgctacatccctccatcacagcttgctaaacgggggtgcacactacatccctcgaacacagcttagtaaacaggggtgcacgctacatccctccatcacagctttctcgcgggcctgcccagtgctgggcttagcccatggggaggagggaggcagcgcagccccaggagccttccttccccaccccagcagctcttgtcttgtcttgcttttaggtgatgacagagggtggccacagcaaggggtttggctttgtgtgtttttcctccccagaagaggcgacaaaggccgtgacagagatgaacgggcgcatcgtgggcaccaagccactctacgtggcactggcccagcgcaaagaggagcggaaggccatcttgaccaaccagtacatgcagcgcctctccaccatgcggaccctgagcaaccccctcctgggctcctttcagcagccctccagctacttcctgcctgccatgccccaggtgacggcctgcccgcaactcccaccgcagccttcccccctgccccagcaaggcagagcatgaagactagagttctagggaaatggaggtttctaacttgcttctgccgaggactcattaggaagtctttgtttccctctctataaaagggagagatagtgttagtcaaatggcatttcccagtgagagaagctcgtgaatgttgtgctgaaaaagactcttaatgatccagcaagtttgggaaatgctgcgttaagcaagacctacatttttccttcctcccttccttcccttccctcccttccctcccttccctcccttcccttcccttcccttccctccctccctccctccctccctcccttccttccttccttccttcgtggggtctccatgtcacccaggctggtgagcaatggcgtgatcatggctccttccttcttccctcccttcctcccttcctcccttccttcacggggtctccatgtcacccaggctggagagcaatggcatgatcatggctcactgcagccttgaattcctgggcttgagtgatcctcccactgtagcctcctgagtaggtgggactacaggtgtgtgccaccatgcccagctaatttttttgtttattttaaagaaggggtctcgccatgttgcccaggctggtctcaaactcctgggctcaagcaattctcctgccttggcctcccaaagtgctggcattacaggagtaagccaccgtcccccgccctacatttttttaaaaattaaatttttatttttttggagacagagtcttgctctgttgcccagaatggagtgcagtgacaccatcttggctcgctgcaaactcttcctcctgggttcaagtgattcttgtgcctcagcctcccgggtagctgggattacaggtgcgtgccaccacactcagctaattttttgtatttttagtagagacggggtttcaccatgttggccaggctggtcttgaactcctgacctcaagtgatgtgccctccttgacctcctaaagtgctgggattacaggcatgagccaccatgatcggccctaaatttctttactatctacactattctaccctaagatgccaatgtctactgagactctccaaaacaggcacagattatccagcatttccccagcttagatggtcatttttttgtgggatgcctgttaacatctcccctggatgttaatgttctgaggagcatggtttgggaaaggacctcgtgggacttacaggaagtagaaagatgtcacccattaaaggccaccacggtaagaacattcctctccttttagcagttgcttaagctgcacaagttggagtaagatgtcaccctttttatccaggtcattgggttagctgacagggagccaagattgaaatctaagatctttgccctgcaggattcagggctaatggacatcctgagatgggaggaaggagctttcattacagccttgtgggtcttgactcaccagtccctgcaggagccagtggagttcctgccatggtgtccctgaggaggtgtagcttctcacctaccctgccgccaagcccctcagtctgggtcttcttttcccatgcagcctccagcccaggctgcatactatggctgtggcccag

SEQ ID NO: 26708 - DNA, 2300 bp, Homo sapien
cccagcgcaaagaggagcggaaggccatcttgaccaaccagtacatgcagcgcctctccaccatgcggaccctgagcaaccccctcctgggctcctttcagcagccctccagctacttcctgcctgccatgccccaggtgacggcctgcccgcaactcccaccgcagccttcccccctgccccagcaaggcagagcatgaagactagagttctagggaaatggaggtttctaacttgcttctgccgaggactcattaggaagtctttgtttccctctctataaaagggagagatagtgttagtcaaatggcatttcccagtgagagaagctcgtgaatgttgtgctgaaaaagactcttaatgatccagcaagtttgggaaatgctgcgttaagcaagacctacatttttccttcctcccttccttcccttccctcccttccctcccttccctcccttcccttcccttcccttccctccctccctccctccctccctcccttccttccttccttccttcgtggggtctccatgtcacccaggctggtgagcaatggcgtgatcatggctccttccttcttccctcccttcctcccttcctcccttccttcacggggtctccatgtcacccaggctggagagcaatggcatgatcatggctcactgcagccttgaattcctgggcttgagtgatcctcccactgtagcctcctgagtaggtgggactacaggtgtgtgccaccatgcccagctaatttttttgtttattttaaagaaggggtctcgccatgttgcccaggctggtctcaaactcctgggctcaagcaattctcctgccttggcctcccaaagtgctggcattacaggagtaagccaccgtcccccgccctacatttttttaaaaattaaatttttatttttttggagacagagtcttgctctgttgcccagaatggagtgcagtgacaccatcttggctcgctgcaaactcttcctcctgggttcaagtgattcttgtgcctcagcctcccgggtagctgggattacaggtgcgtgccaccacactcagctaattttttgtatttttagtagagacggggtttcaccatgttggccaggctggtcttgaactcctgacctcaagtgatgtgccctccttgacctcctaaagtgctgggattacaggcatgagccaccatgatcggccctaaatttctttactatctacactattctaccctaagatgccaatgtctactgagactctccaaaacaggcacagattatccagcatttccccagcttagatggtcatttttttgtgggatgcctgttaacatctcccctggatgttaatgttctgaggagcatggtttgggaaaggacctcgtgggacttacaggaagtagaaagatgtcacccattaaaggccaccacggtaagaacattcctctccttttagcagttgcttaagctgcacaagttggagtaagatgtcaccctttttatccaggtcattgggttagctgacagggagccaagattgaaatctaagatctttgccctgcaggattcagggctaatggacatcctgagatgggaggaaggagctttcattacagccttgtgggtcttgactcaccagtccctgcaggagccagtggagttcctgccatggtgtccctgaggaggtgtagcttctcacctaccctgccgccaagcccctcagtctgggtcttcttttcccatgcagcctccagcccaggctgcatactatggctgtggcccagtgacacccacccagcctgcccccaggtggacatcccagccacctagaccttcctgtgagtgacccagccccttccactctcagactggcctattggtgtgggccccgtgaggcagtcataacacagggatgaaacctggctctgccacttcccaaggtgggtgacttcacttctctgagcctcagtttcctcttctgagcatgggcctgaatgagacgtgtgtaaagtaccaagcacagtggtgagccaatggaagacacgcagctagccaccagcagtcatcaccaaagatgcctctgatttgtgactctgaaaattcttgcaaagctgagaaggtgaaattcctctggctatattgttgaccaaaggccctcctctgtaagagtgaattgcacgctcacttgaaactatcttgagggactaaggtgtacaatcctggtgcttatgcagtttggggctctaggtagacacgagctggctttgaaattgtagattcctacactcccccttt

SEQ ID NO: 26709 - DNA, 2300 bp, Homo sapien
gtacctctctgttatggggagggaaacctttcccataaacactcagcagactcttttttttttttttttttttttttgagacggagtgttgctctgtcgcccaggctggagtgcagcagtgcaatctcagctcactgcaacctccacctcccgggttcaagctattctcctgcctcagcctcctgagtagctgggactacaggtgcgtgccaccaccccagctaattttttgtattattagtagagatggggtttcactgtgttagccaggatggtctcgatttcctgccttgtgatccacccgcctcggcctcccaaagtgctaggactacagatgtgagccactgcgaccagcctcagactcccttttatctcattgcccagatcagcatcacatgtgcatcccttgatgaatcactggcaagagaaaatgacatttttctaattggcttagagcaatcctgattcacttccccaggctgggagagtctcaggcaaaattcaggctcctggaagcaaagatggaagtcactgagtagccagccagcagcatgggcctcatctggttttcccaccacagtcagtgttcatccttggtcggggcagagggcaaggggaagcatttcagatggaacagccatccagccctcagaaagcttatagtctggtggagttaagtgtatgcagatcattataactgaattcctgaaggtagagactagatctttatcaatcaatgacttttattggatgccagaccctattagggtcttggataaacaaagataaaaaggacccacttcctgccattaaagacctcgcagtgtttaaggaaaactacaaactggcaatcaaagggtgactaatgcaaagttagggataaagctagagaccaatagggagcaaagggagcatagtggggggtggggagggggctggaagcaggaaaggctttcagagaagatgatgtttgaatggaatgttataagttaattcaggattaggcaggagaaaaagtatttagaaaaaaaaatccaggagaaggagataacaagcaaaggctaggaagcaagaatttagtgtgtgtagatagcaatgcgtgggacatagagtcgtcagatgaggctggagataaattgaagtcacactctgtgaaagatcttcatccattctgaaagctgatcatacgaattgggtcattcttgtcatatccaactaagacagaattgaaaagccaggggaacaaatactcagggcatataacattgctccaaaaaagtaattttttgcaagcctggctgctaaaactgcctgctgtaacctaaaaccagttttatctaatagctactgaaacagcctgctacaattctgagttttatccaccactatcacttaccaatcaaagcttgccagctccccaagaagctgataaacccccactttactagtgcctgtaaacttccttgaagagcaatatgtaacatttctgttttataaaaatctccaaaccttctctttgttcttctgacataccaaagacaacctggtctgtgtgtaagccctgaattgcaattcttgattgccaaataaaatatttaaactttagagattcatctctatatgttgactttgacaccatcaatccacctgtgcattaatttattaaataaatatctatagagcactaggtaccaggtactttctagccttggaacctttgcacttaccatccctctggctggaacagcattccctaaatcttgtctggtctcagctcaactattaccccctgagaaaggccttccttcatccccttatttaaaatagcccacacgtggtcactttccattgcattatcctgttttgttttccttacagcactaatcacatgaaatgagagtcttcgtttgcttatcagttaattgcctgtggggaccccactaggacataatctccctgatagcggggccagcctccttccctgcgtcatccacggcgttctagcaactcagggagcccagagcatgctgccgccccgcgtgcaagggagcctaagttccaaaccgagcacgcgcagagggcgggacgctccgggcctccaggtctcgcaggccccgccccctcgccgcgggttcgctgttgggcggagatattcgccgccggcgcttgcgcccggaaggtgtgccgcaccacacgggggaggaaggaaggagctcccaactcgccggcctggccacgggatggcccccaaattcccagactctgtggaggagctccgcgccgccggcaatgagagtttc

SEQ ID NO: 26710 - DNA, 2300 bp, Homo sapien
ttgaggatctattaggatactaaaatgtgagtatactcatgtactatagttgaccctgcagaacctatggaaacgaaaagtcagcccaccctatacacaggtttcacatcccatactgtattttccaaccatgtttcattgtggatgtggaaccctctgatagagagggctgactgtatttattgaaaacaaaacaaaacaaaacaagggttgtattggtggacccatgcagctcaaacccttgttgttcccaggtcaactgtatatccagagcttataggaaaatacctctcccagtaaccctgctcaccatttctctcttaagctattattatgattagccacggtttgctatttaaatttaaatttaaataaaaatgtggcctttcagttatgctagccacatttaaagtgctcaatagccatatgtggctaatggttactatttcggacagcacatatttagaacattcccatcatttcagaaattttcattgggaacactctgcggaaaaagggggccatcataatgtgagtccatcttctggaaaaatcctgggaaggggacaaaggaggtctgtttggcattgtgtaatggtaatttggtatttaattttcaaaaatgtttacccaattcctattcatcagccaggtgtggtggctcttgcctgtaatcccagcactctgggaggccgaggtgggaggactgctgcagcccaggagtttgagaccagcctgggtaataatagggagatcctgtttctacaaaacaccaaaaacaaaacaacaactttgatgttgtggagtcaggacagtcctgggttaaaacctttgctctccttagctgtgtaaaccgtgggtctcagctttcttatctgttaacggtaggtacttcttcctagggctgttttgaggattaagtgaaagtccaagattgtgtctggcacacagtagcttctcagcaaatgttttcctcctatgtcagggaatggctcctttatcccgttttgggcccatgggtggccctgaagggtgggtgctcaggtgttaagttctgtagatggcatatccttgggaaaagcaaggcaattaaaaacagtgagaggttgctctggttaagttttctcctataactttccccatgggtcaattgggtagaatctgccattttcctaatacttactgatggtagtggcattcggaagcacaatagctgaagccggagctctgagtggagagaaaggtctgtttctcaggcccaaaaagaggttacacacccatggctgtccagtttggtggtgcaggccctgaaatcagaccaaactggatttaaatccccaaacctatactctaagctatgtgaccttgggctagatacttcacctctctggccttatgaagtaggaataataataataccgtctaggttgttaggagtattaaatgaggtaaagcactgaaaacgtttagggactgtgttaaatcattaaataaataaaaacggggatgaccttatcggcttgacacaggggattaaatgagataatatatgaagacaagtacacggcaaatgcttaattaatgttgcttatttttatgtctgcaaactgacttaaaggggaggcctttaagaaagacagtggggcaatttgcgcgttgatgcattgtaggagaaaatgtgcagggggcccgttgggaccagagttcaaccaggtaagcggcagaaaaccacaaatacctccaggcgttcctggggcagcgccgcctccccaaaatcacgcaaaacttggtttgctaagaattgtcagctcttctaaaggaggcgcttcacgcatctcagtctgtgaaatgggacccaggacccaggtagaggtgcgttctcggcctggggaccgagtattttgtgcgctccggtaacgcaggaagacagcgccactgacactctagagaccagcgggcaccgcctggaggcgccttcaccacttggcggttccgggtccgcgccccaccgcgccacaagactcacgcccgaaccacgtgatcagggccgtggctccgccccgctcccgcgccgcgcgccgcttccggtaggggcggaaagcggaagtgtgggagggtctgcggggcgggctcaggaggtccgcgggaggatggagcagtgagcgggtctgggcggctgctggcagcgccatggagacggtacagctgaggaacccgccgcgccggtgaggggccactggctaagaggacgggcatggggtcaggggaagaaaaggcgggaactggttgaggggatacac

SEQ ID NO: 26711 - DNA, 2300 bp, Homo sapien
atacacagagacctgtgaaacaggggtacttttagagaggcatcagagtgaggcagttaagagcatggccgggcccggtggctcacgcctgtaatcccaccactttgagaagccaaggtgggcggatcacgaggtcaggagatagagaccatcctggctaacacggtgaaaccccgtctctactaaaactacaaaaaattagccaggcgtggtggcacgcacctgtggtcccagttacacaggaggctgaggcaggagaatcgcttgaacccagaaggcggaagtagcagtgagccgagattgcgccactgcacttcagactgggcgacagagtgagactccgtctcaaaaaaaaaaaaagaacatggactttggaccagaccccatagacattaaaatcctagctctgtctcttacttgctatgacttctcccagcaaatcactaccctctgtatctcagttttatcatctgtaaaacagacatatagggatatctaccacacaggattgttgtgaggttcaaatgagttcaaatgaggtttttatggttcaaaaatggtcaaatatcagcaatttcatatgcttcagcaggacacatggaaagcacttagaacagtgcctggcacccggtaagtgcaatatgagtgtaataatcattactattacagtctcagcacactacgctagggtgaatccaaagcccatcccaaccacctatttgccttctgcaatgtttgtgcacctcaaacatccccaagctcaaacaacccctaagagtgctgcccaggcagtcaatcccttctcttcacctcttggttgccctgcacttccacaccctgaacacttccttctttagagctcattctgctgcaggaagtcagacgtctctgtgaaatagaagtaaccacactgaacctcagagaagcatgactccttcggtctctagtccctacttttctccagatgtggtagagtggcaaaagacccgggatgtccacaagggaaatccaggagttgagattttctaggatcagccaccatcctgatcttgaactaaagcaattccaggtaccactaggatttggtgctgatattcacaaaacaactgaggcctgaaaagggcacagactggcagggttcagtgacccggagtaaagaaggaaacacttcccaactactctggacctcagtctccccatctcgaaaatatcctcttatttccttacctacctcccaatgtcaggttctgaagagctgaggaggatgtgaagaccattaggaagacactgaacatcagtaataaaagatgccatcctacagtggggacaccaccaacagcatcctctgaaatgctaccctccaccatcccctcccttgctagaccctcaacctttcctcgcatgctttcagccttaggcgcaaagcttttcccctccacagatccccccaccgcacccctcaagtgggacttcagacccttagaaagtccacccggccttcctcttggccagttctcgatccacccccttaaagagatccctcacagattctcaccctgcttcagcattcgcccccacctccgtgagtccctgcttggatagcgttcccccgagtggcccggcctcagcaggtactctccctaacttgtccccacgttcctcagcacagtctcaccacagcgagtgctccctctaaccggtcccaagtctaacctccttagcagatgctcccctcagccggaccctcacccaccagacgtcccccccctcactcagcaggtgccccatcggctgggtcgcttagctccggggactcccacacaggtgtatcccctcaaccagttcccgccttttcttcccctgaccccatgcccgtcctcttagccagtggcccctcaccggcgcggcgggttcctcagctgtaccgtctccatggcgctgccagcagccgcccagacccgctcactgctccatcctcccgcggacctcctgagcccgccccgcagaccctcccacacttccgctttccgcccctaccggaagcggcgcgcggcgcgggagcggggcggagccacggccctgatcacgtggttcgggcgtgagtcttgtggcgcggtggggcgcggacccggaaccgccaagtggtgaaggcgcctccaggcggtgcccgctggtctctagagtgtcagtggcgctgtcttcctgcgttaccggagcgcacaaaatactcggtccccaggccgagaacgcacctctacctgggtcctgggtcccatttcacagactgagatgcgtgaagc

SEQ ID NO: 26712 - DNA, 2300 bp, Homo sapien
atttaaaaattaggtttgggacagttcttgtaccgtggtttcagccttgtgtggtcatcactggcttctggagctattggtgatgtccaagggaaagctttgagagtttatgtttactctttgagtcccaggagaagcctggcaccctctttgcaaattggcctttgctctttcaatgcctttcatccatctccactctctcaactgcctaaagtcacagcacagatactgcccagtgccttaagaggagacatgatctctaccagggactctcagcaaacacgggactgtgttcagtccacaaaggaaaagcgtttttgaagctctcattgttcatgtaaaaatcatacacgtggcatgttgctccacattccttacacacaggggtagaggggattgcttttgtgacccacgttcaaatatgtgactgttttcttttctcttttactgctaagcagcctggaaaggataaatgaatattagactaagatttgttttccaggaggctcaatctgaacacacagaatgtcagagctggaagggactatagagatcatctgatctgatcctcttgtacggatgatcgcaaaactgaggtgtagagaggggaatggccaaaatcacaaagcaagttagcgttaagagctgagactagaattcagggtcctcactcccaggccaccgaaccatgcagccccttctttgggggaagagacctgtgtcagtcttggttaattgttccagggaaccttgctaacagaaacttgctcttgccttggctcttcagtagatgacctggctgtaaagagattccctggacgagccagatcattcagtttcagcgagtccttgagctccacaacatctaccagatatagcagacaagcacccatggaggcaggtttcgggcctgaagcagatcagagggctttgcaaaagacagcatagagccatcttcctgcaactttacctctttccctcagatggggagccatgactgggttgcacctcaggatactgtaatttgactccataattgcttttgctcctgaaacctgggaatcaatggaaaggcagggaatgtgcctcttctgtggccagattctgttatttgcaattaaagcaagtttttaaaaaatgcaagaggcagttgttagtcttcagggcttggcaactgaaatagctatgtggcggatacggaaaacagaggacaatttgaggatcttgctggaataataaatgacagctaccatttgttgagcacctattatatatcaggcactgagctgggtaggctctaaacttcacaataaccctgtgacttaactactttatctccattttgtagttgaagaaataagttcagagagaaagattccttcccaaggtcatgcagctagtaaatgatagaatcaggattcatagcatcactatagggggtcaatatttacacaaaaaaggaaagtcacaagcctgtttaaaatgaagtgaccaccttttcttgcatagactaaataactcgaactggcatttttaggttggaaagacagctgaattagtagttaagtctgatagccaagtaagttttaaaaaccaaagcatccaggatgcacacccctgcaccatttgctgtgcgaattaatagttctgtctctctctctctttcttttttctttttattctttgagatggattttcgctcttgtcgcccaggctggagtacaatggcacgatcttggctcactgcaacctccgcctcccgggttcaagcgattcttctgctgggattacagcatatgccaccatgcccagattatttttttgtatttgtagtagagacggggtttcaccatgtcagtcaggctggtcttgaactcctgacctcaggtgatccacccgcctcagcctcccacactgctgggattacaggcatgagccaccgctcctggcctctctttcttttttaaacaaagaactttgcacttggccagagaggaggagaaagcccattttctcccttcctaagctagatccaaataaaagaaagttcagttttcccccataactattcttgggtcatgaactttgatctggagtttgttttgtttcaggaatgtgtgcacccagcttgctgatccaacaaagtctattgcttaccagtctagcttgatgaagccttttggccagaagtcaatttgttttggatcagagaaatttcctgacaaggtatatttgttttctagtgacagaaaggcaaaggaacaagtcctagttgttgttgttgttgttgaatactaaat

SEQ ID NO: 26713 - DNA, 2300 bp, Homo sapien
ttgtgaggccaaggcaggtggatcatttgaggccaggagttcaagaccagcctggccaacatggtgaaaccccttctgtactaaaaatacaaaaattagctgggcatggtggtgcatgcctgtaatcccagctactcaggaggctgaggcaggagaatcgcttgaacccaggaggcggaggttgcagtgagccaagattgtgccactgcactccagcctgcaacagagtgagtgagactctatctcaaaaaatcaaaaataaaataaaataaaattatatatgtggctcacattataggtgttggactgtgctggcctagaggactcagaagtcagccatgggacctccggcaagtcaccacacctctcaaagcagttcttatctgtgagataggaataatagtagcacttaccccacagataaatttgcagtttgagtgagattgaggtctgtgcttgacccaaggtaagtactcaataaacgttggtaattatcattattattaataacaatatgtgcaaaggctcatatccaggccctagtctccaggagcctctccccaaccaggcacacagcagccacacaacaggtacatgtgtggggatttcacaacctctacaaagctctttggcacatgttctctgccctcacaacccacttggcaggtgggaatcaggaacccgtgggcaggtaaggacactgcgcctcaggggtaaaatgatcgtttcaagcttcacaactcacctaggaagaacctggggctccaagggagatgaggccaccttctacagctccctaactcagatgcccacggtctgagaaaatgactggagctcacccctaaaatgggcgacataagatcctggccctgtcaagtgtgtgtgccaggaataactgagatcaatcacttgcagcagctgaagtaccctggcacatactaaacactcaattaagtaaatcatgattactgttgttcctttgccagagaagcttctgctgaaatccctctctacggggaatcctcacgccctaaatgacccctccttcccggcccgtaactccggaggatgcccctgcaggtaggcccagtctccagacaccaccaccccccagccgagtcaggaatagaaaccgccgcctccggccgccagcggcctcactccctcctccggcagcgatcgatgcggccttcagccgcgggggactaggcaaggaagaaggaaggagagggcagcggggccgcctgcagcaggaggctcggcggggccggcggggcagaggcgagaccgagtatagccagcggctcccagcctcggtggctttgggacagacacgcgaggcgcccgggaggtgccaccacaggtaaggggcctcctttggggagggacgtggctccgggacggtcccgggcagccagagtgggaggcggggctgcctggggctcctggtgctcttaccccctctaagagaccccccaccccccgccaaggaggaagcagtgtggggtggccgcgctttggagaccctggctggtacagtttgctcatctgtaaaatgggattagaaaacctccctggcagggttggtgtagggattaaaccgagtgaggtgtgcatggagcccagaggagtgactagcagataggaggtgctcaaaataagtgtgtggagagagaatgaaataaaaaaacctggtctccaaccttagctgtgccatggactagctgggtgattttgaacaagtcacttggtctttcttactgatattcaggttcttgtcagaaaatgtttgttgaattaattatcctgtttcatagagcaggaaagtgagctcctgatggatgaagggatttgcccaatattatgcttctaatgggtgatggaactggattagaaatttcattttttgatgccaaatgcaggtggagatccaagtggaggtgggagcggagctacatcacacgtttattgtgcattgattatgtgccagggaccatgctgccgataaacaccttgcatcatttaattctctgagcctctcctggaaagtatgatgctacccggttccacagacagggaaacaagcccagagagggcgacgaatgcactcaaggacagcagctagtaagtggtagactcaggtctgaccacagggaagtacacaggattaacatttattgagcatctactgttttcccagggctttgacatataccacaataatgatgcatccaaagcaacattatccccattctagaggtaaaagagctaaagcccagagtgggaaggagactggcctg

SEQ ID NO: 26714 - DNA, 2300 bp, Homo sapien
ctgatgtccctgaaagaaagcaagcattcatgctatgaactgcctatggggcagcttctagaatctgagattgatccctcggagacagctaacaggaaaagagagacctcagtcctataaccacaaggaaatgaattctgccaacaatctgtgagcttggaagaaaactctgaagctcacatgagaacctcaaccctggccaacaccttggcttcaacctggtgagaccctgagggtccagccaggccatgcccagacttctgacctacagaaaccatgagatcataaatttgtattgttttaagctactaaattgtggtaatttgttatgtagcaataagaaaaattagtactggattttagagacttagtacaaaaaaaagaaaatgtaaaatatctcaataatttctttactgattccaatgttgaaatcataatattttagatttaataaaatatatcactaaaaatacagttgatcctgaaacaacacgagtttgaactgctagtgtccacttacatgcagatttttttccaataaatacattggaaaatttttggagatttgtgacaatttgaaaaaacttacagatgaaccatgtagactagaaatatcaaaagccttaagaataagttagatatgtcgtgaatgcctaagatatatgtagatactatttatgtgtcaatcgactgtttatattattggtaaggtttctggcgaacagtaagttattactagttaagtttcaggggagtcaaaagttatattctaattttctaggcatggaggagtggtttccctaacccccactgtttaaggggtaactgtaatttcgcctgttttttacttctttaaaatgttgcaatcagaaatgtaaaaggacatatgtgggccggacgcggtggctcatgcctgtaatctcagcattttgtgaggccaaggcaggtggatcatttgaggccaggagttcaagaccagcctggccaacatggtgaaaccccttctgtactaaaaatacaaaaattagctgggcatggtggtgcatgcctgtaatcccagctactcaggaggctgaggcaggagaatcgcttgaacccaggaggcggaggttgcagtgagccaagattgtgccactgcactccagcctgcaacagagtgagtgagactctatctcaaaaaatcaaaaataaaataaaataaaattatatatgtggctcacattataggtgttggactgtgctggcctagaggactcagaagtcagccatgggacctccggcaagtcaccacacctctcaaagcagttcttatctgtgagataggaataatagtagcacttaccccacagataaatttgcagtttgagtgagattgaggtctgtgcttgacccaaggtaagtactcaataaacgttggtaattatcattattattaataacaatatgtgcaaaggctcatatccaggccctagtctccaggagcctctccccaaccaggcacacagcagccacacaacaggtacatgtgtggggatttcacaacctctacaaagctctttggcacatgttctctgccctcacaacccacttggcaggtgggaatcaggaacccgtgggcaggtaaggacactgcgcctcaggggtaaaatgatcgtttcaagcttcacaactcacctaggaagaacctggggctccaagggagatgaggccaccttctacagctccctaactcagatgcccacggtctgagaaaatgactggagctcacccctaaaatgggcgacataagatcctggccctgtcaagtgtgtgtgccaggaataactgagatcaatcacttgcagcagctgaagtaccctggcacatactaaacactcaattaagtaaatcatgattactgttgttcctttgccagagaagcttctgctgaaatccctctctacggggaatcctcacgccctaaatgacccctccttcccggcccgtaactccggaggatgcccctgcaggtaggcccagtctccagacaccaccaccccccagccgagtcaggaatagaaaccgccgcctccggccgccagcggcctcactccctcctccggcagcgatcgatgcggccttcagccgcgggggactaggcaaggaagaaggaaggagagggcagcggggccgcctgcagcaggaggctcggcggggccggcggggcagaggcgagaccgagtatagccagcggctcccagcctcggtggctttgggacagacacgcgaggcgcccgggaggtgccaccacaggtaagggg

SEQ ID NO: 26715 - DNA, 2300 bp, Homo sapien
tgcctgtaatcccaacactttgggaggccgaggcgggtggatcacctgaattcaggagtttaagaccagcctgaccaacatggtgaaaccccgtctctactaaaaatacaaaaaattagccaggcatggtggcgggcgcctgtggtcccagctacttgggaggctgaggcagagaattgctagaacccaggagacggaggttgcaatgagcagagattgccccattgcactccagcctggatgacagaggaagactccgtctcaaaaaaaaaaaaaaaaaaaaaaaaaagagcatttcatggctgagcacagtggctcacccctggaatcccagcactttgggaggccaaggtgggagaatcacttgagtcctagagttagagaccagcctaggcaacataggaagaccccccatctctacaaaaaataaaaactagccaaatattggggcgcatgcctatagtcccaggtactcaggaggctgaggcaggaggactacttgggtccatgaggtcaagggttcagtgagccatgatggcactgtgcactccagcctgggtgacatagcgacattctgtcaaagacagagagagaaagagaaagagagagaggaaagaagaaggagaaggagagaaagaaagaaagaaagaaagaaagaaggagaaaggaaagaaagagaggaaagaaggaaagaaagaagaaagaaataaaaaaggaaagaaagaagaaagaaaaagaaagaagaaagaaagaaaagaaagaaagagaaaggaaagaaagagaggaaagaaggaaagaaagaagaaagaaatgaaaaaaggaaagaaagaaaaagaaaaagaaagaaagaaaagaaaaaagaaagaaagagggagggaggggtggagggagggaggggtggagggagggaggaaggaagggctcatatatttgtcctccaaaataaagcttccaaggaggtgccagcattccaaaagcaacatcagatcatagaagacagagcctctcctatcttaatagcttagaagacagcacgagagattcacattaaacccaaggaagaacttcctgctgccagggctgtcctggattggaatgggtaagtgagacaagccctgtaatatcaccctcctttctcaggatcagatgaggtattgacctgcttttaaaacccaggaactgaatgagggtgatggggaggccacagtgggaagtcccagcttagtcaggaattagctgcgtgtccttgggccagtcccctctcatctctatctcacagtttcctcgtctttcaaatgagaaggctgagagaatgtacttcgatggagtttctgtttaggatgtcccttaggatgccaagtctcagctccctctcttctaccaaatgcaggaggcaacatcagagatacgaaatctaaggtgggggtccctggatgagatgacatttttttgctcaggatcccttagggccagagaagaggttccagtggccacacatctgctgtgaccagcaaacttagccaagccaaaagccatgctcccccaccctcaacagccaagccagccccaggaagagggcagttctatcagaagccactggtgatctcaccaaaggcggggtggtctttctcccatccacaggacccaagaggagaggccagggctggcctcactcattatgccagcctgggccagccttctttggctgcaagctctggcctaaccctaatgccttctcccttcctaggcatccagaactctgcaaacccccactcctttgctattcaaagctgacctctacccgctgcctagacatcgctggggcttcaacatctttgagagccaggatagcaagcatctgcctcaacaaccttcaccctgtgtacagatgaaaaaactgaagcccagagagacaagacttgcccaagatcacagcccaagtcaccgatacaggcaagactggatctgagtcccccacatgcaggatgtgccgccaccctatcttcagctattgtgacagcatcccttgcactgagtcctcgggccctcagggggtggggccaagatgaagcaggcacggtgtcactccacaccccctctctttcctctcctgactaagtttctctggcttccctgaggctgcaggtgttaatctggggggccctgggccctgagccggcagcagaaatatgaggacccagagccttctcctcctgggggccctcctggctgtggggagtcagctgcctgctgtctttggcaggaagaagggaggtgagtgcgggaaatccctctgctgg

SEQ ID NO: 26716 - DNA, 2300 bp, Homo sapien
tgttagtatgcacttaaaaatatgttaagaggtcatgtcttatagtatatatttcttaccacaattttttaaaaaaacacggtgttgagcaaagcatgcaaaatacaaaagaatacttaggccataattacgcttacacgaaattaaacaacacgtatcactaagcaagccatagcaagagagcaaaactttaaaggaaaacatgaggatgattaacagaaagttcaagatagtggttacctctgaagtagggatggtaatgtcctattctaaattgataggttcataggtgtttattattctttttcaaaaggtatagaatgttgattacattctttcatatgtaggatttattttacaatactttttttaaagaagtatcatcaacagtcaattacaaatgacattttggggagaaccggagaaacaaatatgaactggctatgagatgacatgcagaaactattaattatcttagatatgataatggctttgtgattatattgaagaatatccttattcttagaatttgcatgctgatgtatttaggaaataggaacataatgtattcaatttcatttcaaatatttcaacaaatgtagctataggtattctaaaatatcccaaactattaataattgttaaatccagttgtaggtatacaagtatcattgttctgttatttcaatttttctgtatgtttaaaaagttcataataaaaaggtggaggaggaaatagccaatacattccaacattctagtatttgtttatgaacttcccagattccatccctggtatccaaatgatctgagtccagtgatatgactggtgagattgtaaccaaagattcaccacctaataaggagtaggctcacttccaggaatggaggtatcctccctgcctccacttaaccccaactcagtcccttccacacttcaggatgtggaacaccccaaacccaaatctttgcattactcaggggtcctgttagtaaatgacagaaatccaattcagaccagcttaggcagaaaggtgaatgtattgggtggtaacataaccctgggtatgagtggggctgatctcaggaaaaagtttagtgaaggactagatatcctctaaattactccctgtccatctctcatctctttttatcagcatcttagatttatcttctcagaatttctctctcaccagggccaggaccaaatttctggagtttctgggcttatatctgcaacttttccaacaggaaggattttcctccctttagtactcattcaaagaaaggaccccaaaagcctggtcacacacacacacacacacacacacacacacacacgcacacacgtccatgtcttcttccaaatccaggaatttgggggatgcaggggcagaggagggaaaacaaatcctatgaagatgatacagtataattattatgctcattgtatgaatgaggaaacggaggcttagaaaggtgaagctgctttcaaagtcacacagctggtgacaggtccaaaatctgctttcctccaggccacatgagattggcggggggcaggagcacacggtgctggagcgcaaggctgagagtgaatgttcaggacagacattttaagcactgccattcagattcttccttggggtgaggtgagaactgagaacaagtccggggcagcacaggaaggagggaagattttggtcccaggtgaatcaggcatgaagagggactgatagagaacacggtggagttgaggaagtctggccctgccactgcctcgtgtgtgaacttgagtaatttcatgccctttctgtgcttcttttcctccttccataagatagtttggccctggtggcgcctaatggtcaatcacgtgtccatttcttctcctcgtgtgaagaacgagggtcgctcttggatttcttcatctattccagtgcagagccttagggaaagccccaagtccctcctcagaaggggccatttccaaatagagctgggaagtgcagcctcccttgccattttgagccttcagctccacccactggcatgcccagcaggaacactataaagccaggctcagcccagctcccagccaagcacctgcctggcaacatggggtccagcagcttcttggtcctcatggtgtctctcgttcttgtgaccctggtggctgtggaaggagttaaagagggtgagcagacatggtggagctgggtggggctgggctggggagaggtcctgaggggccctctggggctggagttctcatatcaccttgtggcttcctccactag

SEQ ID NO: 26717 - DNA, 2300 bp, Homo sapien
tagcagtgtgaattggtacaatgatgttggaaaattgattgcagtatttatgacagctggatgtatctatactctgtgatctgtactctgtgatccagcaattccattcctaaccatatatccaaaataaatgcatacctatgttctgcaagagatatgtacaagaatattcatagcaacactataatagctaaaacctagaaatatccaatgtatattgacagtagaatgaatatataacatttttggtatttttcatagaatactgtacagcagtgaaaatgatgaactacaggtgtagacttcaaaatggatgactctcaaaaatataatgttgagcaacataagcaggacatatgaacactataccttagatttcatttacatacaaattgaaaaagtatactaaactgaatatatatttcagaatacagacagaagtggcataactataaaggaaagcaagggctaattaccataaaatcttaggaagcagttatctctggggaggaaggagaatgaagcaactgaggagaggcatggagcatagatatagcaaatattctcctcctttacctggcagctcattttaatgctattctttaaagaatataggtattttctgtgagctttttatttgtttgtatggcttattgtacaatgagcttttgtgtaaggtagccaaaggcttccacagtctgacattcgtttatgtctccctcagtttcaggcttggtgggcatgtggtcagagtctaaatcgacaaggggtggggatttcaccagctgaattagtgtccaataattagtttgttaccttccctgccttaactccacctcaactcagtgactttcttaactcagattctgtccctgacaatacccaacttcaggatattcatttctattactcagaacttttggtaacaatgacagaatagtaagtcagactagctgaagcagagggctaatttattgcctcataacccaaccatgagaagggtgtgtgaagaactgctctcaaggtaaaggagggaaacctggctgtgtcatctgaatcttctctcaccatcacttctctccttgtctcagtgtattagagtcgtttttctcagacaattgatctccacccccagacttagataaccacttctggaattccctggttcatatatatcaccttttccagaagaaggaacccccgttttcccctttcattactcattcaaataaaatatgttaatagaccagaccaagtctcacacacaacacacacacacacactcacacacacacacacacacacacacccctacctgtggtcaggggtcaggctttcatgattagcagtccccattagactcacaagttgatggttcaaagagacaacaattcttcacaagaaacagggtgctgttcaaagaagtggggaggcatgctggacacacacactgtagatgtccaatgtatacatgatacatgttttctactactttctgattattttctccctaccactgtgatttcaagggcatcatccctcttcagacctagaattccaccttccaattactttcttgatgcatctgaaaggccgtctctgaaacagcaaagtgcaataattagtcattatgtattcaaggcaaatttgtcttacagagttttttgcaggaccagggaagaaggaaggaaatgcccagtttgatgctgggagtggtaaaatgataaagtagatctgggtggggtttgtagcaccagagcataatggagaaacaccttggttttgtaatcaagactggatctaccagtgacttgctgaataaccttcggtgattcctttctcttcttgggtctcactgtatttcaaaacatgaagaatttcattgtaatgttacctaataagtgagccagcacttctactctgtgagaaagtaggaaaactcttgggacaatcagagatgatgtgatgtaatgtccattagttcttcctgtgaataatcctgagggaaagcccccaggtccctcccagaatggggtggatatttcccaatacagctaaggaattatcccttgtaaataccacagacccgcccctggagccaggccaagctggactgcataaagattggtatggccttagctcttagccaaacaccttcctgacaccatgagggccagcagcttcttgatcgtggtggtgttcctcatcgctgggacgctggttctagaggcagctgtcacgggaggtgagtgaacaggtgacctgctgggctgggttggactaaggggagaccctctggg

SEQ ID NO: 26718 - DNA, 2300 bp, Homo sapien
tggagggtataatctctggggagtcctactctaccaggtttttctgcccattccccaaaaataactatatttgaatcttttctaagttgtaaagtgatttcccatagaattgagcaaaatacatttaagtcctcctgttttcttcttttcctatgagtataaaactttcagatttttgtgccaatttagtgcactttaatatttttgcattttttatttgtccaacaggacaaatcatttgatcacttaatcttttcccccatcataattccatatctaagatgtatgcatcaccataccatttttatgctttccaaatcactgatttctgatttcaactttatcaatacattcctttatcatttggaaatgtttttttccacatttcattgaattcaattctaatatgaatatagtaatcacatgttttgcttggattgcattttcctggtttgtttttgcaaatattgtgcccttttgttttatctgcatcttttggacactagatgagatgaaagttttgttcttgatccataagtaagattaatatttcagactctattttgtatcagtaagtttggaacagaacagtttctggtattttcttaagggaagtgtgaggaagattacagtggttagcagacacagtaatcaattttagttcagaacaatatcaccttactctgttggggtttctgcaataaggaactacttactgcctttgaggcaaacagataaatttggtaagatctcagagtggctcatagagaaaccatgcagctcacatgatttatgtttgatagcatagcactttttttctgtggttggcctttctcttttccccttccatagagcattgcctacaggaaggttaagattctaagacagaataattgaaaataagttttcaagctatcctttccccagcactaccctccaaggtgttctgaatgtacacagggacactgttgggatgctttcttcttctcctgtggtctgctcataacgaagtctttatgactcaaagtaaagaaagtttcttcagacttttcaggatgtcatcacaattggaaaaatctatgcttctaccaaaggtgggaattttagcttcatgtccactcacaatacattattcaattcattgatggtggcaaatatttctcacagcctgtttggggattcagctgtttactactgaagtagaaacttctcttaattaaaaagaaaattctgctgtttaggtagatttcatgaaaagaacccaatctagaaaccagcatttttactttttttccaacagttgttcctatcaccatgaaagcatattaaaattctttcatcctttgaaaacacatctggaacttacctcaccctccagatacagcctcagctctcactccaccatgaattcagacttcctgagaaggttgcagctggtctccatccttcaactgacaacccaatgcaattgtattcatctctcattaaagttactagcaacaactaagaaaaactttggatacatgtcagtctttattgtgttgaacttgacagacatatttgacattggagtgccccatttacttgtttaaaatttctttctttggattccataacgtttcattatcttctatatcattggacttctatgattgctcattcttaggtaaaatagaacgtgtctcaagatcatttttaaaacaaaaggaagtatggagttctatctaaaatagagtatttaaattattgcatcatgaagggaaactcacatttagaatataaaggcattctcagaaaccaattgcttttgtagcctgaagccagtctctttcctacttttgtctataattctgtaaaattaaagtgatctggcatgatgatctaaaaggactgataaaaatttgctggggctgccagaagaaagaaaatgcctttgacattatgttgctggggacattgactttgtcccacactcagcaggggtgaggaagttggcatttactgataagctaagaaaagtcagtgccttttgtaatttaagctccacccatggcacactcactcaaggaagatataaatgacaaggtcggctcagctctcagacaaggttttccaagcaagatgaagcccaacatcatctttgtactttccctgctcctcatcttggagaagcaagcagctgtgatgggacaaaaaggtgagtggagagggtaagccttggggaaagctgctcagacagctaataatctaagattatttggggtgcaaacagtaacctgtttaggcacagattcttctct

SEQ ID NO: 26719 - DNA, 2300 bp, Homo sapien
taatcacatgttgtgcctagtttgcattttcctgctttgtttttgcaaatcttgtgcacctttgttttatctgtatcttttggacactagattagttggaagttttgttcttgatccataagtaagattaatatttcagactcttgtttgttccggtaatcttggaacacaacagttcctggtatttccttaagggaagtgtaaggaagattatagtgattagcaggtacagcaataaatttgtgttcaggaaaactttactcttttcttttggggtccctgccataaggaaatacttactgcccttagggcaaacagataaaactggtaagatctcagaatggctcatagagaaaccacatagctcacatgcttcaagtttgatggcataagtagcattttttcctatggttggcctttcccctctccccttccatatagcattgcttacaggaaggttaggattttaagagagaataatagaaaataagtttccaagccgtcctttctccagaactaccctccacagtgttctgaatgcatacagggtcactgttcaaatgttgctgcttctcctgttgtcttctcataacaaggactttttcagtcaaagtaaagaaactggccgggtgcagtggctcatgcctgtaatcccagcagtttgggaggctgaggcgggcggatcacgaggtcaggagattgagaccatcctggctaacacggtgaaaccccgtctctactaaaaatacaaaaaattagccgggcgtggtggcaggcacctgtagtcccagctacttgggaagctgaggcaggagaatggcatgaacctgggaggcacagcttgcagtgagccgagatggtgccactgcactccagcctgggcgacagagcgagactctgtctcaaaaacaaacaaacaaaaaaaacaaaacaaacaaacaaacaaacaaaaaaccttccttggatttttcaagaagttttcacaattgcaaaaaaacaaaacaaaacaacacaacacaacaaaacaaaacaaaagcaaaaaaaccctatgcttccacccaaggtaaaaattttagctttaggtccactctcaatacattatttaatgaactgaagttggcaaatattcctcacagcctgttggagggttcagcagtttattacagaagtatgaaatgcttttatttaaaaaatgtattttggtaaatacatttttgtttaggtaaatatcatcaaataatccaatttggaaaccaacattcttacttctttttccaacagttgttcctatcatcataaaaacatgttaaatttttctcatcctttcaaaaaatctctggagcttacctcaccctccagatacagcctcacctctcattccaccatgaaatcagacttcttgagatggtttcagctggactccatccttcaactgacaacccaacacaactgtattcatctctcgttaacattactagcagtgagtaacatcagaaagtttttgacacatgttagtcttttttgtgatgaacttcacagatacatttgacattggtatgcctcatttatttgttgaaatttttttctttggcttccatgaagtttctttctcttctgtatcattctacttctatgactgctccttctcgagtaaaacagaatgtgtctcaggattactttaaaacaagacaaagtatagagttatacctaaaatttagtatttaagttattggatcagaaaggaaactcgcatttagagtatgaaggcattgtcagccaccaattacttttgtaacctgaagctagtctccttcctactccggactgaatttcttctgtataatgcaagcgatctggcatgatgatatacaaagaccgataaaattttgctggggattctgaaagtaaaaaaaattgcctttgatattatgtccccatgctaagtccctggggactttgacattatcccccactgagcaggggtgaggaagctggcatttactaataagctatgaaagggcagtgccttttgacatttcagctccacccatagcacacccactcaaggaacatataaatgaagagatccgctcagttctcagacaagatttttcaagcaagatgaagtccatcatcctctttgtcctttccctgctccttatcttggagaagcaagcagctgtgatgggacaaaaaggtgagtggagagggtaagccttggggaaagctactttaaaaaaatggcctctaaggatattcagggtgcaaacagtaacctgttcaggcacagattcttctcc

SEQ ID NO: 26720 - DNA, 2300 bp, Homo sapien
gattctcctgcctcagcctcctgagtagctgggattacaggtgtgtgccacactgcctggctaatttttgtatttttagtggagatagggtttcaccatgttggccaggctgctcttgaactcctgacctcaagtgatccgcccaccttggtttcccaaagtgctaggattacaggcataagccaccgtgcccagccccttttcattctttaagaaataaatatttagaaaactccagataatttcttgagtgtggcactgaggaaaataggaacaaacagagagagagagagagagagagaacaggaactctgtgagagaaatcaaattatcccctgggtggtggaagtgagaacaaaaatcttgacctgagagtgtcattacccattggtggaaatcatagcctccatttctctcttacctaccctactaagtactccaactaagagtgaatgcacctggctcatagtagttaccttgtgcatattaattttcttccttttctttttccaccaaaatttgactgatgattgattatgtccaagtcttctgatccaccaaaattcaaaccatggagtgacttttgtataaagggatctgctgccagttgcctgtttggttgtggaatacttaaatacttcatgtggggccatcgctacttgataatgagtgggtctttcatgtctgtggaaagttccacaaaccttcaccttaggaatgaatgggagaattccaagcatgaagataatgagtcaagagcttggagtttgtagctagatgagctttggttgaattttattttattttatttttttaagacagggtatcgctctgtcccccaagctggaatgcagtggcacaatcatggctcactgcagcctcaaactcctgggctaaagcgatcctcctggctcagcctcccaagtagctgggactacaggcatacgtacgtcatcatgcctggctaattttttacatttttttgtagagatggggtctcaatatgtggccagggctggtctcaaactcctactctcaaggaatccatacacctcagcctcctgggcagctgagacagcaagtgtgcgaccctacactcagctatgggctgaattttagagataatggtcgctctctttataattagaagcaacctatgcagactgggtagcaaatagaatgggtttaattttttgctgtcatgtgagatctgtaagggattttggggaattttaggaagcaatcctctaagatctcaaattatctcacagctaaatgtagattacagtgactgatgagctgctttccccctttatctcagattcatttcaattctctttagtgggaagggatactattcatttgttcttttcattcagagtcccttcatgcccttaatttcataaccctctgagaagggctgacttgttagtatcatttcatttcacagctgagacaactgagctccagagagatttgtggagagcggagctcttcttcagctttcatttgtgagtgcttttcctgtgtcaggcacagaacaggcactggggatataacggtgtaaatatttcagggaactaagtatcagttggttgaacgagctgaacttttgagaaagaaactgcattgagtaatcagcagagtttcacaatgcctgagagtccagtaatgtgagaatcagaattagcaatgtgagaatagaatgtattgcacaaagtctcagcagggagtctgtgtctggttttagttccaggtccgggtagcacctttgcaattgaccacttcttccctctctccacctataaggctaatggcctgggatcttgtgatgtttagggctcagatggacactgagatggcctctttaatcaaccaacttcccaggccaatctcttccctttcttttctgatagttgctgtgttggcctcatagccttacctggcataggaaagataaacaatctccttggtgtcaggatttctggtctctggctacgtttcctgcttatgcaatagtagctgggagaggccgaaagaattctggtggggccacacccactggtgaaagaataaatagtgaggtttggcattggccatcagagtcactcctgccttcaccatgaagtccagcggcctcttccccttcctggtgctgcttgccctgggaactctggcaccttgggctgtggaaggctctggaaagtgtaagttggagtcactctggtctaatctgggctgcagggtcagaggtggggtctccttgtggtgtgggtgtgtccccttctgtaggctctgat

SEQ ID NO: 26721 - DNA, 2300 bp, Homo sapien
tttttttttttttttttgagacagagtctggctctattgcccaagctggagtgcaatggtgcgatcttagctcactgcaacctccgcctcccgggttcaagtgattcttgtgtgtcagcctcccaagtagctgggattacaggtgctggccaccacacccagctattttttgtatttttagtggagatggggtttcaccatgttggctaggctggtctcgaactcctgacctcaagtgatctgcccgccttggcctcccaaagcgctgggattacaggcgtgagccactgcgcccggccatttctgtcttcttacaggcacatccttacagtttctcttcttagatactgttggggggtcttcaattaggtgggtgtcccccctcatgccacccattcttgactctgcacctcagctctttgtgtgctgctcacctgagctgcccttgccactcccctctgcctttgcaaatctttcaagactctctctttttaagagatagggccttgctatgttgcccaggctggtctcacactcctgggctcaagagatcctcccgccttggcctctcaaagtgctgggattacaggtgtgagctgcttcttcatttttgtcttctgaaaagctatggcatagaatacctcgcttattcaattcagttttttactgagtaccaagttagtattagacattgtgctaggagcattacacatgttattatctctcagcctcacaacaacctggaaaaagaaatcatgtaatcccaataacccagatgtcagctggggtcttcttgtttctagaaactaaaagttggcttgaactctgatttgatgactgtttaacattcaaatctctctccaagacctctggaaatcccccaagtgcttatcttctggttgtcacctcttgctgtgagcctctgctaaattcatttgatttatggatcctctctcatttctcaaccctgcacatgctgttcttgttccatgcatgttaatcaacctcttcgttggtttacacacttgtgtatgcaggggcatacacaagcgtgtatgtgctaagtaactcatagcgcgtgcacacacacacgaaaaactcattataattgaatattagacagctttgtttctgaaagtcctcagtcagcctagtacaagggatttttcacaggcagcctcaacccacagagttactcatcttcatactggctctcttgttcttttttttttttttctttcctctctccactctcatctcctttccaggaaccccaaatactcacttttttatacagggtaattatcttctctccagtccagctctcggccatctttgcctatccagatcatcaagatgctcaacagggcaatagttccccatcttccatggaaggaagctgtgaatagcaatcactgtcttccattatattcccattttgcaaatagaaaaatggaggctcaaataggtaaagtggccaaacctgtcctctgtaagtcagagagcatcttgaggacaggggccctgactaattaggtcaggatttttggggttggggcccaggcgtaggtattctttaaaatttccttaggtggttgtgctaccagagctgagaagggcagtcctgggcatagactgaccccatttcttcctcagccattgatctgtgtgctgaagggacccatggatgtgagcaccactgcgtcaattccccaggctcctatttctgtcactgccaagttggctttgtactccagcaggaccagaggagctgcaggggtgagcaacacccccaccctcccaccacaccctggactgtggcctccgagggctccaatcagaggcaacatcttgctgtttcttccctcctgccagccattgactactgcagctttgggaaccatagctgtcagcatgagtgtgttagcacccctggtgggccacggtgccactgcagagagggccatgacttgcagcctgatgggaggagctgtcagggtgaggagggctctcctacatttgtgggaggggtaagagatcttagctggtggggtccatcctgactcatcctgacctgtctctcctttcagtccgggacctttgcaatggcgtggaccatggctgtgagttccagtgtgtgagcgagggcctctcctaccgctgcctgtgccccgaggggcggcaacttcaggcagatggcaagagctgcaaccgtgagtgatgggcgggagggtgttctgttggcttctgccccattgcccacatttggagtgtccttgactttgccattgctgtggccc

SEQ ID NO: 26722 - DNA, 2300 bp, Homo sapien
tgtgtgtgtggaggggtctgggggggttggcgagttgcaaagacagccacacagaagcctgtgtgcgtaggggagtgggccgaggtggggaagggcttctgtctgcagaggttcgcctggcaggaggagaggcaccaaacgcccaggctggctcacagaaactagcaggcgtgggattgtatcctgccgcagccactttttggccgaatgactttgggtaccagcgcttaacttttctgagcctcaatttcattgtctgtatgatgggggacaatcacagccttagtcttacaattgcagagaggattaaatgccacaatgcgtgaagagcatttaacactgtgcctgacatttaaggaagacctgtttttttctgtttaaattttgcatatttgtatctatgtatctattcttatttaccattctcttgtgggccgagcgcggtggctcacgcctgtaatcccagcattctgggaggccgaggtgggaggatcacctgaggtcaggagtttgagaccagcctgaccaacatggcaaaacccgctctctactaaaaatacaaaaaattagccaggtgtggtggcaggagcctgtaatcccagctactcgggaggctgaggccggagaatcgcttgaacctgggaggcagaggttgcagtgagccgagatcatgccactgcactccagccgggacgacagagcaagactctatctaaaaaaaaaaaaaaaaagaatctcttgtgtttcccagcaatcccactgtgatgagaattttttaattctgaaacatttcaaacatacacaaaaatagagagattagtaaaataaacctgtaactgtcttccccctccaagtgcctatcacccagaataagagctctgtaaatactgttgcttttctattttccttcctccctccaggctctgacacctccattctctgtccccaagcgccatgagaggccttctttgctggcccgtgttgctgctccttcttcagccctgggaaacccagctccagttgacaggtgaactggggcccagccctcaccagtgggaggaggggagcggaagcaggtcctccctctgcagccagctcctcctgctggggagagggaagcaagggctttggaacatatgggactgggtttaagttccccacttcacctttctgggcctcagtttcttcatctgtaggatgtggcttagttttgggcgcatgcagaactgcccatggggtgtttaatttggaaaaattatttgaaaacatggaaaaaaaccaggaaattttacataaaaatccctgtttagtatttctcttgaaaaaccagggatctgctgacatccaattcgcaggggcatggcctcatttggatgcagctacctgcccaatttaggagtgataggggctctttgggtctccagcgtcctaacccaaccagttcatccatgttccctgcctggtccctgcaggctttgagtttgcgacgcttccttgccccctcgtcaatgggtaataccgcctcagaatagccctcagatctgtaagatgagggaatttgtgaaatctcctagcccaggtgctaggcacatgccgggcgagtgcatctgtctaatctgcgtttgctgtgctgggcgctgttatgtcggcatagcggcatttcccctgggtttcctagggggtctcctcggaggtgaggctttgctgacctaggagagtcctccctgatctccccgcaggtcccaggtgtcacactgggcccctggatctggtgttcgtgattgacagctcccgcagcgtgcgccctttcgagttcgagaccatgcggcagttcctcatgggcctcctccgaggcctgaacgtgggtcccaacgccacgcgcgttggcgtgatccagtattcgagtcaagtgcagagcgtcttccctctccgcgcgttctctcgccgcgaggacatggagcgcgccatccgcgacctggtgcctctggcgcaaggcaccatgacgggactggcaatccagtacgccatgaacgtggccttcagtgtggccgagggcgcgcgaccgccagaggagcgcgtgccgcgtgtcgctgtcatcgtgacagacgggcggccccaggaccgcgtggccgaggtggcggcacaggcgcgcgcccgcggcattgaaatttacgcggtgggggtgcagcgcgcggacgtgggctccctgcgcgccatggcatcgcccccgctagacgagcacgtcttcctcgtagagtccttcgacctcatccaggagttcggcctgcagttccagagcc

SEQ ID NO: 26723 - DNA, 2300 bp, Homo sapien
gtcaatcacgaacaccagatccaggggcccagtgtgacacctgggacctgcggggagatcagggaggactctcctaggtcagcaaagcctcacctccgaggagaccccctaggaaacccaggggaaatgccgctatgccgacataacagcgcccagcacagcaaacgcagattagacagatgcactcgcccggcatgtgcctagcacctgggctaggagatttcacaaattccctcatcttacagatctgagggctattctgaggcggtattacccattgacgagggggcaaggaagcgtcgcaaactcaaagcctgcagggaccaggcagggaacatggatgaactggttgggttaggacgctggagacccaaagagcccctatcactcctaaattgggcaggtagctgcatccaaatgaggccatgcccctgcgaattggatgtcagcagatccctggtttttcaagagaaatactaaacagggatttttatgtaaaatttcctggtttttttccatgttttcaaataatttttccaaattaaacaccccatgggcagttctgcatgcgcccaaaactaagccacatcctacagatgaagaaactgaggcccagaaaggtgaagtggggaacttaaacccagtcccatatgttccaaagcccttgcttccctctccccagcaggaggagctggctgcagagggaggacctgcttccgctcccctcctcccactggtgagggctgggccccagttcacctgtcaactggagctgggtttcccagggctgaagaaggagcagcaacacgggccagcaaagaaggcctctcatggcgcttggggacagagaatggaggtgtcagagcctggagggaggaaggaaaatagaaaagcaacagtatttacagagctcttattctgggtgataggcacttggagggggaagacagttacaggtttattttactaatctctctatttttgtgtatgtttgaaatgtttcagaattaaaaaattctcatcacagtgggattgctgggaaacacaagagattctttttttttttttttttagatagagtcttgctctgtcgtcccggctggagtgcagtggcatgatctcggctcactgcaacctctgcctcccaggttcaagcgattctccggcctcagcctcccgagtagctgggattacaggctcctgccaccacacctggctaattttttgtatttttagtagagagcgggttttgccatgttggtcaggctggtctcaaactcctgacctcaggtgatcctcccacctcggcctcccagaatgctgggattacaggcgtgagccaccgcgctcggcccacaagagaatggtaaataagaatagatacatagatacaaatatgcaaaatttaaacagaaaaaaacaggtcttccttaaatgtcaggcacagtgttaaatgctcttcacgcattgtggcatttaatcctctctgcaattgtaagactaaggctgtgattgtcccccatcatacagacaatgaaattgaggctcagaaaagttaagcgctggtacccaaagtcattcggccaaaaagtggctgcggcaggatacaatcccacgcctgctagtttctgtgagccagcctgggcgtttggtgcctctcctcctgccaggcgaacctctgcagacagaagcccttccccacctcggcccactcccctacgcacacaggcttctgtgtggctgtctttgcaactcgccaacccccccagacccctccacacacacaaacacagacatgcactgcccaaccgcaggcggcagggaggggctgcgccctgttgcggggctgagcgtggtggcgtggcagcgagtggaccaaaacccactgcgcacgagaacgcgcggcttggcgcctgtttcccgcctgctctcaggagcgaccgccagggggcgcccgagatggcagggggcgtgggaagcccacatctgcccagcaggtgcgcccaccccgagcaaacagggggccggggcccggggccttggagataaggcctggacaggatataacccgcgcaagagccgaggagcaggggtgtgcagggttccagcgacagcagcactggactcgtccagagggcggcgggtgagcggctggggccccgtggagccaccatggaccccgcaggggcagcaggtgagcgcttaccctcccgaggccccggagacgccccgtgagaactacgaaggaccacccccccaccccctccccactatacaaataggaaaactaagccccaagg

SEQ ID NO: 26724 - DNA, 2300 bp, Homo sapien
tgctattttgactttctaggattcctggggtggaggcagggtgccaggtgagaagttggctcagaccaagaatgggatgaggggaaccttaaccaagatttaggggcccagaggcatctccgggtaggaaagtatgggaggtggcagaggccccttgtgccttagccctcatgctgtccagggatgttggctttgcctgtggcccaagcttgacaagggttccccgccctcccacttccaccagcgctgccacatcttgcttggtcaccctcccacgacgggccctgccagaggatttatgttcttctaccaggcctgggaggggaaaagggagaagaatccgggatgagaaggtcgcctggagtgagaagcaggcactggcctcgctcagaataggcgcattcacggaattggggggcgggggcggagctgctgttgggttaggggcagctggccctctctgccaagaaacagcaacagaaaaatggctaacacagcttcagcatggggcgcggcggtggggtaggagctggaaggaaatgaggtttagtgaattctaggcgccagggggcctcaagagagagaaggggaaccaggagccctaggttctaatcctgcttttgcagttcggcgggctgcctccttggggcttagttttcctatttgtatagtggggagggggtgggggggtggtccttcgtagttctcacggggcgtctccggggcctcgggagggtaagcgctcacctgctgcccctgcggggtccatggtggctccacggggccccagccgctcacccgccgccctctggacgagtccagtgctgctgtcgctggaaccctgcacacccctgctcctcggctcttgcgcgggttatatcctgtccaggccttatctccaaggccccgggccccggccccctgtttgctcggggtgggcgcacctgctgggcagatgtgggcttcccacgccccctgccatctcgggcgccccctggcggtcgctcctgagagcaggcgggaaacaggcgccaagccgcgcgttctcgtgcgcagtgggttttggtccactcgctgccacgccaccacgctcagccccgcaacagggcgcagcccctccctgccgcctgcggttgggcagtgcatgtctgtgtttgtgtgtgtggaggggtctgggggggttggcgagttgcaaagacagccacacagaagcctgtgtgcgtaggggagtgggccgaggtggggaagggcttctgtctgcagaggttcgcctggcaggaggagaggcaccaaacgcccaggctggctcacagaaactagcaggcgtgggattgtatcctgccgcagccactttttggccgaatgactttgggtaccagcgcttaacttttctgagcctcaatttcattgtctgtatgatgggggacaatcacagccttagtcttacaattgcagagaggattaaatgccacaatgcgtgaagagcatttaacactgtgcctgacatttaaggaagacctgtttttttctgtttaaattttgcatatttgtatctatgtatctattcttatttaccattctcttgtgggccgagcgcggtggctcacgcctgtaatcccagcattctgggaggccgaggtgggaggatcacctgaggtcaggagtttgagaccagcctgaccaacatggcaaaacccgctctctactaaaaatacaaaaaattagccaggtgtggtggcaggagcctgtaatcccagctactcgggaggctgaggccggagaatcgcttgaacctgggaggcagaggttgcagtgagccgagatcatgccactgcactccagccgggacgacagagcaagactctatctaaaaaaaaaaaaaaaaagaatctcttgtgtttcccagcaatcccactgtgatgagaattttttaattctgaaacatttcaaacatacacaaaaatagagagattagtaaaataaacctgtaactgtcttccccctccaagtgcctatcacccagaataagagctctgtaaatactgttgcttttctattttccttcctccctccaggctctgacacctccattctctgtccccaagcgccatgagaggccttctttgctggcccgtgttgctgctccttcttcagccctgggaaacccagctccagttgacaggtgaactggggcccagccctcaccagtgggaggaggggagcggaagcaggtcctccctctgcagccagctcctcctgctggggagagggaagcaagggctttggaacatatgggactg

SEQ ID NO: 26725 - DNA, 2300 bp, Homo sapien
ttttctgttgccctttttttttttgagactgagtcttgctctgtcgccaggctggagtgcagtggcatgatctcggctcactgcaacctccgcctcccgggttcaaccaattatcctgcctcagcctcctgagcagctgggattacaggtgcccgccaccatgcccagctaattttgtattttttggtagagagggggtttcactgtattggccaggctggtctcgaactcctgacctcaggtgatccgcccgcctcggcctcccaaagtgctgggattacaggtgtgagccatcgcgcccggcccttctgttccttctaattgtagcacgctttccccagatattctcctgtctggctccatttcagcattcaagtttcagttccaatgttacctcccaaaaggtctctcaacctccttgacctttctagctaatgtcccccctgccttcagtttccgtcaaatggcctcgttcagttttccttctagtgctcatcataatctgcaagtatcttgtttcctgacttgtggggagtttactgtctgtctcttccacacttgagtgagagtgtgggctacagagcaggggctgtttctgtcttgttcagctgtatgcccagtgcccagcagtacccacagagcctggtgcatacatgacaaacactcagtaagtagttgttgaatgaatgaataagtgaatcaatgggagaatgagtgaatgaatggagacaggagattcacagggaatctcctgctgtagaactatagaccaaagtgggggctaatggtggctgagggtcaaggccctggtcgaccaatagctgagatctcagccctgaggcctgctctgcgtctaaaagaggcccaatgggtggatggaggaggtgcatagggctgacagttgcagagacctgggaggggctgcggaggcacctaccgcttctcatttccgtatgatttctgggccaccttggcatgcaggatccgcacagtctgttcacactgttgctgcaggcacctgcgcacgcctcccctcagaatggtggtgtgctctggggatgacctgggagtagggcaggcaggtcgaccagccacaggagggagaagggtcaaggtggcacagggtccaagcactcaggttgagtaaaatgaagtgagcagggggttagagtgagtgggagggtggggctgctctatatcctgcccctgtggggtcaggaagaggaagcattaggtaaggaggagacttggctgcaaattgtaggctaaatatttaggctgcaaggtgctcaacgaagcctgcatggaacccatgggaccacccaggttccactctgtgggtctggcatcatgcccattggagcccagggccatagggacacgtggctgtgacacaaaggctgcacttatactggccttgggatggagaagagtattttagggctgatggaattggtagagatgaagcttccccaccctggggaaggcagggtggggggtgaggagggaggggaagggagagcctttcctgggctcctggcctggagcgctctctagcctcctgcctgcaaacagaaaagggcccaaaaccttgtcctcaggatgggggatggcctgggggaatctgagcctttctggggccaaagccatattcttccctttctcccatgagaagtggcctgttgctgtgtgggctttcctacccttgattacaggagtcaaggcagatgacattggtcctgcagagtgagccaggttagagcctagaggtctggtggcttcttaacctgggggtcttgagcggtgtgggtgggtaggcccgagcaattgcagggagcaagtagaggaggggaggtgggagagatttggggggttagcaggttgaggcccaaggagagccatgaaaactgaggctgtccttctgagcccttattcctcttggcaggaccagagtctctcctcactcctggaggggacagcgcaagaccgcaccctcgaaagccaggccagacaggcagcagccacagccaggaccgctccaccccttggggctctcctcagggaagtgccttctaagcttccaatgaattccggctgtggagtgtggctgccccggtctccccagtctcccgctgtagctgaattccagcctggcccgcagctagccctgtctgcagctccaagcgtggtaggagcagggggtgctgggtttgccccccctcaggaggaaggggggatccctccctgccagtgggaggggttgcagcctgcacttcccctccccacccgccagccctggg

SEQ ID NO: 26726 - DNA, 2300 bp, Homo sapien
cccaacccctgcccccagggcagacatttgtgaggatggcctcaaatggcctctccagaattagaaccttcagttggctcccctgagtaccaagctttcccgcagggcccatgtgtgatgtgaggaagagccagaggcaacaaggcagggtttaaggcagaagcttgggggccgctgaaaaccttgtcccttgctttttttgtcccccagctgatgggcactctgcccaaggagacttcccaccgcgagagggctacgttcgctatggctccctggtgcagctcgtctgcacggtcaccggcatcacactacctcccatggtataggaagggagggcatgcctggaggggtcccctcagatccatgcagagaatgtggcacacacgggcagggctggagagtgaggccccaaggcatggagacacctgttctcacccagtgtcgcgtaggaccagacagaagtcaaagggcagggggaatctgctagtgcctgtgtggctattggagtagcagacagccggctaggagggcagcctctggacgcccgggctccttgccaccactgttcttaccatccttccattgcagatcatccgtaaagtagcaaaacagtgtgcgctccttgatgtggatgagcccatctcccagctgcacaagtgtgcattccagtttccaggcagtcccccaggagggggtggcacctacttatgccttgccacagagaaggtggtgcaatttcaggtaagaagcagagaataccagcaccaagtgtcctggaaagggagaatgcagagaaccacagaatgtaagatcatcaccctcaccatggttgctacttcctgagcagcctcccatggaacattaaaatcatagactcccaggacagaatcataggatgtagaaaaatagtaataagtaatagtatgaagcaatattccttcccaaagaattttagagtcataaaatattgggatatagccaggtgcggtggctcatgcctgtaatcccagcactttgcgaggctgaggtgggcagaacacctgaggtcaggagttcgagactagactggccaacatggtgaaatcccatctctactaaaaatacaaaaattagctgggcatggcagtgggcgcctgtaatctcagctactcaggaggctgaggcaggagaattgcttgaacctgagaggtggaggttgcagtgagccaggatcacaccattgcactccagcctgggtgacaagagcaagactccatctcaaaaaaagtaagtaaataaattgggatataaaattgtaggatgtaaataaaaatcatgataggtaatagagagcagagaattaatgagcaaagactattcgaagcacagataaagacacagaatgtggaaaattatagaatgtggaaaataataattatcgttaagcagtagtactcccaaaagaatattatcatagaatgttacgagatagaattataatatgtggaaaatagcaagtattattccttccccaagaatattccttcccaaagaatattaaaattgtagattattagagcatagaattgcacaatgttaaaaaaaaaaaaattctggaatcccaagaaaaaagacccttagaaatcagctatcccaggccgggccaatggctcatgcctgtagtcacaatactttgggaggctgaggcaggaggatcacgaggccaggagtttgagaccagcctggccaacatggtgaaaccctgtctctactaaaaatacaaaaaaattatttgggcgtggtggctggcacctgtaatcccagctacccgggcgcctgaggcaggagaatcatttgaacccgggaggcggaggttgcaatgagccaagatcaggccattgcactccagcctgggcgacagagcgagattcagtctcaaaaaaaaaaaaaggaagaaaggaaggaaggaaggaagaagagagaaagagagagagagaaagaaaaagaaagaaagaaagaaaagaaagagaaagaaaagaaaaagagaaagggaaagaaagaaaaggaaggaaggaaagaaagaaaaagaaagaaaggaaaaaagagagagaaagggaaagaaaaagaaaaggaaggaaggaaggaaaataaagaaaaaagaaagaagaaagaagaaagaagaaatcagctagctcaacaagctttcttaacgctaagtgagagaacttaagggcactgtccaagctgaggggacaagtgaaccccagagcctaggattagtatccagttcggtctaacgcagaagcccacgcgccatgctg

SEQ ID NO: 26727 - DNA, 2300 bp, Homo sapien
aaagattgcaaaccatttaacttgcaaaaggatttcttattctggcatgagatttcttcattttctcagttttgttccaaatcctagggaagcatgttaaaaaccactgaaagtcattgcttacctttaaatctgtggaaaccccgtggtcagcatttgaagtttgctttactgccaaggttctctgccacaagagacttttattctttgataataattaagaggtggaaaaagggaagtcactaccaattctccactccacaaagtatatgaattcataatatgccaacagtggccaaaatgtcctacttctaaggctatgttacacccttagaaagatttatacataagtcagggagagacagggttaggcttcttttgtacttcgatcatcgtagaatgcccaccttcacaccctgcaataattccaacagtacgtgtgcttggggacccagagaattttacagtctccatatagcacccccctccacttcttccctcaacctgctcccaccaatgcactgttaggaggatgaagggtaaggaggacacacaactttctcttataaagggtggaagcttaccctaagaatggaaataaacttgcagaccagttctcagagagatcaaacttttgaaaaagttcaaaatctggtagatgaagcccttagaacagacgtcagccactctgagaccagcgtcagagtggtctcagagtggctgaggcccaccgcctatttttgttcagcccactgctaagaatggtttttgcatttttattttttatttttttgagacggagttttgctctgttgcccaggctggagtgcagtggggagatctcagttcactgcaacctccgcccctcgggttcaaacgattctcctgcctcagcctccagagcagttgggattacaggcgcaggcaaccatgcctggataatttttgtattttgtagagacggggtttcagcatgttggccaggctggtctcaaactcctgagctcaagtgatccgccgcctcagcctcccaaagtgctgggattacaggcatgactcactgcatccggcctgcatttttattataaaatgtcatttatttatttatttatttatttatttatttatttatttatttttgagacagggtctcactcggtcacccaggctggagtgcagtgagcgatcatggctcactgcaactttcacctctctggctcaagcagtcctcccacctcagcctccagagtagctgggccacaggggtgcaccacaatgcctggttaatttctttaaaaactttttgtagagatgggggtctcattatggttgcccaggctggtctccaattcctgggctcaagggatcctcctattcctcggcctcccaaagtgctgggattacaggcgtgagccatagagcccagccgatttttgcatgtttaaatggttgggaataaagtcaaaagaataataatatttcgtgacacatgaaaattatattaaattcaaatgtcggtgtctataaataatgttttattaggacctagctgccctcattcctttagtatttatggctgcttttgagctacgacgctcgagtttgaatagttgccacagggatcgtatggcccgcaaaacctaaaatatttagccctttacagaatagtttgctgtcccctgtcttaacacggttcacatcccatttgggaagttctgtgtcttcagaggggagcacacccggtatgaaggctggtctaaactcaacaccctagggaagtccttcccgtccctgggccttagtttccccaactataaaatggggttagccgcagtgatctctggggacctgcctggcagtgggtcaaataaataaagggagttggacctcccggagggtaggactaggggttgagtaggagccggcgggctcgggcagggcgggtcccttggggtttccaactccgcgggcgggcgcagtgccccgcaggcctcgcttccactggggaattccgggcggggtgcgggcggcggggcgggggcgggccggggcggggccggtaggccgcctataagatgggtggcgcgcccgcccggggccactcgccgcagcctgcgcgccttctccagtccgcggtgccatggcccccgcccgtctgttcgcgctgctgctgttcttcgtaggcggagtcgccgagtcggtgggtgcttggaggttcccgggctgggggcgaagcgggggcgcaggccggtgcctcctttgttcgtcggagcgtgggatgggggggggcagatcggggg

SEQ ID NO: 26728 - DNA, 2300 bp, Homo sapien
ttgatgtttggagtcagttgtcctgaatttgaatctcagctctgctccctgtgagctctctgacctagagagtcacaccacctccccccaagcctagtttcctcccctataaaaaggggacaatagctatattttcagattgtgagaattaaacaagatcatgtaggcacttaagaaacagatgttttctcagaaacactagatcatgtgcataatcagtgaactagaggaatttgaatacatatttgttggactgaattgaggtgcctaaaagaatggttgagctggaaagcacctaagaaatctttgggccttaataactccccaactggagtccaggggaactgttcagggtatttccaaatgataaggacaatcgcacactctcaataaagtctcaagtttctttacttttgtctggaattgtatcagctcaaggtgataacacggctaccacaagctgttcagaaattctgattggcagttacatggctctttgatacgtttttttttttttttttttgagacggagtctcgctctgtcgcccaggctggactgcagtggcgcaatctcggctcactgcaagcttcgcctcccaggttcacgccattctcctgtctcagcctcccgagtagctgggactacatgcgcctgccaccaggcccggctaattttctgtatttttaatagagatggggtttcaccatgttagccaggatggtcttgaactcctgaccttgtgatctgcccgcctcagcctcccaaagtgctgggattacaggcatgagccactgtgcccagcctaagttttttttttaatgagaaaataattactggaaggtagattaaatggtggaaaacgttaatcatgtccaactcctcatttcataaacagggaagctgaggtttaaagaaggaagtggcttgctggtcacactgggtggcatagctggccctaaaacccaaattcttttcctggaacaacttacttcccgtctttccacttcagagagggggaacctaggatcaatgaagttgatgggttttcgtctgctggagtaggaataagtgagttatcgatttgctcttgctttttctgttcttaactcattcagcaaatatttactgactgtccactattcggatttggaagatagataaaacagtcatggcagcagagagggtcaggatttactcctatgtgcgacttcagaacctgtgcctttttccactggacacccacattttaaaacacccactactctgccttctaatatagttcatctgtgtctcagggcaggggctgtcttatatatacatgttctagccttcctgccaccgagtaggtgcgaaatcaatgttgtagtgttgaggaaacacttgaattttatttatttatttatttatttatttatttatttagagacggagttttgctcttgttgcccaggctggagtgcaatggcgtgatctcggctcactgcaacctctgcctcccgggttcaagcaattctcctggctcagcctcccgagtagctaggactacaggcgtgcgccaccacgccccgctaattttgtatttttagcagagacggggtttctccatgttggtcaggctggtctcgaaacaccgacctcaggtaatccgcccacctcagcctcccaaagtgctgggattacaggcgtgagccaccgcgcccgaccaacacttgaattttaatacttactttgctactaactgtgtcgttgaaacagtatgttgctttccttctctggcccttagcttaactatctgtacagcgggaacattggcaaactcctacgtggaggagcttgcaggtccacttcaagttatcagactctaactaggagaaaacattgagaatttaggctgaaaataacgacacagtttatcacctcgttaattcccaaacatcattaccgcgtcctaagccaccccacttgcctctcccctagccgccttcctttaaaaaaagaattcccctctagagggcgcgcaagctctgcggccttcgttcctctcttccgtttgccttcactcttccttctgcgcatgtgctcagttcgctatccggctgcttgtacctggttcaggaggttcaggcagaggttgcacccactacgcctgcgcaacctcagccccgcccctccgctgctttccccggaaacgtttctttcctacgcagccgctcctgccgccgtggtcgctggagctttgcctctctaggccggcagcgcctctcctccatggtcctgtctgtcagcgctgttttgggag

SEQ ID NO: 26729 - DNA, 2300 bp, Homo sapien
ggtagacaggagagagagagggtgcaccctctgtgtcttccttgccaaattaccacattgctttctttcctaggccacagcagcagtttaacccactacctaaccttcacttgaataagaaaggatatttatatgtgagaagctgtcccacagcctaggtagggttggcccctcacccctccgttcagagctaagcacccaccccccgtgcatgtacatctctccccactagaagtggaatggtgtggagtgggtcccacatttgattggttatctgactggcctgctgaatggggtggtgcccacaaaaatgtttttcacaagctcttcatactattctgatgcagccagctgggcaccagggattcagggcagccagcgccctttacagcctgttgtgatctgcctaacccaccacgactccctctctgcctcatcttctcccaccaccattcattctcctcttccctctctctctcaggtgtctgctcaaatctcatcttattggtgaatctttcctagaccacctttttaatataccaaaccctctacctctgccctccctgttccctttaccctggttgctgttctccaggcacttatttccatctgatgtagcattggcgtgctggggctaactcataagggctcacaagtctactgttacacttctaggaattctgcaggctggttgttaggcacggccatcattaaaatgtaattgatagcaacttccaattaaataagtgatattaaaaacatagggtgaaaaatgcttaaacttgtcactttctattttttactaccttttactattatctatgttcttaggattctttatatctgtatatctgtagagtagaaatatatcatatatgaatcatatgtagatctgaaaaaagaccccccaaaaacaacaaaaaaagagaaaacataagcaagtgtcctgcccatagctattcgattgtaaataacaaaaagaatctgagaaatatatctccagtattcaaaaactatggtctaattcagcaaataggtcaatgaaatcattgataaatgagttaaatttcaatatctctgttgtttcactttttcaccttcttcttactgtttagtgtaaatgaaaatacaaacattaatgttggtattatacttgtttatccattacaaccataggttggctataaatggaggggttaggcaaaatccaagaaaagcatactataagaagcaactcactaatagaagttacaataaagagtattataggattctattatttgttgatttctatcagtaaaatttataatacaaacacatatacattttgcttcagagagccaattattaaacatttacaagtacacacactgtttcccctccactagaatgtaagcttgagggcaagaattttctgttattctagcacttagaaaaagcacctggcaaggccaggcgcgctgactcatgcctgtaatcccagcactgtgggaggtggaggtgggcggatcacaaagtcaagagatcgagaccatccttgctaacatggtgaaaccccatctctactaaaaatacaaaaattagccggacgtggtggcgggtgcctgtagtctcagctacttgggaggctgaggcaggaaaatcgcttgaacccaggaggcggaggttgcagggagccaagatctcaccactgcactccagcctggcgacagagtgagactctgtctcaaaaaacaaaaaacaaaaaaagagaaagaaaagaaaaagcacctggcatgtagcaggcgcccagtcaaaacaggcgacatgactgaatggatgagcatggtttgggaatccctggtttcatgggttgactatcagaccttggttaggtttccagcccactatgatctagctgggctagatctagtgtggccttgagtagattattcaacctctttgaaccctggcttcctcatttaaaaagaggggataatcctcttaccccacagggaggttgtgacaatgcacacagctgtctgtcgcctattgtctatatttctttctcaccctctacccctcacctctgccacatacactccttggagacccagccctgctactgtcacatttcagtgatgtcacagctgcaggtggtacagagccagcaccaccatctgatgcccagcctgagtgctggctgaactgagaggaacagggttggtgcctggcactggtgttgctccattcatctctgaggtctcacagccccagcatgagtccatcagcaaagaagaggcccaagaacagcagggttt

SEQ ID NO: 26730 - DNA, 2300 bp, Homo sapien
cactccagcctgggcaacagagcaagactctgtcaaaaaaaaaaagggatacatctctgaaaatggggacatgactgggagtgagctaagctcttatccactgtactcctgacttggccctcattttctgtgctagaaaattagatgaagtatctactctatccattaatgagaaataagaatcaaaccaacccaatgaaatagttcttagaagatgaaaactacaacaggataaaaggggaacaggcacaggataaaagggttgtaagcacagtctctagaggcagtctacctgggcttaaattccaggtccatcacttactagctgtagggcctgggacaagttccttcacctctctgtatctcaacttctgtatctgtaaagtggaaacagcaagaggattaaaagggttaatttttgtaaagcacttataatagtgactggcacataataagctctgtggaagtgttaacaattagggcttacttcctataatttcagaaatttgtggaagacagcagttccctccctttctcagaacccattaccatcaaaacagctaacgattactgagcatttccaaagtgcccaagtcctgtaactaaccattttatataaattatcttataagagggagggattaattattcctctttagtaggtaagagatcaaggatcagagaagtgtttacccagctggctagaggaatcaataggtttacaacccaagagggtctgactgtattgcctgtgctcttaaccattgcatttgttgcctcccacaaactagtttccatgcttgtaaactagtgggaaaattgcatgctgtatttatctcacagggttgttttgagatcccaataatgttaagaggcagtgctttagtgtacagagtgctggtcccctgacagggaaacctgaatgtgtcaatgatttgttcacacttccctccctctgcacatgcccttctccctcttttctgcttgttgaactcatgtcttcaagacttagctcagatatcagcgtccagattttattctaacagtggaggaatttaggcaacgccgcgtggcgggggggtcgaggggggcacaccagacttgtgttctgaaatgacagctgacttgtaatgcagggaatggagtgtagccgggccagaatgagtacaagaaaaccagatagggccgggcgcggtggctcacgcctgtaatcccagcactttgggaggccgaggcgggtggatcacgaggtcaggagatcgagaccatcctggctaacaaggtgaaaccccgtctctactaaaaatacaaaaaattagccgggtgcggtggcgggcgcctgtagtcccagctactcgggaggctgaggcaggagaatggcgtgaacccaggaagcggagcttgcagtgagccgagattgcgccattgcagtccgcagtccggcctgggcaacagagcgagactccgtctcaaaaaaaaaaaaaaaaagaaaagaaaaccagatagaaggttactgcattaggagcccaggcgggaggtggtggggcaaacggaaggaatggtggactggaaagatatttaggaaagagaatcgacaggaaatggaggtgtattttaatataggcagcgagggagagggaggtggcaaggatgactcctagttcctgacttgctcgcggatgtttgtcgaatgaatgatccagtgaccccaaggcagaagtatctcagagagatccccccactcccctccccgcacccgtcaccacgctgccttcggagctctgaccgtaagggggtggatggaaggcaggaggaagggaatggccacggagtcttggtccaggagctgctagactggacacttctagcactggtctgagccaggagacgctgcgaaaagagggcaaacgtttctcctctcgcagttgccgcctcgcccctccacccccgcctggccagcagcgcagcgcccctcttagcaccgtggaggtgctggctccttgccggcgtcggggggcgcggcgtagcggcccacccttccagctctgacccgcccggccggcccggcgcccaccccgcccagtgtgcttggtaggttgggcggcggctctgtctagtcccagagccaggaatcaggggcagccgggcgagtcccagggcaggggtcctccgccgccttgcacctgccctgctgggcggcaccgggtcagtgccctgccccctcctgcgggtcccaactctctctttcccatcgtgcgtcctctggagaagtgcgcgcgtgtaagtgtggcgagtgtggc

SEQ ID NO: 26731 - DNA, 2300 bp, Homo sapien
acccaatgaaatagttcttagaagatgaaaactacaacaggataaaaggggaacaggcacaggataaaagggttgtaagcacagtctctagaggcagtctacctgggcttaaattccaggtccatcacttactagctgtagggcctgggacaagttccttcacctctctgtatctcaacttctgtatctgtaaagtggaaacagcaagaggattaaaagggttaatttttgtaaagcacttataatagtgactggcacataataagctctgtggaagtgttaacaattagggcttacttcctataatttcagaaatttgtggaagacagcagttccctccctttctcagaacccattaccatcaaaacagctaacgattactgagcatttccaaagtgcccaagtcctgtaactaaccattttatataaattatcttataagagggagggattaattattcctctttagtaggtaagagatcaaggatcagagaagtgtttacccagctggctagaggaatcaataggtttacaacccaagagggtctgactgtattgcctgtgctcttaaccattgcatttgttgcctcccacaaactagtttccatgcttgtaaactagtgggaaaattgcatgctgtatttatctcacagggttgttttgagatcccaataatgttaagaggcagtgctttagtgtacagagtgctggtcccctgacagggaaacctgaatgtgtcaatgatttgttcacacttccctccctctgcacatgcccttctccctcttttctgcttgttgaactcatgtcttcaagacttagctcagatatcagcgtccagattttattctaacagtggaggaatttaggcaacgccgcgtggcgggggggtcgaggggggcacaccagacttgtgttctgaaatgacagctgacttgtaatgcagggaatggagtgtagccgggccagaatgagtacaagaaaaccagatagggccgggcgcggtggctcacgcctgtaatcccagcactttgggaggccgaggcgggtggatcacgaggtcaggagatcgagaccatcctggctaacaaggtgaaaccccgtctctactaaaaatacaaaaaattagccgggtgcggtggcgggcgcctgtagtcccagctactcgggaggctgaggcaggagaatggcgtgaacccaggaagcggagcttgcagtgagccgagattgcgccattgcagtccgcagtccggcctgggcaacagagcgagactccgtctcaaaaaaaaaaaaaaaaagaaaagaaaaccagatagaaggttactgcattaggagcccaggcgggaggtggtggggcaaacggaaggaatggtggactggaaagatatttaggaaagagaatcgacaggaaatggaggtgtattttaatataggcagcgagggagagggaggtggcaaggatgactcctagttcctgacttgctcgcggatgtttgtcgaatgaatgatccagtgaccccaaggcagaagtatctcagagagatccccccactcccctccccgcacccgtcaccacgctgccttcggagctctgaccgtaagggggtggatggaaggcaggaggaagggaatggccacggagtcttggtccaggagctgctagactggacacttctagcactggtctgagccaggagacgctgcgaaaagagggcaaacgtttctcctctcgcagttgccgcctcgcccctccacccccgcctggccagcagcgcagcgcccctcttagcaccgtggaggtgctggctccttgccggcgtcggggggcgcggcgtagcggcccacccttccagctctgacccgcccggccggcccggcgcccaccccgcccagtgtgcttggtaggttgggcggcggctctgtctagtcccagagccaggaatcaggggcagccgggcgagtcccagggcaggggtcctccgccgccttgcacctgccctgctgggcggcaccgggtcagtgccctgccccctcctgcgggtcccaactctctctttcccatcgtgcgtcctctggagaagtgcgcgcgtgtaagtgtggcgagtgtggccaagggtgccggaggcagggttcgggtgcgtagtcgttgcgtgggcgctgcccaaaaggcgcagagcatcaagtgtgcgtgggcagaaccggcgcgggcgcccgccgcgggtctgcgcggggcgggggcgcagcaagtgcatccgagcgagcggagactagcgcaccggcgtcggtggcgagggtggtgc

SEQ ID NO: 26732 - DNA, 2300 bp, Homo sapien
aaagtgcccaagtcctgtaactaaccattttatataaattatcttataagagggagggattaattattcctctttagtaggtaagagatcaaggatcagagaagtgtttacccagctggctagaggaatcaataggtttacaacccaagagggtctgactgtattgcctgtgctcttaaccattgcatttgttgcctcccacaaactagtttccatgcttgtaaactagtgggaaaattgcatgctgtatttatctcacagggttgttttgagatcccaataatgttaagaggcagtgctttagtgtacagagtgctggtcccctgacagggaaacctgaatgtgtcaatgatttgttcacacttccctccctctgcacatgcccttctccctcttttctgcttgttgaactcatgtcttcaagacttagctcagatatcagcgtccagattttattctaacagtggaggaatttaggcaacgccgcgtggcgggggggtcgaggggggcacaccagacttgtgttctgaaatgacagctgacttgtaatgcagggaatggagtgtagccgggccagaatgagtacaagaaaaccagatagggccgggcgcggtggctcacgcctgtaatcccagcactttgggaggccgaggcgggtggatcacgaggtcaggagatcgagaccatcctggctaacaaggtgaaaccccgtctctactaaaaatacaaaaaattagccgggtgcggtggcgggcgcctgtagtcccagctactcgggaggctgaggcaggagaatggcgtgaacccaggaagcggagcttgcagtgagccgagattgcgccattgcagtccgcagtccggcctgggcaacagagcgagactccgtctcaaaaaaaaaaaaaaaaagaaaagaaaaccagatagaaggttactgcattaggagcccaggcgggaggtggtggggcaaacggaaggaatggtggactggaaagatatttaggaaagagaatcgacaggaaatggaggtgtattttaatataggcagcgagggagagggaggtggcaaggatgactcctagttcctgacttgctcgcggatgtttgtcgaatgaatgatccagtgaccccaaggcagaagtatctcagagagatccccccactcccctccccgcacccgtcaccacgctgccttcggagctctgaccgtaagggggtggatggaaggcaggaggaagggaatggccacggagtcttggtccaggagctgctagactggacacttctagcactggtctgagccaggagacgctgcgaaaagagggcaaacgtttctcctctcgcagttgccgcctcgcccctccacccccgcctggccagcagcgcagcgcccctcttagcaccgtggaggtgctggctccttgccggcgtcggggggcgcggcgtagcggcccacccttccagctctgacccgcccggccggcccggcgcccaccccgcccagtgtgcttggtaggttgggcggcggctctgtctagtcccagagccaggaatcaggggcagccgggcgagtcccagggcaggggtcctccgccgccttgcacctgccctgctgggcggcaccgggtcagtgccctgccccctcctgcgggtcccaactctctctttcccatcgtgcgtcctctggagaagtgcgcgcgtgtaagtgtggcgagtgtggccaagggtgccggaggcagggttcgggtgcgtagtcgttgcgtgggcgctgcccaaaaggcgcagagcatcaagtgtgcgtgggcagaaccggcgcgggcgcccgccgcgggtctgcgcggggcgggggcgcagcaagtgcatccgagcgagcggagactagcgcaccggcgtcggtggcgagggtggtgcagaggagtccggctgggcggagggaggaaggatgggtgcgggtaactttttgaccgccttggaagtaccagtagccgcgctcgcaggggctgcctccgaccgccgggcgagctgcgagcgagtgagcccgccaccgcccctcccccacttccgcctcccgcctcttcctcgttcccggctcccagggcccgtcggtcccccgggagccctggaggcgcagccccaccccggccggcgcggctcgctcccacgcccccgccgcggcctcgctggagcggacggactgagtcagagggggcgccagcgctgcaggtaggggctccggcggcggtgggcgcaggtgccgcggtggaccgcggaggggaccggagcacgaggggaacggccttggg

SEQ ID NO: 26733 - DNA, 2300 bp, Homo sapien
gttttgagatcccaataatgttaagaggcagtgctttagtgtacagagtgctggtcccctgacagggaaacctgaatgtgtcaatgatttgttcacacttccctccctctgcacatgcccttctccctcttttctgcttgttgaactcatgtcttcaagacttagctcagatatcagcgtccagattttattctaacagtggaggaatttaggcaacgccgcgtggcgggggggtcgaggggggcacaccagacttgtgttctgaaatgacagctgacttgtaatgcagggaatggagtgtagccgggccagaatgagtacaagaaaaccagatagggccgggcgcggtggctcacgcctgtaatcccagcactttgggaggccgaggcgggtggatcacgaggtcaggagatcgagaccatcctggctaacaaggtgaaaccccgtctctactaaaaatacaaaaaattagccgggtgcggtggcgggcgcctgtagtcccagctactcgggaggctgaggcaggagaatggcgtgaacccaggaagcggagcttgcagtgagccgagattgcgccattgcagtccgcagtccggcctgggcaacagagcgagactccgtctcaaaaaaaaaaaaaaaaagaaaagaaaaccagatagaaggttactgcattaggagcccaggcgggaggtggtggggcaaacggaaggaatggtggactggaaagatatttaggaaagagaatcgacaggaaatggaggtgtattttaatataggcagcgagggagagggaggtggcaaggatgactcctagttcctgacttgctcgcggatgtttgtcgaatgaatgatccagtgaccccaaggcagaagtatctcagagagatccccccactcccctccccgcacccgtcaccacgctgccttcggagctctgaccgtaagggggtggatggaaggcaggaggaagggaatggccacggagtcttggtccaggagctgctagactggacacttctagcactggtctgagccaggagacgctgcgaaaagagggcaaacgtttctcctctcgcagttgccgcctcgcccctccacccccgcctggccagcagcgcagcgcccctcttagcaccgtggaggtgctggctccttgccggcgtcggggggcgcggcgtagcggcccacccttccagctctgacccgcccggccggcccggcgcccaccccgcccagtgtgcttggtaggttgggcggcggctctgtctagtcccagagccaggaatcaggggcagccgggcgagtcccagggcaggggtcctccgccgccttgcacctgccctgctgggcggcaccgggtcagtgccctgccccctcctgcgggtcccaactctctctttcccatcgtgcgtcctctggagaagtgcgcgcgtgtaagtgtggcgagtgtggccaagggtgccggaggcagggttcgggtgcgtagtcgttgcgtgggcgctgcccaaaaggcgcagagcatcaagtgtgcgtgggcagaaccggcgcgggcgcccgccgcgggtctgcgcggggcgggggcgcagcaagtgcatccgagcgagcggagactagcgcaccggcgtcggtggcgagggtggtgcagaggagtccggctgggcggagggaggaaggatgggtgcgggtaactttttgaccgccttggaagtaccagtagccgcgctcgcaggggctgcctccgaccgccgggcgagctgcgagcgagtgagcccgccaccgcccctcccccacttccgcctcccgcctcttcctcgttcccggctcccagggcccgtcggtcccccgggagccctggaggcgcagccccaccccggccggcgcggctcgctcccacgcccccgccgcggcctcgctggagcggacggactgagtcagagggggcgccagcgctgcaggtaggggctccggcggcggtgggcgcaggtgccgcggtggaccgcggaggggaccggagcacgaggggaacggccttgggggagcgccctccccccgtcctccgccgacgcctcgtgtccctttttagggaattttttccctcttgctggctccagtgcgggtggggctgagaccgagagggagttctccatttcgctggctcctgcccggcccctggcagcctcctgcccccaaatctcttcaccccctttccagtacctataggtcgcgtaaacaactccctttctccagctctgggctccgcggccccccgggggacagctccttcagtctcgtgagatcgg

SEQ ID NO: 26734 - DNA, 2300 bp, Homo sapien
agtttatgtacttcttaataataacactcaagcaaccctatcacttaggcactattatctacatttacatattagtgcctaggtgacagggttgagtgttactattaagcacttgctacattccatatcctacatgtacataatttctcatcttaacaacaaccttgaaagtaggtttcttcattatacaaatgaagaaaagtgacacttgggttgatcatgctcatatggattaaaggctggcatagggatttggactcctgtctttctgacatctaagcccatggccttcctaatatttcgtgtctaatggggcaggaacactgaatgcaggcagaatgaaggcataatgagataaagacatctttctgacatttcctttctggaaatgtctggttggttggcgcatatcttggcagacctgcctgacaccaaattggctctttctagaagtgtggtcatgagtgtcaccaagagactgttcatgaaatccttcatgaatgtgtttcccatagggcaggtggaaaaactaaagcatgactttaactttggaactccgaaaaagtcaataaaaagacaagccagtaaacaaaggggtgagggtgcagaagactttaacagacctttcacaaaaaaataaaaattaaattaaaaaataaatggcaaataagcacatgaacagatgcttaacatttttagttaccagggaaatgcaaattaaaaccacaatgagcaaacactacatacatacccaagtggtcaaaactaaaaagtacaaaaaattagaaacttcaaatgctgaccaggatgtggtacaatggagactcatagtttatggaaacataaaatgatacattttggagaaaggtctgacagtttcttataaaattaaacatacacctgctctctgacccagcaattccactcttaaatacctggccaaaggatatgagaaatatacgtctacaaaggagcttgcacagacagcagccttgttaataataaccaaaaactttaaaagtgcccatcaagagttgaatggataaattaataatactacgcagtaataaaaagaattgtggatacatgcaagaacatggatgattctcaaaaacattcttcccatgagaaaaaaaaaagccttacacagtatacatactatatgatttcatttatatttagttctggaacagattaatctattgtgggaaaaaatcagggtactaactgcctctggaaggtgatagaggagcagggattgactaggaaagggtattgctaattttctggggttttaggaatgttctgtatcatgataggagttcgggttacataggtgtgtgcatttgtcaaaactcagtgaatgtgtactttggatttgtgcatttcactgtatgtgaattttacatcaaaatgcaatcgaatactgaactctagttaattatatgcatgcttaactacttaaaggaaagtgtactaatgtctgcaatttactttgaagtgcaccaaaacacaagatggaatgatggatgtatagacaaatatgtggtaaagtacaagtatagtataatgtaaatagtagaatctaggtggtggaaaataggtttattgtaacaggtgctcattctttcaattttgtttgaacattttcgtaataaaagaaccacttatttgggggttttgcagcaaatggagacactagaagctaagaggggcaggaggttcctcttactttgggaaatgcaaattaaaaccacaatggttttcccaaaagtaattgatctttttcagtcaatgtttcctcaactatcaaatgggtaaaatggcagtgaaggagcttcatattattaagcatttcctggtgggtggaatacgccatgaactaggtgcggcctcaagctggttactcgccctgcctactccctctcgtgtcctcccagtacccccttagacccaccagctctgagggaatcttcgcgacctgcgcaggcggtcgctctgataaccgcatcccggtttccgggacgacagcggaagtcacttctcacacgcctttcttattggataccggcttttcatggggccgagcgccgctgggtaggcggaagtagccgcaggcatggcggcggctatgccgcttgctctgctcgtcctgttgctcctggggcccggcggctggtgccttgcagaacccccacgcgacagcctgcgggaggaacttgtcatcaccccgctgccttccggggacgtagccgccacattccagttccgcacgcgctgggattcggagcttcagcggg

SEQ ID NO: 26735 - DNA, 2300 bp, Homo sapien
cctacaagttaaatcacttgttcaaagccacatacagagtgtggcagaagatatgtgccctacccttaccccggacctgactccttcggtgccaccagctgatttccaagtgctagtgtctgcatctctttgcctgagggcttccttggaagccacacaaggagggcccaggcccagatcagccggaaaccctcagtccatatggagactggtgcctgaatatctccactggtgcataaacacttgctctcctagggaaagggggtgatagctgctgcgaggaattgtctggccctgctcccagcattcccaatgggattaagctcagtcacaaacagtgatggggggcttgatgcctcaccctttctcacccccacgcccaccttacctaataagctgcttcttagatccccaaattcccaaattcagacaaacccagaattaggacttttatagcctggctggaaagtctgggctctaatttacacaatcttcctcccaaaggacaaagcctttgggtctgtcacatatgcctgggttctgccatttatcagctgttatgggttgaactgtgtcctcccaaaaaagctacttggagtcgtaacccccaggtccctccaaatgtgaccttatttggagatgggctctttacaaaggtaatcaagttaagatgaggtcatcagtgtgggccctaatccaatacaactggtgtccttaaaaaggggacagacgggagaacactatgtgaagactggatttatgtgaccacaagtcaaggagcttccagaagccaggagagaggcctggaacagatccttccccagcttcttcagagcaaacgcagccctgtggacaccctgatctcacacttctggcctccagaatttaagagggtaaattgcagttgtttaaaccagtcagtctgtagtcctttgttctagttgccccaggaaaacaatatggcagttacgtgacatcaccgtgcctccatatccccctctgtaaactggggaccataatgcaccctccttcacaggattcttgggaattaaatgaaataatgcgtgtaaaaggctaagcatggagcctggtacatggtcggtgtccactaaatgggtagttgttattgctgtaactgaaataacaaaccaccaccaccaccctacaacacacatacagagatacacacacacacacacaacttcagggaaggggatttcttagataagcagacaattgaccctcatgctccttcccttctccttcagagagaccaggagaacaacctacccctcaatctgacctggcccaaaagtaaaaaaaaaaaaaaaaaaagaaaaggctttaatgttgaaacatcactcaggtttttgtgtagcttggagtggccattaagaggtaggtgttgcaatgggttttcttcttacaactggtagggcccagtctgatggcaggaaaagcggtgatgctgctgttctgcaaaatattgggaagatcacccaatattaaggttcttagttgcaaacaacagtatccaatccagtttgtttaactggaaaatgaatgtttttaaatattgtataaggccagagagacaaagcctgaaactacacagacaaggaaaaatgtccaacatcacagggagcgagggggattctttcatgaaaacccccccgccaccactacttggcagagctgatgctcagaactggatgccaggaactccacccctgccatccccaaggaacccagtgggggggtggggggtggaggacgaaggtgaggatgcagtgagaatgagggctacggtgagagagtcctggattcaaaccctcagcctgtcatccgtgctgggcagaggagatgtactcatgccctcctttattcattcattacgcaaatatttacagactacctcctttgtgccaggcactgtcctaagtgctgggggtaacgtgatgaaaaaacaaaggaatgtggtttgtgttctcgtggtgctcagttgatcaaatcaatgctgaaacaagcctgtggggagaggaaggaggcagggttctgctgtgaaggagaaggttgaggaggaagcagagaaggtgctgcactatttcagaaagcagccacaggccctgtctggggcatcctcagatgtcagcatctcaaggcagcacaggtgacaggctctctgcaaagagaaaggaatttgttaattgtcgttgctgaagcccttgacttggacactgtgcagctggcagatcctagaccctcccagaaatgagcacctctggtcctccctgcagtca

SEQ ID NO: 26736 - DNA, 2300 bp, Homo sapien
gactgttaggatgatacacagtttatgcaggaagaagatgcaggcccaaaacatgaagtgtttctctaagtcacatagccagaaagtggccatggatgcattgtccctgattgggcatggatgcatttggttctaaagcctctgcccttttaaatgatgtaaagagaatatctataactatacctagcacggaacttggcaccacaaaagctaaacatctgatgccattgactgatgaaaattccttccccatccttctgcctggccctgccactctccctcagtctgtattcctgtaagagagagccaatcaatagggtgctcataagggcctgggaggagcaaggctgggcagtttcctggcccagggagctgaatagggcccggaagaaagctgttggcagcagtgcctggggctgaatgtacagtagccagctgggtccacgggctaaaaactggctgctcaccccagtgttctctttgtgccctagactgggtttcactagcctgttatgggctgtgttcccacctggctcctgccctcattgttgactgagctcagagtaaatagccctggcccctcccaataacgtccccagtccccaagttgagcatgagaagctgggggaggtgttctcagcatccattttggggacagtggccagatgtactcacatcaccaaaccctactcacctgtcactatcatcccagtgttcactgccccagggcccctctagcctccagcagcaaagacctcctggggcttctagaacctcagatcattggagcaggaagcacttcttgtctaactccctgggtaactctgttttggcacttaaccccctggattctaaagcttcatttatacttattggtctccttcgtcacaggagacacttatctgtggagcactcatggccatgtatccagtacctatcatgggtcaggcctggagtccctgtgtcaatcagtgtggatctactctcaatgctcccagtgagtacatggttgttccgtggcaggaacgttgcatttgtgttctcactgaagtcccatataggtgtcattttcactgatgatgtggcagctcagatccaggaaaggattcattccagggccctcaggtgggaagtggtggaggtgggagtcagaccccagaccctgtcaccccttcaagaccagtgctggagggccccttttgacgactttctcttcaccaagcgtcttgccctgcatatgtcacacagtaggcacccagtgaatatttacgacggaatggaaaaaacaagggcctggagggagagacctgggttcaaaaccttatttgtacagctttgcaggggaccttgtggtggaggtgcggtcctaaatccctaaacactcagttcctttgtcatatacagctgataacagtaactccccggtcagaggaccggcgacaattccttgagacaaggagcacagagcctggcacagtcagccctgatcaggggccggtaggacaaagagagggagacagaaacacacacccaaacggcttgagactgctaggtgcttcaccttcctgggcctgtttctgatgaggagggtttgtttattaataataagtgctatttctgtagcccctactatgtgctctgtatcactaccctagccctccatcaagagggatctgccctctcatctggctgaccccaaatcgaaccctttaacccgcatgctctactgcctccctgcgggccctgccttatcctcctcaaccgcccactggggacactctggagaaacctcggagtcttggaatagaaacccaggagccctgagccttggccctcaggccccaggagggaggtcaggagggaggcgtggacaagggtccggccgtagctggtcccgtcctggaagctgcttaagttcctggttcccaccggggccaagagtgatacctgatcctgggggattgtgaaatgacctcatgtggcagcccgcccgcggtgcccgcaaagccctccaccctccccttccccgctcggctccacccctaccccacgccccctcccgcgcgcgcggttaaatccccgcacctgagcatcggctcacacctgcaccccgcccgggcatagcaccatgcctgcttgtcgcctaggcccgctagccgccgccctcctcctcagcctgctgctgttcggcttcaccctagtctcaggtgagtggggcggggagaggcccggcgcctagaggggccgagccacgagcgccaggatggagccaggcggaggcgtagcctctggaggctggg

SEQ ID NO: 26737 - DNA, 2300 bp, Homo sapien
tgaagccacatccacagctgccccttcccccaggtgctctgtcccagggagatgggagttttacctataagcccctgactagggctgctgcctttttttcagagatgccctgcccagagaggaggaatctagagaggcagtctggctacagcggctttgccgagctgtgttgggctctgcccagtttgaacttcctggtggctttgtttactctgtgaggggaaaactgcctactcaagcctcagtaatggtggacgcccctccccctaccaagcttgagagttccaggtcaacttcagactgctgtgctggcagtgagaatttcaagccagtggatgttagcttgctgggctccatgggggtgggatccgctgagctagaccacttgtctccctagcttcagccccctttccaggggcgtgaatggttctgtctcactggcattccaggcaccactggggtatgaaaaaaaaatcctgcagctagctcagtgtctgcccaaatggccacctagttttgtgcttgaaacccagggccctggtggtgtaggcacccaaaggaatctcttggtctgtgggttgtgaagaccgtgggaaaagtgtagtatctgctccagagtgcactattcctcacggcacagtccctcatggcttcccttggctaggggagggagttccctgacctcttgtgcttcccaggtgagatgatgccctaccctacttctgctcgccctccgtgggctgcacccactgtctaaccagtcccaatgagatgagccacgtacctcatttgaaaatgcagaaatcacctgccttctgcattgattcactgggagctgcagactggagctgttactattcggccatcttgaaagctgaacctaaatcttttttttttttgagatggagtctcgctctgtcgcccaggctggagtgcagtggcatgatctcagctcactacaacctctgtctcccaggtgcaagcgattctcctgcctcagcctcccaagtagctgggattaccggtgcatgccaccacgcccagttaacttttttgtatttttagtagagcggggggtctcgagtcctgacctccgatgatcccacccgcctgagcctcccaaagtgtgggattacaggcatgagccactgcacccggtgatctgtcagccactttccttgtcctctacagctaatcacccagttctgtgcctgtgttttacacacaaaaacctgcacatatttatagcagctttatttataattgccaaaagttggaagcaaccatgatgtacctcagttgatgaatggatttggctgggcctggctcccctctatctaacctgggaagtggagtgtgattgtgtgtgtgtttgttagtggaaggacgtgtggtttctctctgcatggatgaatgagtgtatttggagggtcatggtgctgagagactgcaactgggattcggtctgtgggtatgagtgaagattataagtgtgtaacccctcacatgtgtactgtactttacactttaagtggcagcatagtgcttaaccatggcagcagcagttaacacatagactctgcagctagatttcttggggttcaaattctgcctcaattctgtgtgaccttaggcaaattacttaacttctcagtgcctcagtttcctcacttgtaacacaaggaaatattaacagatccctccccttcttttaggattattgtgagaattagaagagttaatatatgttaggggcttgatacctggcatgtaataagagctaattaagtgttcactgttataatttctcataactacagagtagtttgatatttcagggagaaataatatatgtttgtttcccactgctttcacaacaaccctatgttgtaattagcactgttccactggcacctaaagacacggaggctctgggagatttctggccctaggccacgaaggcccacttgggactcaagctgaggtcctgtgattccatttgggagcaggaggagggatttgcaggtgatcttcctgggcctcctgagagcagctcaggtgcccaagatggactcaggcaggcagctctgctgtatgtgaagcccagtgaggggcagtgggggggccatgctgcaggtacaagttaatctccctgtatcgcctctgcccacttacccttactcctttttctacccagataaggagggttcctgcccccaggtgaacattaactttccccagctcggcctctgtcgggaccagtgccaggtggacagccagtgtcctggccagatgaaatg

SEQ ID NO: 26738 - DNA, 2300 bp, Homo sapien
tagagaaagcaatggccaaggaatgagtatcatggttctagggaatttaaagaaaaggaagagctataactaatgtgcaaagatggggaaaacatttctgtagcaactaagtatgctgctgatccagttagcacccccattttcaaaaaggcatcattgccacacacacacacgcatcccttgcaaaagacatatacctgtgtgtgcattcacaatgtgtgaggcatttgaatatttattgaacacttgcaccaattctgggaagtatgctaaagcaacataattaaccccaatttatagatgagaaaactgaggctggaagacgttaaatgacttgcccaggtcaagagtagctggacttaaatcaacccaagtgtccgtcactggatggataaagaaaatgtggtatgtatacacaatggaatactactcagcctttaaaaagaaggaaatcctaccatttgtgacaacgtggatgaacctgcaggttacgtgaaataagccagggacagaaagacaaataccaggtgatctcacttacatgtggaatctaaaaaagttgaagtcacagaagcagagagtagaatggtggatacccggggctgggggtgggaagtattgggaaggtgctggtcaaagggtacaaaatttcagttagacagacggaataagttgtaaagacctattgcacagcatggtgaccgtagttaataacatattgtacacttgaaaattgctaagagagaaaatttctctctctctctatatatatatacacacatatatttcaaaacatcatattgtacctcataaatatataatgtttctcaacttatgatgagattatagcctaataaacctagcctaagttgaagatatcagaagttgaaatgcatttaatacacctaacctaccaaacatcatagcttagccttacctaccttaaacttgctcagaacacttatactagtctacagttgggcaaaatcatctaacacaaagccccttttataatgaagtgttgaatatctaatgtaatttattgaatactgttctaaaagtgaacacagaatggttgtatgggtattccaagtactgtttttactgactgtgcattgtgtttgcaccatcataaagtcaaacactgtaagtcaaaccattgtaaattggggactgcctttatacaatttttatttctcaattaaaaataaataataataaatatatgatagaatgcttcttgaaaaagaatagctggacccatcacaacctcaaattttaaatctgaggctcactaaatctccctaaagcatgctggctttgtctttcaaaaaaaatggatctctagagagtcaaggaaaggagacagttggaatgtgctggattctgggggtgtgtctctagagaccatgaccctctgaagcaaacaaagctgggccctccttctacatggtgcttttgatatttctattaaaatataatgaatctgctcctcctccaagtaggtgactgtttctgacttccaatgtgtttgtgtgtgttgttgccataatttcctgggagcacccagatgggatggaggcagcatctaatactttgcctggtgcagtgtgggtacttgatgaatgtttgttgaatgaatgagtgatacgagggcactgaagcagacagaccggggtctcagtcttgtctctgaaacttgctgtccatgtaacaatggtcaaagtagcataacctcctctcatctacaaaatgggagtgttagtgttgtgggattcccgtgtagacttaagggaagcaatgtgtgaaaactattttgcatggtgcctggaaaaggaaaggtactcaaaaatggctgctgtctttttattattgtgaaaaaggcttccaccctgaagtggtactaaagtagcctgggtggccagatcagataaggccaggaggagagaggtgaagctgtgctttggctgaacactctgttcctgaggcagcccagccccatgaaaagcctgagttaaaggtgaatgagctggatgtggggccaggctcctccccttggtcccttttctccctaaaatggcaaccccaggctgagccactggctgagtggcaccatgcagcttcaggcctctctctcgtttctcctgattctcactctctgcctagagcttcgatcagaactagcacgaggttggtatgaaatgtgggatctcaaagaatagactgggaatcaggctggggggcggggtggtgggggaggtgatgcagcacaaacagagcccatttcttaccttaccgga

SEQ ID NO: 26739 - DNA, 2300 bp, Homo sapien
agggcatgggtgcaggtagtttgtttgagagatttcccaggacatacaagatggggagtgagatgagtaattcagggaagagaagggaagagagaagagtctattatgagctggttactactgtggctcaatcctattggggaccttttaaagaatcatgtaaaacaggcttacaaattttctttttaaaaatattttattttattttacgttccgggatacatgtgcaggacctgcaggtttgttacataggtaagcctgtgccatggtggtttgctgcacctatcaacccattacctgggtattaagccccgcatgcattagctatttatcctgatgctttccctccccctgccccctcaacagtccacgtgttctcattgttcatctcccacttgcaagtgagaacatgtggtatttacttttgttcctgcgttactttgctgaggataacggcttccagcttcatccatgtccctgcaaaggacgtgatctcatttctttttatggctgcatagtattccatggcatatatgtaccacattttctttatccagcctatcgttgatggatatttggtttgattccatgtttttgctattgtaaatagtgctgcagtgaacatacacatgcatgtatctttataaaagaatgatttatattcctttgagtgtatacccagtaatgggattgctgggtcaaatggtatttctggttctagatctttcaggaattggcacactctcttccacaatggttgaaccaatttacattcccaacagtgtaaaagcattcatgtttctccacagctttaccagcatctgttgtttctggactttttaataatcaccattctgactggcatgagatggtatctcattgtggttttgatttgcatttctctgatgatcactggtgttgagctttttttcatatgtttgttggccgcataaatgtcttcttttgagaagtgtctgttcatgtcctttgcccacttttcaatggggttgtttgttttttttcttgtaaatttgtttaagttccttgtagattctggatatcagaccacaaattttcttaatctgtctccagtgatgggaaagctaagctatttgtccactgattcccaacgcccactggatgccagggatactaaatccctcgctctttcaaactgttatacttgcaagctatacaagctccctgggggccagagaaaacccacagcagaaaattagggactgatgctagaggtaggaggctgtcaatgtgcattggctattattcggccataaaaaggaatgaacttctcactcaccactgatgacatgccttgctgcacacacaccctgctgccaccctgcagaaatgcttccattacccacagtcctttgccagatggaactgatgcccaggtaactggctcctcacctccttcgggcttataccaaggatataaaacttggtacagatgctcaagcgttaatgcttcagggtgtgacttttaatccaatgctgtagctgtgacaacagggaaaaacggagaacagagttggagaagtcccaaagtaatgaaagaagttatttactgttgcaaaatcaaacgacttaaaggataaatgtaactgatctttacatacgaaagaagagagagggaagtgaagggcggggagaaagagactcagacagacagagactccctgagaaaaagacaggcacagagtaaaagacatacagatgcacagaaaagagaagaaacagagtgagaaaaataaaacataagaatagacatgtcaggagaagagtgaaattagaaagaaggaagagagctagcatactgttaacctgcaaactccccctgggaaatggaagactctggagttaaacctccccttctgctaagggagcctggaaagcccaagacaacatgtgccctctttccctggtagaccagaaagcctcagattgctgaggattaggagccacctatcccccagtgtaggtaccaggtagtcccactgatggcctcagggatctggtgttcctgatcggggagtctggctggcttgtctccagggctgtctcttaaggtgctgggccacaccggggcaggcaaagtgcagatgtaggagctgctgaggagcagttcttagttttggtgccatcaaccaggccagtacttcctaaaatgggactctcaggacttctgccaatcctggtaccattcatccttttgggggacatccaggaacctgggcacgctgaaggcatccttggcagtaagtattgggaactccgtc

SEQ ID NO: 26740 - DNA, 2300 bp, Homo sapien
tgatcctaaattttgtgaccatatagtcactctctgataataaggctgtctttgtctggcctctgtctgtcatgtaggaaaatttggagaacaaacttggcccaaaagggtaactcctagttagagaagaaaacgggagccctcgggataacatttactctgtaaagagtgtctctcttcttcccaggactggctgagtggccagtgtagattccatggctgtaggaaaggaaagctgtccaagttccccagcacctctttcccacagctcctctagcagcccagttagaatccccaaagtctgctgtgttactgaactttattccactgcagtctcccaggcaagtcccttcacttcatagttcctcagacatcaaggagctggcagtgatgataaaggctccctctaagctctgatatcctctcttgctctcagagcaacaaaactttgagaaacattctctgaagactctgctatcagcctgattcctcccctacaccctgctctgtggcaaatctgtattctttggccttagtcaacgaatatgagtgaaccaaagatacaataaaagacagaaggatgggaggaaactgtgggagagggagaaaggaacacagagaccatggggaaagagaaacagtagacttaggcacagagaggcacagataaacaatgagataccaagagaccgacagagacacattgtcagagacaagcagaaggagtgtgctagtaagtgtgcacgtacgatggaaaatgaatgaagaatgaggacattccaccactctccaagttatcaagatgaagacccaagatggtggcattcactctgaaggtagcctggaaagtgggagacacgctttgcccactccctgtggttgactagagcccccagcccagtgcagcctaggggtgtaaggatcaagatccattcaataagagacccttcctcccaagctgtgagctgtgggtgccagttagtcccatttgtgaccttgggaacttagtgttcccagcaagaaagggggtggctggcttgtctccagttcttatatccaaggtgcagcagctgagcattccaaattcgggaaccaccagaaaggctggcctctcttcaacatgggatcttctggacttttgagcctcctggtgctattcgtcctcttagcgaatgtccagggacctggtctgactgattggttatttcccagtaagtattggcctcagcccttaccctagagagaggggagtttgctgggaggaaggaacagggaagaactcttcagatgtgggttgctttccaccatcttagcccaggtcccgggttgggagaggagagagatatttgtaagatccctcctgtgtaagattccttctgggaatgcagtaaccccaacttaggcaatccccactttcagctcctttgaagtggagggtctttatcaagcaggtggaggagagtcacaggatctagctttcaggggagtcgctacaggaatccgggaaaccaagggaccttctccttaccccacaagcaaaacaggccccttccttgaggcatcatctctatccactcttggttctttcaaatgtagtcccataaagtgtccctgtatccctaggggttccctaactttgagataaaggacagcatccagaagtctctttaaacttaagacacattagttgtggaatattaattccatgactataatgtaacaatgatcattggtatcatttgctgaacactcaggaagtaaggatttctgaaaagggatttctaaaacaacagagggatctggaatcagacttagtgggttcaaatcttggtagccctgtaatcttgggcaagttacttaaatttcatgggtctcagtttccgcatgtgtaaaatggggatattaatagaacttccttcatagagcaattataaagattaaatgagatcatacatttaaaatgcttagaagagtgctcggcttatggtaaatacttagcaaatgttagataatatgactgtgcatcagttactttgattagggctttatatactttgtctcattgttttctcacaaaatccgtaagggcaaaatgattttacagatgatgaaaccaaggttcagagagggtcagaattcagaccaagtcagaattcaaaatctaaactggctccggggtaagtgatactaattgctgtataatactaccacctagaggaacttccaaacatggattcctcaacaaggccaaaaagaccgcattggcttacatcagtggcccacaatggtgtgattttgcc

SEQ ID NO: 26741 - DNA, 2300 bp, Homo sapien
acgaaaaaatgcagccttaattggggaccctgggtaccatttagaaatttactgactttggtgagccaagtttgcgccactgcactccagcctgggtgacagagtgagactccgtttcaaaaaaaaaaaaagaaatttactgactttcactttgtgggtgttcagcctctgtctccactaaagacattacttcattcctttagactcacccttcctctctaccttcaactctacaagaaaatattatatccacaccaacatcaaaacatgccctggtgtcctctggcaagaacttgtgtgctcagctccctcttaatcttatttctgacactcacttgctgggtgacatttagtcagcatcctcacttctctgggccttatgattcccatctataaattgagaaatagggcttgatggtccctcagagcccttccacttagatattccagttttcactctctcctgggctgagtttgtgagaatatgggaaatgaaatgagtgaaacagcactgcttacgacgtcttactcattcattagaaattctagccaggcacggtggctcatgcctgtaatcccaacactttgggaggcttaggtgggcaaattgcttgaggccaggaggtggagaccagcctggccaagggcgatacgtcatctctactaaatatacaaaaattagctgtgcatggtggtgcatgcctgtaatcccagctacttgggaggtcgaggcacgaattgcttgaaccgggaaggtggagattgcagtgagccgagattgtgccactgcactccagcctggatgacagagcaagaatgtttttaaagaaaaaaaagaaaagaaaagaaaagaaaggaaaggaaaggaaaggaaaggagaagagaagagaagaggaaaggaaaggaaaggaaaggaaaagagaagaaaagaaaagaagaaaaaagaaaagaaaaatttgattcggtagtctcttcaagtgagattgtcaagttggtggcatgggattcttacggcggctgtctgtgatcctaaattttgtgaccatatagtcactctctgataataaggctgtctttgtctggcctctgtctgtcatgtaggaaaatttggagaacaaacttggcccaaaagggtaactcctagttagagaagaaaacgggagccctcgggataacatttactctgtaaagagtgtctctcttcttcccaggactggctgagtggccagtgtagattccatggctgtaggaaaggaaagctgtccaagttccccagcacctctttcccacagctcctctagcagcccagttagaatccccaaagtctgctgtgttactgaactttattccactgcagtctcccaggcaagtcccttcacttcatagttcctcagacatcaaggagctggcagtgatgataaaggctccctctaagctctgatatcctctcttgctctcagagcaacaaaactttgagaaacattctctgaagactctgctatcagcctgattcctcccctacaccctgctctgtggcaaatctgtattctttggccttagtcaacgaatatgagtgaaccaaagatacaataaaagacagaaggatgggaggaaactgtgggagagggagaaaggaacacagagaccatggggaaagagaaacagtagacttaggcacagagaggcacagataaacaatgagataccaagagaccgacagagacacattgtcagagacaagcagaaggagtgtgctagtaagtgtgcacgtacgatggaaaatgaatgaagaatgaggacattccaccactctccaagttatcaagatgaagacccaagatggtggcattcactctgaaggtagcctggaaagtgggagacacgctttgcccactccctgtggttgactagagcccccagcccagtgcagcctaggggtgtaaggatcaagatccattcaataagagacccttcctcccaagctgtgagctgtgggtgccagttagtcccatttgtgaccttgggaacttagtgttcccagcaagaaagggggtggctggcttgtctccagttcttatatccaaggtgcagcagctgagcattccaaattcgggaaccaccagaaaggctggcctctcttcaacatgggatcttctggacttttgagcctcctggtgctattcgtcctcttagcgaatgtccagggacctggtctgactgattggttatttcccagtaagtattggcctcagcccttaccctagagagaggggagtttgctgggaggaaggaacagggaa

SEQ ID NO: 26742 - DNA, 2300 bp, Homo sapien
gagaatcacttgaacccgggagaaggaggttgcagtgagttgagatagtgccactgcactccagcctggggaacagagcgagactccatctcaaaaaaaaaaaaaaagactattctgagaatttgtaactgcaaccttgtttcctttcataagagcagagtaggaaaattggcacatgtgcatggtctgataaatctaaagctatgaatttaattcaaaattgcatgagttgttagggaaaaattgaggacaagttgattcggaagaattctcctttaaacacaggaatccaagaaattccacaaagtattgttacatacataaacttccattaaatatgtactctcacaataaaaaaaatcacacagatcttaagaaaacaagatgaaaaaaatcaagaaaaacaaccaacagcagaggtccacaaagacttcagatattggagttactgtattgtattgtagcgagttattgtattgtaggaaaggaacatagaaaaaggattcctgattctgtctttggggtaggaagggcacgtgataaaaactttcattcaaaaggtaaaagacaagccaataagggttttagaagattacccttgatcctggaagatgttcataatacatataactgaggaaagacatgactccagtagaaatcagcaagaaaaagtcagaaaaccccagagaacaatgagcaaaacatttgaaaagaaaatcaaagagaggatagccaagtggttaataaagatctaaaaaggtgctcaacctcattagtagtcaagaaatttaaattaagtccacagtgatgtatttccatactcgtagcaggatggtaaaaatgaaaagattgtgacagttctacatacagcatggttatggaacaataggaactctcaactaccaatggcaaggctgtgaattggtacaaactctttgggaaataatttggtatcagcttgagaagctgaagatatgcataccctgtaacccatcattccctatgctgaatgtataacctacaagaacacctgcccacgtgctccagcaaatgcacacagagtgttcatagcagctttattcttttttttacatgagtaaattgtttaaaatttttttgacatttaaaaacatttattaattcatttaacgtaataaacttattacatgttgatataaataacatttttatttagaaaatcctagttttttattatactttaagttctgggatacacgtgcagaacgttattacatacatgctatgtatacacacagcagctttattcttaacagctgcaaactataaacaactcagtagagatgtgtgtagtcatacaatagatggcatggcaatgaaaattgacaaaatacagctacacaaaacaatgtggatggaattcattaatataatgttgaacacaaaaagccaggcacaaaagaatacattccaagtgactccattgatatagaacagaagcagacaaaaacaaaaacatatttaggggaatacatatgatcttgaaaatatgaaaaagaaagtcactaccattagctgcctttgagagcataggaaggggttgtgactggaaaagaatgaaaaaggagcagaaagtgttggaaattttttacttgatttcagtgatagtttaatgagtggtcacttcgtaatagttcgttagactgaacattaatgtttcatgcatatttttatttttgtggtgtttttcacaatacatatttttacaaaaaggaaaagtagctcttccttgttttgtctccttttctttactaactgaactagtcagtcctaaagccattagataggcacatttagcaaggtaggcgtttgccccaaggggaagggagccacggctggctccgtgtgggcatcagagctggaacaggtcaaggagggtgtctctgtaggagggctgctggcctggtgtgctggagccaggggtagatgagaatgcccagtgaagaggcaagaagcagcatagcatggagaccagcctgcccatgttgagaaaggcatccccctggggctagaggggcagactggcatagaatgagagcctgagtggggtgagcagagtgtccaggcaggggagcagatgagggaggagccttagagctggagcaaagtgaggaagctgtctccatagggaagaggcctgatgtggactgtccgaactgaaggagggtgaggagggtgtctatgggggtgggtagccagacatggagggtctgagcccaaggagatgaggaggatacatagaagttagagtggtcggctgt

SEQ ID NO: 26743 - DNA, 2300 bp, Homo sapien
actcaagagctctgatggagctatatgaagagatcaatgttttcatgcctgctaacaacattcattcttcagcccatggaccaagagataattttgactttcaagtcaaaattatttaaaacatacattttggaaggctatagctaccatagatagtaatttccctgatggatctgggcaaagtaaattaaaaaattcctggaaaggattcactattctacataccatgattcatggaaggaggtcaacatggcagtattaacaggagtctggaagaagttgattccaatccttataaatgactgagggtttcaagacttcagtggaggaagtcactgcaaatgtgatgaaaatagcaacagtgagaattagaagtgcagcctgaagatctgactgaattgctgcaatctcatgagaaaacttgagtggatgaggagttgcttcttatagatgagcaaagaaagtggtttctttgaatggaatctgctcctggtgaagatgctgtgaacattgttggaatgatgacaaaggattcagaatattgcataaacttagataaaccagcagcacagtttgagaggattgaccgaaattttgaaagaaattctattgtgtataaaatgctatcaagcagcgttgcatgctatggagaaatctttcttgaaaggatcaatcaattgatgtggcaaacatcattgttcttattttaataaattgccacagctaccccaaccctcagcaaccaccaccctgatcagtcaacaaccatcaacattgagggaagaccctccaccagcaaaaagatgatgacttgttgaaggctcagataatcattagcaatttttagtagtaaagtattttaaaattatggtatgcacattattttttatacataatgctattgaacacttgacagactacagcatagtgtaaacatacctttttaatattttaataagtaataatgaaattcatcataagaaaactattagaaactgtttagaatatgaaagaggtacagttgtatactgaaacatatacagatttgtatcagaagtttgcaaattttactagctttttcagagaaacaactttcaactattaaatatttcattttctagtttaaataaatatataaataaaagacttcaggaaaacatacttttcatatgcactgggaaaccaaaaaagtgcacttggctcactttattgcaatattaccttttttatggtagcctgaaactgaacctgcaatatctccgaggtatgcctgtatcctaggaagaattttatattgacatctcctgtcactgcgtataatattcctgcagacaggctttgagagaaggtttaccccttggaagtccctgcctcctgcccacttgactgttctcttttctcatgagctagtgatctccaaatcatgtgtattgtgtgcccaatataatgcccttccctgacatttggtgaacaaatccctctgcacctcaaccaacaagctcatggcaagaacttggtgctggatttggtcacgtcgcttccttcatttgttaggtggtcatctactttttctaaaattcttcctattcagtctctttttagctacataaaagtcagagggcatttggtgggagatcttgttatgattttattggtaaaagagaatcaatactgagaaagatagaatgttaaataggacagacaagaggtcaaaggtcaatgtagactgttcccaacttcctacatatgaatggactgagatgtatttgagagactttgggaacatgtactttgggtctgctgggggtggcctgagctgcaatccaggtacacaatgttcttcccagcttttcagaggatcccacctgcaccttagaaaattgagtacatctggatgggtgaatatcaaaggaaagaatctgtgatacagccaacatgtagtttctgggtagaaattaaaaatcggtcacaaccaaaatcaccattaagttcctggcctttgaacattgtttttctgctcttctgcccccagttcgagccccacttcaaacaacttcataataaaaggccagacaaaagagctgtcagccagttactacagacactcaatgcagacaccttcagaggtaggtggggataaaggtcttgagacatgagcttctatttgtggcttgcttggattaattcctagcccagatggtgtcactattcctgtgaggtagggattattgtttcttttgttcaaataagaaaattgagagggggtgacatgagctgtctgaggttccataggtaaaagg

SEQ ID NO: 26744 - DNA, 2300 bp, Homo sapien
tatggggaaaggctagagagcttccatgccctccatgagcatgctgctctccaacaacctctaagtgttcagtggtagccacctggaagctctgacttatatattttaatttgaaatttctgttcagttttgagtaattgtctttttttagactaatttctaattatttccattatagtctgaaactatgtcctttgtgatgtaattctttaaaattttgttcagactttttttatagcctaatgtatagtcactttttgtacatgttttatttgtgcttgagaaaaatgtgttcctctagtttttctatgcagacttctgtatattttaattaagtcaagcttattaatcataatgttcaaattacccatctctttactaaatttactactctatcaataatttgaatgtataaagtatagaccttctatatacccataaatctttccccttataaatgtcagtacttgagcctgccacaatgttgactagactgctttaacagaaagcctccatcacataataactgaaatacaatatactttttatttcttgctcaaataataattcaaaatgagtattctaaaacaatgggtatccttttttcatgtgataaaagaagtcaaggacccaggctcctttcaccttttggcttcactaggctctagaaccttgttgtcatctatactgagctggtggaaaagaaaaagagtgtgaaagagacttgccatcttcttagggtcttgacctagtagtgacaagtctgttagccaaaatatttacattgtggcactggctgcaagatgcttgggtaaggaaaatgcagcttctatttgagatgatgattctcctctatataacccctctttgctaggatagttatgacagtgtccagtctctaaattgttcatttatgagtggacaaaaagaaaaactaggaaagagagagcctttgggaagggtcaaataccactctgtaaactataggtacaaatatcagaatttttgaattataaaggatatcgcaaaggatacagaggaaggtgcataaggtgagatatgggggaaaggctagagagcttcctttgaatgtaaattacaactgtggactgaaggagtctgcattaggagttcagaatgtcagaaagaggttcaaatctttagaagattatcatcatcagaggaagagggtgatcttcttcccagcttgcatgcctactgggagtccagtgaccctaggttgtcccctctttctcctgttagggaagaagaaacatcttcacttctgagagttcatttccttcatgatattcaaggtcagtgaccacctcctcctggacagcctgccaagcctttgactgataggtctctccccctgtctgagctctaagatatttactatgtttctccactagcccttctgtcccatgccctacaatagtctctctttctgtgtgtttatgtgtgtttaaatttgtatatgtatatctgtgtatgtgtttatatacatttatatatgaaacagctacttactctttcactcaggaattctagctctcttagtctaaagaaatcaaagatttataaataaaaataatatgacattctctagattattagtaattagtacaatacaaatacttgattattagcatttgagagctgtgcaattatgaaaatccacattttgagaaatacttacatgattaaataagggtggcaaaaatagataacaaaagttgtttatattaaaaggattgtttatattaaatatggagagaaactaaaagataatgcaatgaaacatcagttaattctaagcaactctttttaacaatatattttttcttttcttttttccataaaacattttgtaattagaaagcagaaataaatgatatctttcattctatcggcaagaacacaagactggttatgtgaaaggaggaggcgtcattcctgcggaagccctatcccacatgacgaacgacaaggccaggggcaagcaaaaagaggaaggactctcttgctctgctccgacttggccagtagaggcagtgaggagctaaagatcattccttctttccttccttcactctccgtagacagctctgcagggaagtctgtgacaacctggccagacatagggctcacgatctgatcagagtcatggcaccccagactctgctgcctgtcctggttctctgtgtgctgctgctgcaggcccagggaggataccgtgacaagaagaggatgcagagtaggtgatgggctgctggatgggtgagggggaattgggt

SEQ ID NO: 26745 - DNA, 2300 bp, Homo sapien
catgccttcctaactgtaatcatttccagcttttcatttaaagtgagagacatagaacccttcctatcacttgaacacgtagagaccattgtggagttattaattggcctaattttaatattgttatgtctcaggaaatagagaggcctgaggagagggagagagatggggaaatggccagttgttggagcagtcagaacacacacacaacatttatccattaatcattttttaggggcgcagttcatagtgtcccaaaacaattacaacagtaataaccaagattatggatgacagatcatcacaacagatatgataataaaacaagtttgaaattttttttttgagatggagtttcgctcttgttgcccaggctgcagtgctatggcaagatctcagctcactgcaaccttcacctcccaggttcaagcgattctcttgcctcagtctcccaagtaactgggattacaggcatgcgccaccacactcagctaattttgtatttttattaaagacggagtttcaccatgttggtcaggctggtctcgaactcctgacctcaggtgattcacctgccttggcctcccgagtgctgagattgcaggcatgagccactgcgcctagcaagtttgaaatattttgagaattaccaaaatgtgacacagagacatgaagtaagcacatgctgttagaaaaatggtgccagatgacttgctcgatgcagagttgccacaaaccttcaatttgtatgaaacgctatagctgtgaagtgcaatagagcaaggctcaataaaacaagatatgcctgtagtgtctagtaggcatgtttgggggtggcttgagaggatgcttggtaagggaggctatccaaggaaacaccaaataaggtctcttggagatcatgcccttacagcccacagagtacatctgatggtgtctgtgttgatggttgatcatgatctctttcctaagacctccttgtccaagggaagctcttgagaaaggtgaagacaagcctgagatacccagagcccggtgatgcctcagaggtggctcacagcctctggtctgatgaaggaagttttcttctctgatgtctctttcattgaatggcccagcaagaagcactagactggagcataacactgcacacctgcctctgggcatggcctatcctcctgaaacctcttcacatttggcttcatgtcccagttagctacatgtgacccaaccctggatctagccccaggatcatttcagaggagttgcgattgcagagtgggagattctgtaccacactgattaatttccaccaactcacagtaggatgacagggaagacccatagccactctgtgccaattactccttagcaacagcagcatgaaccacctgttccacatcccttagtgttcctcttgatctaaagaaaagagaatgaaccagcccctaaggaagagggcttgggaaagataaggactattcagttaatggaaggtgctggagtgtcagatcctgaggcccaaaatgggtcccatcagaggagtagccatattggtgggtgctggataggaggagctttggggttggtgcaggcactcactctcactaggatgcctctggtctcaggtaatggagagaagtgaggaaaaagtgatcctagaggaaacaccctcttccagtcacatcatatcctctcactctcttgtggccttgggcttgctggacttcctgggactcattatcctaatgatagacagtaatctgaaccttacagagagattggggagcataggatggcggtgcaccaaggctaaggagaccaaagcagtgcttgggggcctcccactctttatctcgggttctaactgccacccatctcatgcttaatgggtccttctgactccagggtgagaaatgttctccttagcatcaggagatgctgcacatgagcagttcctccccctgggagtactggttcagtgagcaaaacagcaaggggctgggcatcctgagggctggcagggatacgtgggccaaagagggagagggagggtagagaagcatagccagggagagaaattgaacaccaggacgcaagacaagtggggcatctgtaggggccacagtgagctctcaatgatcatctgtagtggcagcaaaagaggtaggatccctgggcatttgttctggtttatttgacagggacaaggggttcagacagtagagagggcggcattcctgttgatgttcttatgctggtgacttgaggtccttgtgcttcggatgtgggcacagtct

SEQ ID NO: 26746 - DNA, 2300 bp, Homo sapien
aatttctattctcttggatatatacttagtaatggaattgctgggtcaaatggtagttctattttaagttctctgagaaatctccagactgcttttcacagtggctgaaataatttacaccaccagctctgcacaagcattcccttttctccctcaccagccattctgactggtgtgagataatatctcattgtggttttgaattgcatttccctaatgattagtgatactgagcatttttatcatatgctttttggccacattatgtcttcttttgagaagggtctgttcatgtcctttacccattaaaatttttttttgttttttgcttgttgatttaagttctttatagattctggatattagatctttgttggatgcatagtttgcaaatatttgttcccattctgtaggttgtcttttactctgttgatagtttcttttccagtgtagaagctctttagtttaattaggtcccacttgtcaatttttgttttggttgcaattgcttgtagagtttttatcatgaagtctttgcctgggccaatgtccagaatggtattttctagattttcttctagggtctttatagctttagattttacatttaagtctttaatccatcttgtattgatttttgtatgtggtaaaaagtgggggtccagtttcattcttctgcatatggttagccagttatgccagtagcatttattgaataggaagtccttttcccattgattgtttttgtcagcttcattgaagatcagacagttgtaggtgtgtagctttatttctgggttctctattctgtttcatttgttaatgattctcattttgtaccagtaccatgctgttttggttactgtaggcttgtagtatagtttgaagtctggaagtataatgcctccagctttggtctttttgcttagaattgttttggctatccaggccctttttgcttccaaatgcattttcaaatggctttttctgattctgtgaaaaatgttggtagtttgtatataggaataacattgaatccgtaaattgttttgggcagtatgactattttaacaatattgacccttcctatccatgagcatagaatgtttttctgtttgtttgtgttgtctctgatacagtgttttataattctcattgtaaagctctttcacctccctgtttagctgtattcctaggtattttattcttattgtggctattgtgagtgggattgcattcttgatttgactctcagcttggacatatttctatgcatttcatacgattgaaatgctgctagaaatgctgatttttgtacattgattttgtatcttgaacctttgctgaagtggtttatcagatctagaagctttgggcagagactacagggttttctaggcttatattgtctgtgaatattgtctgtcaaacatagtttgacttcctctcttcctatttagatgacttttatttctttctcatgcatgattgctctggctaggacttcaatactatattgagtaggagtggcaagagtgggcatccttgtcttgttccgcttctcaagaggaacgcttccagcttttgtcaattcattatgatgttggctgtgggattgtcagagttgactgttactattttgtggtatgtacctttgatgtctggtttgttgagggtttttaacatgaaaagatgttaaattttatcaaaagcctcttctgcatctattaagatgatctttttttaaagtttggtttatgtgatgaatcacatgtattgatttgcatatgttgaatcaatcttgcttcccagggataaagcctacttgattgtggtgaattcatttttttgcggggcaggggggagggggggtgggtattgcagggagctcccaacaggaaacaatgtggtggattagctttttgatatactgctggatttggtttgctagtattttgtttaggatttttgcatctatgttcatcagtgatattggtctgaagttttctttttctgttgtctctctgccaggttttgatgtcagaatgatgctgacttcatagaatgaattagggaggagtccctcctcctcaagtttttggaataatttcagtaggattggcaccagctcttctttatatgtctggtagaatttggctgtgaatccatctggtccagggccttttctggttggtaagtttttttttaattactgattaaattttggtacttgttattggtctgttcaatttcatcctggtttaatcttgggagtttgtatgattccaagaggttatcaa

SEQ ID NO: 26747 - DNA, 2300 bp, Homo sapien
atctgccctcctcagcctcccaaagtgctgggattacaggcgtgagccaccgcacccagccgtgcatttatccttttaaccaatgatcacacttttagaaatttactgatattatacctccaacaatacagaaaattatgcataattgttcattgcagcattatttataatagcaaaatcttggaaactacctaaatgcccaaatataggagactggctatatgactaaggtgtatgtcaaatgcagctgtaatagaggaaaaattgttatgaactactggagagcagttttcaggatatattgttaaatgaaaacaacaaggtgcaaatgggtatattcgtgcaagaaaaacagagttgagagttcaagtaactaattatcttaaatcaagaatttatagagaattgataaagaagggctgctactcagcacatcctatgaagtcagcataaacttgctatgaaaccaagcaaggacaatatgagaaagacaagttacaggcccagttcattatgaacatagatgtaaaataccttaaaaatagcaaactaaaccaaacaatataaaaatgataatattcaatgatcaccttatattaccatagaaatggcttaatgtttgaaaatctgaatgttcactgcattaacagattaaaggatataaaaatgttatcatctcaatatacatagaaaaaagcaatacatataatctgacataaactaatttaaaatttcttgttaggaatgaaagaaaaatttctaaacctgatagagggtacttatgagaaacctaaagtggagacaattctaaaaggggaaacaagaagttttcattttaaatcaggtatcagacaaaaatacacactatcaccacttacatatgatgtactcaagggcctagcgagcacagtgaggcattaaaaatggcataaagtttgaagaagaaaactataactgcttatttgcctatgataaacactgaagagaacacacaaagaaaccataataaacaatgggagaatttagcaagctaactagttacaaatttgtggaaagaagaaaagatccaagctttaaagagaggaaagcaagtttgaaatagtatttgtagaaagtgggaacactggcttactgaagaaacttagtaagattgccagaccctttttggtttggtgatggtgcatctattgtgctgtttagtagcccagttgagttattttcccccagcaacaattatctgcctaggttcaagcttcaatgaaattgatggttggattcattcagggttgcagtttttgtaggtagattcaagcaaggagatttaaatgacaggttctgagtcctacattgatagaaagaaaagtaaacgcctataggggaggactacgaaatagggaagtgaagagtcaatgtttattggtttcagtgaggtcaaataattgtcatggtggagatttttgagcaaactggaaagttaacttctctacattagcagtaaacaaaaggaattagttgaaaagttatgataacatttacaatttccttttaaaaacttcaagcctcagaccaggcgcggtggctcacacctgtaatcctagcactttgagaggctgaggagggcagatcacctgaggtcaggagttcaagactagcctggataacacagtgaaaccccatctctactaaaaatacaaaaattagctggacatggtggtacacgcctgtaatcccagcaactcaggagtctgagacacaagaattgcttgaacctgggaggaagaggctgcagtgagcagagatcgcaccactgcactccagcctgggtgacagagccagactccatcatctcaaaaaaaaaaaaaaaaaattcaatcctctgtgaataaatataacatgtacaatttccacaggggaaaattataaaaaaatgttaagggacatgaataagatctagatacagatgaaagagatagcaaggtcaagattaggggaataaaggaggatatgaaaacactacgtgaccctggagtgggtgtgattgggaggtgcttggattcctgccctgccggttttgattggagtacacggtgaaaggctagtcacactgggcctccactttgccctctttccttctcttctcctcacagcagtgcctggtcaaacccagcaacccttggccagaacttactcacccatcccactgacaccatgaagcctgtgctgcctctccagttcctggtggtgttctgcctagcactgcagctggtgcctgggagtcccaagcagcgtgttctgagtag

SEQ ID NO: 26748 - DNA, 2300 bp, Homo sapien
ccgcagcatggtgggctcaccggagcctgggcaagtgctcatgcgtctaaactgctccactggcctccacctgctactatttatcacgctcctttgtacagggttaataaaaggactaagctgaaagaccaccattctaatttggaacatctggagacatcagaaggcccattagaagaccctaaacttctaactttttctttcaaatactctgaaacgaaatccaccaacttatgaatactatcatttttttggtggtggaattccacaggactccattttgttcaccattcttgaagcatcagtaaaataataaagatgattcccactccctctttttttttttttgagacggagtctcactctgtcgcccaggctggagtgcaatggtgcactcttggctcactgcaacctctgcctcctgggttcaagcaattctcctgcttcagcctcctgagtagctgggattccaggtgtgcaccatcacacccaactaatttttgtatttttagtagagacagggtttcactctgttggtcaggctggtcttgaactcctgacctcgtgatccgtccaccttggcctccgaaagtgctggggttacaggtgtgagtcaccatacccggcccactccctcttttttcagagaaaaaactggaacctgaatgagtgaccttgtaagtgagttgctggcagtttctacctttgcagagaccaagttcttccatctacatggccttgtgttgtcctcccaataccccaaggcatggatgttttcttcatatttcacatgagggaggtgactgtctcagagaggtacagtgagcagaccaaagtctcagagcgtgaagggctcagcttgagtccctgcccagggtgctgtcaacccggaggctagaagagcttgttccttgacaaagcctcagatctgagtgccctgggttccccctgggccatgacttggttccttacattgctctgtgttgcagaattcatgctggactgcaccgtgcctcccccagggagtgcaaagatagcccttggaggggaatgatggaggaggaggcaatcaggtaatgagaggccattctgagcttgtgggaatgtagtgcccctggtgaggctacaggaagaaagtgagcatccctgggaatctcacatgaggaaggcgagaccaaatccctgtacttacaaaatgatctaggaaatatgcctcagttggcaggcatgatgacttctgagcccttgtgtttgattctgtagaagaaaaatattttcaaatattaactagtgaagttttacttttagagatatatatttttctttcaattacttccaccattaatattagaccatgaagctcatttctcttgccatagggaaggcagaacctcaaaaaactcaatgacaccaaagagttatatttatgcttctgcattccaatgtagagcattgaaagatgtggaatttaattgcaagggctagtctcttcaaagagaagtggttgcctaatccccaaaattcacagcaattatgttggcaagtaatgttttaaagcttacatggattgtctattttaacctcactattattgttccagtcttaaggatgaggaagttgatgcccagagagaggttaattagcttgtctaagatcacttaaggtcacttagctaagaagccaggatttgagcccaggtgtttggctttgagcccatgcttaatcactctgcacattatctcatgctgggtattctgctcatggtagggaatacagcagggaacaagactgccaggcttccctcaaagggctcattggttgagtcttccactgtgagtcttttgaaatttcatatgggccttgcaaagcaggaaaaaacaagagtacttattttactcatgagaaaaagaaagtaaaaaagagggaattgtcttactcaaggtcatagaaagacatagttgcaagatgggattagaaaccatatgtctcatcagcaccctatgtcctttctctgccctgggagcacactccatttagcaggcttgcggctagtgttaatgtctggacaattaatcaaaacttcctttgggctggatctccagagcccaagaacactggtggccaaaggatggtgtcttgtgaaaggagggcaagcaaaagtgtaggacaaattttgctttgggattttggttacacctgcaggtacagtgtccctgggataagggtggattctgggtcgggggaaggtctgtggataaaggcatttgtgggtgtgttcagagaggcagagtcagaaattc

SEQ ID NO: 26749 - DNA, 2300 bp, Homo sapien
ttgtggaaaacagtgtggagattcctcaaagatctagaggcagaaataccatctgacccaataatcccattactgggtatatacccaaaggaacataaatcattctattataaagacacatgcatgcatatgttcattgcagcactattcacaatagcaaagacatgaatcaatccaaatgcccatcaatgatagactggataaagaaaatgtgatactgaaatatatatatatacacacacacaccatggaattctatgcagccataaaaagaaatgagatcatgtcctttgcagggatatggatggagctcgaagcagttatcctcagcaaactaacacaggagcagaaaaccaaacactgcatgttctcacttacaagtggtagctgaatgatgagaacacatggacacataagtggaacaacacacactggagcatatcatgggggtggtagggagagggagaacatcaagaagaatacctggtgaatgctgggcttaatacctaggtgtagggatgatctgtgcagcaaatcaccatggcacacatggtttatgtatgtaacaaacctgcacatcctgcacatgtaccgctgaaattaaaataaaagttgaagatttttttaaaagatagcatttacaataatattaaaaatataaataagattgtaacacctgcatgagaaatgtcataaacctttctttaaaatattaatgaaggtcaaaatagatggaaatatatatatcaaagacaatattataaggatatcattcttttccaattgatttgtagatccagtgcaattcaaatgaatatccaaaataggtgttttgtttttgtttttgtttttgttttcgttttcggtcagagtcttgctctgtcacccaggctggagtgcaatggcacagtctcagctcactacaacctctgcctcccagttcaagcaattctcatgccgcagcctcccaagtagctgagattacaggaactcaccaccataaccagctaatttttgtatttttagtagagacggggttttgccatgttgaccaggctggtctccaactcctgacctcatgggattcacccacctcagcctcccaaagtgctgggattacaggcatgagccaccacgcctggcccgaaacaggtcttttgaataacttgataaactgactaaaatttatatgaaaatacaaaatcctaagataaacaaagttcaagagattaagtgtggctttggagtgggggtatacagtggagtgaaataaagggctcagaagcaatcccacataattaagcaaaattattttgcagttaaatagaagaggaactcattaataaataggtctggaaccactgaaaaatgaaaaaggatccttatgttataccttaccaaaaaatcaacatcaggtggttttagggtgtaaaggtaagccaaaacttcaaaacttttaggagaaaacagatccaagatgtcctcatgttcctagataacatagtgtagtgtgactaagaacaaaaactctgaagccaagttcaaatcttgtctctaccacataataaatgagtgaccttgtacatgtaacctaatctctgtctccatttcatccttaaatgatggtaataactgtacttacttcatagggtgtatatgatgataaagtatatacaaattacttaaaaatagcacctggaattaagtagtactctaggttataactaaccctgttactattattatagtgctattgcactctttctcttgtgccatgattagtttcttctgtgcataaaaggtcaaaaagagaaaggaagaaatccctttttaattcctcactctgatgattctacccttcatgattaaatatatgcagaagctctgatccttaagtttctattgcttctagatgaacatgggactcactatcaagggtctaatcagtttggggccttcagcttcatggctgggtacccaagcactcactgttcaactcaacacctagtaatgtccagtcctggcccttggggtaggtgagctcaaccgtctcaagtatcaagcccaaaatataacatcaggtgataccacaactatcctgcctgctgcttgctgcaccatgaagtctgccaagctgggatttcttctaagattcttcatcttctgctcattgaataccctgttattgggtggtgttaataaaattgcggagaagatatgtggagacctcaaaggtatgaagctaaggcagaaaataaatccaaaggtcaattatgaatgagagagaaggtattgggaga

SEQ ID NO: 26750 - DNA, 2300 bp, Homo sapien
cctctcctctagtcactttctgttactgttggccagggatcccaaatgatagctcaccatgttctcctgcagttatccaggattccagagacccaagagcaagaagtgccttcagaagaaagaggcagcttaacatcatgatgatgctgagagttgggacaagagctcagttcaggctagaggtgtacaccttgcccagagtatcagctgaggtatgagcaggactagggatggccccaaacccagtcccaaaaccttccctttcacaatactccccaagaatatcttctcctgacaagaagaagagggattggctgctggagtgtgggaaaattcctggcactaccaaaggggacctgtgatgggaggatcaaattctgtaagcaatatacacaatattcctggatgatgagaaacctagtgggtggctggaaaaatggaggggtggccattggaaaaagaatcaaagagagccctaaagggcattggaaggacatggctttagcccaaataacagagggagggattcacgacactacttaatggccaaagctaataacataaccaagcataataaaattgtggctcctgttcatcctagcaaccaagaaaatacagaatggaacagaccactcagaaactatcaaataggccaaggcgggcagatcacctgaggtcaggagtttgagaccagcctggccaacatggcgaaaccctgtctctactaaaaatacaaaaatcagctgggcatgctggtgcatgcctgtaatcccagctacgtgggaggctgaggcaggagaatagcttgaacccaggaggcagaggttgcagtgagtggagatcatgccactgcactccagcttgggtaacagagtgagactctgtctcaaaaaaaaaaaaaagagagaaaagaaactatcaaaaacctacagaaaagcagtagttgagtttgttaagaactaatgaaaagcaccaaacacctacatctttgtccctctaacccacacaggccattcttggactgtatgaagtctagctggcagaacccaagagaagttgctatgtatgactcaaatagtctgcccacatatacctcctttatttcttttttctccatttctttttttctttatctgtcctggtcatgcctttggttagctgtgatacctaatggtgtccactggcactgcttagtcctatgggcaggtacaaggtaaaacctccttaataggatcaaaaagtttggagccaggaagtcgcccttatggttagaaggctgatgttggctcatggagataattaacatttgatgatgacctcatatgtgcctaatatgcttttttttttttttttttttttttttttgagacagagtctccctctgtcccccaggctggaatgcagtggcgcgatctcggcataattaacatttgatgatgacctaacatgtgcctaatgtgctttttttttttttttttttgagacagtctccctctgtcgcccaggctggagtgcagtggcgtgatctcggctcactgcaacctccgcctcctgggttcaagagactctcctgcctcagcctcccgagtagctgggattacaggtgcccaccaccacgcccggctaatttttatatttttagtagagacggggtttcgccatgttggccaggctggtctcgaactcctgatggcaagtgatcctcccgcctcggcctcccaaagtgctgggattacaggcgtgagccaccgcccctggccgagcatattaaaatctagttttcaaaaactgaactgcaggcgccgctgtaccaaacgcttccctctgctccccaaccccagcctacagaaaactggtcccttcctcctaccccgcagtcatccccaggccttggcccagcgggaaacatcccttgactgaaccgccactgaacacccacactgcacaatcgaggcgcagccctcccgagaggaagccccaacgacctccacctacaaggcctctaagtgtaactgtcctgggcgaggcgcggcggttcggttcccatggtaaccccgcagctccagcgtcgcgcttccgggcggacgagcagcgcgctccagtgacgtcacggcgccactttccggccggtgacagagtccagcggagttgtgggggccgggggcgccatgggagccactggcgacgccgagcagccgcggggacctagcggggccgagaggggcggcttggagctgggggatgcgggcgcagcggggcagctggttcttacggtgagggcgcccccggtgaggtctggg

SEQ ID NO: 26751 - DNA, 2300 bp, Homo sapien
actgacctctttagagccctcaaccacagagccagtgaatgtgagggatcttaggtattgtttattccacaacccatctcctgtgcccttccccattttgtacgtgagttcagagaaggaagtgacttgactagttcaagatcacacagagttacagaatcggagtctcctcttcctcagtcctgtgctctttctaccggctgtagatctccatagccttgtgcactggggatcccaaatctgccatgcaagccagtggctgggatataagccccatgcagggccagccttaccttgttgtcatctgtgagcggcggcccctccgctgcacctgccggtgctttatcattatgttccaagggttctgtggggaccaacggaacaaatgtcactgcggcctgtgacactggggtggggtggaggtggagggtgggtatgaagttaaacctggacatccctgcttctcagatccgtcaccatctctcccgccttggggtgggacgatagttgtaaggcctcctccacaaaagaggaactgaggaagtttcctgccttaaaagtcccgaccctgccttctggcacggcaggaggaagggaagcagtatttaccgagggtcaactctgtgtcaggtgatgtccggggcgttgtacccgcctttatcttcccatcccacaacaagttttatgagacaggtactaatcatttccattttatagaagaggatcctgggactcagggggttgacagagatggcccacgtcacctagctaggagggcggcaccagaatttaaatccaggtcgtcgggctgcgaaaacgccaaccccctctgcagctccagcctccgcgttctctcgcccgcgggccagggtcccaggagccccgaggccgtgcccggcctgagcccagacctcaccgggggcgccctcaccgtaagaaccagctgccccgctgcgcccgcatcccccagctccaagccgcccctctcggccccgctaggtccccgcggctgctcggcgtcgccagtggctcccatggcgcccccggcccccacaactccgctggactctgtcaccggccggaaagtggcgccgtgacgtcactggagcgcgctgctcgtccgcccggaagcgcgacgctggagctgcggggttaccatgggaaccgaaccgccgcgcctcgcccaggacagttacacttagaggccttgtaggtggaggtcgttggggcttcctctcgggagggctgcgcctcgattgtgcagtgtgggtgttcagtggcggttcagtcaagggatgtttcccgctgggccaaggcctggggatgactgcggggtaggaggaagggaccagttttctgtaggctggggttggggagcagagggaagcgtttggtacagcggcgcctgcagttcagtttttgaaaactagattttaatatgctcggccaggggcggtggctcacgcctgtaatcccagcactttgggaggccgaggcgggaggatcacttgccatcaggagttcgagaccagcctggccaacatggcgaaaccccgtctctactaaaaatataaaaattagccgggcgtggtggtgggcacctgtaatcccagctactcgggaggctgaggcaggagagtctcttgaacccaggaggcggaggttgcagtgagccgagatcacgccactgcactccagcctgggcgacagagggagactgtctcaaaaaaaaaaaaaaaaaaagcacattaggcacatgttaggtcatcatcaaatgttaattatgccgagatcgcgccactgcattccagcctgggggacagagggagactctgtctcaaaaaaaaaaaaaaaaaaaaaaaaaaaagcatattaggcacatatgaggtcatcatcaaatgttaattatctccatgagccaacatcagccttctaaccataagggcgacttcctggctccaaactttttgatcctattaaggaggttttaccttgtacctgcccataggactaagcagtgccagtggacaccattaggtatcacagctaaccaaaggcatgaccaggacagataaagaaaaaaagaaatggagaaaaaagaaataaaggaggtatatgtgggcagactatttgagtcatacatagcaacttctcttgggttctgccagctagacttcatacagtccaagaatggcctgtgtgggttagagggacaaagatgtaggtgtttggtgcttttcattagttcttaacaaactcaactactgcttttctgtaggtttttgatagtttcttttctc

SEQ ID NO: 26752 - DNA, 2300 bp, Homo sapien
cttgttgaagacagtctggatctcctcgttgatgctgggctgcaggacagctcggaggagatccatggagatggcaggatctgtgaaactgcattcaggagggagacagggtgagggggcatgtcccaaacatattctttcccagcctccccagttaattatggacatagaattccttaacaatactagacagcttttattgaaaactagctacatgctcagattttgtgcaaatcacagaggcatgactttatttctttctcataataactctatgaagtgcatattattttcaaagtttttttttttgagacggagtctcactctgttgcccaggctggagtgcagtggcgtggttttggctcactgcaacctctgcctcctgggttcaagcaattctcctgcctcagcctccttagtagctgggattacaggtgtgcaccaccacgcccggctaatttttgtatttttagtagagaccgggtttctccattttggtcaggctggtctcgaactcccaacctcaggtgatctgcccgcctcagactcccaaagtgctgggattacaggcgtgagccaccgcgcccggccaattttttgttatttttagtagagacggggtttctccatgttggtcaggctgttctggaagtcccgacctcaggtgatccacccacctcagcctcccaaagtgctgggattacaggcgtgagccaccgcgcccggcccaaagtgtttttatgaaatataatacttatacagaaaagtctatacactttaatgagtaattatagtgaacatccatttcaccactatcagcatcccaaaggcccaccttgtgctctctcccttccctgacatgcatactattaatccctctttatagttgagaaaacgggctcatcagagtctgttgatgagaacacagttgtctgactccagagcctgttctcttaaactccatgctaactgacctctttagagccctcaaccacagagccagtgaatgtgagggatcttaggtattgtttattccacaacccatctcctgtgcccttccccattttgtacgtgagttcagagaaggaagtgacttgactagttcaagatcacacagagttacagaatcggagtctcctcttcctcagtcctgtgctctttctaccggctgtagatctccatagccttgtgcactggggatcccaaatctgccatgcaagccagtggctgggatataagccccatgcagggccagccttaccttgttgtcatctgtgagcggcggcccctccgctgcacctgccggtgctttatcattatgttccaagggttctgtggggaccaacggaacaaatgtcactgcggcctgtgacactggggtggggtggaggtggagggtgggtatgaagttaaacctggacatccctgcttctcagatccgtcaccatctctcccgccttggggtgggacgatagttgtaaggcctcctccacaaaagaggaactgaggaagtttcctgccttaaaagtcccgaccctgccttctggcacggcaggaggaagggaagcagtatttaccgagggtcaactctgtgtcaggtgatgtccggggcgttgtacccgcctttatcttcccatcccacaacaagttttatgagacaggtactaatcatttccattttatagaagaggatcctgggactcagggggttgacagagatggcccacgtcacctagctaggagggcggcaccagaatttaaatccaggtcgtcgggctgcgaaaacgccaaccccctctgcagctccagcctccgcgttctctcgcccgcgggccagggtcccaggagccccgaggccgtgcccggcctgagcccagacctcaccgggggcgccctcaccgtaagaaccagctgccccgctgcgcccgcatcccccagctccaagccgcccctctcggccccgctaggtccccgcggctgctcggcgtcgccagtggctcccatggcgcccccggcccccacaactccgctggactctgtcaccggccggaaagtggcgccgtgacgtcactggagcgcgctgctcgtccgcccggaagcgcgacgctggagctgcggggttaccatgggaaccgaaccgccgcgcctcgcccaggacagttacacttagaggccttgtaggtggaggtcgttggggcttcctctcgggagggctgcgcctcgattgtgcagtgtgggtgttcagtggcggttcagtcaagggatgtttcccgctgggccaaggcctggggatgactgcg

SEQ ID NO: 26753 - DNA, 2300 bp, Homo sapien
gaggctgaggtgggtggatcacctgaggtcgggacttccagaacagcctgaccaacatggagaaaccccgtctctactaaaaataacaaaaaattggccgggcgcggtggctcacgcctgtaatcccagcactttgggagtctgaggcgggcagatcacctgaggttgggagttcgagaccagcctgaccaaaatggagaaacccggtctctactaaaaatacaaaaattagccgggcgtggtggtgcacacctgtaatcccagctactaaggaggctgaggcaggagaattgcttgaacccaggaggcagaggttgcagtgagccaaaaccacgccactgcactccagcctgggcaacagagtgagactccgtctcaaaaaaaaaaactttgaaaataatatgcacttcatagagttattatgagaaagaaataaagtcatgcctctgtgatttgcacaaaatctgagcatgtagctagttttcaataaaagctgtctagtattgttaaggaattctatgtccataattaactggggaggctgggaaagaatatgtttgggacatgccccctcaccctgtctccctcctgaatgcagtttcacagatcctgccatctccatggatctcctccgagctgtcctgcagcccagcatcaacgaggagatccagactgtcttcaacaagtacatgaaggtgagagggacacaggataaaaaataacaggagaaagactcatgaggagcccagtccttgcctgcatcaccagtctgtctctttcctacatacagatatctaaagttttcctttcttgttgtttttgttttgttttgttttgtgtttttgagacagattctcactctgtcacccaggctggagtgcagtggcacaatatcgattcaccgcaacctccacttcccaggttccagcgattctcatgcctcagcctccctagtggctgggattacaggtgcccaccaccttgcagggctaatttttgtatttttagtagagacggggtttcactgttggccaggctggtctcgaactcctgacctcaaatgatttgcctgccttggcctcccaaagtgctgggattataggtgtgagccagggcacctggtcagttttcaaatttttaatcccccaagaattttattccctccttgagggtaattcagataccttttttttttaaaatctgcccttgtcacgcacgtggttttttttgctgacctcttataaggatgaagtgacttaaatgtactgtgctgagcactgtgctccagacataacaagtgtccaataagtattcttattagttgtttaataatataaccattattggggccatgcacagtggctcacacctgcaaccccagcactttgggaggccgaggcaggatcacttgaggccaggagtttgagaacagcctgggcaacacagtgggacctcatctctactaaaaaaaaaaaaaaatttttttttttttttttgagacagagtctcactctgtcgccaggctggagtgcagtggcacggtcttggctcactgcaacctccgcctcctgggttcaagcagttctctgccccagcctcccaagtagctgggattacaggcatccgccaccacgcccagctaattttttgtatttttagtagagacggggtttcaccgtgttagccaggatggtctcgatctcctgacctcgtgatccgcccacctcggcctcgcaaagtgctgggattacaggtgtgagccaccgcgcccgtcctgattttttgcactatttacacctcaatctgttgggcacccccacgattatatccgtaagagggggaataaagggaggaggtcaagcctgaaatgtgaatctaaatctggctgatcccaaagccctgctcataatcacttttcccttctgtatgaagctaggataaagacttattttatattcagtttccttcaggttgatgcacattaacaggactctgaccttgtcctctgttgtgctcccctagttcttccagaaggcagcactgaacgtgcgagacaatgttggggaggaggtggacgcagagcagctgatccaggaagcctgtcggagctgcctggagcaggtgagaccaaaggggacaagagatgcaggcacaaggtttagctctcgagcctctgataagaaatgcgatcttaagccggacgtggtggctcacacatgtaatcccagcactgtgggaggccaaggtgggcagatcactcaaggccaggagtttgagaccagcttgggcaacgtggctaa

SEQ ID NO: 26754 - DNA, 2300 bp, Homo sapien
acttgatcttaaccaaaaggtgtaggagcaatggtggatccctttttttttctttttttcttttttttttttttttcttaattttcaccacaccattcaagagagaaatgggtccttttttaaaagagaaggctataaataagtcaccagtccctactctcccatccatgaagcatctactgtagtaaaagattgtctcaaggaaccattcccatccctccccacttactcttccgtactaaattgtaaaccgcatcccccgcttccacctagtagcaggccttacattaaacagatgtttaatgaagtgttactgagttggagtgaaatgaatcaggcaatgaccactctcccttgctcctgcctcaggcctacctcctcatcgaggaggacatccgggaccttgcggccagtgatgattacaggtaaaaccagtgggtctcctgccccttctcctctccctgcctccaaatagcccctagaatgaggcagggcctacatcctcacttcccccaacttctctcttcaatgtctgttccagaggatgcctggatctgaagctagaggaattgaaatcctttgtcctaccctcctggatggtggagaagatgagaaagtatatggagacactacggacagagaatgagcatcgtgctgttgaagcacctccacagacctgaggccgggtcccctggccacacttggcagccctcctccaaagccctcttcctcacgtggctgaggccaccgctgggactgctcctagatggatctcagcggcattaagctgtgcctgagcgagtttgtagtgactcactgcacagcacccccagactagcatgtggttctatatttgtaaagttattgggataagaaacaattaaacagtttgtagtaaacacagatggtgaacctgctgtgccctctaccttgtgggaattgacagaacatcaagggctctagaagtgggtgtaggaaaaaaggacgagataaccctcacccataacagtatagagccaggcttgataagaccaacctgggagcaccatgtaccctgcccgtcttccctttgcccatttgtagtttccttacccagctaatgtaaggacatggcagaatgcgatggagtttgatgacagatcatatgaaaaatagagttggcttttattgctcccattttacaggttaagatactaaaggacccgccccaaggttacacactacccactggggaggtaggatatacaggatatgaacctgtgttgttggggtttttgtttgtttgaagacagtcttgctctgttgcccaggctagagtgcagcctctggctcaagcgattctcccgcctcagcctcgccagtagctgggactacaggctcgtgccacctcaccagccttttttttttttcttttctttttttttttttttcttttaagtagagacaggtctccctatcctgttgctcaggctggtctcgaactcctgggttcaagtgatcctcctgcctgggccttccaaagtgttcgggattacggacgtgagccactgcgaccagcctgaaccaatgttgcctttttttatttctgtcatctctgcggagatgtatggacctatgttttctaatagggagcctgctgctctggccatcagcctttagtttttcccctcgctgggattttcagatacttaggacgcagcaaaggtgcccaggcgattataatggtgggagggtaccagtgctgcaggattggaggcactccctgcccgagggaaattggatcaaggctgggcgtgccgagtgttcccacgcggagtaagacgtgtagccagaaggaggggttcatcccacgtggacgttttcttggccctttaatggttagcgttttccaacggccaccaattcgctacggattcgttagttaatggcagcatcatctaccaatcggttgtcagaagcgggattctgccgcccaatagcggtgcgccagtgggtaggtctagcagtggcgcagcaatagagcgctccggagcgtctcattggctggatcaaacccaagcgagccattgattggtcgacgcccccagagggttacaattcaaacgcgggcgggcgggcccgcagtcctgcagttgcagtcgtgttctccgagttcctgtctctctgccaacgccgcccggatggcttcccaaaaccgcgacccagccgccactagcgtcgccgccgcccgtaaaggagctgagccgagcgggggcgccgcccggggtccggtgggcaaaaggtgagtgatgcggcctacc

SEQ ID NO: 26755 - DNA, 2300 bp, Homo sapien
aggtgggcggatcacctgaggttgggagtttgagaccagcttgaccaacatggagaaaccctgtctctactaaaaatacaaaattagccgggcatggtggctcatgcctgtaattccggctactcgggaggctgaggcaggagaattgcttgaacccaagaggcggaggttgtggtgagccgagattgcaccattgtactccagcctgggcaacaagagcaaaactctgtctcaaaaaaaaaaaaaaaaaaaaaccaaaaacaaaaattagctgggcgtagtggtatgtgcctgtaatcctagctactcagaaggctgaggcatgagaatcacttgaacctaggaggcggagggtgcagtgagccgagattgtgccactgcattccagcctgggtgacagagtgagagtctgtctcaaaaacaaaaccccaaaaaaccaaaaaacaataaaaactaaattggaatcccatgggtctccctcaccctttggcaccctgcctgcctgggggaggccttatttagcttggcccagccctgctgagctttccttgggaatgtctatatataggggaagggggcagcccagttgccactgtccatctgcattccttggtgtccagcccccctttcctggccccagagcctgctatcggttgtcttggtgctctttctgtccacgtagccactgtctacaagccttgcctactccccagtgcccagcctgcaccttgtggattctcaggttgggctccctctggacttggtctgcccacccctttactccccagatgaccagatttcttcactgagctctaggaaggggccagctgtccttttaccacttaaagaaccttcccctgcctactccttacttcaaaaaaagtgaatccaaacaccctttccctggagaaggtaactttcagagaaggatctttgctttcaatgattatttctcctccaaatgcacatcctcctctcctccatccctccatacatttttccatctggacaggtgccccaaggactgtctgtcccaacttccctccagtcaggattaataataagaatcatcaacatgggtgggcatggtgcctcatgactgtaattctagcactttgggaaaccaaggtggaaggatcccctgagcctaggagttcgagaccagcctgggcaacatggtgaaaccccatctctataaaaatacaaaaaaaaaaaaagccaggggtggtggtgcacctctagtcccagctactcgggaggctgaagtgggaggatcacttgagcccaggagatagaggctgcagtgagctataatagcaccactgcacatcagccttggtgacagagtgagtatagacctttataatttacaaagctctgcagtcaagtggggataatcgttgctacctcataggaggagcactagatgagatcatgttaaaatgcttagcacagtgtgtggcacgtcatggggttcagtaaacagtggcctacctgtcactttctcctcctatcccctgccccttaccatggttcaaagacgggacattcctcttgccaagcaccaacgctgtgtacccagcacaagctaggtgacttatacccgggttcccatttaccatggtctctctgtgagggagaccccacagacaggtccaatcccacagatgaagaaatggctcagagaggcactgctaccggcccaaggtcacacaactcgcagaggctggccttggatcttgggttttggacttcaaggcttgtactctccccattttaccatgctgcctcaccctttactactctgatcatccttaccatcttggagccagtgtgcttcctcggtcggggggactccaaggcagtggaacagggcaggccttcctcacaagaatctaggacgtcaaggcctgccacctgcttggaggcttaaatttctctgcaagggcccttggctaaattaggtaatgggttcagactgtgggaggggtgggactcgctgaccccaggatctgattgggcagggtctccagtgctggggagcagggaggtgggaggggagggtgcccctacaaatcccgggggctagagcaggccaggtcatctttgggtggtggagtgcaaaggaggcgacctgcaacagaggagtcccggtcaccagcaaccatggtaaggacaagaggggactttgtgcctttactcacgggagcactctggacccctttcaggccaggcctgggtgctctgtggggcagtaacttggatgtttgaggttggagcatggaggttcctggaaccca

SEQ ID NO: 26756 - DNA, 2300 bp, Homo sapien
ctgtttatatgacccagcataagcccttcccctcactaagcctcagactacctatctgtaaaatggaggtgataggccagatttctgaggggccctcctgctctaacaacccatggtttcatgaagaccagctttgtgcccagacatgtaaggcatataccgaaggacaagttattttttaaccaatggttggtgaatgagtgagtgttgaattaatgaatgaagtatgccttttttgtcccaatatcttgcccataagccaaatgaagagtaattcgaggtttgaaattgtgcaaactggccaggcacagtggctcacgcctgtaatcccagcactttgggaggtagaggcaggtggatcacttgaggccaggtgttccagatcagcctggccaatatggtgaaaccccacctctactaaaaatacaaaaattagccgcatggtggcacatgcctgtagtcccagccactcaggaggctgaggcaggagaattgcttgaacctgggaggcagaggttacagtgagccaagattgcatcactgtactccagcctgggcgacagagcaagactctgtctccctctctaaaaataaataaataaataaataaaattgcacaaacttaggcttaaaatcccagcccctctatttcccagatgtggatcttggggaagtcactttgcctcagtttcttcatcttgaaaatggaccattaatgtccagttacagcctcttccccaggacgctgtgagggagagatgtgacagtaaagtgcctagagcaggatgtagaaagtggaccctcagaaaataagaaccccagcctttctgctcacatgggagggcagggagctgaaataccttctgcttatcccaaggcattttcccccacccttctctcctgtgccactcagaaagggtaggagctactttggagagattttgattttatttattgtattgtataactatcaaaatctgccctaacaactgatacctaggctttgtgacaggaagccacaataactttttcttgacctgcagctgccctgcggataaaagataaaacaaagctggggagccactgagattatcaggcctgctgcacaggaaaagggcagtatgcagcaggggacctgggctccaggccccatactcagaaacctctgagggaggcagaggcaggtggatcacttgagcccaggaattcgagaccagcctgggcaacatggccaaatcccatctctacaaaaaatacaaaaattagctgggtgtggtggcgaacgcctctattcctagctactggggaggctgaggtgggagggatgacctgagcccagggaggcggaggttgcagtaagcagagatggtgccactgcactccagcctaggtgacagagtgagactccatctcaaaagagaaagaaagaaagaaagagagagagagaaagaaagaaagagagagagagaaagaaagaaagaaacctctggcaagctgtgtggttaagccaagtaactcaccctctctggtcctcagtttccctgtttgcctacttcccatgtgtgaggttcaaatcagattgtgcaagcctgtgaacactgtagaaacaataatcattatgtaagtgatcatttcgtcagcctttgctctatgccaggcacgggacgagcgttcttacaagagctgcaaaattagttttagcagtattgttcctgttttacatatgagaaaacctaggctcagcgaggtcagattccaaccaacccaaatcacgcatcttctcctggcccttcgttttctctcgggagacatggcctccctactattgcataattactttgtgaagttaaagagcgttgggtggaaatgagtgggacagattggagatgacgtgggtggggtgggaggattcaaggagggtacgcgcctggccggactgggatgactctgcggcaggcctgggactccctcaggccgacccaggcttcccaagtccctcctggagccaagggcccgggattctcgggcggctcgggcgagcgggcggggcaggaggcggggcggcggcaggaagctgcccgagcggcgctctgagcggcctgagcccggcggagccctgcagaacccggccgacctccatgggctgcggggggctgcacccggacccctggggcgcggcgcgcccctgaatgcaccgtgggacgcaggaggtagaggcgcacgaggcggcgcaagagacatcgggagggtcctgagcccctccggggaggaacgcggtcctaggctgagtgggttggggg

SEQ ID NO: 26757 - DNA, 2300 bp, Homo sapien
tgtgagggagagatgtgacagtaaagtgcctagagcaggatgtagaaagtggaccctcagaaaataagaaccccagcctttctgctcacatgggagggcagggagctgaaataccttctgcttatcccaaggcattttcccccacccttctctcctgtgccactcagaaagggtaggagctactttggagagattttgattttatttattgtattgtataactatcaaaatctgccctaacaactgatacctaggctttgtgacaggaagccacaataactttttcttgacctgcagctgccctgcggataaaagataaaacaaagctggggagccactgagattatcaggcctgctgcacaggaaaagggcagtatgcagcaggggacctgggctccaggccccatactcagaaacctctgagggaggcagaggcaggtggatcacttgagcccaggaattcgagaccagcctgggcaacatggccaaatcccatctctacaaaaaatacaaaaattagctgggtgtggtggcgaacgcctctattcctagctactggggaggctgaggtgggagggatgacctgagcccagggaggcggaggttgcagtaagcagagatggtgccactgcactccagcctaggtgacagagtgagactccatctcaaaagagaaagaaagaaagaaagagagagagagaaagaaagaaagagagagagagaaagaaagaaagaaacctctggcaagctgtgtggttaagccaagtaactcaccctctctggtcctcagtttccctgtttgcctacttcccatgtgtgaggttcaaatcagattgtgcaagcctgtgaacactgtagaaacaataatcattatgtaagtgatcatttcgtcagcctttgctctatgccaggcacgggacgagcgttcttacaagagctgcaaaattagttttagcagtattgttcctgttttacatatgagaaaacctaggctcagcgaggtcagattccaaccaacccaaatcacgcatcttctcctggcccttcgttttctctcgggagacatggcctccctactattgcataattactttgtgaagttaaagagcgttgggtggaaatgagtgggacagattggagatgacgtgggtggggtgggaggattcaaggagggtacgcgcctggccggactgggatgactctgcggcaggcctgggactccctcaggccgacccaggcttcccaagtccctcctggagccaagggcccgggattctcgggcggctcgggcgagcgggcggggcaggaggcggggcggcggcaggaagctgcccgagcggcgctctgagcggcctgagcccggcggagccctgcagaacccggccgacctccatgggctgcggggggctgcacccggacccctggggcgcggcgcgcccctgaatgcaccgtgggacgcaggaggtagaggcgcacgaggcggcgcaagagacatcgggagggtcctgagcccctccggggaggaacgcggtcctaggctgagtgggttggggggaaagcgatgctggctgggtcccctggttcgcaagacctcggactgccagggggtggggcctcaccgcgcccctccctctccggttcgggccccgcccctcctcctcctgcgccgggctggggtacccctcctccgggatccggtacacagcgtcgcgcgctccccccagggtgccatggcctcccggctcctgcaccggctgcggcacgccttggccggcgacggccccggggaggcggcggccagtccagaggccgagcagtttccggagagctcagagctggaggacgacgacgccgagggcctgtcctcccgactcagcggcaccctcagcttcaccagcgccgaggacgacgaggacgacgaggacgaggacgacgaggaggctggccctgaccagctgcccctcggggatgggacgtcaggagaagacgcaggcgagtgcaggaggacggaggcgggaaccctggggctcgattaggcctccatcccagccgcgttcccagagcatccagggcgctaagttgatccagctgaaactcccacacttcttaaagcgcctgggccacctcttggctgtgtgaccttgagagagtcttaacccccctctgagccaagttttcccttgtgtcaagtgggagaactcactctcatctcagaattgctgcaggcattaaatgtacagggcttgggatccgaatggaaatgatgtattaacgatattttgagggtggagctattaatt

SEQ ID NO: 26758 - DNA, 2300 bp, Homo sapien
cagtgcctgataacagagagctgagcaagccagttgacctcagacagtgatgtttattgctgttgattgagccctggtgcctggttgactccccatttggatcagagtgaaggaagcaacacttctctagacctgcttctttcatctgaaggttgaaagtcatccccaagatgtctcatggcccagatgtcagggttcctcaaggtcagcctgactcagacaaagtgagaacttcagggaaaccagggaagttctcttcctctccaaatcttccctcacctgcttgttgttggctgccttatccctggccagtgccttctactctggtggtggtggtcttgttgtttttgagacaaggtcttgctctgtcacctaggctggagcacagtgacgcagtcatggctcactgcagccttgatctcctggcctcaagtgatccttccgcctcagcctcttgattagctgggactataggcacatgccaccatgtccagctaatttttattttttattttttgtagaaacagggtctccctgtgttgcctaggctcttccactctgctttggagcagagacacctgacagtgaaggaccaaatggcttccatatacatcaggggtgaagtgactgacagtggcccttgcctgggagaggctgaatatacaaacagacaatggctagaccatgtagaaaaacagaactctgacgcacaatagcagcaaccagcacaggaagccagcctactatccacaagtcagacttgtaggaagtcagaccactatctttaccaaccagtccagcaagccaaataatgaccactgtaacaattggcctccaaagccaggacttgattaataactgatagctgccctaatttttgcccctgcttccaacttaggaccaaccggagaaagccaaatatgtactcctaaccaatcacataggatgtcccactcttttttgagacagagtttcactcttgttccccaggctggagtgcagtggtgcaatttcggctcactgcagcctccacctcccaggttcaagcagttctcctgccatagcctccacctcccagcttcaagcaattctcctgctgcagcctcccgagtagctaggattacaggtgtgtgccaccaggcctggctaattttttgtatttttagtagagacagggttttgccatgttggccaggctggtcttgaactcctggtctcagaagatctgcccgcctcagcctcccaaagtgttgggattacaggtgtgagccaccgtgcccagccaggtgtcatgcttctagttagcccaccaacagcttccccatgccaacagcctgcaatgggagcatccctgaagcctttttttccactacagagcattcccattcctttgcctgcctctaagtctctgccaaaagcaagtgatggtggttgacttcctgctacaacaagctctgattggctgggcgcagtggctcatgcctgtaatctcaacactttgggaggccaaggtgggtggatcagttgaggtcaggagtttgagaccagcctgggcaacacagtgaaaccccatctctacaaaaaatacaaaaatttgttgggtgtagcggcgcacgcctgtagtcccagctacttaggaggctgaggcatgagcatggcttgaacctgggaggcagaggttgcagtgagcccagatagcgccactgcacttcagcctcggtgacccagcgaaactgtctctcaaaaaaaaaaaaaaaattagctgggtatggtcatgcacccctgtagtccccccccactcaggaggctgagtcacaggaatcgcttgaacctgagaggtggaggttgcagtgagccgagattacaccactgtactccagcctgggtgacagagcaagactccatctcaaacaaacaaaaaaaagaacaagcgctgaataaatagcctttgtttgttctcaaaaaagaaaacaacaacagaataaacagtaaacaggctgcaggctagatttactgctccctgatctagaataatggttttggactgatgacaagatcccaggcatagatggagcaagatagaagcaaggagtattaattttatttaacaaacacatatagagccctcactatgtgccagatattattctaaacactttacaactacggattcatttcattatcattaaaatcctgtaagcgatgagcaccatgatgatccccagtttgcaaataagcacactgctcagagaagtgaagggtcacacggctggtgagtggtggagccaggatttgaatgc

SEQ ID NO: 26759 - DNA, 2300 bp, Homo sapien
ccgaggcaggtggatcatttgagatcaggagttcaagagcagcctggccaacatggtgaaactccatctctactaaaaatacaaaaattagctggacgtggtggcatgcacctgtaatcccagctactcaggaggctgaggcaggagaatcacttgaacccaggaggcagaggttgaggtgagccaagatcgcaccactgcactccagcctgggtgacagagcaagactccatctcaaaaaataaaattaaataaatgtataaatgaataaataacaagagccctcagacatcaagtctaactccttcagtgtacagatgagaaaactgcagcttggccccagagatgaaaatgcttgcccagaatgtaggcccattggaagctgaataattatgtctctagcctcccacgtcccagctgtttggcattttctgtaacaatgagttatgaacagccctccatgacctggcaggtggctctcgcctgtaatcaatcccagcactttgggaagccgaggtgggaggatcgcctgagcccatgagttcaaaaccagcctgggctccaaagtggggcctcatgtctactaaaaataaaaaagttagctggatgtggtggcaagcgcttatggtcccagctaaacgggagactgaggcagaagggtcacttgggcccaggaggtcgaggttgcagtgagccatgttcgtgccactgcactccagcctggacaacagggccagatcttgtcttcaaaaacaaaaatcaaatagccctccaagaagttatttacaattccttaagtggaaggaagggagctcaaagtaagataacttccagtaaagccaggagaagccttggaggtcaaagctgttagaagccttgctgcagggggctgggcgcggtggctcatgcctgtaatcctagcactttggcagaggtgggcagattacaaggtcaggagttcgagaccagcctggccaacacggtgaaaccccgtctctactaaaagaagttaaaaaattagctgggctgtggcgcgcctgtatgtcccagctaatcaggaggctgaggcaggagaaatgcttgaacccgggaggcggaggttgcactgagccgagatcgcaccactgcactccagcctgggcaacagagcaagactccgcctcaaagaaagaaagaaacccttgctgcagtcaagaacttcagcgatgctgggaaagaaaaaaacatgcttaggcctcagaataagtaatgagaaaccagacccaccaaatggtactgggggcgggatattgtgagaagaaaaggatactgaagacacaaggagctgcggcgtcggttttaaggctgatccatcagctgtgtgcccttgggcaaatcactgccctctctgggctagctcccccgtgaaggcttagggcaggctgccgagcagggtctctcaggtcaccactatatttgctcagctgtgcagacctcgcagcgcggagaggaagggaggaagccagagcagagaggacagctctgttgggggcgagttctctcctaatcgtggcagagggtgcatcccacgcagagccatactagtcccggagccaggggccccgggcggcggcagtcaagatcaagtttctgccctaaaggaggggatgctgggcaggagctgccggctacctgaagagatcctcgtccagcggctcgaggttgagcacggtcgtgaccaagacgctacggaggtccccagggggatcgccgcggtcgccacagccctgcccatcttctggggcctgcggggacgacatctagttcaatgctgcaggccctgcacacccgctccgcggaagacgcggagacatacacagaacctgactcttccggcagattgccctagtaaccggaagtctcctgcagaccccgggaaggaggaatctaggttatgattggtcaggactcctgtcagtccgctggtggctgtggccctctttctctagcaattggagaaaatgaatgccaatctgcgaatcctgtgtgtgactggatatgtcgctgaggaggcggaacctcgggactggataatatggactgagtgtcatttcccctgtcagatagcaaatacacccccttcctcttgtaacccggtcaggcctagggttcctccctgagttccagaataggccacccagttggggcggacccttaaggcattctgggcccacgcctgcctataaaccctcatagtgtgacctttgacccctggtgtgatcttgggcccgggctgggaccagcccctagtgtgggttgtg

SEQ ID NO: 26760 - DNA, 2300 bp, Homo sapien
gaagacttcccccacctcccaggcatttgtcattcatttctttctccgtacatttctttttttttttttttttccacattccttttaaagcatttatcacacaccagtttgcttgagttcaagtttatcctagttctctggggatagtttgaacacttattcatctttatgtcacctatacccagcatagcactggacttcagaacagtggaaagaatatagcctggctgtctaattgaggagctttggttgagcatctcaatccaagtctcaaactcggatatgctttaactctgagttggcccgcatgctctgagttaaaatttgaactgattcaatttttttaaatgggaaaatccacataaagtgtggatttctgacaactcttgcccaaaattctggcaacactagatctttattttcatatggcagccatcagctggagctgattagatggcatctactctccatttggcccatttcacacttctgttgtccctagcacaaagacctggtgttggttgctatttcatcattctttttcttaaagtaaaattcaaagttaaaactttcttacattgggttgtttcacctaatccctgaaggcatttgagttttcaactcctgtcttaacctctaagcctgacttctcatctgtcaaatcttctcatctgtcaaatgcaaaaaaataacatttatctataattctgaaaaaaaagccctgcagggtaaagcatgcatagagaacactgcctggcacatggaaagtgtttgaaaacggttaatataaggagctcaaaaaccatttacaaaatgaatgaatagaccaggcatagtggctcatgcctgtaatcctaacactttgagacgccgaaagatcgcttagtccaggagtctgggaacagcctagccaacataacaagacccagtctgtacaaaatcaaataattagccaggcatggtggcgtgcacctccagttccaactacttgagaggctgaggtgggaggatcgcttgagcccagcagttgaaggctcagtgagctgattgtgccactgcactccagcctgggggacagagtgagaccctgtttcaacaaatatataagaactaaaaactgaatgaatgaatgaacgaacattccaacgaccatgtgactgttttgtaaagaggagactgatgaaggaaattatcgccaaggtgtttttatccgtttatgaaagccatactttgtatttgggttgctgcagctgctcaaaacaatgggagaaactgcagttataaattccagaaaagcctgtgaatggagtgaaagtggagtgggtggtcaaaaaccaatggccgtggaggcttagctctcttcacaaggcacacagcaggtgctcaatgagtgcctgttgaatgaatggccacgcagcccaatgcgtgcctatgcacccctcctcctccaggcagccctccggaggtccagcctcctccccaccctcttggcccgccccgccccgcccgcccttacaggatgtcttcgcggatggaggtgccatggttgaggttgtggaagcggacggagacgcagtccctgagaatgaaggagcacctgttctcccttttgtaggcgctgaagcactccttgaagtcctcataggtcttgaagcagctgcccagctccatggccgcccccacaacccacactaggggctggtcccagcccgggcccaagatcacaccaggggtcaaaggtcacactatgagggtttataggcaggcgtgggcccagaatgccttaagggtccgccccaactgggtggcctattctggaactcagggaggaaccctaggcctgaccgggttacaagaggaagggggtgtatttgctatctgacaggggaaatgacactcagtccatattatccagtcccgaggttccgcctcctcagcgacatatccagtcacacacaggattcgcagattggcattcattttctccaattgctagagaaagagggccacagccaccagcggactgacaggagtcctgaccaatcataacctagattcctccttcccggggtctgcaggagacttccggttactagggcaatctgccggaagagtcaggttctgtgtatgtctccgcgtcttccgcggagcgggtgtgcagggcctgcagcattgaactagatgtcgtccccgcaggccccagaagatgggcagggctgtggcgaccgcggcgatccccctggggacctccgtagcgtcttggtcacgaccgtgctcaacctcgagccgctggacgagga

SEQ ID NO: 26761 - DNA, 2300 bp, Homo sapien
tgttctgcttgatcagggaaggaagaggaattgcatagcaataggactcgactttacagttaggaagtggctgctctaggtggatttattaattttaaagaaaattgaggccaggcgcagtggctcacactcataatcccagcactttgggatgtcgaggcgggtggatggatcatctgaggtcaggagttcgagaccagcctggccaacatggcgaaaccctgttctactaaaaatacaaacattagccaggcgtggtggcgcacctgtaatcccagcttcttgggaggctgaggcaggagaatcgcttgaacccaggaggcggaggttgcagtgagcctagatcgtgccaccgcactccagcctgggtgacagagtgagactctatctcaagcaaaaaacaacaacaaaaaaaaaagaaaagaaaattaagtattagcaacctaatggggttgtggagccaaatagaacctgatgcctcacattcaaggatttggcaatctgcgtcttaatttgcctccttcctacaactaagccttcaaggttgatttcaggtttccttatattctagcgggaagaggccaaatagactggagggtgtgggggaaaaacctgaatcttagacttgactgccagcaacttgctggggaactgtgggcaatttctttgacctcagtttcctctgtaaaaattagcatgttggcctgttctaatcccagatttcccctctaggtttacataagcacctttttgttttttgttttgagatggagtttcgctcttgttgcttgttgcccaggctagagtgcaatggcagaatctcggctcactgcaacctctgcctactgggttcaagcgattctgcctcagcctcttgagtagctgggattataagcatgtgccaccacgcctgcctaattttttgtatttagagatggggtttcaccatgttggtcgggctggtcttgaactcccgatctcaggcaatccacctgcctcagcctctcaaagtgctgggattaaagggatgacctactgcacccagcccaataacattttcgatgcgtaagtaccaacactgatttgatgttgctagttggtaatcttaatcctccaaggcctggtaaacacccagttttctaagtctgccatcttcaagggaactgaggacaagagaccagttagtaggcccttgcactactgtagtaggaccctaaataagtcatggcatcattctgtagaatactggagggggttgggctagagaatgccaagttttggcttgtttaaggggatctggatttcctcagctctaaaagttgggctcctgatccccgaaggaggagtagaatttgagacctggaactcagtttccccataaggtagaatatgcgttatgactatatatgcactgtttcctaaattccaggggctttagagtttcacacacacacacacaacaaaacaaaacccgcggtggctcacgcctgtaatcccagcactttgggaggctgaggtgggcgaatcacgaggccaggagttcgagaccagcctggccaacagggtgaaaccccgtctctactaaaaatacaaaaaattaactgggcgtggtggcgggtgcctgtaatcccagctactcaggaggctgaggcaggagaatcatcgcttgaacctgggaggcggaggttgctgtgagtcgagatcttgccactgcactccatcccaggcgacagtgcgagactccatctcaaaaaaagaaaaagaaaaaatatatatataactgctatttattttccttttcattttctgcttttgagggagtttccatagtaacgtgtccttccagtcgcctagcctgaagggaagccccggagctccagcttcaaggctcagctctcccagatgcaagtatctttacctccagccagctccttgtaaccctggcaacacggcccgcccgcgaatcgtcacgctacgattggtccgtggtgctaaagcctgaaagcgaattcctcagacattggtccgagtcactgcgatgctgacgctgtggttggtgagtttggatgtcagtcagagtcggaggcagggtcaaatagggagaaatggcgacggagcctggctgtgggtgagtgcttcctgaaggggtgaaagtgtgagacagcggatcaccgcagttagccgtcacacagctcccaaagggatgggagggaggttttcttctcatccggctccagctggactctgggaatgtcagacatccacatctcccacccaggttagaggtgagaggtcaaagg

SEQ ID NO: 26762 - DNA, 2300 bp, Homo sapien
ggaggttgcaatgagccgagatctcaccagtgcactccagcctaggcaacagagcaagactctgaaaaaaaaaagaaagagagagagagaggaagagagagaaagcaagcaagcaagcaagctagctagctcaagcctgggcaacaaagtgagaccccatctgtacaaaaaattaaataattatctgggcatggtggtgcatgcctgtagtcccagctatttgggaggctaaggcaggaggatcgcttgagcccaagaattgaaggctgcagttcactgagcactgcacttcagcctgggtgacagagcaagaccctctctctttaaataaaaaaaaaaaaagaaagaaaagaaagaaacatgctcatagacttgggcatattggctattggcttcgaggcataacaaaccccagactgagagcttcttaatgctgagtatgattcattatagccctggtaagcattgcagttatacctctcatcacatttcatgaactcaatgcaccagaaccctctttgtgccaggcctgtgctggaggcttcagttgcacaggcaaatcagacactacccctgcccccagaagctgctaagtgaatggggaagggattgtgctaagtgttatgatataaacagggctgcagctttgtggcagctctcaggaagaggtgcttctctcagccccatgaagcaggctgggcccagagagcagtaaggacttgcccacatttaatgacaaagtggggaccatgacctagaccttctggatcttggcctcagacccaccctccagttcagtttgcctttcacagtcttcttcccacagtgccatccctgcagactctgtgccgcctagtgatacaaaggagcatggtgcaccggctggccattgatgggctccacctgcccaaagaacttaaggatttctgcaagtatgagtgaagacccacagtgcaccagagcacagctgcatcctggagccccagacctgtggctggctggtccgaagttggccacattgctgccagccaagaccagaaataaacagccgatgctgacatcttgatcactggaaggtctccttgcccctacagcctatgagagtcacttcgtttagaatcactgcaggtcagcaggtcggagcaaaagagcaggggtccctaggctggctgcttgttagagtcatcttaggatatgtaaagagtgctggtgtcccacatcccatccctagggattcgtatttgatttgttgggaaattaggcctagacattgtgttttgtaaaagcttctcaagagattctcatgtacagccagggttgagaagtatgtccctagaaaaaaggttccaactttgtcatatattataatcacttgaggaattttgaaaaataccaatacctggcctgtaatcccagcactttgggaggccgaggtgggcagatcacttgaggtcaggagtttgagaccagcctggccaacatggtgaaaccctgtctctactaaaaatacaaaagttagccaggtgtggtggcaggttcctgtagtcccagctactcgggaggctgaggcaggagaattgcatgaacccaggaggcagaggttgcagtgagctgaggtcttgctcctgcactccagccttccagtcatggcgacaaagtgagactctgtctcaaaaaaagaaaaagaaaaataccaatactgggtctgacccgaagtcttactctacaaggcacgaagcacttggctcctgtgtttccatctctggtcatctgcttccatacaaatgatctcatttcatcctcaaaactcctaatgaggtagtgggcagtcatcagacacactttacagataaggatatcaaggaacaaaactatctgggtgactcgttcaaggttagggcaagaacctagaacacccagctcctggtctggtgctcttttaacctcatcctattgtcatgtccaggttctagaatgaataggtcaacgctgtaaagtggattccaagtgtgaaggggagggtctatgaggtgacattctagaagggtgaagaagggaggacaggcggcagatcactattccctcacaaaccggggctttggggaagccatgtcctacttcaggactccacaaactcatccaggtcctctgccttccggccaaggtgagcggggggcacctgcaattggagggagtgcggcagcttcccctgagaagttgctttctggctctggggaggtggcggttctgctgggcatttgggggctggccctagaatcaattcttttagaagaaaagcc

SEQ ID NO: 26763 - DNA, 2300 bp, Homo sapien
ttgtcgccatgactggaaggctggagtgcaggagcaagacctcagctcactgcaacctctgcctcctgggttcatgcaattctcctgcctcagcctcccgagtagctgggactacaggaacctgccaccacacctggctaacttttgtatttttagtagagacagggtttcaccatgttggccaggctggtctcaaactcctgacctcaagtgatctgcccacctcggcctcccaaagtgctgggattacaggccaggtattggtatttttcaaaattcctcaagtgattataatatatgacaaagttggaaccttttttctagggacatacttctcaaccctggctgtacatgagaatctcttgagaagcttttacaaaacacaatgtctaggcctaatttcccaacaaatcaaatacgaatccctagggatgggatgtgggacaccagcactctttacatatcctaagatgactctaacaagcagccagcctagggacccctgctcttttgctccgacctgctgacctgcagtgattctaaacgaagtgactctcataggctgtaggggcaaggagaccttccagtgatcaagatgtcagcatcggctgtttatttctggtcttggctggcagcaatgtggccaacttcggaccagccagccacaggtctggggctccaggatgcagctgtgctctggtgcactgtgggtcttcactcatacttgcagaaatccttaagttctttgggcaggtggagcccatcaatggccagccggtgcaccatgctcctttgtatcactaggcggcacagagtctgcagggatggcactgtgggaagaagactgtgaaaggcaaactgaactggagggtgggtctgaggccaagatccagaaggtctaggtcatggtccccactttgtcattaaatgtgggcaagtccttactgctctctgggcccagcctgcttcatggggctgagagaagcacctcttcctgagagctgccacaaagctgcagccctgtttatatcataacacttagcacaatcccttccccattcacttagcagcttctgggggcaggggtagtgtctgatttgcctgtgcaactgaagcctccagcacaggcctggcacaaagagggttctggtgcattgagttcatgaaatgtgatgagaggtataactgcaatgcttaccagggctataatgaatcatactcagcattaagaagctctcagtctggggtttgttatgcctcgaagccaatagccaatatgcccaagtctatgagcatgtttctttcttttctttctttttttttttttatttaaagagagagggtcttgctctgtcacccaggctgaagtgcagtgctcagtgaactgcagccttcaattcttgggctcaagcgatcctcctgccttagcctcccaaatagctgggactacaggcatgcaccaccatgcccagataattatttaattttttgtacagatggggtctcactttgttgcccaggcttgagctagctagcttgcttgcttgcttgctttctctctcttcctctctctctctctttcttttttttttcagagtcttgctctgttgcctaggctggagtgcactggtgagatctcggctcattgcaacctccacctctcgggttcaagtgactctcctgcctcagccttctgaatagctgggattattggcacatgccaccacacccagctactttttgtatttttagtagagacaggctttcaccatgttggccaggctggtctcgaactcctggcctcaagtgatctgcctgcctccccctcccaaagtgctgggattacaggtgtgagccactgtgcccggccaagcatgtttctaagaaaagggcaaacaattctcaaagaggcccctaatatctaaaattggtttagaatccctgccctaggtgaatacaggaaacactatcaaaactaaaagggaacttgtagggcatcttaatcaatcaaccaagataggtaccaaggcccaaaaccatgtagaggcttgtgcaagatcacaagcagaggtgcaatttgaagctagattctcccactcttaaactagtgccggacagacgaaggcctagcacatgggctacggagccctagtagattccagtccccacactgagccaggaggggtcgctgcccagggatacctacagccatactcgagctggacaaggcgcacgctctttgtggaagcaaacacgtccaccaccgcgtagaggggctgcgcagctggcagtccccgggc

SEQ ID NO: 26764 - DNA, 2300 bp, Homo sapien
tgcttaccagggctataatgaatcatactcagcattaagaagctctcagtctggggtttgttatgcctcgaagccaatagccaatatgcccaagtctatgagcatgtttctttcttttctttctttttttttttttatttaaagagagagggtcttgctctgtcacccaggctgaagtgcagtgctcagtgaactgcagccttcaattcttgggctcaagcgatcctcctgccttagcctcccaaatagctgggactacaggcatgcaccaccatgcccagataattatttaattttttgtacagatggggtctcactttgttgcccaggcttgagctagctagcttgcttgcttgcttgctttctctctcttcctctctctctctctttcttttttttttcagagtcttgctctgttgcctaggctggagtgcactggtgagatctcggctcattgcaacctccacctctcgggttcaagtgactctcctgcctcagccttctgaatagctgggattattggcacatgccaccacacccagctactttttgtatttttagtagagacaggctttcaccatgttggccaggctggtctcgaactcctggcctcaagtgatctgcctgcctccccctcccaaagtgctgggattacaggtgtgagccactgtgcccggccaagcatgtttctaagaaaagggcaaacaattctcaaagaggcccctaatatctaaaattggtttagaatccctgccctaggtgaatacaggaaacactatcaaaactaaaagggaacttgtagggcatcttaatcaatcaaccaagataggtaccaaggcccaaaaccatgtagaggcttgtgcaagatcacaagcagaggtgcaatttgaagctagattctcccactcttaaactagtgccggacagacgaaggcctagcacatgggctacggagccctagtagattccagtccccacactgagccaggaggggtcgctgcccagggatacctacagccatactcgagctggacaaggcgcacgctctttgtggaagcaaacacgtccaccaccgcgtagaggggctgcgcagctggcagtccccgggcgctcgggcccatgtcctcgccgttgatgatgatgtgcatgtcggccgtgccatcggggcgcgggcaaaagaggacacccaggcggctacggcgcgcggtcggaggcagcacgttcagctcatagagctggtccaagagatggctgtagagccctggccggctgcggcccaccaggcggtcccggggaatgcgaaactgctcaatgcgcagatatggttccacgaggagggttggaggtcggctgggggccgctgcctccgcctccgggcggccctcccggggcacgcggttgtggtggcgcgtgatggcgaagacccaggtgtggcccaggttgaccagatcgggcagagaaaactcgggaacgggggccagactggcggggtccagcgcggtcagaccgagacgcagatgtccgcaccagcccagctctttctcctcgatctcgaccaggaagacctggcccggggccagcggctcgcggctgaagcacacgccgtgggcgaagctctccacgcgtgtggcccgcgtcccagaggggtccacgcggatgttggcaccgtgcacccgatggaagcgggtgggagggggctccgggcgctcgagtccccagagtgcacccgaatccacgggctcggaggcagcagccatctctcggccatagggcaggccagctggcgccgggggctattttgggcggcgggcaatgatggtgaccgcaaggcgaccttgtaaggcatttcccccctgactcccttccccgagcctctgcccgggggtcctagcgccgctttctcagccatcccgcctacaacttagccgtccacaacaggatcatctgatcgcgtgcgcccgggctacgatctgcgaggcccgcggaccttgacccggcattgaccgccaccgccccccaggtccgtagggaccaaagaaggggcgggaggaagactgtcacgtggcgccggagttcacgtgactcgtacacatgacttccagtccccgggcgcctcctggagagcaaggacgcgggggagcagaggtgagctggcaccggaggctggaggggatccccgagcccgggatcggtgcgcggcagaggaggctcgcgggtgggagctggcgctggggccggggcttccctcgcggaggcgccgccagcaactccccgggggctgctgcacggaagcgctgagg

SEQ ID NO: 26765 - DNA, 2300 bp, Homo sapien
catgtgcctggaggacagacctgagatcatgtgacctgcctcaccccagagattgcccaactgccctatcccatacctgttccccagaaggccatggtagtaggcaaagtagaccagggagttgtcattctgctcataggaggagagtccattgcccacagccagcccctgtgaaacacccagggtgctcagctcatgtggagggcaaaaaggaagagcctccctcaccctaccacccagaccttcagcaatccggaagctgaaacccagggtggtttatgtaggccggtgggtatgagaggccactcaatgcaaaacacagagctggcagcctgacaggtgagtttcctgtgtgggaggcacacagacagacctagggcagccggtggtggggaggttatgcaggaagctgggttggatggggacattgaccagtcagtctgaccttgctaactgtaaggccacagcctcaagctacctcccttccctcctgcagctaccctgcacctgaaggttcatgctgggatcctgcatgaccagcacggccagggtggggatgtagatgccagcatagctctccccggtcaggaaaagtttgttgttcttgtactccggaaagaggcggaagaaatcttgaagggcctcaaaattgctctgggcgacctggggatggcagagcaagacagagggaatcaggaagctttggtatttgaactggaaagaacttcagagataatgacattaacccaccctatttgtgcaagaggaagtgactggccaccataccacaatagcatatgacagagcgaaaagtagactccaaggccatgctctctctcccagcatcatgccatggatggaggaccggggagcctggggcagatgggcaggcaccagactcacctcagtgtcattagttgcataaaacttgtcatcggagtaggagaagcccaccccagctggggactccaggtataacacattggcaatctagaggggagggaaaaattagctaaatgccaccccatccaagtgcccagacacacccacagctccagctataccagattccaagaataggggttgtactccagggtgacaccatctggctggacctgaggaggaaagagatggctgagtaagtcccaagggccagctgggtggagggaaagggccaccatgagaggcactttacatgtgggtaaaacctctgagaggtacaggcagcaaagccaatggcatagaggaaaatcccgaggcttagaaggaaggaaactttttggaaaatcacaaagcccctctctcgctttccccagccttttactttgggaactgtgctttccccctgctgtccactcaccaggaaggggccatgctctgtgaggagcccatctagtgagctgcagccgggacccccattgagccaaagcaccacagggctgttctcgggatccttctgggactccacaaacctgggaggggggtcagggcagggttggcgcagttggaggggccctttccagccctcccggctcccaggcatcctcaggggtctgcagaactaccccccatccctcatccgtcatctcttctcccaatcccgcccagaaggcagggcggcagaccagtagtggaggtgcttggagccggagcctttgaggtagccggagtactggcggaaagacggctgcttggccagcccggggaggcgctggatctcgtcctggtcgggggctgcctcgcctcgggacgcccaggacactagcagcagcagcagcagcagcagcaggaacagcggcggcggcgcggctcggatcatctacgggaggcagcagaggggctgttgactcgctcctcagcgcttccgtgcagcagcccccggggagttgctggcggcgcctccgcgagggaagccccggccccagcgccagctcccacccgcgagcctcctctgccgcgcaccgatcccgggctcggggatcccctccagcctccggtgccagctcacctctgctcccccgcgtccttgctctccaggaggcgcccggggactggaagtcatgtgtacgagtcacgtgaactccggcgccacgtgacagtcttcctcccgccccttctttggtccctacggacctggggggcggtggcggtcaatgccgggtcaaggtccgcgggcctcgcagatcgtagcccgggcgcacgcgatcagatgatcctgttgtggacggctaagttgtaggcgggatggctgagaaagcggcgctaggacccccgggcagaggctcggggaagggagtcag

SEQ ID NO: 26766 - DNA, 2300 bp, Homo sapien
aaggacttcttcacatttatcaaacacctgcaacgtggcaggcactgtgctgaactgtgtctatgtagattatttaagcttcaagattccccctcaaatgagatcatactacccacattttccagataaggaaactgagggctatgaattttgaaatcactgtctgaagtcacagtgttgggaggcagtgatgctaggatttggacccaggtctgggaagattcctgccactgagcctcagtttccctacctgtgaaaaaaagtgggtgaagaggtgaaatccaagagcagtaaatcttgggacaacttggtggggtcgtggagaggctggggatctgtaaagcatggtggcttggtgtatcattgcagcttcaggaagtggcccgcatcgtgggcaactctggcctcaacatctacaatctctatgccccgtgtgctggaggggtgcccagccattttaggtaggtgctgctgggtgcccctggagccaaccccagccccatctggaggctccacacccattcccccacctcacattgcaggtatgagaaggacactgttgtggtccaggatttgggcaacatcttcactcgcctgccactcaagcggatgtggcatcaggtgtgcgagggcgtgggcttcctcctggtgaggtgggggcagggggaggggcagggaagcagaggccctgacccactgtctgtgccttccaggcactgctgcgctcaggggataaagtgcgcatggaccccccctgcaccaacacaacagctgcttccacctacctcaacaacccgtacgtgcggaaggccctcaacatcccggagcagctgccacaatgggacatgtgcaagtgaggttccgtggccacctgtgacttggggtggtgggttgctggggcttgtgggcatcggcaggtttctcagggatcttctgtgtagagtttctcaatgagatgagctgtagaggatgtttaacatccatccctgacccctcagtggattgagagtcagccaattcattcttttatcttttttaaatttaaaatttttttgtttgagacaaggtctcactctgtcacctaggctggagtgcagtggtgtgatcatagctcactgcagcctcaaactcatgggctcaagcaatcctcccacctccccagtagctgggactacagacgcaccaccacccccaacaagtttttgtattttttgtacagatggtgttttaccacattgctcaggctggttttgaactctggggctcaagtgatctgcccatttcagcctcccaaagtactgggattacaggcatgagccaccccgcccagccccatttcattacgtagccacattggttgttgtttcacagttcactacagcctcaacctcctaggctcaagcgatcctcccaccttagtctactgagtagctgggtctacaggcacatgccaccattcctggctaatttttaaaaaatttttttgtagagacagggtctcactatgttgtccaggttggtctcaaactcttggtctcaagcaatcctccctccttggcctcccaaagtgctgggattacaggcgagggtccccacacccggccatcacattggttaataactattacttccgactgggcgcagtggttcacgcctgtaatcctagcacttttggaggctgaggtgggggaatcacctgaggtcaggagttcgagaccagcctggccaacatgaagaaaccccatctctactaaaaatacaacaattagccaggtgtgctgttgggcacctgtaatcccagctattcaggaggctgagggaggagaatcgcttgaacccaggaggcagaggttgcagtgagctgagatcatgctactgcactccagcctgggcaacaaaagtgaaactccatctcaaacaacaataacaaactgttaacttccatgtccagtctcctgtggccacccccccccacaaccccaagtaaaagggtaacactgggcccagcagggctgctcaggtccattttgattggtcagtgctcacactctaccctgttgtatgttgtgactcccacacctgctggcccctagacactaaatgccagatgcatcccagtcctcgtaacaaccaaaatgcgtcccttgtacatttctttttctttttttttttgagatggagtcttgctgtcactcaggctggagtgcagtgctgcgatcttggctcactgcaacctccgcctcccgggttcaagtgattctcctgcctcagccttctgagtagctgggactacaggcacg

SEQ ID NO: 26767 - DNA, 2300 bp, Homo sapien
aaggtcaggagatcgagaccatcctggctaacacggtgaaaccccgtctctactaaaaatacaaaaaaaattagccgggcgtggcagcgtgcgcctgtagccccagctgctggggaggctgaggcaggagaatggcgtgaacccgggaggcggggcttgcagggagccgagatcgcgccactgcactccagcctgggggacagagcgagactccgtctcaaaaaataaaaataaaaaaaatagaaaaaacaatccaccagccacgataaatggcagacctccttctgatttcagccggtgtggtatgttcctgggctgacagcacttgtctagtcttgctttcccaagtgggaaaggtctctgggaccttaaggtccccaggtggtgacacagagacaggtaggggggcccatagcaaagccaggcaaggaggtcccgagatgattgtgggtggcagggaaagaaaaaatattccttgactttgtgcctggacctggttgtaataaaggcccaagaggtagttcctatcatcgtgcacatttcgctgaaggaagaaactgagggtcagtgacccaagtgaagtgacttgcccaagatcatgcaggaagacatggataattgtaatttgaaccaaggtcccagcaaagtgggattgttggggctgagtgggccggctcctgcatttccttccctctccctgggcttgggtctcccacttgtccagacagcggccgggcttgtcacggggctctgtgcagccttttccactctcccggctgccagcgtcccgccccgtcccctcccagcccccaagggaggaggggagagctgcagagaggaggaggggtcggggaggccggctttataaaggcggctggaacaaccctgcccgccagaccccgtcgcccggatcccctgagctgcccgccatcccacgtgaccgcgccgccccccagctccaccgctgagtgagttggggcgcgtccctatcccgttcccagtccctcgccgagccgcgtggtgcactgaagccggcgtggggaggagagccgatgaaggagaacgctaacatgggggctccaggcagaatctctaatgggagagatttaggacctgagggagccgggagacccgggagcccacggtctggtcggccacctcctctcctccccgggcgcgaggcctatgagaccgcaagccaccctccaagaatgcgcgtgcagtcgttgccgtggcaacgtgcaagcctgcatgggcccaccgctaaaggaaaggggaggttgttgggggtgtgggggctggtcccctggaggtccaaactcatcacgcggcggtagcacgagggaactgggaacgtcccctcccccgtgtcccaaatcctctgggagccagaacgcaagtcgcatcgcctctctgagcctcagtttccacatctgccatatggaggcaagattattggttccaagttccccgaagagttatctggagggtaacgatccaggctagttcccacttatggttggacgtccaaggaatgggtttaagcggctcagataactcctgcgaccccaccccacccccaggcccgctcgccatggccctcttcggggccctcttcctagcgctgctggcaggcgcacatgcagagttcccaggctgcaagatccgcgtcacctccaaggcgctggagctgggtaaggcgcaggggcagacagggacggacgggagcggacggggttggggtcgccccaacagtgggcacgggagctaagtaagggtttctctgctgcttcagtgaagcaggaggggctgcgctttctggagcaagagctggagactatcaccattccggacctgcggggcaaagaaggccacttctactacaacatctctgagtaagtggggggcggggcctcgcgatccggggcggggcctcggcggtggaggcggggcccgagaaatctcagggtctcgggagactggaggctgagtgggatggggcgtggccaaatcgatgaggcaagacttaagaaaccggatggggccgaaaagataaaggccaagccagtcatcataggcgggaccaggcagatgggcgtggccttgaaaatgtagagggggccaagaaggaagcaggaccagtggatgtgaggcgtggtcgaagaacaacagaaaggtggagtcaaggaacttcccaatagatgagagtggagtctcgggcacggggtggagttaatcggaggggtggagaaactgaaggctctaagtatggtttaggatgagggagggggaataaggaa

SEQ ID NO: 26768 - DNA, 2300 bp, Homo sapien
gttcaagatcagcctgggcaacatggtgagacctgtctctacaaaaaatacaaaacttagctggacatgacatggtaccacctgcctgtagtcctagctactcaggaggctgaggtgggaagatcgcttgagcccaagaggtggaggcttcagtgagccgtgattgtaccactgcactccagcctgggcaacagagcaagaccctgtctctaaaaatataaataggcggccgggcgcggtggctcacgcctgtaatcccagcactttgggaggccaaggcaggtggattgcctgaggtcaggcgttcgaaaccagcctggccaacatagcgaaaccatatctctactaaaaatacaaaaaattagctgagcgtagtggtgggtgcctgtaatcccagctacttgggaggctgaggtaggagaattgcttgaacctggtaggcggaggttgcagtgagccgagattgcgccattgcactccagcctgggcaacaagagagaaactccatcttaaataaataaataaaaataaataaataggctgggcatggtgggtcacacctgtaatcccagcactttgggaggctaaggcaggcggatcacttgagggcaggagttcaagaccagcctggccaaaatggcaaaaccctgtctccactaaaaatacaaaaattagccaggtgtggtggcacatggctgtagtcccagctacttgggaggctgaggcaggagaatcacttgaacccaggaggcagaggttgcagtgagccaagatcacaccaccgcactgcagcctggtgacagagcacgactgtgtctcaaaaaaattaattaattaattaaataaaaaaggaaatggaactatttttgtgaatctgtggattatatcagaaaaaaaagacacaatggggaaagtcctaggcaaatcaggatgagttagtcatccttcctagatgagtgtttggtgctaaatacatgctcagcagacatgattattgcttcccctttctttcgtccatttggcaacaaaaaggtggcaagcacccactctgtgccctgtcctagggtccgggaaccctgtaagcagtagatggaggtgggggtgggggtgggggcggggatgctgttcagagcaccttgctccaagggttcattaaaaaatccaccagtggaccgggcgcggtggctcatgcctttaatcccagcactttgggaggccgaggcgggcggatcacaaggtcaggagatcgagaccatcctggctaacacggtgaaaccccgtctctactaaaaatacaaaaaaaattagccgggcgtggcagcgtgcgcctgtagccccagctgctggggaggctgaggcaggagaatggcgtgaacccgggaggcggggcttgcagggagccgagatcgcgccactgcactccagcctgggggacagagcgagactccgtctcaaaaaataaaaataaaaaaaatagaaaaaacaatccaccagccacgataaatggcagacctccttctgatttcagccggtgtggtatgttcctgggctgacagcacttgtctagtcttgctttcccaagtgggaaaggtctctgggaccttaaggtccccaggtggtgacacagagacaggtaggggggcccatagcaaagccaggcaaggaggtcccgagatgattgtgggtggcagggaaagaaaaaatattccttgactttgtgcctggacctggttgtaataaaggcccaagaggtagttcctatcatcgtgcacatttcgctgaaggaagaaactgagggtcagtgacccaagtgaagtgacttgcccaagatcatgcaggaagacatggataattgtaatttgaaccaaggtcccagcaaagtgggattgttggggctgagtgggccggctcctgcatttccttccctctccctgggcttgggtctcccacttgtccagacagcggccgggcttgtcacggggctctgtgcagccttttccactctcccggctgccagcgtcccgccccgtcccctcccagcccccaagggaggaggggagagctgcagagaggaggaggggtcggggaggccggctttataaaggcggctggaacaaccctgcccgccagaccccgtcgcccggatcccctgagctgcccgccatcccacgtgaccgcgccgccccccagctccaccgctgagtgagttggggcgcgtccctatcccgttcccagtccctcgccgagccgcgtggtgcactgaagccggcgtggggaggagagccgatgaaggagaacgc

SEQ ID NO: 26769 - DNA, 2300 bp, Homo sapien
tctactaaaaatacaaataaaattaggtgggagtggtggcgggtgcctataatcccagctacttgggaggctgaggcaggagaattgcttgaacccgggaggcagaggttgtagtgagccgagatcgcgccactgcaatccagcccgggcgacagtgcgagatttcgtctcaaaaaaaaaaaagggtaataatcactacatggtttttaaactttagtgaaagcgcgggctagctggggggcatgagcatggaaaactggttatcccgtaggtcaagagcgaccacgtagtttactgcccaaagcagtacttttttttgagacaggagtctcactctgtcgcccaggctggagtgcagtggcgcgatctcgactcactgcaacctctgcctcccgggatcatgtgattctcctgcctcagcctcccgagtagctgggattacaggcgcgcgccaccaggcctggctcatgtttgtaattttagtagagacggggtttcgccgtgttggccaggctggtcttgaattcctgacctcaggtggtccacctgcgtcggcctcccaaagtgctgggattaccggggtgagccaccacgcccggcccaaagcagggcacttctgaaaaaggaggcaatattagtaattatgccagggcagcaggcataaatcaaagctggccccccacccttccagaactgagacaggacccaggagtctggtttcccatcaggcctcttatctgaacgagaagctctgcgagggcagaactgctgtgcctatatagagctggcttatttctggagggctcaaatctacttggagcaatgctcatgccactgtgagatgatcacggctaaccgattcagcacttaggaagcgccaggtattgcgctgaggacttcacatgcatcacctgagttaattctcaccaaacctttatgaggtaggcggatttattatcttccactgaggaaactaaaatttaaattggttaactccttcaaggccacacattttgggtggaggagcagggattgaaatcagatgaggatcatgaaccctcgttctcaattactactcatatcggtgcctccgtttttcttgagcgtccgcctgcctgcccccacgctggcgtgcagccaggaccatggacatctgagaggctactcagccggggtacctacagcccctggctccacacaagcgccggtctgacagcaggtggcaagcttttcctcttctcaagctagcactggaagggatgcttgctggggagaccggagatgggtggagctaccactcggacgcctgcaggctcctaccaaaaagaatcctgcagggagccggatgaggagcacctcacagctgccagttccctgccaggctacccgctgtagctggtttgagggctcagtgaggctttgaactgcaactaatggccacagatgtcaatgttggaaaggccctacaatgcatttagttgatttcccaactctgccgaaagccatctctattacttgcccccgaaggctagtttaagttgcttctactcaagagcatttacagcttgggttcgatgtatatgtagcccgggcatggggcagggcttcttaacatttggacaccacgcagcacaaaggcccagagagggaaagagactggctggaagaggcagagccgcgcgggtgccaggacccaggtccttgctacgtccggagcctacgtcaccacgatgcctcccctgggccggcggcagaacccgagacccccgcaggttctaagacagcccccacgccccccagtgcgcacgctcagtccaaccccgccgcgcaccgcccaccgcgaacatccggctcctgcgtgtgtgctcgagggggaaactgaggcggggacgtgccagtgaattcattccttcctcagtccacccgcaggcctacaaagctgtctccccttcctcagcgccacaaggaacagcagggacggatgggaagaaggggagggggccgaaagcaagctgggtgcgaggagccagccgaccctgccacactcaagatggcggcgcggccgcggcgaggtccctcagaggcggtaccagcgcatgcgcagcgcggagtcccggcccgggacacaagatggcggcagcggcgctggggagggcgaggcggaggcggcaaaacgggcggtcgagcagaacgtgtagccgcgtcccctccagtccgctccgggcaggtaagagtcccaggaagccatggtcccgcagcgagccgcgccagggtctggggatccgaagctggggggcggc

SEQ ID NO: 26770 - DNA, 2300 bp, Homo sapien
tcttaaaatttttaataactttttaacaaggagctcacatttacattttgcacactgggccccacaaactctgtagccagtcctgccaactgaagtacccttaggctgggcacgtggctttggcaacttgggagctgggctaggagttcaaaaccagcctcggcaacatagtgagcccccagctctacaacaaataaagctttttgtttggttggttttggtttcctttgagacggagtgagactccatcacccaggctggagtgcattgcacgatctcgactcactgcaacctccaactcctgggttcaagcgattctcctgtgtcagcctctcagtagctgggattacaggcatgagtcacagctggctaattttctgtacttttagtagagacgggatttcaccatgttggccaggctggtctcgaacttctgacctcaagagatccacccacctgggcctcctaaagtgctgggattacaggtgtgagccactgcgccgggcccaaataaaaaaaaattgcacctgcagtcccagctactcaggaggctgaggtggaagggtcacttgagcccaggagttcgaggctgcagtgaagtatgatcatgccactgtgctccagcctgggtgacagggcaagacctcatctcttaaaaaataaaagaggccgggcgcggtggctcacgcctgtaatcccagcactttgggaggcccagatgggcggatcacgaggtcaggagatcgggaccatcctagctaacacagtgaaaccccgtctctactaaaaatacaaaaaaaaaaaaaaaaaaaaattagcccggcgtggtggcgggagcctgtagtcccagctactcgggaggctgaggcagaagaatggcatgaacccagggggcggaggttgcagtgagctgagatcgcgccactgcactccagcccaggcgacagagcaagactccgtctcaaaataaataaataaaaataaaaaataaaataaagtacccttagaccagagaaaaatcaacaaacatacctatcactgatctgtgggggcacaatcccaagcctcccacagcaagtcaaagacacgctctgaataatgtcttgcaaaaacaaaaacatgcaaacacattatgtgacacatcttgttcgcctttattgaaaaatattttccccaagaaacatcctgtgatattgatgcaccgggtagatgaactttgcagaatacgcacaagcggcacagcttagtgtgaggctaaatggggacactgcagtatttccaaagccagctgtgcatcagaatcatcttggagtttgtaaaaaaaaaaaaaaaatcagactcctgtgcctcactgcgcatctcagaagccagaaataaatacggaggtgaggcacacaagaatttgtatttttaaaacgcaccgtaagagtgactgggagacaggatgactcattttttcacactatttgaaaaaatgtacccattttttgcaattaaaaccatttttaatttcctatgtgacttgagcgcagcaggtctgtggccgaagtaccagcccctgggttggacagacccggattccgggcccttctgctttccggcttataaaccggaatcactcgaccgttatatgtagagtccagcattgtacgctcccagtaagacataactgctcttaagttaacgtctttatttatcctgtggcttcccgacccccacgcataccgcagtttgagaattaccgctgctcaaggataaacaactctatctgcgcaaccagaaaaacccaccagaagccagagtccgagtccgggattggaggcacgtggggcgggaccatctccgcaatgtaccaatcagaattctccggcccagtagggaggagtcaaagggcgaacaaagtacgcaggcgcgacggcgcacgaaggcgagaggcgagctccagcgcgcgcgcgcgcgcgcaccttcccctccccctaccccagcgagggtgggctgtttggcgcgcgcgcgcgcgccggcccatctctcgggctccgccccccgccccgccgcgcgctcccgcccccgggctgaggcgactcagagtcggagcccgacacaaaggcggtggcggcggcagcagcggaggggccctagagcccgctccgctggggctctccgggcccacctccctcacttcggccaccggcgcggccgcccacccgcgggtctaagatggcggcggcaacagagacagggcaagcggcagtcccgagcagaaagcgccggaggggccgccgccccccagcttcggatcc

SEQ ID NO: 26771 - DNA, 2300 bp, Homo sapien
ttttattttttacacttaaatcttactccacctggaatttatttctggtgtatgcagaaaggtagggatcgatttttttttttccagaagtcatccgacgtggtatcttcacctgtggtttgaagtgtcctcctcatatactagattcccaaatatgtaggagtctgtttctagacttgagttctgttctattgatttgtctcctgttcccatgccaatctcatgtggtagagtttttctgcttacaaaagcacatgcttgtaaaagaaacaaaatgggcctggcgtggtggcttatgcctgtaatcccagcactttgggacgccaaggtggctggatcacctgaggtcaggagttcgagaccagcctgaccaacatggagaaaccccattgctactaaaaatacaaaattagctgggcgtggtggcacacgtctgtaatcccagccactcgggaggccgaggcaggagaatcgcttgaacccaggaggcggaggttacggtgagccgagattgcgccattgcactccagcctggccaacgagcaaaactccatctaaaaaaaaaaaaagaaaaaaagaaaaaaatgaacattaggaaatgtttcagtagaaggtgaaagtccttggcatttctcccctcccatcagatacccagtaaatgggttcagaagaatttcttcagggatttgttcatgttcataccaacacctagacctttgttccttaaaaaatgggatcacattattggctgctcctcagcgtcatcttttacctaacagcatgtgatgcacggcctggccagcacctgcagttacccttattctcctaagatctccatcttgcatctctgtatcatttgatcacatggatgttctcagctatagttaggcagtcctttattggctgggttctttcgttttatattaattcaagcagtgcttcactgtacatatattttcagtgctcataaattttttttttttttgagatggagtctcattttgtcacccaggctggagtgcagtggcgtgatgttggctccctgcaacctccgcctcctgggttcaaatgattgtcctacctcggcctcctgagttgctgggattacaggtgcacgtcaccacacctggctacttttttgtatttttagtagggatagggtttcaccatattggccaggctagtttcgaactcctgacctcaagtgatctgcctgccttggcctcccaaagtgccaggattacaggtgtgagccaccgtacccagccaacatctttgtagtgtttttaaaaagcctcctacaagaagaattagtgggtcagagggtatggtgagaagccttgtaaaaagatacgccagtatacgtggccaccagtagggtatatttccctgcattcatgccaatacactgggtattatcagtctttataaatcttttttttttttttttttttgagacagagtcttgctctgttgcccaagctggagtgcagtggtgcgatctcggctcactgcaacctccgcctcccgggttcacaccattctgcctcagcctcccaagtagctgggactacagacacccaccaccacgactggcttcttttatttttttatttttagtagagatggggtttcaccatgttaagcaggatggtctcgatttcctgacctcatgatctgcccgcctcggccttccagagtgctggaattacaggcgtgagccaccacgcccggcctcagtcgttataaatctttaccaatctcacacttgtaatcccagcactttgggaggccaaggcaggagaattgcttgagtccaggagtttgagaccagcctggacaacatggtgaaaccctgtctcttaaaaaattagccgggtgtggcaatgcatgcctgtagtaccagctacttgagaggctgaggtgggaggatcgcttgagcccaggaggttgaggctgcagtgagctgtaatcgtaccactgcactccagcctgagcaatacccagtctcaaaaaaaaaaaaaaaaaaaaaaagtaattgtatgaccgtaaatgaggttgaactcctctctgtatgttcagagaccattttattcctttctaaagtacctgtttgtgtcctgtatttgtttttctattgttagcttttagttattgctttgcaggagctccatatatgagggaagtccactttttatgagttgtgaaatatcccccaaccccaatttctttgttttttggcttcattttatggttaattttgctctaggttttatctttctctgtcatgattagaaaaa

SEQ ID NO: 26772 - DNA, 2300 bp, Homo sapien
ttaagcgatctttctgcttcagccttccgagtagctgggactacaggtgctaaccagcacacccggctaactttttattatttactaatttttttttgtagagacgatgtcttgttatgttgcccaggctggtctcaaactccgggccttaactgatccttagagcttttaatatgcaagtaacattttgtgattgacagacagaaagaatgtaccatttcacaaatatatttgagtgcagaatatgttatttacagcgtgccccttagcgttttccccagtgaactccagctggggaagcactattctaagagaaaggggccttggcagggagtaggctcatagctgaggctgggtctgttcagtgtgagagggtctagagtgggcttggggaagctctggtctaattcctcggccttttccccacaggaagaagaggccagatccggtgagtctggcgtgctggcctgggaagggaacctgcccgggggttgtttatgggggtgaggacaagaggggaggttttatcctccctcctccacttctttctccatctggccccttcttatgccttcctagactccaaagctgagctctttcccctgccctgtgtgtggccgtgtgtaccccatgcagaaaagactcacgcagcacatgaagacgcacagcactgagaagccccacatgtgtgacaaggtgggtgggagccagggctggggctgagaggagggcctcccctgggtgatggagggtgatcgccatctcactgctctccacccctcacagtgtggaaagtcctttaagaagcgctacaccttcaaaatgcacctgctcacgcacatccaggctgttgccaaccgcaggtacatccccttggaggcccctggggacgggagcagtccccagctcattactgagcttccctccctctaaccgcctccaggttcaagtgtgagttctgtgagtttgtttgtgaagacaagaaggcactgctgaaccaccagttgtcccacgtcagtgacaagcccttcaaatgcagcttttgtccctaccgcaccttccgagaggacttcttgctgtcccatgtggctgtcaagcacacaggtcaggctggacacaccccagccccactcaccagccctcagtgccctgtacccctgatcagaggcttagctcccatcctcttccttccccctcggtagccccagccacagaacagcccaagtccttcaagtgtaaagagaatttcccataggcgtattcaccctaacctgagcctgggttcctgcttggctggttgttctctggatggctctgggccggtcgcttgccctctccgagccttccatatttatgaaatgggggaatcagagtgcctgccatatggctatgatgaaagtaagttccatttgttccttgagccttgtgtgtgctggcactggggctggagaggaggctcttccagaccctgccttggcagatgaagctgcagaagcaacgccattggcttggcccacagaagctgcactgcaaacattgtttctttggtgcctagctccctggtcagcacactaggggcgattacagaaaaggagccaggggttcccttagccagagtcctgtgatgacccacaggagcttgtagtcacatgactttgcaaataggtaggcacaggaaggctcttgagtgcagagggcggccctgattcatttctgtcctgggccaccagaatggacagtggcatgtgtttgcctacatacgggaatgaatcgctggaagtcagtcagttggagagatccttagggtcaagaaaggattcctggagggggtaggctagggacgggcagacttaagcatgccccaacatgtgcctccaggggccaagcccttcgcctgtgagtactgccacttcagcacacggcacaagaagaacctgcgcctgcacgtacggtgccgacacgcaagcagcttcgaggaatgggggaggcgccaccctgaggagcccccctcccgccgtcgccccttcttctctctgcagcagattgaggagctgaagcagcagcacagtgcggcccctggaccacctcccagttccccaggacctcctgaggtaaggtcggggcatgggtcaggatgacagagtgaggccgcttctcccagccccagcatcatttgcacattgagatgcaacaaaataatccctgcctcttgagactgtggtaaaaactcactgagtcacacatatgccagccctaagcttagagtaagggtggctttctagtgctggtaatagagaatg

SEQ ID NO: 26773 - DNA, 2300 bp, Homo sapien
gccccgaggccggcagcttcggctccagcgccccacccccagtaccccaaggccccgaaggagacctggccggccccggaagctgccccgcctggagatctcagacctcccagatggtgaggcttggtcttgggaggggctcgtgtgggtgggtcaggagtggcctctctccctgcttgtctctgtggagttctggggactgagtgtgccctgcagggcagctgtctcaaaccgggtcacctgcaggcctccagggaaaggggaaagccctcaaagactcaagctcaagaaaccctgactcaggaaactctctcagctttatggaaatgcctttcaccacaatttgtcatagcaaaagagaaatttgggactttatcactgaatgcgtaagataagttttaaatattactgaaatgagaagagaggaataagtctgaggcctgggactatcagaggagccctggttcggagcattactggctggggacagaaaggacccagccgtggtgtgagcaccagctctgccgcctgcagtctgtgtgacttggagcttaaatctccagtccctttatttatgcatggaggttatagcagcatgccttttaggattgcttaagggttaaatacacacaaaagagtacagtggcagctgtttatggttggagagttgttgtattattattattattattattattattattattattattttgagacagagtttcactcttgcccgggctggagtgcagcgtcatgatctcggctcactgcaacccctgtctcccaggttcgagcaattctcgtgcctcagccttctgagtaactgggatcacaggcgcccaccaccacaccgacttaatttttttagtagagacagggtttcaccatattggccaggctggtctcaaactcctgacctcaggtgatctgcccacctcagcctcccaaagtgctgggattacaggcgtgagccaccgcacttggcctattgtattctttagtctctatttcaaaaaggcctttttaccgaggcacatatgtatggaaagttacacatattctgcccaggtcaatgagttttcacaaggtgcacacacctgtgtaaccaagcacctgtataacccagtcaagaagcagaacattacctgcattgtctgtattgttaatttgtctagtacatatttaatatttaaatactgtcaatgtttttgaagaggtaacagatttagattgtccaaatggtttgcaagcatggaagtcacatctccctccttccctcccatcagccctccagctgcctgacctccctggggaatgccagtgttaaagcactcctattgcttcccgagccttagattgttctgtgaagtcaccaaagccgccattctggcctcccttggataaatggggcaaatgagactccgggagaggaatggctttgtctgtaggtgcacagcatgtcagtgacagagccgtgcctggaacccaggtctcctgactgggaggtcccagctctcgccgttgctctaatccaggccaggtcctactgtgctgacagaatgtcggctgttgggcggtagtatccatgctgccctctaaccacaggctgtctgtgtcatgtgactcaatgcacccatcagtggtctgtgatgagtgggtgggaggatattttggctggcctctggcccacttgtccacgtctgtcctggtgtgtcagtggctggcttgtgacctggcatgtccgtggcaggtgtggaaggagagcctctagtgagttcccagagtggacagagccctccagagccacaggatcccgaggctcccagctcctcaggcccaggacacctggtggccatgggcaaggtgagcaggacccctgtggaagctggtgtgagccagtcagatgcagagaacgcagccccctcctgcccggatgagcatgacactctgccccggcgccgaggtcgaccttccaggcgcttcctaggcaagaaataccgcaagtatgtggagcagaggtgagggtggggcatgcatgtggttaagccaccaaccccaccagacctttccgccacactctcatcctgcaggtactattacaagtcgcccaaaccacttttgaggcccttcctgtgccgcatctgtggttctcgctttctgtcccacgaggacctgcgcttccacgtcaactcccatgaggctggcgatccccagctcttcaagtgcctgcagtgcagctatcgttcccgccgctggtcctcgctcaaggtgcgggagccaaagaggcttggggctca

SEQ ID NO: 26774 - DNA, 2300 bp, Homo sapien
atcatgccactgtactccagcctgggcgacagagcaagactctgtctcagaaaaaaaaaaaaaaagaaagaaaaagaaacagagtcttgctgagttgcccaggctggtctcaaactcctgtcctcaaacaatcctcccacctcagccttccaaagcactgggattacaggtgtgagcggctgtgcctggccctaaaatatttcagtatgcagtcatcataacaattactggtgagttttggccgggcacagtggctcacgcctgtaatctcagcactttgggaggctgaggcagatggatcacaaggtcaggagatcgagaccatcctggctaacacggtgaaatcctgtctctactaaaataccaaaaaaaaaaaaaattattggtgagttttttaataccaattttttgaaattcattattttacacttaattatatctcagtttggactaggcatatttcaagggctcaatagctacatatggctggtggcagctgttttggatagggcagccgtagagtttgtggacttcaatgtttatttaaacttttttctaactggctgtacagtgtctggaggaagggttgccttttccctattcacatgaaggtgctttatgagctagtggtaggtgccaggaagggtagagaaagaacttcaggggctcagggcaggaacgccaagtcagccagaggagatcaggagggctttctggaggaggcatcgctgtgggcttggaggaggagtatgcaggggtagggaagtgagctgggcaaggggtcagggctgaaagggcaggtcccgccactcactgttcaccaactttactgtcccccacagaggatagcgactataatccagctgaggatgagccccgaggccggcagcttcggctccagcgccccacccccagtaccccaaggccccgaaggagacctggccggccccggaagctgccccgcctggagatctcagacctcccagatggtgaggcttggtcttgggaggggctcgtgtgggtgggtcaggagtggcctctctccctgcttgtctctgtggagttctggggactgagtgtgccctgcagggcagctgtctcaaaccgggtcacctgcaggcctccagggaaaggggaaagccctcaaagactcaagctcaagaaaccctgactcaggaaactctctcagctttatggaaatgcctttcaccacaatttgtcatagcaaaagagaaatttgggactttatcactgaatgcgtaagataagttttaaatattactgaaatgagaagagaggaataagtctgaggcctgggactatcagaggagccctggttcggagcattactggctggggacagaaaggacccagccgtggtgtgagcaccagctctgccgcctgcagtctgtgtgacttggagcttaaatctccagtccctttatttatgcatggaggttatagcagcatgccttttaggattgcttaagggttaaatacacacaaaagagtacagtggcagctgtttatggttggagagttgttgtattattattattattattattattattattattattattttgagacagagtttcactcttgcccgggctggagtgcagcgtcatgatctcggctcactgcaacccctgtctcccaggttcgagcaattctcgtgcctcagccttctgagtaactgggatcacaggcgcccaccaccacaccgacttaatttttttagtagagacagggtttcaccatattggccaggctggtctcaaactcctgacctcaggtgatctgcccacctcagcctcccaaagtgctgggattacaggcgtgagccaccgcacttggcctattgtattctttagtctctatttcaaaaaggcctttttaccgaggcacatatgtatggaaagttacacatattctgcccaggtcaatgagttttcacaaggtgcacacacctgtgtaaccaagcacctgtataacccagtcaagaagcagaacattacctgcattgtctgtattgttaatttgtctagtacatatttaatatttaaatactgtcaatgtttttgaagaggtaacagatttagattgtccaaatggtttgcaagcatggaagtcacatctccctccttccctcccatcagccctccagctgcctgacctccctggggaatgccagtgttaaagcactcctattgcttcccgagccttagattgttctgtgaagtcaccaaagccgccattctggcctcccttggataaatggggcaaatgagactccg

SEQ ID NO: 26775 - DNA, 2300 bp, Homo sapien
gtcccagagtctgttgagacccgattatggttttgaggcctcggagcgaccttccggaacactgaaaatgtgtctttcccggggccagcgggggaagtagttccggcctacaataggccgatgggttcctccgcagcggaggaaagaggatggcgacctcgtcgatgccggagtcagagaggaacgtggctacgaaagcctcgggtgagcttcgggtagagttaggcggccccaccgtaccctgccgtggagtgaggtcacactgcggggatacccggaggcgaggtcccaggccggcggggctgtccgaacagggccccggggtcccaggccctttagtcgctctcgcacttgcctgagcggaaacccggcgccaccacaagatggcgtcgggcctggagcacaggcagcgccggggacagccccaaatcgccaggccccgagaccgtcgctgtcagccgcctccgcaggggaaccgggggggagcgaaccactgacccagggggccagcgggctgtaccaccggccctgcaacccggggggacgcgggggccgaagggctgaaccactgggcccggatggggctcacagagcggaacgctccacgagaatcgtgggggcgagggaaagggtcaagattaccagccattgaccaccctcccgggaagggccttagcctgggaagcacagcttctccgtcaagtttttcccgagctcccctcgcaatacaccaggaagctccgccccgtcggagactcaatcttcgcatctgcaaaatgggcgcaggggtgcaaatgggtggccgtggttgccggggctggggagatggcccacttgttccagccacggtcacctctcttctcagagtgaagttcccagaccctacgccccgctgtcaggcagcccgccgatcagatggaggagaacgaggtggagagcagcagcgacgcggcccctgggcctggccggcccgaggagccctctgagagcggcctgggtgtgggcacctcagaagccgtgtccgccgacagcagcgacgccgcggccgccccggggcaggcagaggccgatgactctggcgtggggcaaagctcggaccgcggcagccgttctcaggtatggacccggctggacggcgtgggtggaggcaaggaccgcgagcagcagtgcctgacagccaagaggaaacaaggcttgtttgtagctaatacttggtgtttctggtttactgtgagccaggcaccaagccaaacccctaaaatggattttctcatttgagcttcataccttctaagacacataccattttttcccacatcttatagaaaaggatgccgaggtacagagtgcagacagagccaggattcaaatctaggctgtggtcttagctactatactacccacagtcctcacactttgagaggcagatgtctaggccaggagtggtagctcatcgcctgtaatcccagcactttggaaggctgaggtgggaggatcacttgagcccaggagttggagaccagcttgggcaaatagcgagacctcatctctacaaaaaaaaaaaaaaaaacgcaagtgccctgggttaagactgggtcctgcctccagtttactgggagacctctttgagcctcagtatcccggctaaagtaaagcagaaatacttgctttcaagggtgcttgattgtgagctcccaccagacatcctcttgcaaacattttgtaaaccatctcctcctggctgtgccacttcctagccgtgtgatcttgagcaagctacccaacatctagctctgtttcctcgtctgtaaagtgggaatggtaaatatacctgcctcatagagtttttgtgaggatgaaatgaattaacatatgcaaagctaataattaaaacagtgctcagcacattgtaagcactcagtaagtattagccattcttatatgcaagataatggtcatattcagtatatcacgtgatagaagtacacagcagtggtcatcactttggggtcctggggtttcattagttcagcagagatgggggcctaccatgtgctcagcgtgtgctgggccctggaaatacagcagaggaaaagacaagtttggtccaggcccttgtggagggcacagtctggcatggaggctgttaaaaggcacaatgaaccccacagtggtgtggtgctggggacacaggcagctgcagcactgaggatgaagaagtcctgacttggcctcaaagccagcattgacttcctagaagaggtaccagctaaatggtggtgagaaggctgggtaagatt

SEQ ID NO: 26776 - DNA, 2300 bp, Homo sapien
tcatcatgccagtgctgacctagctcttcagagctgctctggggcctggtcctgctggttgcaagggataggggatgagggtcctaacctatccagaggcctcctgttccattccctcaacccaaaagggaaacctaggaaagaaaactttacctaagaaaaggaccagatgaatcccctcatacacaagtgcacacaaataacagctcaaagcaccctttgtcctttttatttttatttatttatttattttttgaagcggagtttctctcttgtcgcaatggcacaatctcggcaacctccgcctctgggcttcaagcgattctcctgcctcagcctctcgagtagctgggactacaggcgcgcgccaccacacccagtgaaattttgtatttttagtagagacagtttcaccatgttggccaggctggtctcgaactcctgacctcaagtgatccaccggcctcagcctcccaaagtgctggttattacaggtgtgacccaccgagcccggaccttttctccttattaataggtcttctccttaggactttttgtttgtttgtttgagacaagagtttccgctgttgttccccaggctggaaggcaatggcgtgatctcggctcaccgcaacctctgcctcccgggttcaagctattgtcctggctcagcctcctgaatagctgggattacggcatgcgccaccacgcccagctgcttttgtatttttcgtacagatggggtttctccatgttgatcaggctggtctcaaactcccaacctcaggtgatccgcccgactcagcttcccaaagtgctgagattacaggcgtgagccaccgcgcccagcctgcttaggagtttttttgagatttttttcccccaaaatttgtatctttcaattaaggaaaatagcctatggaactacagagacttagggacaaaaaccagagcgccttactccctcttgtgctcttccactgcaaactgctaaaagtcttaaaacagaaggtgacatttccggaggaaggacataccttaagggcagctgacttttaattaaaattttttttctttctccacttttaaaggataggtagttgacttgtatttatttattttttgaaagagggtctcgctctgtcgcccaggctgaagtgcagtggtgtgatcacggttcgctgcagcctcaacctcccagactcaagcgatcctcccacctcagcctcccgagcaactgggattataggcacgcgccaccatgcctggctaatttttcttttttttcttttttttgtagagatggggtctcgctcttttgcccaggctggtttggaactcctgggatcaagcgattctcctgccttggcgtcccaaagtgttggaattacaggcgtgactcacagcgcccggcctcagctctattaatgttaacaaatatgtatacaaacctaagggacaagcattaacttctttccatttccccgactcctgccatccgtacttagctcctgagtccctttattggatgtgattttggaccagcccttcccatacccagacctcagtttccctatctgtacaataattatacattcccttcccaacaaaacacatcaaacctaacgggcagagctcgattgggttgcagcagcgcgctaagtaataagtaatgagtcaggtaaaatgactgacaacatgaattcctctttggccaagccaaagtcgcccgcggccacacgctcttccgggctgttgtaggaggggcgcggccaagccaccgggagccacgccccccactgggagccacgccccaagagagcggggcgcgcattcgccgcgcccaaccctgcggcctagggaagggaccagaatgacgtcacaaccacttcctacgtaacactccgccgagataaagtagtccccaaaccatagtgggctcagtgccaaacaccgggcgacgtataaagtcccagagtctgttgagacccgattatggttttgaggcctcggagcgaccttccggaacactgaaaatgtgtctttcccggggccagcgggggaagtagttccggcctacaataggccgatgggttcctccgcagcggaggaaagaggatggcgacctcgtcgatgccggagtcagagaggaacgtggctacgaaagcctcgggtgagcttcgggtagagttaggcggccccaccgtaccctgccgtggagtgaggtcacactgcggggatacccggaggcgaggtcccaggccggcggggctgtccgaacagggccccggggtcccagg

SEQ ID NO: 26777 - DNA, 2300 bp, Homo sapien
ctctgagccttagtttccccctctgaaaacaggagggatactcattaaacttaccttacaggtggtgaggatgaaacgagaggcttatagagaacttattacggtgcttgacacagtaaatctcaaaaaatgcattattattattatggttcagaggtaaagtgacttgcccaaggtcacatagctggaaaatggcagagccgggatggaaatccaggacttcgtgactgcaaagcagatgttcattggttagtgaactttagaacttcaacttttctgtaaaggaagttaattatctccatctcacagtctcatttattagataagcatataaaatgcctggcacatagtaggccctttaaatacagcttattgggccgggcgccatggctcatgcccgtaatcctagcactttgggaggccaggtgggcagatcacttgagtcagaagttcgaaaccagcctggtcaacgtagtgaaaccccatctctactaaaaatacaaaaaatttagccaggcgtggtggcgcacgcctataataccagctactcgggaggctgaggcaggagaattgcttgaacccgggaggcagatgttgcagtgagccgagatcacgccactgcactccagcctgggtgacagagtgatactacaccccccaaaaataaaataaaataaataaatacaactttttgagttgttagcaggtttttcccaaatagggctttgaagaaggtgaatatagaccctgcccgatgccggctggctaggaagaaaggagtgagggaggctgctggtgtgggaggcttgggagggaggcttggcataagtgtgataattggggctggagatttggctgcatggagcagggctggagaactgaaagggctcctatagattattttcccccatatcctgccccaatttgcagttgaagaatcctaagctgacaaaggggaaggcatttactccaggttacactgcagcttagagcccaataacctggtttggtgattccaagttagaatcatggtcttttggcagggtctcgctctgttgcccaggctggagtgcagtgacataatcatggctcactgtatccttgaccttctttctgggctcaagcaatcctcccacctcggcctcccaaagtgctaagattacaggaatgagccaccatacctggccctgaatcttgggtcttggccttagtaattaaaaccaatcaccaccatccgttgcggacttacaacctacagtgttctaaacattttatatgtttgatctcatttaatcctcacatcaatttagggacaaagagccccccaccccccgtttttttttttacagctgaggaaacacttcaaagtggtaagacatttgcccgaggtcctgaaggaagagagtaaagccatgtctgctgttttctagaggctgctactgtcccctttactgccctgaagattcagcctgcggaagacagggggttgccccagtggaattccccagccttgcctagcagagcccattccttccgcccccagatgaagcagggagaggaagctgagtcaaagaaggctgtcagggagggaaaaagaggacagagcctggagtgtggggaggggtttggggaggatatctgacctgggagggggtgttgcaaaaggccaaggatgggccagggggatcattagtttcagaaagaagtctcagggagtcttccatcactttcccttggctgaccactggaggctttcagaccaagggatgggggatccctccagcttcatccccctccctccctttcatacagttcccacaagctctgcagtttgcaaaaccctacccctcccctgagggcctgcggtttcctgcgggtctggggtcttgcctgacttggcagtggagactgcgggcagtggagagaggaggaggtggtgtaagccctttctcatgctggtgctgccacacacacacacacacacacacacacacacacacacacacacacaccctgacccctgagtcagcacttgcctgtcaaggaggggtggggtcacaggagcgcctccttaaagcccccacaacagcagctgcagtcagacacctctgccctcaccatgagcctctggcagcccctggtcctggtgctcctggtgctgggctgctgctttgctgcccccagacagcgccagtccacccttgtgctcttccctggagacctgagaaccaatctcaccgacaggcagctggcagaggtgggcaaacacctagtctagagttggggagggctgtccgtga

SEQ ID NO: 26778 - DNA, 2300 bp, Homo sapien
aagacacacacacacacacacacacacacacagcctctgccacagcacacagcattccaggctcatacacacctgcacacccaaagcttgggggctgtgtttcacttcgaccccagcgaagtagtgtgagtaccggcatctgagagtgtgaatgggaaaacagcaatcaccttgggacatgagagagggccgtcttattcctaagccaggggatgaggagcgagagaagagaaggcaagggtagagaagcaggatcccacagccaccctcctctcatcttatgagcattacacacctactaagtgccaggctctgggtctggaactcagaacacaaagataaaggagatggtccctgtccttgagatgttccaatggaggatacccataagtaaagaaaacgactgccatccaccgggacatgtgcactaagggtgcagtgggtgggccgaagaggaaactgaaaaggtttttggaaaaggttaaatgagctataacttacagaacgaataggagttttcctggctgatggaggtgggagaatgaatgtggacaagaacaccagaagcaaatgaggaaagagaatgacagacttaaggctttggcctttattttgcaagtgatggggggcttctgtggaggagggctagggaaggactggaggcagggaggccagtggagaggatgtggtcgtggccatgtgaggcttggagcagggcgatgatgacagaggggggaccgatgctgccagattcaggataagtttcagaggtgaatggccaagacgtggggatcagttggatttgctggaaagaaaaaaggaagggttgagaatggctccagaatttcttactttcaaatctgggaggctggtaaggtcattcatgaaaatgagaaaagagattatgagaaagatgaagagtggaaggagcccaagaaatccaagtggccacaaccaggaggcgttcggttcccgggactggggccattcggaattccaggcctcaatttggtcatctgtacaatgaggaggtccgccagataaccccctaagggttactctaggggtttcggcgcttgggtttgcttcggggcgagctcacctgcggctcggcagcgacccctggcggtctggggaggcttctcctcctccttctcctcctcctcctcttcctcctcctcttcctcctcctcctcttcctcctcctcctcctcctcctcctcctcctcccctcgctggggccactacaagccgattcgccttgttccttccagacccgagggcctcagagccagggagaggacccctgatgagtgccccctgaggggagactgtgcacgcgcccaggatgctacttctccaccgaaggccagaaggatctttcccctcccctatactctgtgccctgcgtgtaacttccattacaagaccctgcacagggcccgcgaggaagacgcccccaaccccgcctgagctggctcctcccaacccttacggagctcgagcagacaaggagctaagtgggtccccaagagtcgggatcagcgaccctacggcatcctccctgaatctcgctgcccaggatccatactaacttccctgcctcccgtctccttcccgggatccccagtcgctgtccgctaagcctccagggagctagaggattggaggatccgccaggcaccgaggacccgctgacctggcacctgcctcggcaaccctgactcagttttcctcccgccctcgaccccacccccctcccaggccccactcccatcctcctggcccaactcattccctactagtcccgccctttcctgaccccaaaccaacctagtcccgccgcctcccctttaggggctcctgaccatcccccttcaacacacagccccctttttccctagttccacctcctcactctggtcccgctccctactcgagatgtccccgcccctttagtgccctacggcctactctccaccttgaccccggcctttccatcaccagacccgcccccttcgcctccgtccaaaccccttccctggccccacccctttccctcgtggccacgcccacctcgcgtttggcccctccccctccacactttgcgttccgcggccccggccccttggtttcctagtcctggctccattcccctctcaggcctagggctgggacccctccccgcccccggtcttggccctgcccccttcaacagacggtccgccccggcccctccccctcgtcccgcccggccctggcaggccccgccccctgcggcctctacctttgacgtcttc

SEQ ID NO: 26779 - DNA, 2300 bp, Homo sapien
gctgctgctgctgctagtgctgtgtgtgtgtagagtggagtggcatgcttaaaaatttttgaacactggcttcttttaacctctgtcaccaattcaaactcatctcacccttttggtggtttttttctctgggagagccaagaataccagtgcccacaacttgtctgaatagctaactctccaccctgaaaggtcctttgggtatccaaaaaaccaagtggcagcgatacttgattggtaggtccctcagaggcacttttgagtcagctgctgaaaactccacggttgacccaatctgaagccactgacaaattgtattaatacaagtaaagctgagccctggatcctgtccatggtcctgaaaaaagtcctgtcctataccccggtctccagggatatgaatggctctttaggatttttgcaggttttctggaggcttccccttcagttgcaagccaagagtccattctagccctgcacctctgaagcctgagcacaagaaaaggaataaagcacatctcagatgtagtgcctgtttgtttgtttgtttgtttgtttgtttttcaggagctaataatcagaggctgctgaggggcatggatatgactgcatccttgtctcttctatggaggcaagacgacttttataagttctatcaatgaagagagtcctaaactggagtaaagcaaactggatgctagaccaaattctgccatccactggcattatgtccacaggcagtcattttccctctatgggccttagttttttcatctgtgaaatgaaagctgtgtgtaagatacaatgactgatcttttcccaaccgaagaacttttctggaacttagagagccagggagagagctagtaccagtgtgaagattgtttaccccgatctgctcccaccctcagatgtttagatcttctagagactcaaagctttcaaacctctgatgccacttcctgagatgtctgcaccactggctcaaacctggactctaggggctctgaggggtcccaggatgatcaagcttctgggggattggcctaagggaagaggggaggaggacagagagcatgtcggctctggaagcctcagaaagcaatcctggattaggggattagacacttctgccccaggagaaaatctggtctcaaaccgacaggcggcctcattccgccctcccccactctgtccctggccagcctcaggaccggcctgtcctccctagaggctgcaccatccctgatggaaagtcagtgctccctggaaactcactgctgcctcttctgctcctcctcaccaggtcttatctctagatcagtccgcagtcagaaggtccctggctgtgggctccagggacttgtcttgggggtgggacgctgggactcttgtcagtctaagcacaatgagagagttccttggaacttctcaggcgctaccccacccattttaagacagattgggtcagtcagcccagtgacctgaacgcccctgggggtagcacattgcttaattatgggccctgggctctacatgcctccagctccaatctcttgagcagtggtatgaaagagggtctggttctcctcccccacttcagggctggcctctccagtcttgcagagaggcttcccaagggccccatgttccatggcgcacctccacggccacttcagtgccctttatcttccccctgggggttaccccagacccccagtcaagcagccgctgcggggccgcctccccgcggccgcgacctagttccctgccgttatttttagggcgcgggatggcacctgcccacgtgccgggccccgcccggagagtgggtggggggagctgcgtctgctcaagggaggcgaggccctgtcccccgaagcacccccttcatcccacccacgcaatcccccagtttttgtgcaagggggccactagtcgggctctgcccgcccctcatcttctcttctctctccctcccgctctccccccaaaaccccgccagtggctcacgcctcctgcatacgggatgaggtgagcagcgccgctgctgagagggggcgcgcgcgggtgtgagcgtgtgtccgtgtgcgagtgtgtgtgcgccgggcgggcgggcactgcagcttcttcctccgtggagcggagagcgagacagagctacagcgaacgagagagcggcgaaggcgggtagaggggcgcgggcgaggcggcgcagccatccccggaccaggggccgcgccgccaccatgctaaacaacctgacggactgcgaggacggcgatgggggagccaacccg

SEQ ID NO: 26780 - DNA, 2300 bp, Homo sapien
ctaccccagccacacctgacgctgtctgggtggcgccagctccagctctgccttgggctcaaaggaaaagaggtggtgaggtccggattactcagtggcgccagctctgggaggtgcgtgagatgtcaagctaggtgcgcaggtcagggccctggggctggaggtactgtacccagtcccagatggtgctggaacgagcatgcagtgcctgacccccttagtaatgtgccctaggggaagggaacccggccaccgcgccttctctaaggacagagcacgcctcagaccaggctggtggagcggaagggccaaggatgagctggggaagccaaaggccctgggtcctagttagaggagagcagacaggcgctaaggacaaagcgcgtgcgactccagccctccctcaggcccaggtccccgggagacggagctagaggccgctgctaagcagcgaggcccggccccagagcacggagaaggcggctgggtccctcaggcgagacaggagctgccagatggggacgggggaggaacatcacgggcggctctggggcctctcagtgggtccggcccctaaaccagaatcggccccctcctccctcacttgtcccagggaggaaactccggggagggggcgccctccagctccacaatttcagtctttggcgaggagccatgggatacggggagcaggcgacaagccgactgaggagagacgcctgctccccagcgaaggcaccggggcggggcttcctcggtggggcgcgggcctctcggtttcttcctcttgaggagcacccctcccctatcctggccccaacttgcataagagccgatgagaagaggttgctcgcgtctctgcagccgcagtggaagctcacgtccgctgggaggcgaatccaggaaaagttggacccttgtctcacctcatctcggaaaaggactggagaggagggtgggaagccaagggcgcgcggaaagggcgaagaggcgagagcaggacggaggtgtcgagggaacgaggccacgacccccgcctgggcctaaagcactttcgctctcaaactcttggacgtcaaggaaaattcagcttcccgaggcctcgcctccccgcagtgcccccagcgggagagctcgactatggcgagaagtctgttgcgcttctagtcacataaatatggggacgttaaaaatacacgcgatgtctcctgtacactatgtataggctcggccgcccgcgccccacggctcggcgagaaggggcggcggagacggcaagcgcggccttcccaccccgcgggcctccgggccgccgggagccagggagcagcgccggaggagcgcagagcgaggaccgcggcgggagtgggaaggggaggaatgggccgcatggactacctgggggtccccaaggccccagctcctctcctttccgcgccttctcccaacctttattgcagcgtctcctccggcgagacgaggccgggcttagaaaaagggcagcgaagacccaggggccaaactggcactgaggagctctggtctctgcgcggcggggcgccctctccgaatcagccccaacaggcgtggcctccgggcttcaggcagcggggtaaggggccaggacacgggcacagggtctgtatgtaaacggtgacagcggcggggggcgcggcgagggctccggagccgcgggccgggcgcgctcgggcccgggtggcaggtcctggttctcaggagtagatggtgatgacctcgcggccgccgccgcggaccagcatcacccggtccaggtgctctgtgaggacctcgagaaactccatgtctgagagccggtcaaggagaaagacccggtctccttccctcccgacgaaattggggtcgcgctcggctgccaggggacctctcgcgcccgtgtccctgtccgaggtgctgatccggaggcaggaacagctcagctcttccatcccagggacaggacccagattccctgacgtccacctccctctttcccccaattttaattccaggatacagttttcatcaccattgcggttgcggggaggcccaggcatgttgagcaaaacaagcttggcgtcccgggatttcttcacgatgacctcgttcagccgcacggccgtgtgcatgcgccgcacgttggactggttcctgcggcaggaaggaggagtggagaccgcgtgagccgggggggtagagaagattggagccagtcgcccttccagcccgaactgggctgctggggactggttcttgcaagcctaggaccaccaatcctaaac

SEQ ID NO: 26781 - DNA, 2300 bp, Homo sapien
tgggccagcactgctgggggatccggcgcaccctccacagctgctggcctgggtgctaagtctctcacgcctggggccagcagggcgggccggccgctccgagtgtggggcccgccaggcccacgcccacctggaactctagctggcccgcaagcgccgcgcgcagccccggttcccgcccgtgcctctccctccacacctccccgaaagcggagggagccggctccggcctcggccagcccagagaaggacttccatggtgcagcggcgggctgaagggctcttcaagcgcggccagaatgggcgccgaggccgaggaggcaccgagagtgagcaagggctgtgagggctgccagcacgctgtcacctctcaatagggttgtgaggattaaatgagatgatatgtgtaaaggattcagcacatggtaggcacacaatagatgttacctattatgtaaagcaaacatctaaataagaagtcaccaagtcctgagcacctgcctccctacaagaatctttcttcataaaattaacttgctcctctatcaaaaatactcatcaaacactatatattatcgtttgtttattgctcatattccctaataggccatgagctccctaagcacaaggattttgtctaccttactctctactctccacaaaatcaagtgcataaaaaacactcattaaacacttaatacacaagtcactgaatacatcttttggctaaagtccactacccacttgaggtactgccactcacctctaaaccaacatttttccctaagcttggttatcttaatcatctaattaatatgattcttcttaaattttcatagtattaggatctatattggagggaaaggaataagaatgaacatttgttgggtatccattatttgacagactttatgtcttcatttctaatttcatacagtcttataaagtgggaattggaataacccactttgcctgtgagtaaactaaagttctagttacaaccattgagaatccctatttctttccatcacagcgtttatctcagtttgcaattacacactcaagtgtgattattcgtctaatgctttcaccagactgtaatctcaaagatagcagaaaagggtctgcatttgctcataacagcgcctaacaagcaggcatataataagtatagggctacatagtaggtatgtaataaacattcagtgaataaatgagtggagtgagcataggggtagatgtcaaagaaatctggcttcttgtagtgtttaaattccgcaggcaccattttttcttagtaggcaatattcgcaaggagaagaactagaccccatggagtctgaggcgtttccaacactaataaaagagtacctgattaatatagctatggctgtgattaatagagtgcatttactattgtgtgagcaaatcccattccctgtgacaaatgtattctatacatgaaatgaacagtacaacattttacaggcttcacggtcaacagttacattccgggaaatttttgacgttgaacgaatattccaagaataaataactcaagaagaacctgtgactatatctccagaaaccttttgccgcttgtcagtgaaactaatagagtacagagcctatttaaatgtaaatttaaatacaacattttctccacctttctgctctctttgttccttgtggtccggaggttacaggactatatatattctccaatacacacgtgtatagggatttggggtttttgctttcagttttatgcaagactaaatcaaggtatttggggatttgaatgttctgttcccacagttagggaggagggaatgtgctctgaaaacagaaaaaaagtactctggggcgggggctgaggcgaccaccgtggggcccatcctcagcctaggacgctgttgctaggcaactccctgcgttctcaactcccgcccgagagccacttcccgggccctcattgccaaggagatcgacgccccaactcagccctgccgtaaacacgcgcggtcttgcgacagtgccgcgcctgccgctacgtgcgcgccctctgcccccatctccactctccgcccggccgccattgcctcgtgcccgcgccggtcggttggtggcgcctttgtcctacggcgggcaggtgggccgacgcggaggcggcagcggcgggcctgaggcgaaggagcggccgggagcccgccgcgctggtagcggtgagtgccgggaagcgctggccgtcagccgaggcgtggggctgacgggcaggccgttgtggggggcctggccgg

SEQ ID NO: 26782 - DNA, 2300 bp, Homo sapien
ggcaccctctgaattagggcagtggcagaggtgacagaaaataagggatggatcctagaggcagaatccacaagacttgcaaatgtgcccttaacagcagaagccatgagaatggggttagaagtgtcctcctcttccatcctccctgatctgtgaggtctggcctcttgtcctcttccagaaattgagagcttggagggtcatcacctcaaccgttgtctagttcaagctcctaagttttccttggagaaaaatttaggcctaagggaacacagtccttcagaggcagaggctgcaccagaacccaggtgttccatgctgcaaagcagagtgttaacactggttcaagaacatcttgagggccaggtgcggtggctcatgcctgtaatctcagcactttgggaggccaaggcaggcggatcacctgaggtcaggagtttgagaccagcctggccaacgtggagaaaccccgtctctactaaaaatacaaaaattagctgggcgtggtggcgccagcctgtaatcccagctactcgggaggctgaggcaggagaattgcttgaacccaggaggcagaggttgcagtgagccgagatcatgccactgcactccagcctgggcaacagaatgagactctgtcaaaaaaaacccaaaaaccaaaaaccaaacaaacacccaaaaaacaaaacgaaacaaaaaacaaaaaaacaaaagcacgtcttcagagttcatgaacccaggaaatgtaggcacaagtgtgtgtgtttctgcaaaatgagagggtcccgagtttcctaacatacttaaagtgttttatgatgccacaaaaggctggcccactctttttttttttttgagatggagttttgcactgtcgcccaggctgaagtgcagtgatgtaatcattgcaatcatggctcactgcaaccttgacttcttgagctcaagcgatcctcctgcctcagcctcctgagtagctgggactacaggtgtttgccaccatgcctggctaacttaaaaatttctttattttgtagagatgggggtcttgccatgttgccaggctggtcttgaactcctggcctcaagcaatctccctttttggccttccaaagtgttagattacaggcgtaagccaccgcgcctggcccccacctttatttttatttttatttattatttattttttttttttttgagactgagtcttgctctgccttcgaggctggagtgcagtggcacgatctcggctcattgcaatctctgcctctgcggttcaagcgattctcctgcctcagcctcccgagtagctgggattacaggcgaacgccactacatccggttaatttttgtatttttagtagagacggagtttcactatgttggccaggttggtctcgaactcctgacctcaagtgatctgcccgcctcggcctcctaaagtgctggattacaggcgtgagccaccgcgcccggccccactcttaataaatgcctgtctccaggtgctgggtgggaggtgggatggaatggaatgaggtgaggacgcatggatgcatggatgaatggatgggaagttgagacgacgcgcccacacgagggaatttcctttgaaagagagcgaaattctgagttgggaaactcttccttgaaacgcctccccataccccagctgtggccttcccgttttctgcgtggtggtgtggggggaacttcctcaggcctctccgcagtggagcctctttcggttctgccaggatacctagaggcagcggagagcggggcagggaggggaaaaccgtgagggtccctgtggcaggccccagcacccatgggatctctctccggtcgcaggaagcaggctagctcctagcccgcctcggcttggcctttgtgggacctgggggcaaagaagaagagctgtctctgggaccatgcctcctcccgtacacagcaagatgcgtccctaaactcccgggggaattagacttgtgggaatgttctggggaaactcctgcgcggtgaattgctgggggctccgcccccccgataggtggaccgcgattggtctttgaagaccccgcccctttcctgggcggggccaaggctggggcaggggagtcagcagaggcctcgctcgggcgcccagtggtcctgccgcctggtctcacctcgctatggttcgtctgcctctgcagtgcgtcctctggggctgcttgctgaccgctgtgagttgtttttgccccgaccagacgggagttgggagtggggaatgagaaggaaagggaaggaagacttcg

SEQ ID NO: 26783 - DNA, 2300 bp, Homo sapien
tttccagctctaaaaccatatgattataagatacggttatttgtcctcccacctccccccacgcccaagtgattcattcattccacattgatccaacatgaattccagctcctgctagctgggcatccttcatcaaggtcctccactgctgaagcctcagttgccttatctgtaaaatggggataatgatagtctcttccttaaaggattattaaaagtcttaaaggagatagtggatgttaagctctgaactcagtgccttcctgacatgtggaaagttcccaataaatgcttattagccttatttttcttaccctcccagggagctctcattcattccctccacatttgccaaggtccactgtgatagatccagagatggctagtatgtcccagtgccttacctgcattattttttctcatttaggtactgtcagccccagttcacagatgaggaaactgaggctaagagagtagtaaactgccaagggttacatagatgataggtaattcctcccttccggtagcccaagacgtaagttggaggaaggaagtggatcagggagctgaagcagccaaaaataatgtgtttggtaagaattgtagcagaattaacagaataagatcctggaagcactaaagaaagactgagtaatcctggagggcttcccagaggaagtaacttcaactgggtctcgaagaatgagtatgggatgtgaggtggccatgcgagcaagagtattccaagcagagagaagagcatctgcaaaggctgggggtggggagaaggtaagaagtgtgtggcagcttcgggaagggtttttggccctgggggctggatcgcagggtggaggagtggtgggaggtgaggcagggaaggctggttggaggtagttgtgaaaagaacttgaaggccaggttaaggagcttgataacttgctcaacttgaatatgccttctaaagtccattgagagtggccagtggcagggatgtggggttagcatggtaagcccaagtggagggatatttgggaacccccaaatcatcctatgtgggacctttaacccatggttcctatagctcatgctacaaatgggcatggtaacttggagacccgtggggagatgtgcagccacctctctcagccccgtgtgcccagctctcacatacagaagcccaacagcatttctgaggttggttgccagctccattgtagaaaggggaaactgaaactcaggggaataaagtggctggttcaaggtctcccagctagtatgggacagagcaaaggcggcacaggttcccccgactccaagcctgtcccttccacatgcactggttgccttagcagatactgaccctgccaagaaggaggtcacaggcagattatatgtccagagggacacacggacatgaagtcataggtcccttgaacatcctgtctaaacctcacacatggagaattacttacccaaggtcacacagagtcaaagatcttgccagaaataaagaacattatttatccagatttgccttctgagcctttggctctacgatttacccaccatatgatttctcttttttctttctttctttatttttctttctctctttctttctctctctttctctttctttttctttctccttccttcctttctttccttctttctttctctttctttctctttctttctctccctccctctctctcttctttctttccttccttccttctttctttctttctttccttttctttctttctttctttttctttctttctttctctctttccagggtcttgctctgtcgcccagctggagtgcaatggcacaatcatggctcactgcagcctcaatataccaggctcaaccaatcctctcacctcagccccccaggtagttgggactgcagacatgcaccatcacacctagctaattttttgtagagatggcgtcttgctatgctgccgaggctggtctcaaactcctgggctcaagtgatcctcccgctttggcctcccaaagtgctgggattacaagcatgaggcaccacgcccggccattgtgtgacttcagacaagttatttaccctctgtgtgcctcagttttcttatccataaagtgcatatgctcagaccacctacttcatagggttgcaataaggataaaacgcaatagcaacagctgacacttactgagcattttacataaattaacgcatttaatcccacaacaacgcaatgaggcagccctcgttttacaggtgagaaaactgaggcacaaggaggttaagt

SEQ ID NO: 26784 - DNA, 2300 bp, Homo sapien
tgccgtcagcacacagtggatcctgagtttacagcaggaggcagccgaccagtcccactccccgtgaaactcttggggagcctggatgcctggaagctttcaggctgcccctcagagagctccctgccagcccagccagagagccccatcttctaagtcactgcttggaagtgaggtgtggtttcctcctccaggagatgttcctgaggtcactggcaggtggaacatgtcagtaatgaacatgtagccaagatagcagaggatggagcaccagtgagcactcagaggtctgggctggtgaggggttagaaagcaccaacattcagggcactgcttagagaggacaggctgggatgaagtattccacatcctagaattatttaatgttattgctaataggacccttcgagaatgtctggttatttacaaatgcttatatagcacttgctacgtgttgtacacacagtttcaaatgccctgcagatattaactcaatctgtctcttcaccgacctattaacccatttatgcctgaggttgcaattttttgaatttttgcaatcagaccttggcgaagtccttgagcagtaggatataaataactctcacatgcttagcgttccaataatggaacgctaggcataattgggtcaatattagaccgattttgcaggtgagaaaattgaggcacagggaggtcaaatgacctggcttggattatacagacataaaacagcagagctggaatcagaactacccagcactgctcataatcactatgctctgttcattttccaggtgtggaaactgacatcagagaaggcagggtcttacccaagaccaaacactgggtcagggacacagccacgcctggaattcaagcctcctgcagtctcaatttttccaggcttcattcattcattcagcaaatattaatatattagaatttacatgtaccatatcccacaatgctggtagcccagagataaataagacagggaccatgatcttaaagacgtcccaacttggagaggtggggacatcatggttttgctggcgaagatctacctccttggacttgtctggcccttttaggatcaggtcttgagaaagcagaagtcttggagtttagttgccccgacccatgtctagaaagcatcccacgttttagtttctcctttgcaatatggggatagaaattgtaccaaaccacaggatttctgcaaggatacttaaaataatgaatgtagatgctccacgtgcatgctgtgtgctctgtggtgagggggtggggatggcagtggtgatgacagtgttgttgggggccagggatgtgatggtaatattggtgattatgatgggggtaatagtagtaataggtgggctggtgattgtggttgtggtgactatggaagagatggtggtggtattggtgatggtgatattggtgatggtgatggggttggtggtggtggtgagggtagtgatggtgatggctttagtattatttatggtagagatgatgggtgtagtactagaggatgtggttctggtggtggtggtgctaattctaatggtgatggtagtgatggtgatgacctgatggtgatggtggtgatggcagtggtgatggtaacagtataaggatggtgatggtggtactcatagttatgttgatagacgcactgatgataatgcaaatagtggtattggtaatggcttaatgatgacagtggtaatagtaatagtggtagtgatggcaaaggtggccatggtggagatgggatggtgatggtggtgttgatgctgacagtggtgatggtgttggtgatggcagtgggtgctactggtgattgtggtggcaagcgttgtagtgataatgccaatggtgccaaggttgatggtaatggtggtggtgattacagtgatgattacttaacttatgcccaaatgttcccagttctggtccttgtaccagcttggttaacccacaaatttctcagcatgaccccactgcctactattgtcctcatagtagagaggaggctatctagatctcccacttgatgcctctccccttgctcctgtgctctcattacagacaatcatgcacagctatcccgggcatccctaaggatccgaatcctggatgtgaacgacaatcccccagaactggccacaccctacgaggcagctgtatgcgaggatgccaagccaggccaggtacccctgagggggtggggactgggcgttgcttccaggactggccagcagcatcctctacctcgacccagagtggtc

SEQ ID NO: 26785 - DNA, 2300 bp, Homo sapien
gatgcgggtctatatttagcagctgctgcgaggtacagtctgttcttgctgtgcagatagcagggagcagagccggaacggggcctgggaggaaggtgtgagggaagggaggaggcggggcgccgcgaggccccaatgccagaggaggaattaacttgtgtgttttaaaggccaggcctgccagcaggccccccacaggggcgacagggatggcatttgtgtgctaatgaggcatcacacgggctccagggccccttttgcagcatttggaggggacagcaggggaggccaggacaacagctggaactggggacgatgggtgaagacaaggctgcgggagctgaggccaggttataattaccagcccccgcccaccaccaccccagcaggaatagaaatgttctccgagatttcaagatctctgctgaaaattgtcaactgagccagagtcatccattttacagggagggaatgaaactaacatttgttgagcaccttctaagtgccagatcctggggtcaggataatgaagtagacctggtttctgccctcacggagcttctgctccagcagagaagcaaatggatagctacacccaggctgtgagaggggcagtggaggggcactgggagtcagccagtcaaaacgtcatttgagcacttgctgtgtgccaggccctatagacacgggatgaacaagaccagcatggatttctgcctctgtgaaacttgtttatggaggtactcaatccagaacttgaggaaagagatcagcaaggcatctccaaaatgtgaggcctgctgctggaagcttcctctcattcagtcctctcaacagccctaccaggtgggtgtctccatttcacataagaggaaacagaggctcagagaggcccaggaacttgcccatggtcagctagcatgtaaatggtggaaagaagacttgagcccatatctgtctggccccagagtcctcctgcagcctatctgagtctgtgcagccccagcacctgtagtaggccctcggcaagactgtaatgaatgaatgagtgaacggatgaagtcaaagagccagaagctttcaagaacaacttcatggactgttttggaatatttgtacccctagatctctcagagggcaatagtctccaccgtgcttctcccaacatcaggaggaagacagtggagtggaacatagtagataggaaaatatgttatcaattcctccccgccctgcacacggctgcttactaatgtgactttgccactgttctgggcaagaggtggagtctgtttccctaccccttgaacctgggttcgcctgggactactttggccaatagaatgtggcagaagtgatgttatgcaaattctgacattaggccttaagagaccttgcagctttcacgtttactgtcctggaacacagtcctgagactgctatgtaaggaagccagcctactggaggatgaaagaaccaatgtgtccccgccgacagccaagaccaactgccagacatgtaaatgagccatcttggaccttccagtcagctgctcctccggtttaggctcagatgcgtgagtaagcccagacaaaatcagcagaggaatggcccagccaactggatttctctatcagtcatctagagctatgtaaaaaaaaaaaaaaaagaaaaaaaaaaacccaaaacctggtagcttaaagcaacaataatttattatttgtcacaatttggtgtgtcagcttggcagttattttgctggggtcactcatgcagcaacagtcagctgtcgggtcgctgggagtgacttcactgggacagctggcaggactaggcctccctctccatgtggccttttatcctgggcttcttcacagtacaatggtctcaggattccaagaggacaggccgcagcatacaggggcttatcaaacctctgcttttgtcacacttgctgatgtcctattggccaaagcacacttgctgatgtcccattggccagagtcagtgtgggagggaatgacccaagggcgtggataccggaaggtgtggttcactgggcactgtcaccatagcaacctaccctgttccctggatcccgagaacaaggcccagggggcccaactcacacacacccagagatggcacctgaatcctacacaccacaaggcttcaggaccagtttccaagtgagaagagtgtcgtgtccccagttcctcaggagctggaagtgacagggacagcaaagaaggcagccacgtggagcctctctcactcacagaggtggagccaggcccctg

SEQ ID NO: 26786 - DNA, 2300 bp, Homo sapien
ccctgcagggctgtgatgggccctggagctgcttgttggagttgggggaacagttcccatggggcacgcagggaagccatacgctccaggaaatgaaggctttggagctgcacctcctcctcacccataactccagtctcattacgaccagcccaggtcataatgcagggaatcaaagccggatccctggaggtggcagcacagagcagggcttgcggagcagggctgccagggttgggaagcctcgtgcccaggcccatagaagtcataccaggcagggtatgttcaccacaggatcatgggtcctcctgaccccatgagttcaggcttggacctatagggaaagagggaacagcgtgttccagacccctccctccatccctccctatggagtgtggacgttttcccactctcattgcccagaactacagcttaaccccttcaccgtcaccctcaccttccagcaatgactccccaccctgaaactccttccataaagattttccggaggagatgctagaaaaaaaagcactggggaattaggcatctgcaaaataggcataagacaattttcagagttgtgattcccgtgagttaaagggaagggcattgcccactgtgatgctgggttaaagaaggtggtctgcgtttcttcctccctagagttaggccactttctttgttctcaggaagatctggctagggccaggtcagcctcccaccccaacccactacacaccatctgcccaaacacacacccctgctcacaatctaactccccaaactggccagaccactcagccaccatgcacactcctctgcctgaaatgcccatccctttcttcccatctgctcagatgccgcctcctccaagaagtaaccctgattgtctcccgcctactttccctttccaaacacccgagctcagtcccttccctgagccccacaggtctcaggttgtccacacagacacttttatagccccgatcatatgccacctagcatttaggttgttataagaagggtttcaccttccaccccactaaactgtgagcttatttaccttgcccctggcaactggccaaacctggcacaaagttgaagcttggtggaactgagctgttgaactgagctgaactgggatcaggagaaggagaagtggggattgagcccctcacctccacacactcctctctgtgcctgaaattcctccattaagcagcatcgctgtcccctgtaaacacccacattaagccattattcatcttatggcttgagtaggcgttagtccctcagatcctttcctgctgaaagcaggatctgatagagagaagggaagagagatggatggatctggggacggcaggctggtccaagagtggggaggaaagatgtctctcggactctgggaaagaaatattttctgggggaatgtggaggcaccagaggcaagctcagaggggttgtgaccctgcccggagtcactgagggtgtctccaagccaggccctctgggactcaggtgctgtatccctagaagctggtgtgggggtacgagcacatcagagggccttcccttggtgcctgtttcagatggaatgacctgtctgtgctgcgatggataggaaggcaggcatatttggtggtgggctgggtgctggacttctgtgcaccaaggaggcctgggtcttgggggctcttgaagatgccttctagaagcacctagggtgggggatttctgggggctgggcagggctggagagattgtcagccaggtcaggggcaccgcctactagggtctctccttgtgtgggcatgagggctgagcggggcaggggctgtgagaaaggcgtaggagattgggagtacagggcgtatgatgccaggtgaaaggagaggctgcgatgtgcgggagagggcgcctactagactatgggctccaagaagaggggaccactgtgagttgctatgatgcctgtcccaccctgcacagtaccaggcacacagcaggtgtttaattagtacctacaagaggaaagatagactcaacttgccctccccctacacagaagcccctctaatgttttcttgtttctcttgcaggctcctgatggaaagggaaggcccctagtcctggcaggatctgccggccccaacccgcatcctttctgcgcaggaaccatggcgcttccccgactctggagctgtccaggtgctgcctggtgatccgcacgcgacgcggcgacgggggcgcgggcgggcaccccgggggctgtccatgccccggatgcggccgcgccc

SEQ ID NO: 26787 - DNA, 2300 bp, Homo sapien
gaacccttgaccctcaagacccccgagttagctgccactgctccccatcctaccagcgcgcggcactggtcctggtggtcctcctcatcgccgggggtctcttcatgttcacctacaagtccacacagttcaacgtggagggcttcgccttggtgctgggggcctcgttcatcggtggcattcgctggaccctcacccagatgctcctgcagaaggctgaactcggtgagcacgtgccactcatcctccagagagaggaaccccggcacaggcagggcggaggcagggcagggccggaccagacctgatggtgcctgtcccccgccctgcaggcctccagaatcccatcgacaccatgttccacctgcagccactcatgttcctggggctcttccctctctttgctgtatttgaaggtacgttgggccttccctctcaagggcacctcagtgcagcagaccacagatcctcgccctgagcccaacacagtggtagctgcagagattattgagatcaaagatgcagtccctcccctggaagcgcatggtttggggtccagcatgataaacgctacagagaaagcacatataaaattcagggaacagtaacagtaagtgtgcacagagccctgaaagtgcaccagggctgttctgatctttttaaacataggaactcatttcatccttccaaaaacctggtgtggcagtactattattatcccccattttgcaggtagaacaaaatgaggcccagagaagtaaagataacttgcccaaggtcccatagctcgtaaatgagccagaatttgaagccagcagcctggctccaagtggtccagccctactcttaaccaccctatcttgcctctaaggaatggggaatcagggattgttccaagatgctggagtaatcaggcaagtcagaaaggcttcccaggccgtggtttggagggtgagtgggattttggcaggctgcagggagcaaggcatctcggaagtaggaataggaggttcagccatgtccaggaatataacctggggatgtgtgttcaaggagtgtgggccacgcaggatcagcagagggtgggcttccagagctgggggctgaagaccaggagccagcacacaggagcctggggacatggtcagttgttcctccactgtcgtcctccagggatgaggagagccctggagaactgtgtaggctgggaggtgtgacgccaccttcctttctttgatgttttgggattagcctttgtcccctttctgtttatccttcctcccagagtcccgtctgtaatgccctcagggtcattacagaaaattctgtcccacatccatttaagtttcaagcagtgaagcgtcttgaacctccccaagaaaattattctgaagccccgttgtccaggaaacttctgttcagggcctcgttttttttccttctttaaaatctctccccactccttcattatgcccccttgtaccaaacgccacactctccctcccctcccgtgtgtttacaccatgccccatctctgcaaaacctcatctgaaagcccctggtagtcgtcacttggcaaagctgcatggatttagctcctttaatcttttctggtaaattaatcccccaagcgccttcattacttatgctgctcttccccgaattcccttcaatttgccgacgcctttgcagttctgctgagcccagcaccaaacaagatgtcctacactgtgaggctgttttgcctggggggactgtcactcggcatttctttggtgcttccctccaaaaatctcaaaatactcgtccagcttccagctaccacagttgtctcttgtgcccagttctgggccccccttcaccctgtgctaatacaccacgaggactttcgtgtgggagggacgccgggagtcattcttccagatggacagtgttggagggaccatgactcctccgaaagtctaagctgaatttggggtagggggtgtgcatgcctgtgtttctggagcaaggggccatgtgtttgcattttctttttgggaaatgttcatcaagtgataccacgggttggagaaataccagtctggtcccaggcctctcattttatcagtaaggaaactgaggtccagaaaggggacacatctcagcccaagtcccacagctctgtactagcaagacctagattaaaatgaacgtttgtagggatagaattttgtccctgtttgtaggtgaactggctgaaatgtagaccaaggagttccctgagtgggctggggcactgttggtccttcgtcacttgg

SEQ ID NO: 26788 - DNA, 2300 bp, Homo sapien
aggcaggctgcaaggccacagacaggtggccactggtgggtggtacacgcagccgcagcagagccctatgtggcctgggggctacacaagagtttcttcttccctctgatgttttgcttcagagagcactgttcctgccttcttgtcctcctacttctcatccttccttcccgctcctgggctctgccgagggttaggtaaagaacaggactcagggagctcaacgtcagacctgtaacctcttctctctggtgataaccagaggcctcttagtcagagattccttctgattaaaggtcgcttatcactcagatgacagcccagctctgtttggtcatttcgctcagtgatttgtgctcctgctcctttctcggtgatgggtctgagccctgagctccagcagtgcattgtgggtaattttgcttccaggtacacaatgaccaaatcctcagctgtcctcttcatcttgatcttctctctgatcttcaagctggaggagctggtgaggccccagcgtctcttgtgtccttcctgcccccacagatgctaagaataaagtgggagtctgagcagtggcttgtcctgctgtgtgacagaggagacaagcccagtccaggtggcagtagatccctttctgagaagggacctagacatgggcaatactcagaatatttagaaaccagtgtggcagggtaatgaccaaaggtgaaagcactgcaggatgagggtcccagcagagctgggtctaggaagcaccctgctgtgggaggcagtagccctgtgtgttaggcccagggaggaggtgggaccacttgggggcctaggacagccgtcagtgtggcagagcaagcagggctgttggcataccagctgaccgtcagccctacatgctgacattggtgggcaaggactgtccaggaccccctgggatggagctgaagggtggaaggatttcttgccccaggggcagccaagatggctgctgaccccaggctccaaatgtgatgaacccttgaccctcaagacccccgagttagctgccactgctccccatcctaccagcgcgcggcactggtcctggtggtcctcctcatcgccgggggtctcttcatgttcacctacaagtccacacagttcaacgtggagggcttcgccttggtgctgggggcctcgttcatcggtggcattcgctggaccctcacccagatgctcctgcagaaggctgaactcggtgagcacgtgccactcatcctccagagagaggaaccccggcacaggcagggcggaggcagggcagggccggaccagacctgatggtgcctgtcccccgccctgcaggcctccagaatcccatcgacaccatgttccacctgcagccactcatgttcctggggctcttccctctctttgctgtatttgaaggtacgttgggccttccctctcaagggcacctcagtgcagcagaccacagatcctcgccctgagcccaacacagtggtagctgcagagattattgagatcaaagatgcagtccctcccctggaagcgcatggtttggggtccagcatgataaacgctacagagaaagcacatataaaattcagggaacagtaacagtaagtgtgcacagagccctgaaagtgcaccagggctgttctgatctttttaaacataggaactcatttcatccttccaaaaacctggtgtggcagtactattattatcccccattttgcaggtagaacaaaatgaggcccagagaagtaaagataacttgcccaaggtcccatagctcgtaaatgagccagaatttgaagccagcagcctggctccaagtggtccagccctactcttaaccaccctatcttgcctctaaggaatggggaatcagggattgttccaagatgctggagtaatcaggcaagtcagaaaggcttcccaggccgtggtttggagggtgagtgggattttggcaggctgcagggagcaaggcatctcggaagtaggaataggaggttcagccatgtccaggaatataacctggggatgtgtgttcaaggagtgtgggccacgcaggatcagcagagggtgggcttccagagctgggggctgaagaccaggagccagcacacaggagcctggggacatggtcagttgttcctccactgtcgtcctccagggatgaggagagccctggagaactgtgtaggctgggaggtgtgacgccaccttcctttctttgatgttttgggattagcctttgtcccctttctgtttatccttcctcccagagtcccgtc

SEQ ID NO: 26789 - DNA, 2300 bp, Homo sapien
tgtttgcagctggtcttactgccagagagcccaggaggaggctagaggagggcgaaaggcacaaaactgggtctgaatgtgcaaccctagcttgccctggcctaatgttcttgactgcaaatgctgcccttttaatccatcccgcaagatgaagaaaatctgaactccctaggctggcattttggggccactgcaacctgcctcttggctactttaaccaccacagttacaaacaacctgtgagccccaggcacggctggagctttctcaccctcctttaggattctcccatttcctctatctgggatgctctctccctactcaacctattgaagttgagataattcttagaaagtttcatacagaaaatatttcacaaatgtttcgtattacttctggatcgcccaagttttaagttgtaatggccccagctggcctgagctcccagaagaaaaagcccatgagatacttatcttcgtggttcattccatggttgcccagcattagactggacataagaaaaacaatttgttcagtaaaagtaaacaagttaccattttttggatgctcactgtatgcagaacactagcaggcaccggggttccaaagcaagcccctgattgagcgcgggagagacgcagacaattacacggctgtgctctgagcctgagggacttcgcggaggacaaaactacgctgtacctcagaaagaccagaccacctcagaacccgaccacaacagacgccccgcccccgtgctgccccgccccgccttttcgccccggctccgcccagcccctgggtagcttccggcggaagttaccgcccgtgccgcggttcggcggcggcatccggcctcgcacttccggtggggagattccggcctggagctcccagggccgaggtgagtgggtgtgcggccggcctcccggcgcactcccagaggctggggggccggggctggagaagggaagcgggctccccacccgggatctgcgcgggttgacatggggcacgccacgcccctgcccctccccgggcctcagtttcgccgtctgtggagggggcaggggtctccaagcgccctcctgcaaggcacctgccggacgccggctcatctggtatttcctgagcacctgcgacgtcctgggtgcgggacccgggccggaatcggacacggccctgccctctgaggggctgcttcccgcggtgggattggggcgggcagtaaacacgtgagcaaacaaggaaacgtcagaggtgggagtgccacgaggattgggaggggtggggcattggagaaagtattcagccaagcggaggtctgcggaagggagctgaaggcaggaagagcagcaagtaaagaaaaacacaggtttgatgtgtttgacacgtggcagggggccgctgtggcgggtgctgggaccagtggcagaagaatgaggttacagaggccttccttgtggaccaggctgaggagctgggcttagccttagggcatgatctgtttcgtgtgccatctctctggctgctttatagattccaggccttaggggcgaaagaggaaacagggagaccagttagaccagtggcagtcagcaggtgaaagataattgtggcttagactgtggtagtgggaatggagaggaagagaagtagaggggtcaagaagtgtattgaaagtggaactgacagggcaggatttgagaaatgacagaaataagtggtcaaagatgacttcatcatagatttttggttttggcttaagtaaccaagtgtattatgctggcatttactaaatgactttgggatagattgggagcgtgagaaataattacgaaatcttcttagggcatcttaagttttagatatttggagtgcagctaccaaataggcagttagatatatgagtctgatacagaaaaggtcagggctgatgtaaagaatttagaaatcattggcaagtggattgggtaggatgagattatgtagggtaagatttaagagagaagagaagccaggttccaagctttaggcacccaatttttatagattgagttgacaagaaggtgccagcaaaaaagaccaataaggagtccagaaaagcagaagaaaaaccaggagaatgtggtatcgtggcacccaagagaaggttttttctaggaggaggaagtgatccattgtgtaaggtaagaatagagactaagccggcccggcacggtggctcacgcctgtaatcccagaactttgggaggccaaggcgggcagatcacctgaggccgggagttcgagaccagcct

SEQ ID NO: 26790 - DNA, 2300 bp, Homo sapien
agccccctccagtttgctttcctttggccttccagaccccaggaagttggccttcccttcctagtgctatggtttctgccattggccatgatttcagggagctggctgaggccggctgaggccacacctgtgccagtggggcttccctggtgctgcagcacttgtaaaccacacacacagcctctctccctggacatacgttagcacattggcattcagtattggtggcctggcatggtaggtactacccaatgaagagtgtactatatattttcattactataggccatacttatacagacgtgtatatatatttatataagatctacctatcttaggatggaaccttggggaaaaataaaattgaggggaagtaaaaagtatgtaacacttccagttgtgagccaagattgtaaccagagagcagccaggagcttcctgtcagtaaccatgttttcaataaatactctttcatgtacaaactgtggttcctgttaacagctgtttgtctgtacttgccccctgcccaatggtgaagatttcaccttgacaagacttgatctccatgtatctgggagactctggagagctccagctggagcccttagtcaccttccaagagtcccttcctcctcatcattcgctcctcccacacatacacacacacagacacacacctgctggttaagagtgttcacagattgctgcactgggacgaagcgttttctgctcaaccctgctgggtacagcaaggtaaggcatactgtacacccccatgaacacatcctccctcttctccctgccagggacacagccagggaacagctcgagtacttgtgccttacaaagaagacacgctctttaccctgtgtgttgcctgtgcatagtgcccagccttccagctggtgttttaggctgttgctccaaaccttggccttggtagctgggagacttaaatgagggtggtgatgaaaatagatctcttgcctctgagagagaagggtgtgaggacaggctctttcaaaaggcatagaaagtgcatgcaatacaagcctgaggactgaataaagccaagaccttgggcagtgatgggtaccattgtaggtgcttggtaagcactgaatgaactaatgcctgcatgatgccagctggcggcggtgacagccgcagtttgcataaaacactgcttacactctggccttgagccttctgttcagaggggccagggatcccagctgagtcacttgtaaggatccatgtttgcagctggtcttactgccagagagcccaggaggaggctagaggagggcgaaaggcacaaaactgggtctgaatgtgcaaccctagcttgccctggcctaatgttcttgactgcaaatgctgcccttttaatccatcccgcaagatgaagaaaatctgaactccctaggctggcattttggggccactgcaacctgcctcttggctactttaaccaccacagttacaaacaacctgtgagccccaggcacggctggagctttctcaccctcctttaggattctcccatttcctctatctgggatgctctctccctactcaacctattgaagttgagataattcttagaaagtttcatacagaaaatatttcacaaatgtttcgtattacttctggatcgcccaagttttaagttgtaatggccccagctggcctgagctcccagaagaaaaagcccatgagatacttatcttcgtggttcattccatggttgcccagcattagactggacataagaaaaacaatttgttcagtaaaagtaaacaagttaccattttttggatgctcactgtatgcagaacactagcaggcaccggggttccaaagcaagcccctgattgagcgcgggagagacgcagacaattacacggctgtgctctgagcctgagggacttcgcggaggacaaaactacgctgtacctcagaaagaccagaccacctcagaacccgaccacaacagacgccccgcccccgtgctgccccgccccgccttttcgccccggctccgcccagcccctgggtagcttccggcggaagttaccgcccgtgccgcggttcggcggcggcatccggcctcgcacttccggtggggagattccggcctggagctcccagggccgaggtgagtgggtgtgcggccggcctcccggcgcactcccagaggctggggggccggggctggagaagggaagcgggctccccacccgggatctgcgcgggttgacatggggcacgccacgcccctgcccctccccgggcct

SEQ ID NO: 26791 - DNA, 2300 bp, Homo sapien
agctgatcaagcagcagcgcctgaaccggctctgtgagggcagcagcttccgaaagattgggaaccgccgaaggcaaggtgagaggagacggggcaatccttggtgccgggaagagcctgcctggatggccccttttgtgcccaggcctttcccagtactgtcgttgctcacctgtttggcttcccttgtgttccagaacggttctggtactgccggttggcactgaaccacaaggtccttcactatggtgacttggatgacaacccacaaggggaggtgacatttgaatccctgcaggagaaaagtaggttcatttctctgttgatgtgtcatggttgctggacttgtcaggagacaggagttctagtccagctgtttgtagctgatcatctgggcttgtacctgttacctctctggacctgtttccttatctgtcagcgatttcctctacctggcctactcggtggggtggtttggagaaacaatgagttcacaggtgtgaatgtattgtgtagactgtaaagggtggtacatgactaagtcgaaaggcagtagttaagaggagaagctgtgaagccagactgcccacattcaaatcctggctttgctcctaattaacttgaattctaattaattgcaagttctcccctctgccttggtttcttctcctgtaaagtgggaataatagccacactttcctcctaagaggattgcatgagtaatgtatgcaaagcacttagaagagtggttggcaggtagtcagcataactgttagcagctgccactgctgttggcgatgatggcatcatcatcgccattattgtgaaggagaggggaagggagtcaccaaggtcccgttccttggggatataaatccaagagccctgaagtgaccctcagttagctttgacacagcctcactgggctgtggtctacaggagtgaccaagacggagggaacagtacaaggccatcctccccaccaccctcactgagctcatacagcagcccttggagtttggggctgaggcttcctatgcatctgccccagtacctcccttccagcactgatgtaggcactgaccagcttgcagcatgaacttccagagactaattcccatcatttatcagttcctgttgcagacattaaggccattgtcactgggaaagattgtccccacatgaaagagaaaagtgctctgaaacagaacaaggtgagtagagaggccagtttgagtagctggcccagtgatacttggagagtgccattggtggtggttttttccaggtgcattcttggcatcttcccctctctattcctgaatgttttattaagaattttgaacatacacaaaaatagatggaacctctgtatacacatcacccagactcagcaaccatggccagttctgcccatccacttgtttctctcctttatcgctttgaagaaagtcccaagtatcacactgtttcatctgtaaatatttagtgtacatcgtatagtgtataacattgccaccagtccattagcacacataacaggaaatgaaagtagttatttcagatcaaatattccactgatggtgactttctaccaattgtcttataaatgtcataatttctctacagatatataaatgtttatatggatacacacacacacacacacacacacacacacacacacacacacacccccatacccatcttgtctaaaccagagtctaagactggtcttttaagtttcttaattcataagttcccccgcccccccatcccccaccatcttttcctttgcagtttattagctgaagaaccagattgcttgtttggtagtttcctagcatctgaattttgctgattgtttccccgtggtacagtttaacttgttcctctgtcccagatctgtacattggaagagggatctagaggtttgatccagttcaggtttaacttttttcctggccagtgtcatcagtggtattatgttctatcaagaggcacataacgtctggtggtctctccttttgtgataattagcagactgttgaagctcagtgcctcattccatcagtcaactaaggtttgcaaactcatgatattttgatgcagtcattgcttttcatttatgagctgaaccatgaaacttgcccttatctactattggtttcccagtggtacagtttatataggaaacgagaataaatgctgattcttcttttatgtacttactttcaaaataatgagttagttccttggtatcatgcaacagtgaccaattttgtgtgtgtgtgtgtttt

SEQ ID NO: 26792 - DNA, 2300 bp, Homo sapien
aggattcataatggtgggtgagacagagggagtgacaaatacaagggagcaagaagggaagcaggatattgtgggagtgaggacaggatggtgagagacaggaatgtaatcaagggttgatcagctaggacagaccgagggagacatagcatgcaagagaaagacagagacagaacatgagacaggaccaggggacctaaagtggggtgtgggcatcagagggacaaaggaggaggtgatgaaccgacaggggaatgtgggggcacagagacagtggggagggagagtcaggagggagagggacatggtgtgggcggcacagggagcagggacagagtgataggagagaggagaggacaagtgagaggaaggaaggaaggagagggccgtgggagggagctggtaggagagtgaactgttcctcctttgtgttgctatctcagtatcattgaaagaaaatggcctttcccaaagcctctctgctgggtgaagccatccaaaacattttatttttctaagggaaaaacaactctgcctccatgcacaccatctattgttttgcatttagtaggcctgtgaaatgcctgattggaggaaggtccagcccccaatgttctgtatcatagccttgatggagtagcctcccccatttctggtgtggttgggtatagcccctgccttcactctgcttcccctgcccaggggaatgcagaggaagggatggcgcctttcaggcctgcagtgagtcatctctgcctgaaccaagcccattcatgctccatcgccttctagaatatgaagtcctcgtgtgtgggaggaaagctctgttcccttcccaacatacattccttttccttagcatggatgtggcccttcattaaaagagatcagttcagtcccctgctccctgcctgtgctttttctagcatgtgatccgagggaaccgccccatcaaaactgagatggcccatcagctatatgtccttcaagtcctaacctttaaccttctggaagaaaggatgatgaccaagatggaccccaatgaccaggtaggtgctaagtggggcagctgttttctcatggctgtggtgcagtccagccttagtctatgtgccaggcactgtgcttggtctttgtctgcagaagtagtttgcatctgccctagaaaatctagcatgatctgcaccatgagccaagcccatttctgtcctgctgtggtagaggtgatgcctcctaagggattgattggggccaaagtttggcccagaaaagcctgacccactgtttcttttccttgctcccttggttagccgattcacctgctgactgtctgtttcacctcgcaggctcaaagggacatcatatttgaactgaggaggattgcatttgacgcagagtctgatcctagcaatgcccctgggagtgggaccgaaaaacgcaaagccatgtacacaaaggactacaaaatgctgggatttaccgtaagtacctcagagcatagacggtggtaggccctctcccctgatgggaagtcaatggtcccacccagacagagctctgacaaccaaccccatggtggccctggaatagatgacagttaggaagctggtggagctttaatgcttgctttgctttgttgatggtgagtctgtgagtttatgtgcaaagtttggccctgtgaaacgaatccatctgtaggggggttgcggtcagctagagtgggtagagaggggacctgtcctcttacccaaactgctaggttctttgcaaagctagtgtgaatattttgtgatagagtagggcttgaggatggggttaactggaagaagtatttcttgcgtacctactcagtgtgcagcagcatgtgaagtaggttctgggatgcatggtgaggcagccaccgtccagcactcaagagctcacagttcagtggtggtgatgggtgtgaaaagagctaggacagaggtgggtgctgagtggtagcagcatcaagaggagaggcgagagggcatcccctcaggtccctgcatacacggagactgccgcatctcaaattgggtgtctttatttctctagaaccacatcaatccagccatggactttacccagactcctcctggaatgctggccttggacaacatgctgtacttggctaaagtccaccaggacacctacatccgggtaaaggcaggggagctggccttctcagtcctggtgccacatctcctgccttcctccttcatctccctaatcctccctttctcttcccccgacagattgtcttggagaacagtagccgg

SEQ ID NO: 26793 - DNA, 2300 bp, Homo sapien
gaatagggacattaagttcaataatatattttattcagcccatgatatcgaaaacgttaccatttcaacaagtaataaatatgaaatattattaataagacattttacattttcttttttcctactaaggcttcaagatccggtatgcatttacactcacagcacctctcagtttggcctaacatttcatgggcctgggggctaccaaactggacctcacaggtctaaagagattgatctagagtcagagcaaactctagggagagctgatccaaagttagaaggagctttaaaaagatactgagtcagatacctctctaaagtcagagcgctctagagcattgctattcagtagaactctgttaatggaagtgttccgtatctgcattgctgtagccgctagccacggtgactactaagcacttaaaatgtggctggtgcaactaaggaaccaaattttcaacttaaatttgttttaactgatttaaatgcaaatagctgcatatggctagtggctgctatactggacagcacagccctagagacagagctactgagtagggaaattgaaggacatagtggtggtacatgtggaaaatggaggagagcctcatttgggcaagaaagaaccaagagggacaggattcataatggtgggtgagacagagggagtgacaaatacaagggagcaagaagggaagcaggatattgtgggagtgaggacaggatggtgagagacaggaatgtaatcaagggttgatcagctaggacagaccgagggagacatagcatgcaagagaaagacagagacagaacatgagacaggaccaggggacctaaagtggggtgtgggcatcagagggacaaaggaggaggtgatgaaccgacaggggaatgtgggggcacagagacagtggggagggagagtcaggagggagagggacatggtgtgggcggcacagggagcagggacagagtgataggagagaggagaggacaagtgagaggaaggaaggaaggagagggccgtgggagggagctggtaggagagtgaactgttcctcctttgtgttgctatctcagtatcattgaaagaaaatggcctttcccaaagcctctctgctgggtgaagccatccaaaacattttatttttctaagggaaaaacaactctgcctccatgcacaccatctattgttttgcatttagtaggcctgtgaaatgcctgattggaggaaggtccagcccccaatgttctgtatcatagccttgatggagtagcctcccccatttctggtgtggttgggtatagcccctgccttcactctgcttcccctgcccaggggaatgcagaggaagggatggcgcctttcaggcctgcagtgagtcatctctgcctgaaccaagcccattcatgctccatcgccttctagaatatgaagtcctcgtgtgtgggaggaaagctctgttcccttcccaacatacattccttttccttagcatggatgtggcccttcattaaaagagatcagttcagtcccctgctccctgcctgtgctttttctagcatgtgatccgagggaaccgccccatcaaaactgagatggcccatcagctatatgtccttcaagtcctaacctttaaccttctggaagaaaggatgatgaccaagatggaccccaatgaccaggtaggtgctaagtggggcagctgttttctcatggctgtggtgcagtccagccttagtctatgtgccaggcactgtgcttggtctttgtctgcagaagtagtttgcatctgccctagaaaatctagcatgatctgcaccatgagccaagcccatttctgtcctgctgtggtagaggtgatgcctcctaagggattgattggggccaaagtttggcccagaaaagcctgacccactgtttcttttccttgctcccttggttagccgattcacctgctgactgtctgtttcacctcgcaggctcaaagggacatcatatttgaactgaggaggattgcatttgacgcagagtctgatcctagcaatgcccctgggagtgggaccgaaaaacgcaaagccatgtacacaaaggactacaaaatgctgggatttaccgtaagtacctcagagcatagacggtggtaggccctctcccctgatgggaagtcaatggtcccacccagacagagctctgacaaccaaccccatggtggccctggaatagatgacagttaggaagctggtggagctttaatgcttgctttgctttgttgatggtgagtctgtgagtttat

SEQ ID NO: 26794 - DNA, 2300 bp, Homo sapien
tgagagagactggggggagtgggaaggaagggaagttatggggcagggggcacagagcagagaacaagagagtaaggctagagagatgaaagaaacagtgagactgagctaagaagagcgatctcacgcttaagagacagagggcgtgcctgtgacagggcgggagctacaggactggacatgatcaccgattcagggggagggagggatgcaggcagaggcctaactccagcatgttagcatgtgctatggaagtgctgtccacaatggtggccaccagtcatgtgtagtactttaaataagtctgttgtggctgaggacctaatttgtaattttaatttcattttaaatttaaatatccgtatgtggctcatggctgctgtattaggaagtgtagatctagagaaacagctagaaaaaggagagagcactggagtcacagtaggggaagaggtctagagcaggaccgtccagtggacatagaacccaaaccatgcacatgattttaaacattttagtagcagcatgaaaaaggaatagggacattaagttcaataatatattttattcagcccatgatatcgaaaacgttaccatttcaacaagtaataaatatgaaatattattaataagacattttacattttcttttttcctactaaggcttcaagatccggtatgcatttacactcacagcacctctcagtttggcctaacatttcatgggcctgggggctaccaaactggacctcacaggtctaaagagattgatctagagtcagagcaaactctagggagagctgatccaaagttagaaggagctttaaaaagatactgagtcagatacctctctaaagtcagagcgctctagagcattgctattcagtagaactctgttaatggaagtgttccgtatctgcattgctgtagccgctagccacggtgactactaagcacttaaaatgtggctggtgcaactaaggaaccaaattttcaacttaaatttgttttaactgatttaaatgcaaatagctgcatatggctagtggctgctatactggacagcacagccctagagacagagctactgagtagggaaattgaaggacatagtggtggtacatgtggaaaatggaggagagcctcatttgggcaagaaagaaccaagagggacaggattcataatggtgggtgagacagagggagtgacaaatacaagggagcaagaagggaagcaggatattgtgggagtgaggacaggatggtgagagacaggaatgtaatcaagggttgatcagctaggacagaccgagggagacatagcatgcaagagaaagacagagacagaacatgagacaggaccaggggacctaaagtggggtgtgggcatcagagggacaaaggaggaggtgatgaaccgacaggggaatgtgggggcacagagacagtggggagggagagtcaggagggagagggacatggtgtgggcggcacagggagcagggacagagtgataggagagaggagaggacaagtgagaggaaggaaggaaggagagggccgtgggagggagctggtaggagagtgaactgttcctcctttgtgttgctatctcagtatcattgaaagaaaatggcctttcccaaagcctctctgctgggtgaagccatccaaaacattttatttttctaagggaaaaacaactctgcctccatgcacaccatctattgttttgcatttagtaggcctgtgaaatgcctgattggaggaaggtccagcccccaatgttctgtatcatagccttgatggagtagcctcccccatttctggtgtggttgggtatagcccctgccttcactctgcttcccctgcccaggggaatgcagaggaagggatggcgcctttcaggcctgcagtgagtcatctctgcctgaaccaagcccattcatgctccatcgccttctagaatatgaagtcctcgtgtgtgggaggaaagctctgttcccttcccaacatacattccttttccttagcatggatgtggcccttcattaaaagagatcagttcagtcccctgctccctgcctgtgctttttctagcatgtgatccgagggaaccgccccatcaaaactgagatggcccatcagctatatgtccttcaagtcctaacctttaaccttctggaagaaaggatgatgaccaagatggaccccaatgaccaggtaggtgctaagtggggcagctgttttctcatggctgtggtgcagtccagccttagtctatgtgccaggcactgtgc

SEQ ID NO: 26795 - DNA, 2300 bp, Homo sapien
cagctgccatcagcactgacatagttctacagtctcccaagggtacagggttagactggccttagtttcactctcttcagcctgaggataataatagctaccttgcagtattattgtgagaagtattgttaatgagaatgtgtctgaacatgctttgtaaataggaatatcatctgttaattctagagcactgtacagatgtataaaggattaaatgtataaggagaagagaaaaaagagaaaacattttaatccttattctctaccagcactagaataagagctttgcatacatcatcatcttgtcgtctccacaaccctgtgaggttaacgctgtgagactaacttgattttacagaggaagaaattgaattttgaaaagataaaatttgcttggttagtaaggtggacaggaactgaacccatctcttgcactctactgcctcttggcccaaaggttaacatggcacttacacttccttaggttctcccaacaggtgttggagtttgacaaaggtccaatgtcttctttggtcttgggaaatagataagtgattctgtgtccctgggatgaagcatatggagaaggaagatctaattacccagcaacatttttttttttttttttttttgcagcgatagatacctgggctgaatctgctctacactggctaggtgtgcacacaggcacttacagttacagttgcatcgactgatttcccatggggtgttcacattaaaattcatcttttttgtggctgccctcacacctgtgtttcccgatctgaatctttgtctattttgtgtgtgtgttgcacgtgtctcagctacagtgagatgctggcattcaccctgactgccttcctagagctcatggaccatggcattgtctcctgggacatggtttcaatcacctttattaagcaggtgaggcctccaacattctgtctttctctcctccctcagctgccagttcacaaggcttaaggggagatacaggcaatatcgccattctggtgagatcagctttatattccctggggccagatttttcatcctcaagctctagtcttctgtggcttctgaaagatttgcattttgttatattctcagggcctgcactgagatggaactggaccgtcagaactaaatatgatcaaagtagaattagattgtcagtgagactggggataaagccagccagtcaaccagtactagccctgagtcttttgaccgacttcctgagctctctcttctttttgtatatatataaaaaaaatttgcatttcatttgtaaatttgccttctatttacaaatctgcaaggtagcctgtttggattgtcagactaagttcagtgggtaggagagggtacttctggttttaccctcctttcttttacacaaaggagcagtgtcaattcagaatactgaactaaaaccaatgaataatattgtatctgctgccctagaacttcagctatcattggcttaggacattgggactccccgacactggacacaagtgaaatgaccatgtgtcaaggatattataatggggactgagaagaaggattagagtaaaaggcttcaaggtcctttctacctctcaaagtctaagtgtgtttagggggagtgtgtgtcaggggaggtacatggagataaaatgagatcccagtatcagtaaaatcctctgcttttttataccccactttctcaaactggaacccttattttgataaaaagaattaagcttttagattttgaggaaacacaattaagtggatactataatctgagattaaggtatccatgccaagggaatccctggcacattggccagggtagccgtaaaccagataccactatccacctagcaacagctgcccaaatgtgaagcagagagagcttcaagggctagcatcagatgctaagcttctatctttcttgggccctgagcttctcaattgatgtgccatctctgggtctagattgcagggtatgtgagccagcccatggtggacgtgtcaatccttcagaggtccctggccatcctggagagcatggtcttgaacagccagagtctgtaccagaagatagccgaggaaatcaccgtgggacagctcatctcacacctccaggtgtgagtaaaaaaccctacacctccctcccttcacttgtctgtcctcttttctcctcttattttaagtcttccaatcctactctcctttgcttatattccaagctgttggttggcttcttcattcatcacctcttccacactcctgccagaatttctccc

SEQ ID NO: 26796 - DNA, 2300 bp, Homo sapien
ctgcatgggtgattgataaagctccatggggcttctgtaacagtgctgattttataagcacaccttctagaagccacttagagactgctccattggagacactaatgttcctatttttctctacttttcccagctctgtgtttgaaaaactggcctttcattcttatgacttatagtaaaattgtcatcaggtcagtgtgtgcctgtctcctgttttgtagcattttgagttttccaaatcatccttatatctgtaatgcttaaagaggagtggaaggtagaagggtggggagttgtttaatccggaaggggccctctgggcctggatatggaactacagctcccttatgctggtggtttgcaattgagctacagtactgctgagtggcggagcaagaggctatttataaccctgagaattttgcaatgttactgaattcctttgacctaatttctacttcctttctagaatgaaaatgaagggagtaagcaaacacgtgctggaagggttccctataaggagatcctttatcctgggaatattatctggagaacagaattatttctagtctcctatctcctgatgtttcttttcgatagggagaaaagcagagggaggttttcctctttctttcaactagagttaggggtgctaaccctgatttttcagtaagacttattctaatgtttgatatgaaaacaacagttttttattttatttttattttttaatagagacaggatctcactttgtcacccaggctagagttcagtgacatgatcatagttcactgcagcctcgaactcctgggctcaagcaactctcctgcctcagcctcctgagtagctagggactacaggcacacgccaccatgcccagctaatttttattttttgtagagaaatgtctcgaactcctggcctgaagtgatcctcctgccttgacctcccaaagcattgggattacaggtgtgagccactgcgcccagccaaaacaaactgttaaacaatggaaatactgtgtagttagagggtattgggacgcagagggaacaccagacagcctgcacagttcatgcctgtccctgtctgtttggagccagcctggttcacaggagtggaagaaatcagagccattgggtttaagcagacacaggtgcttactgagccttcactggacaccaagtgctgtgctaggttatgagactgcagagttatacctgttctggaggaggagctagtggagatgtgtaaatatgtaactgtaatagagtatgacaaaatcgtactcattaacggaagtatgaacaggatgctgtgagaacacagaggcccctgtcctatttacttttgccagggaaagtagagaaagctaagactagtacaaggaggaggtaacatccgaactaggctctgatgcttgaataggagctcttctgacagtcagtaggaggaagagaatgtgcaaaggtacagaagaattgaaagaacatggcctgccttatagaaatagcccgtagtccaggatggctagattgtaaaggaccaaatagcacacgagggagtgtggcccacctgtagacagtggagagctgtcttctgttacaatggtgagttcttgctgtgaaggtttcttagcctcagtgtgctttggtttcagatacacaaaccagaaatctccacaaagcacctgctgcgggtcaggtgcagagccacctgctttctcatggctttccagcaacaccagacaacctggtatcaaattctggctgtgccacttgctagctatgtgacactgagccttctacttaactcctctgtgcctccattttcttatctctaaggtggggataataacataccacacagcattgctgtgtggattaaatgaattaatatatgtaaagcccttaaaatagtgccttagcattatgtaattgctagctaatgtcatcatctaaggaagtattatatagagcgatgagaactcgctttggagtcctaagacctaggcttgagacccagttctgatgtgttgggttgatttagttttatttcttttccctcccttcattttttttctttccttccttcttttaggagggaggtgtagaaagaggtacatggagaacaagtttgtcaatccgtctgaacttcagttgccttacctgtaaggtaggaatgtttttcagagttcttatgagcatcaactataataatgatatagaagtgagcaatcaactataaagaggctacctgggctgggcacagtggctcacgcctgtaatcccagcactttg

SEQ ID NO: 26797 - DNA, 2300 bp, Homo sapien
tactgttattctccccattgtacacatgaggagacaggctcagagagatctagtaacttacccagggacaaacagctggtaaatagcacaaaggtctgcaaggttacaaagctcagaatctctactatcctctcccacgtgccagacacaattgcatttgtgtaatcatgacattcagctgcaggtactcctcctatttgattccagcctgaaaacacggcacctgaacctagttgcccactgggagcagctgaggtggaggaagagggatctggaactctgcacttctgtgcagtcttggtggagctgtccatcaagttgcccgccctccttagctaaagtgtggacatgttacctgagctccgccaatcgaacccttgctccagggactttgactcatcaaagaaaactctggtcaagaaagggaagaaaaacatggaattgattcacttgcctgcctaaactctcaaagcatctccactttctgtccttttctaagcctgattctccagcttcctgttacctctgtgagttaaacactagcctgccaataaaatcttttttgggtaaagttagccagaattgattcctaagactggcaatcaaagaacctgcactggcaatatcaggaaaaaaaaatgacacagtcttgtaaagctctcaagtgagtgattcattccttggataaatgtgttattaagcagagccaggactaggatgaagcaaactgaggcacccagggtacaaaatttaagcctttcttcctcagtgttgtgtgagtgcagggttggctcaaacagccctccctgctatcaaagttaataataaaaggaacggagaagatcatttcgctttcacataagagtatgaagtgagtgtcccaagtaggcaggtagcatttggcacctcctgtgctgtagctctgttccctagcacgtcgtcatcatcatcacaaggtcaaggctgggtccagccagtgagaaggagaaagagtaactcctgccagagttttagcaatgttagctatggctaagcctcaacctccccaagcctcactttattcacctgtaaaataggactaacaaaaatcatctttaattccaagatgtttcgaggatcaaatgaaacaacgtatgtaaaactgctttgcagactgcgcagtggcctacaagtggtagtcactacatcgtctctttgctgagtatcagtttctttatctgcaaagggacagctgaatacacacctcccaggattgttgtaagaatctgctagacaaacgattaaagtataaactttggaatccaacaggcataggttggcatcttgctctgcccctcaccagctgtaagatctcggaccctctctgagcctcagtttcctcatctgcagcgaagggatcacggtgctccctccatcacacggctgctgtgagcatgaagagagacagcaggagtgagtccttggcgcggtgcccggccttgttccgatccgcaggtgcagtgacgaatgccacctcccacggatcccttccaacagcacagctgagttgtacccttctgcctctgctcagcgcccacggtcagccctgggtgccggtataattagctccaactcggtggtgagcagcgcggctgctcacagcctctgacacgactgtcacctcccactcagttccccaaaccacagctatccccactgttgagtgtgcggtaagtgcccgctgggcacagggcggagtgccaccagaggcccgcttagagctcacaacctatgatttgacacagcgagcaaaagccttttccttcactctaggactgcataccaaaaagaaaaaaaagtttgggggaaaaagaaagctgcctcttgggttagctgggaaattaccttccttcagaccctgtagcccgcaggggaatggcgtcctgtttctttaagaggcctccactaggggggcggggacggccggcgtttttcccctctaccggcagctgtgcccgccccttcttgagtgacagacaagcaacctaattgaagaaagagacttcagcgtgacggcgagtcggagcaatagaagccgggcccggcctgtgcggggcggggtcccaagaaggcggggcgggcggaggctggaggagccgccgagcggagacccgggagcaggagctgggcctaggtctgcgccctggtgagtgaggggcgccctgggggtcggggcgcggcaggcggtggagaggggcccggcccgaaagacgcagggaagagaggccgggccgagcgttgcggctagcgtctgctccgga

SEQ ID NO: 26798 - DNA, 2300 bp, Homo sapien
cacacacacacatgcacacacacacacatgcacacacacacatgttctggatctaaagaatctcattttcagactaaaaatttcaagagatgaatcaaaggattgcagagtcactgttgaaacctgacctagaatgccaaatggagtaatgaaacaaaacacaaatcaaaaatgcaaagagaggaaaattatgaggtgaaataaacagtttgaggaaatgatgcaggcaatcaaatacttgcatatttggattattctatgttggaattattattattaggataatagaaatttgtaaaataaagcagatggaagacaggcaataattaaacaaataatagaggaaattgtccttgaaaattttccaataaagacttgatctgagatttgaaggacccactgaattccaaacagaacttacacaaaataatactcatctttagccatgtcctgaaaacaatgactgaaatctcaagtgttaatataaaagcttactcatttctagagagggaaaataagtaacttacaaagaaacaatgagatgtcatttgacttctcatctgcatccgtggaagcaaactatgctgtaagtatatctacagatttctgagagaagaggaatcctaaaagaaagactaatagtaatgtcagactgtaagtcctgaaggatctcagcctagtatttagggaaggggtggaagaagatggaaggtaaaagtgtttcaatatctttgcgggctgaggatatagaaaaatactacaaataggtctctttaatgtggggaaatagatgcttttctcacataatggaggattatataattgcaattgtgtattttattctgaatgtgaaaaaaatacagataaccactcatggcatggaaaagtatagcgcttctctaagaaacctataagaatctataagaaaatctaaaagaaaaaaatctacaagaaaaaaaaaatctaataaatggccatgttaccaagccatcaaaaacaagaaaaagagagaaaggacaaagtaaaataaatagtgaacctgagttaaaatggaagaaatgaaataaattatatccaggtttacacaaacctcaaatgagccgaattctcccattaaaactcaaagttcattaaataggattgaagaacaaaaaccagccatatgctgttgttagaaatactatatcagtcagaattggtgtaacagaaacccaacttacagtggtttaaatatgtaagaaatttaattttccttgcagcagagagctgccgatataggcagctgctcagaaaacctctacccttttccagcttccctcaccctcagcacctctgctgggcttggtagcttacctgatggtgtgaccccaaccttcattcctaagcgatctgagcccttcttggtcaccatgcctctcatgtatgaggccatgatggatgtacgtgtccatttaccatcaaaactgggcacctgatccatataccaagctcaggctccttcctcctctgttggctggtcataaaggacccttctctccaccccatgcagccatcagtatgagctgagagcaagacaacaggtggatgagatgggggtctggttacctgctcacgcagctcgcttatgccatctggtcctccttctgctcaatcctccatgtcccacttctattctggcatgctgctgggcccacctgatcttatgacttggttgatctgacaaatatctgactcattgtggatagttttggctgcacaatcgtttgctttcccgtgatcgggtgttccctccctccggggccaagtagccctcaggagcttgtgatggttaattttaggtgtcaaccggactgggttaaggaatagctagagaacttgtaaagcatcacttctgggtgtgtccgtgagggtgtttccagaggacagtggcctgggactttgtggactgagaggaggagatctgccctcattatgggcaggcaccatccaatcagctggcacccgcatagaacaaaaaaggcagaaacaaaacaaaacaaaacaattttctctctctctctctctctccctccctctcttcttctctctcctggagctggaacacacttttttctcctgcctttggacatcggaactccaggctctccaggctttccagactctggacttaacagcagtctctggacttacaacagcagccccctggatcctcaagcctttggcctcagactaataattatatcagcaacttcctggttctgaggcttttgggcagccatgctactagcaacccagcagtt

SEQ ID NO: 26799 - DNA, 2300 bp, Homo sapien
ggctagagtgcagtggcgtgatctcggctcactgcaagatccgcctcctgggttcatgccattctcctgcctcagcctccccagtagtggggactacaggcacctgccaccaagcccagctaattttttgtatttttagtagagacggggtttctccgtgttagccgggatggtctcaatctcctgacctcgtgatcagcccgcctcgacctcccaaagtgctgggattacaggcgtgagccacagcacccggcctggtgtcatgctttagcagttattcacatgaagtaaaattatgctgtaaatatacatttgtataatatccatttcttagtcagaagacctgcctctgtctactgccaattggtgtgtgttttggtttgctggtggaaaaatactctttcagagctcttctgagtttacgtagtgttgagtggcttgttcctagggtgtttgaaagtaggcttccctttaaataatttgaaaagtaatcatcttttatttaaaaactgtattcagtttgtattcctatacgtgtgtaaactttgagaactttttatctcttcagtatgtgttaattttagtgtaaaagtcatcatccaacttgagtcaatacaaagtctgtggtactttatatcttttggctacctgtgctagatttgtgatcaaggaattgttaccaaaagggtagattaataaaggagacttgtgcgaaattttttttttaccaaaaatgggataaactgacatcatcccactgacctagcatgatataccaagaagaacacaatattccttatataggattcctgccaagaaatgtataacctgaatcaaattatcaggaaacactcagacaaacccaaataaaggaacattcttcaaaaaaactgatgcgtcctcttcaaaattaacaatgtcttgaaagacagagaaaggccaaggaactagattaaagtggtctaaatgatatggcaactctgcgtaaaaatgatcctcaattgaaccccggatcagaaaaaaaattataaaggatattattagaacaattagtaaaatttgaatatggtctagattttagataataatattatatctgtttaagttcttggatttgataattgtggttatgtttaaacaattttgataattgtagttatgtttaaaaatttttgataattgtggttatgtttttaaaaagcccttgttctaggtgatatatgctaaagttttaggggtgacagttcatatttgtaacttaccctcaaatggtgatgaggatgaggagagaaacagaaggtggggaggcagatatttgctgttgatgaatctgagtaaatggtttacagatgatccgaatgaatcatccctgaaacttttctgtaagtttaaaatatttcaaaataaaaagtgtaaaagggtaagaaaattattaacaacatgttcaatgaaaagacccaaatcactcattgagattttggggtcccatttcaatatcatctaacattggccatggtcatctctggaaggggagattctgagtgtgcttcttagatgaaattttcctttgatttatgtgtatttgccattatgtgaggcttttacttttgaaatccagtttcaggtggaggtaatatttgcattctgcggaaaaagctttctggtcgtggttattaatcttttacttattgctttgctttattttctataaatattccactatgttgcttggctttcattaattttgttttcagatgtgcagttgacaaactcctttccttctcacggtagctttgcctctgaagtgacactgattgtaagtggagtgcatgcaaatctcctacctggtgggttatgaggaactagggctccaaataaaagtaaagatgactttggaccacaaatcccccaacttgccaagtaagccagaaactcttcagacgttccttaaggaagggggcgcggagacttgtgggaaacggagtctggaagttgatggatcgccccggcagggccccgggaaccggtctttggcagccccgtctgcgcatgtgcagacttcctccttgttccttactcctgtctctgatcagcgtggagcctccgcgtctacgcgtaactcagcgaccaggtgctgcactaacgatgcgctccgcaggtgagagcctagcttggagggttgctttgcggggcttggggtaggtttgtgttcacagcctgtggaagcaaaaacttgcgcaaatcccacgcgggttgagaccctctggcacttgttcccgagtctgccctgcatctgtccg

SEQ ID NO: 26800 - DNA, 2300 bp, Homo sapien
aaaatttaatatacataaaaaatatataaaaatactatgtgttcaagtgccaaatggaataaggttctaggctcagatcattataaacaggatttttcgtttatatgaatatttaagattagaaagttatacaggacttgggacatttctttcctgtaggagaaggtcctgcatgttgcagtgtctctaccatccttccttccctctccttccaccaaatgccaacagcatcccacagaaccctgacaggcaaaaatgtctccgcagatgtgccacatgcccctgatggaagggaccacccacattgagcccctctgaagaacgatggtggtctgcatttagtctcctgaacatgccccaaattttacactcttgcttttaaccgtgtttctactgtttgctccttgactttctaccccttttctgcctacattgtgaacatagccaggagccatctcgtcacaggacccattcctgtcctcatattctttgtccacagactatgtgtttacagagcaatgctggccctcttctttgcattacatgtagggtctggtcattatctgtctacctcacaagtaagactattagcctttaaaggtgtaggcacatgtcctcagtagccatatccctgctcatagtagtactcatcatttctttttttgggtaatcttgttttgtgtgaaatggtgaactctcctctgctctgaatggatcatcattctacttacagtattgcttgcagaatggacctgagtcaccgggagaatcgagtttctttttcttttgtcataagcacctttcagtttctcacaaagtgaacacatttcactgttcttactttggactttctgctatgaagtgcactgggtctgcctgagcaagtacagaactttctagtgagggctcttccctggcactctttctccctggcgttttgtttctaatatttttgccagtcattctttctagtcattaagaccttatatgtctattgttgtgcctataattatgagatactctttatcttcaggaagcttataggtccttcagaggaagtaattcatggaagaaataaaatggataatgtaactacttctggtttaagagacagttaagtggtgatagcgggaaaggcctcattaaattacctaataaaatttgtcagtagaaagatgtatagcagatcaaagaaaagaaagacgggtgacctaggatggtcatgtgggtgaggtgagacatacagcaggccaaagcccaggtgtctgcagaggtggaggcagcatgcctattttttactgctttatttttaaatacgaagaatgagaaaaatcatacacaaaatacctgtgtttccttcacctcgcttcccctgatctttcaaaactatattatagtgatcagaaccaggaaattcacatgaatacagtattattatctatcgtattcaaattctgcttattattttccataatatcctttttcagttcaaggatccaacctaggaacccaggttgtgttaaatgtcctgtctccttagcctcttgcaacccacgatggtccttctttgtcacttacaaccttgacactttgctggctagttattttgcagggttcatcctagccttttctttatttcctttccccttccccttccctttcccttgtttttcctttgttttcttttccttgtctttcctccctcccttcatttctcctttcttttcctttcctctttcttttctttctttcctttttacttacttaagcttatttaacttacttaatttttgaaactgggttttgctctgttacccaggctggagtgcagtggtgcaatcatagctcactaaagtcttgacctcctcagctcaagcaatcctcctgccttagccttccaagtagctgggactacaggcatgtgccaccactcctggcaaaaaaaaaaaaatttttttgagagatggggtctcactatgttgcctaggctggtcttgaactcctgagttcaagcgatcctcccacctcagcctcccgaagtgctgtgattacaggcatgaggcaccacgcctggcctaccatagttctaagaatcaaaaccgtatagaaagatattttagagaagtgtcactccttctcatctcttctactctgttcccatccgtccattctttccgtctgtctccacctctcccctgaatgtaaccagtttcatgagtttctggtgtatcctttccataattttttttcacatgtagtggttacatgtgggtttttttgtttttttgagatgaggtctt

SEQ ID NO: 26801 - DNA, 2300 bp, Homo sapien
ttttctgaagcaagattttttcaatttttcatagccaaattgatcaatacttttctctacagtgtcacttttacatggcaatgaaaataagatagaaaaatgttcccaattacaaaagtagcaaaacatttgagactatctaaacttgaatgaatagaaatatattcaattttcttgatgactaggaaactttgctttaataaatttcagtaaaagagcttccctagcaagtaatgcaaaaatcacttagtctgtgagtttgcttttaacatttcaaattatatgtcaatgtgaaatatattgattataatgtgtgagatgggaatcttagttttttactccaaatggttagtgagttgtcccacatcactttttcaataatctatttaacaataagcctttctcaatgatttgaaatggcagcttttcatattatattcttggaaatcatcttttgttggtgcttagctagctattgctgtgtaacaaaccacccaaaacttagaggcttaaaataataaaattcattatttcttgtagtctgtatgtttactggcatcagctatatgatttcatctggagctgaagtcatccaggaacttcactggcctagaatgttcactcatatgtctgatgtctctaggcaaggatgactggaaggctgggatagctgcattgctaggaaagatgggcctctctttttccatgtggtctcagggcctctcacttcctacttctcctggtttctccacttggtctaacaggttaactgcatgtcttacacagcgtctaaggactcttcaaagggcaaagctgaagctgccaggactttgtatggcttatttctggaactggcacagtgtgacttctgacgcattcttttggttaaagagagtcacagagtcagtcaaagtcaacgtgggagggaaatatacaagcctggaatactgggaagtttagttcattgggggccatctttgaagactagctaccaccagtcgctaattgttcttttctggaattgaataataatacattataactttgtcagaaactttcatgccttccaatgagtaaagttttataaagttctatttattcaatatgtatacaattcatatacagtcatgcataatataagaatgttccagtcaacgatgtactgcatatacaactgtggtctcataagattacaatactgtacgtttactgcaccttccctatgtttagatatgtttacatacacaaataccattgtgttaccattgcatatggtattcaggacagtgacatgccacacaggcctgtagcctaggagaaataggctataccatacagcctaggtgtgtagtagactatattgtctagatttgtgtaagaaccctccatgatgttcacacaaagacgagattgcctaaagacacatttctcagagtgtatccccatcgttaaaccatgcatgattgtatgtattttccttgtggatgtaaaactattttctatattactcacaatgtatatgagataattcgtggtattaaagtatattaactatattgctaatttaaaaaataacaaattactagacctatatgagttcctctttgtaaagctgtcagaagaatgtgcacctaatgttaaactcggatatctctgggaattggggttacggctaatagttcattttcttcagagatattctgatttattttcaaccttcacgtattgaaagccagcaatgattttgtatcctgtttgggagaaattttctgcaggtcgttagtattatattctgctggaatatctttagcagtcattttcatttcgcagaattttcctttctcatctatagacttcggtgaaacggatatgaaactttacttttcgtattgatgattcacagcagtcacctaaactctgtagttaaagcagaagctcctcaaagatccctcagggtagggcggtggccgcgacgccttctggggactgtggtccggaaagccggcggggggcccgggagagccccgggaaaggcggcccgggggcctttctgcgcatgtgctgttcctgttttttacctggacgcccttccggttcgccaggctcttccgggtgagggtcctgcagcccgtgaatccctggtcccgccgagacttggacctggtgcgaactggaggcgaagcgggtgcacccacaacctataggaagggctggcggcgagctctgagcactcgggcgtcggagggaacggtggggccgggcggagcgggcctcgggtctgcggagggtggacgcgcgct

SEQ ID NO: 26802 - DNA, 2300 bp, Homo sapien
tagtaggccaggtgcagtggctcgtgcctataatccctgtgctttgggaggcaaaagcaggaggactgcttgaggccaggagtttgagaccagcctaggcaacatagcaagaccctgtctgcgcaaaaaaaattagaaaataagccaggtatggtggtgcacacctgtagtcctttttactcagtaggctaaggtgggaggatcacttgagcccaggagttcaaggttacggtgagctataattgcaccccacactccagcctgggctacagagcaagatccagtctcaaaaaaaaaaatagtaaagagatctgctcaaggtcacacagcatgttagagatggagccaggattccaatgaggcttattgaactccttgtttagtgatttttatttcttctcctttttacgataccatcaccacctctatttctccacctacttgactctatatctgtttggcactcatattggaatatgtctgtgtgtaatctgtcactatgtgtacctgtagttcatcacttctgtgtgttcctgtgttttccttggtggatttcctttatattttatttcaatactctcccggtgatgatcacctaggtggcctcaaacaaccgtggcacaaatatcctttgacactgtctccttaggacccatgaggtagttttctgggtcataggaaatacagataatgaatacccctaattactgccaagatgctggccgggctgacaggatttctgtttccttatatcctaccaggacttattgtccacttttcttatttttcccagtctgattggcatgttgttgaatttattttaatttgcatttccctgcaaattataaacacataggtttgggtatctcttcataatcctgttggccatgtagatatctcttttcaggatgacatttcgtaccttttgtccacttttttcttgggggctatggtaaatggcttccaaacacggcagcccactgtccctggtggatgccgcccctaccatcaagggctggagtctatttccttccccttgaaccaggccagtcctgtgggctactttgaccaatagaatttggcagaattgacgttcttagacttccacatcctgcccttagaggccttttagcttcggtttttgttgctcttgaaggccactatcatgtaaagaggtcaaggatagactcctggagaagctacgtgaagagagaccctgaagtgtcagcggccattgcagaccttccagccctagcaaaactcccagctcacggggcagagacaatgccatccctgcagagctctgtccaaatgcagaaacgtgagccgagaaattgctgtttcaaagttctaagtttgaggatggcttgttatgtggccacaggtaacaaaaacaaggtttggtttggttttgtttgtcttgtcttttctgagttggggtgcttctcatatcttctggacatgagcccttggtgtattccaatgactctgtaccagccctgccatctccttgttcctatgctgccatgagcgtaccgtaatggtgctgccgccttctgcctgcagatctttttcactaagaatggcaaagcccttcaggcttcaaggactgagtaacatccggtcagagcaagctagaatgccttctcaggaaagctgcagagacacctggtaaccagccagaagaggcagactctagatttccaaatgccacaaagttccagctcagagcacccaactaagtgaagcaatctgctcatctgaaactctgcacttgcagtccccttgcctggaatgttctccccagagactccccatcgctcccaccttctcccttcctcccacattgccatgagcatctggctgactccttcaggtctcaatctagtgccacctgctcagagaagtcctctccgtccaccctggctaaagtagcctctgagtcagtttaacatcttggtcattttcttcttagccggcatcatgacacatgacttgtttatgtttctattgcctgtctcccctgccagcttgtaagttccatgtgggcgggacaatgaaccagaacatgacaggttcccaataaatgtttattgaatgaataaatggaagaaggagtgaacaaagtaatgaacaaaacagaccccagatcagaggaagagatggctttcttgttaattctggagcagattcaagcagcaaatatttactgaacacttgctatgtgctggaaattgttctaggaactggagttacagcagtaaaaaaaataacatttgtattttcataaatttatattc

SEQ ID NO: 26803 - DNA, 2300 bp, Homo sapien
tccgtgcactacagggtgtgtagtggcatccctgggctctgctcactagagacaagtggcgcctccctaaatcatgacaatccaaatgtctcctagcattcccaaatatccccgtcaggggaacaaatccttccccctacccagctgatgactcctgggctaaaaatcaccagccccaggccgggctctgccactcatgcctgtaatcccagcacttttggaggctgaagcaggcagattgcttgagctcaggagtttcagactagcctgggcaacatggtgagaccccatctctgcaaaaaatacaaaaagtagccaggcttagtggcaggtgcctgggcaacagacccagatccagatcctgtctcaaaacaaaaacaaaaacaaaatcaccagccccaggtggtttgctgggtgagagctagcagatttgcaaggaacagagagttcccaactcacccaaactgttcaccagcatagaaaaatagacatggccactcaatttatagctagcaaaaccctggccccaaaaccaggtaaggagagcaagggaagagaaagctataattcaatctcctgtaaaaagaaatgcaaatagcaaaatgaaaccatgacagaatgaaaagaacaatatacacatgatcaggtagcttttatactaggagttttaaaaaggaaactatcaatatagttttatatttaaacagattaaagaccagaccatgtaattaccttaatgtaacccacgctgataaaattaaatcaatgatgcaagtaaatgctttgtatgcaaacagtgatgccccagcacacatacctgcagcaccttgtctttggtttctgtctgcttattttatgcatcaatttatctgtgttagcacacagatatacactgtgttatttttcaatgacgggagaatattccattataaatggacagttgttggtttatttaagcaatctctctgcccaatggaaatataggtatttccagactttgctgttactcaacaatgacgtgtcacctgagccttgtctatgcattcattgattacatctagagaaattcctgtgactgagattcctgggtcaaagagcatgtacgtttaaaatgtcgttagagatgaggaaattgccctccaaagtggctcaccattttatagcagtatggggtgggagtcctcagagggacctggtcactgagagaaatgagagtattatagggggtatggggacggagacggagcatagaacccagccaggtctgtaaggggcagcttttgctggaaaagacacttgtaaatgacacattcttgtaaactttgcttatcatcaaaatcaaaaaacattttacatgcaagggggtgattttagagctttttgagaaaataaatatgctttgggttgcaaaaattccctagaaggcccaaaaatatcctatttaagtaaaacgccataaaagtgatcagtatgaattgtaggcaggagaggtgacaaactggtggcccactagctgaggccagctcataggggggtttgatacacacagtcttagaaatttggaagagctgccaacagatgctctcatgagctctctttctcactgaaatccagggatgcccccaacaagaggtatccagaggccaactctgggttgagattgtttggctgagggaaggagcaggcagaggaagtattttaaagccctggttctcagtgtacagtccttagaccagcagcaccgggggaacacgtcaggaatgcagattcttggatcccaccccagacttgctgaatcagcaattctgggtgaggtggggccagccatgtgggctttaaccagccctccaagtgcttttctgcactctcacattggagaaggagtgttctaggtacaccaccccagcccatccctgatcaaaccacagtgtggcccttgaatgtcactaaccctgggaatgttctctccacctctctctcgatctggttctcttcttacctgcttgtctctgtttctgcctgtgcatgtgtctttctgactgcctttctctctctgtctctctaactctctcttctcacttgtccctgttgttctctgccactctgccaatctctatggatgtctttgtctctctgtctctacgtctttgtgtccctctttccaactgcctctctctctctctctccctcttgctgtggtcgctctgcgttggtctctctccgggtctctcccaccttttcctggcccaggccatccgcctgagagtgcaccccctgtatctgatgattccgggcacagt

SEQ ID NO: 26804 - DNA, 2300 bp, Homo sapien
tgtccaacctgccttattttgttgttgttctttttttgtttgtttgtttgttttaagcttttagcagcctgaagccatggtttttagtttctgtctctagtgatgagtggaaaagagggatgaggaaggggctttactggcccaaccagaaacagaaactaagaacccatgactgtattctcttccttggacacttctgtgagaacaaagcaaactaaacatacgagaaactctttggggtctaaggctatgcagagagcttaacccgatcatccaaaggaaaaatttgataaatttaactacatcaaaattagaaatgtttgcttggtgatatatagttaagaggctgaaaagacaagctacagacggggagaaatatttgcaaacagcgtaactggcaaagaactgacatctagaatttgcaaagaactttcaaaactcaactgtaaaaaaccaaataatacaagtagaaaacaggcaaatgacaggaaaagatagttcaccaaagaggatatagagatggcaaattagcatgtgaaaagatgttaaacatcactagccattagggaaatagaaattaaaaccacaatgagctattactatgtccctgtcagaatggttaaaataaaataaacagtgacaacaccaaatgttggcaaagatgtggagaaactggatgattcatacattgttgatggaagtgcaaaatagtacaatcactttggaagacaggttgacagtgtcttaaaaagctaagcattgcaaatactgggcaacccaacagttgcactcctgtatggttacctgagaataatcagaagtgaatagaagtgactcaccccccttaaaaaaaaataagaataacggccgggcgtggtgacgcacacctgtaatcccagaactttgggaggcccgagatgggcggatcatgaggccaggagttcgagaccagcctggccaaaatggtgaaaccccatctctactaaaaatacaaaaaaaaaaaaaaaaaaaattagccagatatggtggcacacgcctgtaatcccagctactcagaagaattgcttgaacccgggaggcagaggttgcagtgatccgagatcgctccactgctccccagcccagcctgggttacagagtgagactacatctcaaaaaaaagaaaaaaaaacccaaaaataagaataactcatcagcagcaataactctcattgagcacctgctctgccagacactgcgctaatcacattacatgtgttatctcatttaaacttcctaacaaccttcttgtctggtgtagactatttttaaaaatttaacttttaagttcaggggtacatgtgcagatttgttgtataggtaaacttgtgtcatggggatttgttgcacagattatttcgtcatccaggtattaagcctagtgcccattagttatttttcctgatcctctgtctcctcccaccctccagcctcccataggcttcagtgtcagttgttcccctctatgtgtccatgtgttctcatcatttagctcccgcttataagtgaaaacatgcggcatttggttttctgttcctgtgttagtttgctaaggataatggcctccagctccatccatgttcccgcaaaaaacatgatgtccttcttttttgtgactgcatagtattccatggtgtagactattattatcaccactccactttcaggctcagaggctgttgttgaaggccacgcagtgagtaagtggccgtgccaggatttgaacccgggtaataggagtacgcgccttaatcctcgccttgtcatcctcagccatctcacaggcgagtaaacagaggcgaggagaggataagccagctgccccaggccacattgctgggaagccaagaggcaaggccacactgccctgcggctggggtcccgtttgctaattctagtgcctaactttctccaacgttcccgggcctctttcacccggtcccaggggcgcaggcaccacccttttcctccaggaggagcagggagagggcgggttccccagcgcagtcccctccccgaccctcccccaggctttaagccggcgccggggccaggcggggcagtcccgggccggcccgtaccgccaggcgatcgcgctgatggcggcgctggcagcagcggccaagaaggtgtggagcgcgcggcggctgctggtgctgctgttcacgccgctcgcgctgctgccggtggtcttcgccctcccgcccaaggtaacgcctcctccgcctgtgcgcccccggtcaaccacaggcgggatcctc

SEQ ID NO: 26805 - DNA, 2300 bp, Homo sapien
tcaattcaattcaacccatctcatatttatttcccactcatgtgccaggcagtagagaggcagctgtgtctgagcaggcatggcctctgcctatgggaagctcaaagccacgctttccttctcttcacatgagttggcttgaagtctggtggaaggacccctggactgggaactggccataattcagaccctgactctctggatggtattggaacagacactgtgaccctctgtttgttgacctgtttagtgggacaggtgtatcagattggatgactatgaaaaagcccctctagctagtgggagtcatagacatgtgcagctcagattccccttcaaactgggacttgctgcccagccattattagctcttttggggactgcctcagttttcaagtagaagtaatgctcttctcagggaggccctcagctcagagactggttgagtcagatgccggtacaagtatctacccacctggtgcaagactcctccaatgggtgagctttgctctgggctctccattgtgctggcagagactttgtcttgcctgaatgctgcctggtggctccctctgcccaatcctgcttctccctgttccttttccttttcacaggtgttattcccaataaatcttatgcattcctaaccccctgtttcctagagaacccacactgtgatttggttctacatatgaactctgtcttatttatcttttttttttaatgaggattacagacatatactctaacattcaaagggttgaaaaacactgtgttgtaggctgggttttcaaggacttggagacgagtgtgcaggaaatttattaggacatgcctttgggatccacccccatggaagggaagggaaggaaacaaatatagggtgaagggagatgttgagcagaaatgcaaccttcacagaggacttgaccaattgcatgagtgctctgaagggggatggcccctcaaagttgtcccaaattggggtgaggaggctgggaacttgtattcccgcttcagtcactaactggatgtcagccactctgggaaggaaacatgaccttggctaaagtggcactgtttgctgaggcaattatcaaatgggctcatagccaaggattgactactggaagcattccaagcagataaagatttttgttcctaaaggggcactgggcagtgcattccaacattcatagcagagtatgatgtgcaaataagtcttccgcttgctcatgtccccaacataactttagtcacacataactgaaaacatagacacataaggctcaacatattaggttttctgctgccttgtaaataaagtacagaggtggttccatgaattcatgaaggatcccaactcccatctttctgcttttccatccttagtgtgtacctttcattttcaaggttggttcatgttggtttctgtattaaatcacctcacaagttgcaacaacattattttgttatttctcataattccatgattgactgggctcagttgggtggttcttctgctccacatggtgcagctgagatcacttagggggctgcatttagtgggagctctgctggggctgagacatccaaaatagcttcctgtctttcagggcccctctctatggagtctttcatcatttagtagtctagtccatgcttctttatggtgtgacattggctgccaagagggagtgtttaaagaagacaagccctaatgtgcaagtggttattaagtctttgtttgcatcacatttgctgatgtcccattggccaaagcaagttacatggccaagcccagagtcagtgtgggaggggactacacaagggtgtgaataccaggaggcatgggtctgtggaggccaccaatacatcccttacacttcctgatcaacgatggctgctggagctcaagccatgagtcaggaaggaaaaagggagaggaaagaaaaaagggtatgctcctttaaagacacggtcctaaatgtcccacataacaacttctactcacttcccattggccagatcttaatcctatagatacaccaactgtagggaagcctgagaattgtttttaaagctgctcatgtattccagggaagtggcactaaggtccaaaggaagctacatatgggtggtccctgctacaccagcctcccaagcctcccagtgcaccttctaggagacaagcaaggtaatcaattttttatttatccttctgcattgttaagtatgcatgtattttttttctttctttacacactggccagcatgaagttttatatggatttctatac

SEQ ID NO: 26806 - DNA, 2300 bp, Homo sapien
taagtcatgttctaggcagaattgggtatttaaagtaaattgaggacaggcttctcccagattgtgacatgtatatctcagatacatgggtgtggcattgaaccacataatgagaacattattctctttttagtccttgtgagacaaggatgaagtctcagttgctgatactcgctgagcttactggccctctaacccagtgtttttttttgttgttgttgtgtacatgttatatttattttgaaaccagtttaatgggatacaaccagcattttaaaaaatgaaatagaatacagcatggaaaatatcagtgtattgttttatgaaactttcacgtgtatatatagaccaaggatatgtgctgagttttgatgtcaaatatatttctctttcagggtcatgatcaaaaaatgaaaagtctgcttaactccaatttctcttttaaaaaagcagacttacagctttcaggcaactgaaattcatgttaacatgtttttatttttattgctttgtatttttgtggttaccttctaagacaagtgattgatctaaagttccttttaagtttataccgctaaacaaactgagttgatttctatcacaggcagtaagtaggtagagcaaaaatggtgaagtgacttgtgaagactgaagtttgatgaagtctggtttaaggcacaggtaaactgagtgtggatgcaaaagtaccaggagctagcttttaaccttgcccagcctcagtttcttttcttagaagaagctatgtttgggtgggaagggaagagagggataagaaaatacctttcttccttgtaaactccaatcaacaaacatattttgagtgccttttgtgttccttggcaccctgttgggtattgggtacttggcaccctgttgggtattgggtacaatggtgagccagacagacacagcgcctgtccttttgtaagaatatttatttttataaaaaagtataaagtatacagtgggatgttttgatatacattatgaaatgattgctacagctgagctaattaacacccatcacctcacatagttactgtcttgtttcttaatatggacatttgcagctatgaatttccctctgcacactgttgtcatcacacactctcagttttggtattttgtgtttttgttttcattcatctcaaagtattttctaatttcccttgtgatttcttctttgaccccttgattgtttagaaatctgttaatttccacacatttgtaaatgttccaatttttcttttgttattgccagcttcattccattgtgttcagagatgatacagtcagtgcctgttcttatgaagcaaacattctataatagtaggaccagtaccctgtctgtttcattcaccacagtcagcatgccccaagtgcccagcatggggcggatggccaggaatgagtgaaaacttcccttcctgggtagttgtgactagtagagaggaaaaataatataattgcctgcttactgcatgccaggcattgggctgggaatttttatattggatctaaaataactcttaagttaggcattatccccattttatagatggagaaactggccccaaaaggtgggaacttgtccaagacgtcacaggtagcaagaggtacttttacctggctccaaatctgtgttctttccactgacaaatgagatatgggatatggtgcatctttacagtactataataagtattggcgtataacattattttcaaggaactccaagggccacaggagctgacaggtttttcaattaatattcccaacatgaatgagatgcctcattcctcagtttcctcacgtgtactataaggctagtacctgctttgttggggtatggttggctcgtgtgcattaagtcaacaaatccctagttgatagggtttggctgtgtccccatccaaatctcatcttgaattgttcccgtaatccccacgtgacatgggagggacccagtgggaggtaatttaatcctcggggcggctacctccgtgctgttctcgtgatagcgagtgagttctcacgagatctgatggttttataaggggcttttccctcttgttcggcacttcctgctgccacgtggagaagggtgtgtttgtttccccatctgccatgattataagttttctgaggcatccccagccatgctgaactgtgagttattaaacttttcctttataaattacccggtctcgggtatgtctttatcagcagtgtgagaacggactaatacactagtactcactatgcgccgggcactggag

SEQ ID NO: 26807 - DNA, 2300 bp, Homo sapien
actaaaacgtttctgcacagtcaagaaaaaagaaaaaaaaagagtgaaaagacaaactacagaatgggagaaaatttttgcaaaccatacatctgatgaggggttaatatccaaatatataaggaatacaatccaatagtaagaaaggacaaaacctgaattaaaagtaggcaaaagatccaaagaaatctttctcaaaagaagacataaaaatggacaacgggtatattaaaaaaaaatgctcaacatcactaatcatcagcgaaatgcaaattaaacccacaatgagatatcacctctgacctgttagaatcgctattttaaaacataagaaagataataagtgttggcaaggatgtggagaaaagggaaccgttgcaccctgttgataggaatgtaaattagtacagacattatggacaacagtatggaggttcttcaaaaaaaataaaaatagaactaccttatgatccagcaaccctactactgggtacatatccaaaggaaacaaaatcagtatattgaagagatgtctgcagtcccatgttaattgcagcatcattcacaattctcaatctgagtgtccatcactaaatgaatggataaaaatatggtacatttatatacacaatgggatactattcagcctttaaaaagaatggaatgctgtcatttacagcaacatggatggaacaggaggatattgtgttaaatgaaataagctaggcacagaaagacaaatatcccatgatctcacttatatgaggaaggtaagaaaagttgaactcatgcaagcagagtagaatggtggttaccaggcggtggggtagggggagggagatagggaggattttgagaagttggtcaaaggatacaaaatttcagttagataggaggaaacattcatgaaatctattgcacgacatggtgactatagataataacaatgggttgtattcttgaaaaatgctaagataatagattttaagtgtcctcacccccgaaatgatcagtatgttaggtaacgttaactagctggatttagccattccacaatgtatacatatttcaaaacatgttacttacgataaacacgtacaatttttacttttccttatgtacgtcttcatctggctgttcatttttatcttttatactatcttttataataaactggcaatagtaagtaaagtgttttcctgagaaacaacaaactggaaacaactgtttagcaacaagaaactgcctgaccaggtagaaggacgtggtagctctgtatgtattgatatggaatatagtctgagataaattgtttaggaaaatgaaaagcaagttgccaaagaacccacagtatgatgtcatttatgttggaaaaaacgccacaacgatgtgtgagtgtgcacactgaatgaaagaaaattctggaaagaaactaacggccagcagtgtcacaagggggataggtagtttatttatttatgtgtgcgtgtgcaaagttccgtattgtaagaatttgctacagcctgtgttattataagctttgtaatgaaacaggtagaaactgaaaaagtttaattattcccaattcagtttaggttctgtctccggaagactttcccggattccccagcccccactccccaccccatcttaccaccccctctgccagctctgagtctcaattttcttttctgtaaggattttcatcatttaaccttatttcttctgaatgcactaaatggtagttatcctagcacttaagaggatgtcggaaacatggttcattgtctgacccttccgactctgacttgtatgagcacattttggggggaatgtaggagtcaggggaagaggagttccaaaaagagactactagagggtacagctgtcccggaagagacttctgaagagagcaaagcgcgtccgacgtttttctcgagaggcgccgaagttttccggaaagagacgaccaactgagaggtgggcccccaaagccggctgcgagagtcaccgaagatttccggagagccaaggagtcgggaagagccacttactgagcgttgccgaacgtgtacggagatagccgaagaggcggaaggcggggccacaagagcccttcctgcagggaacctcaggcttcagagagccgaaaagttgggaggcgtaaccacttacaggccggaagtgtccggggtggacgcattcgggtagccgaagaagtcccaggattgccgaagaagtcccaggatttccgaagcgagccgaagcatcgcgacagttttcagagacagctgatcggt

SEQ ID NO: 26808 - DNA, 2300 bp, Homo sapien
atcactgtataacaaattattccccaaatttagtggcttaaagaaacaaacatttattatctcatgtcttctaggataaagaatttagcatagctaaattctagctctgagcaagagctcagaatcttgcaaggttgaaatcaaggtgtcagccaggactagagtcacctccaggctaggctgagggaagattcacgtccaagctcaccacaagcttgttggccagatttagctccttaggggctgttgatttaagggctttagtccctcactggttattgcctggaggcattagctatgtgattcaatagcttcgctccatgtgggcctctccattgggaagctcaaaacatggcagctcaattgcttcatcagagcaaacaagtgagagatctcgaaactgaacaacacagaaatcatttataacctaatccgaaaatgacatccaccatatttgccgtcttctattcattagacgttgctaagtgatacttctagtgacatctagaagagaagaggatgccactaggccacgaataccaggagggtctcagtgtaatcagactttttatatgaaggctcagggatccaggcaccagtattccagtgacccagcctcagaagttacacagtgtcactctgcaggctactgatcaaaccagtcacaagcccacttttatttcaagggaaggaacaacgaattctggagccatgttttcaaactgccccagctattattatttttgaaactgtgcaaggatcccctggttcagaggtcttatggatgctgtcatctttgctgagatacctgcttgtgccttcagcatggaagaatgcctgtgtatccacctgtacggtaggggtcgctgtgactttgactggtgagggtacagccactggtgcacatgcaaaggtgcctatctgtgaacacgtattgagaggctggataaggctgcgcccatgtgagtgctgggcttgtacgtgcatttttgcctgagtgagcattagtggcagtgtccccagcctacccctttcctgaatcccaggctcatagccaactgcccacctatttccacgtggatgcctgctgagcacctcaaatgtcacacagccaagacagaactctggatctcctttcccagccacaagctgcccctcttccagtctgtaagttcttacggagcatatatatgtgatctgcctacttttctccaacctcaccacagtgacatgagcccaaaccaacttctcaccttgcaacagcctcccaggtgggaaggctgagtattctggcccttaaccagttagaactccccagttatctgtcctgctgatggggttgaaatctacattcctgaccctggcccaccaaagcccctcccttagctcccatctccctcctctctccctgtcttctcctctgctccagacactctggcttcatttctgcgttttttgtaccccataagctccttcccaccccggggcctttgcctttgctgttccccctgcggggaatgccggatctctgctcagatatcctcttctcagatcagcaagctaaagcagccacctgtgtctgcctaacccaccaccgtagtttaactttctgcctagtctttatcactagctgatatttctcaggatcctttagttacttctttttcgtcttcccctcctagaatgtaaactcttcccctcctagaaggtaaacaaaagacctgttctgttttgttcttcggcccatcccaagcctagcgtagtgcctggtatgtggtggtgtccaaacccaagcgtggagtgaatgagggatgaatccatgagagagtgagcggctccagtgggtatgcgcgagtgtctcactcggtgtagatgtgtgtgttgtgtgtgttgtgtgtgtgcgcacgctggggaggccagacaagtgtggaccagtgattggggcacctcttccctgcaaagaggccaggggaagacagtgcgtgtggggtcttctaccagggaggatggcttgctggtgtgtcccccccaggggaggactaccaacgaaggggacccgggagatggcgggtgggggcccccgggaggacagtgggcgagggagggggtccttgccaggcctggggcggccgggggcggtcctgggctcccctccgtcccgcctccaggcctcggggcctggctggccgacgtggcgttggcggcgctgcgcgcgggagggcagggcaggagggacagaggcgggggcgggccggaaagtttgtccggcggcagcggcgttggggactccggcgggggat

SEQ ID NO: 26809 - DNA, 2300 bp, Homo sapien
tatattcttactgcatacaattcacttgatatttcctattccagtctattcctttaggaaaaaaaaattaaggttcacaggccaagacaaattaaacacctctgaaggtcattaagatgctcaatttataatgacttggagcacttagcaaagatactatgggaagtgaagctgtgtgtacagtaataatatttgttgagcaattgctagtgccagctgcagtcatagtagaaagtgttttatgagcatgagctccatgaattttcacaataatagtataagatgagtactgttattttcactttagtgatgagaaaatcaaggccaagtacatatgtacattctgcctctagaagacagaagcagagccatctccaagcctactgcggcaggcccagagaagagaacaaccatgtttactgaatacatttgcttctgtctgaagtttggggagtagaaagcggagtaagctatgaccagaggtgggtctgggaatggtgaggcctgatacatgtataatttgcagcccctattcaagaaaaagagtacaaaattatgagtccaagattagataagaaaatgattatttctttaaattaagaaaagaaatcacaacaaattcaaattttaagaagctgaaaattaccacaaacatcacaaaattcccaactcaactttcctccaaaatgccagcagccacctgacaccaccctactcaagggcaagttgggggtggggaatcggagtggaaagacagcggtgtctacggcctgcagccaaatgtccaaagcaaaggacttttgtaaactttacatcaacaagccaccatctgaacacttttctaagtccccttagaaaggggtccaagcaagtcaggggcccaagaacttaaccttcatcagctcctgtaaacttacaactggaattgaagactgttacggctcaagagcaacggctttggagtcagccaggcctgaatttcattcctggctcagccactttctgccttctttgagcttggacctgctcatttgtgaaatgagtgtgctgacagcagctaccttggggtctctcttggggattacatgagataaggaagagttgggcattggatgagcttaaggttgcaaataaaaatataggacccccggttacattggaatttcggagacaaaagaaatactttttaaatataagtacgtacaaccaatcgcataagacatatactgcaactgattcctcgtttctctgaaattcaaattcacctgggtgccctgtcttttactgcacttaagaaatgacagtggttgatattgcttttggattgaagcatcctgggtgtcccacggtggaattcatagacattagagagtgggtgacgggctaggaaaggctgcatagactccaattaacacagttcattgccagggagactaaaaggggggtggctatgagaggatggagtaagtggggtgccttgatttgggcatgtaggtggagggggctatacctctcactttcactaaaccagttaagctcttgagacctcagtttccttagctgtaaaatgggtgaaacataggggagacccctgaaccgttctcacctaaataccacaccaatggcacttcctcataattcagatgtcacctcctcagagaggtcttccctgactgctctagctaaaattaccgcctctcctccactccccaacagcagatacatatattatttttctccctgtaactctaactttctgaaactgtcttgcttctttacttggttatttgtttatggtttgcctctccatgtgaatgcaagttccgggagggcagaaaactagtctgtcttgttctagctgagtctctcaggagtggtacctggcacagtagatgctcaatatattttgaatgaatgaatgggtggttgagtgaacgaatgttagtgtcactattgaggtcctctccgagccgtcgttcctttcacaggggtcatgcctgggttgcagggaggatgtgctgccccggggagggaggaggtgcggggtgtcggtgggtggggaggaggctgggccctggcctccaggaccggcgagagtgagcgcgctctgctcggctgcaggctcaggaagcggcgcggcggcacgtgctgggccagagccccgcgccctgcgtccagccgccgggtgtgtgcgcccgcgtagcccagcgtcgcgcctcggcgcccccacgcgcccacgcagcggcgcggggacccgggcgggggcagagggagggcccggcccagggaggagaaggggc

SEQ ID NO: 26810 - DNA, 2300 bp, Homo sapien
aggatcacttgaacccaggagttggagaccagcctgggcaacaaagtgagatgcctgtctccacaaaaaaataaaaatgaaaacactaggcaggtgtgatggtgcacacctgtagccctagctactcaggaggccgaggtgggaggattgcttgagcccaggaggtggacaccaggattttgctaggcaacacaacaaggccctgtatctataaaaatagaataactgtttatgtcttcctaagagagtttttgggttttgttttgtttgaaatggagtctcactctgtcacccaggctagagtgcagtggtgcgatctaggctcactgcaaactccgcctcccgggttcacgccattctcctgcctcagcctcccgagtagctgggactacaggtgcccgccaccacgcctggctaattttttatatttttagtagagacggggtttcaccgtgttagccaggatggtctcgatctcatgacctcgtgatccacccaccgtggcctcccaaagtgttgggattacaggcgtgagccaccatgcccggaccctaagagagtttttggataaagctttccaatcagggagtaaaaacagcacaagggatgaagacatgggacattccgtggggaatatagattggactcaccgctctgaggagcgacatgcaaacgggtttttcagttttaaactggggggcccagcagtttttccttggggtatcacttctagagaactccaggcacgtgcacccaagaagacctgctccagtcatgtggaattcgttctcataacaacaacatggaacccctgaggactggacaggtgaactgtggaatagacatacctgcagataccatgcagcagtgagaaagaataaactagatttctgtgtcatggcatggaatgaacaccaaggtattttattattagagtgaaaaaacatcctggaacaagatgtacaagatcaatagcgataacaacacattcacaaaacacatttgtaaaaacagtactgtatattttaatgaaggtgtgtgggtgtttgtgtttataagctatttatcctattaattgtggatacatctggtaggaggtagtgccccaatgtggctgtaatcttatctgaaattttaaaatgtatttacaaatatttttagatgttatttgggtaaccaaaattctattttaaaagaaaaagggccatgcagttcttatctcagcaggaggaggcacaggtggactagttggggtcacctgttgaggaattcctactaagtctggatagcaaatcccactctgaaatgccaacttcaggagagcaggaacttgtctgtctggttggacactgtatcctcaatgtctgagacagtccctggttctttgaaggcccttaaaggacaggggaaggggaggaaagatgaaatcaattagtgaaggagtagcagctttgctctttggtgtgctatgtaaacagcatcggtgattctaaatgatgggcagcctgactcaatgaatgaatcagtgaatggctttagtgtcagctgtgttcctgatccatttatctgccttctagcctttgcaaaggaaactgaatttgccttatttatctggggagatgattcccaacacattgcagccctgccccacaacttctattcaatgacacttccccatgttaagggagacagggtaggggaggatggaggtgtggacaggaggagggatttgtgatcacttccttgtggcttgtggagttcttccccaaagttgttgaagtgacaacagcacctgaatttcactggctggacccacagctgattcctactctaatttttcacactgaacacctggggcgtgatatacctgtatcaaaacaaaaggcagtctgcagtcccgcaggcaagggtctgcccacggctccaggtaggcatcttccagggcttgtgtgcagcaggagagaacgtctcttctccagcagttcatcttgggcctcccgttggccccaggtggctcacgtgaccaccaccctggagccaatcactgtagaccgaggaatgggagatgctaattgccaggctcagagcttgttagtagggtcagtcccagccaagccacgtggactgagagtcatggggagacctagggaaattaaataactcacaaacacctgtaaaaactgttacagtgactggtgtgtgtgatagagggccatgggcctgtgaaagctgcaggagggaaatcgcttactcagggagagcctggggaaatcctgccggaactgaggcctctgcagggt

SEQ ID NO: 26811 - DNA, 2300 bp, Homo sapien
ttggggtcacctgttgaggaattcctactaagtctggatagcaaatcccactctgaaatgccaacttcaggagagcaggaacttgtctgtctggttggacactgtatcctcaatgtctgagacagtccctggttctttgaaggcccttaaaggacaggggaaggggaggaaagatgaaatcaattagtgaaggagtagcagctttgctctttggtgtgctatgtaaacagcatcggtgattctaaatgatgggcagcctgactcaatgaatgaatcagtgaatggctttagtgtcagctgtgttcctgatccatttatctgccttctagcctttgcaaaggaaactgaatttgccttatttatctggggagatgattcccaacacattgcagccctgccccacaacttctattcaatgacacttccccatgttaagggagacagggtaggggaggatggaggtgtggacaggaggagggatttgtgatcacttccttgtggcttgtggagttcttccccaaagttgttgaagtgacaacagcacctgaatttcactggctggacccacagctgattcctactctaatttttcacactgaacacctggggcgtgatatacctgtatcaaaacaaaaggcagtctgcagtcccgcaggcaagggtctgcccacggctccaggtaggcatcttccagggcttgtgtgcagcaggagagaacgtctcttctccagcagttcatcttgggcctcccgttggccccaggtggctcacgtgaccaccaccctggagccaatcactgtagaccgaggaatgggagatgctaattgccaggctcagagcttgttagtagggtcagtcccagccaagccacgtggactgagagtcatggggagacctagggaaattaaataactcacaaacacctgtaaaaactgttacagtgactggtgtgtgtgatagagggccatgggcctgtgaaagctgcaggagggaaatcgcttactcagggagagcctggggaaatcctgccggaactgaggcctctgcagggtgagcaggagggactggagttccaggcagagggaacagcatgtacaaaggccctgtggcaagagggagtgtggagcgagagaaaggccagcgtgctggaatcagatattggacaaggagaagccagatcaaggctgtgttcggaactctttgctttatcttaagagcaatggaaagccgtcagaggttataagcaaggatgaggtgaggcgggcaggttcagatttatgctgtcatttgctgcacagagaacaaactggagggaggccccggtggccccagggaggtgggcaggggggctgccgtggtcttcctgggcagagaggatggtggcttggacctgggcgatggccatggaggtgaactttataaggcctggagatggattggacgtgagcattgaaggagagggagaagtaagagcaatcctgagcttttggtttgagcaactgcccccgaaatgggggaagccaagatggtttgtgattcacagatgtattttgaatggaaattgaatgaggctggtggaggctgtcagagacgtccaggtttgggccacagctgctgtctgtccagaagcctgtgattgaagtcagcaggctttgatttctcagcccgtgaaggatgctgggagtgaccctctccaaagtccccttagccgactggccatctgtcctctgcatctgacagacagggccaccatcctcagccaaggtagctggtgtactcacgggggtgtggaaaggtgagcggcccacccgcctgggaccctccatctgcttttgatccctcccagcctttgaagctgcccctgcccccaccctccagctgtcatctctcgggctcccccacttcttcccagtccccagggacaggggtggtgacaagggtaacaaatggcacaagccgcaggcagcagcaggccaagggggccagagggagggtgttcctgaatgcctctttcttcccgctccttcaggctgtcttctgaagtagccaggctatcagggttttgcaacaatgcaacaaagaaagaattttttttttttgtaaatgaattccatgcttttccttcctttcccttccctgccttcgtgaaagggaagctaagtctttctcctaccccagattccttgaaggctgtctgagttctctcttccttcccctgcatagagaataagctggtctccaatttcaggtaattgtgaggtggggaagagtggggagaatgtgaaggaagccttccccac

SEQ ID NO: 26812 - DNA, 2300 bp, Homo sapien
tttggtgtgctatgtaaacagcatcggtgattctaaatgatgggcagcctgactcaatgaatgaatcagtgaatggctttagtgtcagctgtgttcctgatccatttatctgccttctagcctttgcaaaggaaactgaatttgccttatttatctggggagatgattcccaacacattgcagccctgccccacaacttctattcaatgacacttccccatgttaagggagacagggtaggggaggatggaggtgtggacaggaggagggatttgtgatcacttccttgtggcttgtggagttcttccccaaagttgttgaagtgacaacagcacctgaatttcactggctggacccacagctgattcctactctaatttttcacactgaacacctggggcgtgatatacctgtatcaaaacaaaaggcagtctgcagtcccgcaggcaagggtctgcccacggctccaggtaggcatcttccagggcttgtgtgcagcaggagagaacgtctcttctccagcagttcatcttgggcctcccgttggccccaggtggctcacgtgaccaccaccctggagccaatcactgtagaccgaggaatgggagatgctaattgccaggctcagagcttgttagtagggtcagtcccagccaagccacgtggactgagagtcatggggagacctagggaaattaaataactcacaaacacctgtaaaaactgttacagtgactggtgtgtgtgatagagggccatgggcctgtgaaagctgcaggagggaaatcgcttactcagggagagcctggggaaatcctgccggaactgaggcctctgcagggtgagcaggagggactggagttccaggcagagggaacagcatgtacaaaggccctgtggcaagagggagtgtggagcgagagaaaggccagcgtgctggaatcagatattggacaaggagaagccagatcaaggctgtgttcggaactctttgctttatcttaagagcaatggaaagccgtcagaggttataagcaaggatgaggtgaggcgggcaggttcagatttatgctgtcatttgctgcacagagaacaaactggagggaggccccggtggccccagggaggtgggcaggggggctgccgtggtcttcctgggcagagaggatggtggcttggacctgggcgatggccatggaggtgaactttataaggcctggagatggattggacgtgagcattgaaggagagggagaagtaagagcaatcctgagcttttggtttgagcaactgcccccgaaatgggggaagccaagatggtttgtgattcacagatgtattttgaatggaaattgaatgaggctggtggaggctgtcagagacgtccaggtttgggccacagctgctgtctgtccagaagcctgtgattgaagtcagcaggctttgatttctcagcccgtgaaggatgctgggagtgaccctctccaaagtccccttagccgactggccatctgtcctctgcatctgacagacagggccaccatcctcagccaaggtagctggtgtactcacgggggtgtggaaaggtgagcggcccacccgcctgggaccctccatctgcttttgatccctcccagcctttgaagctgcccctgcccccaccctccagctgtcatctctcgggctcccccacttcttcccagtccccagggacaggggtggtgacaagggtaacaaatggcacaagccgcaggcagcagcaggccaagggggccagagggagggtgttcctgaatgcctctttcttcccgctccttcaggctgtcttctgaagtagccaggctatcagggttttgcaacaatgcaacaaagaaagaattttttttttttgtaaatgaattccatgcttttccttcctttcccttccctgccttcgtgaaagggaagctaagtctttctcctaccccagattccttgaaggctgtctgagttctctcttccttcccctgcatagagaataagctggtctccaatttcaggtaattgtgaggtggggaagagtggggagaatgtgaaggaagccttccccaccaaagtgcagcagagctcaactctgcccctcaaaccacaataggaaccagtggtttccgggtgatcctgatgacagtttccagtgtctacctggaatgaaacgaatggtgtgtttcaagcctttgtctgtgtgcatgcaaataatctcagctgccctttgttgaatacccactcactcgtgccttctctgactcatttttctcagaata

SEQ ID NO: 26813 - DNA, 2300 bp, Homo sapien
ggaaccagagcttctgcccagctgtcacccttgaagccacatggagggaggttcatgaaatgctaacaactgctttaaagagaaaaaaagacaagaaccctaacctgtacccctgttcctccttcccacaggcacaacagggttctatcaaggaggaaatggactgggcaacgcagccggtttcgggagtgtgcaccaggtagacatggctccctcccgattctttcctcagttctttctggaaatattccccttacatcagggcacccagagagcccacgacacacacaatccccattgggaacctgcctcttagtccctgggtttggagactacaggggctagattgtgcaaaaggctgctggaaggacacagtatacaggcggagacgtaggaattgttagaagattcctgagatgtcatggagatctacaagtatgttccatcttgacctggactcaggacacccattgactgttgaatctgatatatatcaatacaaatgggtgggttctttcaccagaccatgggcttctcaagggggaccgtatatcttgctcacctctgcatccccagtggtgagagcccagcacacagtgggggctttataaatacttgttaaatagagcaaagtcaactctatataggtaaatgttggctagtactttgattctcttggtgtcacttacaaagtgaattaagagttcgcatctgctcaaagtgtgcagtaactctgctgtgtgtacaccttccctgtacacctaaaattatttcaaaacaaaaggttcacctgctttcaggctaccatttaaaacagaaccaccctggggtagatgggctttaggaatatttaacatatttagatctgaggaatacgcaatttcttttccagtgagaatctaaataatttaaaacttagcaaatgtaaaaattgtttcatgtatttttgcattatttctaatgtactatgtacatagataaaatacttataaataaaacagtactttttaagatgtggttcttaaccctccatttcaccattaaatctgtgtttttcaaaaacactgaccacccccgcaacccccacccccaggaactctgactcccagctctggggtggggcccaggaagcagaacgttccatgagttccgtgcagggttgagaagcactggtttggtgatagtgcggcaggatatttgaaacaatgactgttggagaattgggatcgctggtctgcttaaacaaagcttgatcaaaggtgattggcagctattgaattgatctccatgactccctcatagaatattctggacccctaatgctgtgtaggtgctgctgtatttgcacctcctccccatgaacataaaatgtcacctagtctcctgggtttgtgtgtcgtgtgggtgtgtgtgcggtcttctaggtttgtgtgtgtgtcgtggggggggggtgcagtgtggtcttaattgttaatgcatttgtttattaatttaaccagtatttgttgagttactgcatataccaggcactgtttcaggtgcagaggatacaatagtgaccaggacaggtgccatcagggccacgtctatatcccttagggtggcctgtggacctccaggtgccagcatctgcatgcctgggcccaaggggcttttctagaaccagtgcacggggcaggcaggaagtgcctgggaattaaagccccctgggtgcagctctcaaagaccaacaagttgatgtataaacccctccactcccttgacccgtgggagaggcagttctgagatgtggattttagaccatctcagcttttcctcatagggctcatctctggtcactaccacagaagcacctatgcaggctgctctcccgcatctctctcacttccccgatcccctgctggtgtctccttcaccttccaaacagcctccttgcacttgaatccttgccccggggtctgcttctgggaaaccaaaatgaagacagtttctgcccacagagagcttttattctaatggtgagacagagtggccaggctgaccaacggcccgagcccagaaaggcttcctcacatatgtccttggtttgtttttctcttcccaggactatccttcctaccccggcttcccccagagccagtacccccagtattacggctcatcctacaaccctccctacgtcccggccagcagcatctgcccttcgcccctctccacgtccacctacgtcctccaggaggcatctcacaacgtccccaaccagagttccgagtcacttgctggtaggtgcagtcactggt

SEQ ID NO: 26814 - DNA, 2300 bp, Homo sapien
cgaggcgggtggatcacaaggtcaggagatcgagaccatcctggctaacatggcgaaaccccgtctctactaaaaatacaaaaattagccgggcatggtggcgggcacctttagtcccagctacgcaggaggctgaggcaggagagtagcgtgaacccggaaggcggaccttgcggtgagcagagatcgtgccactgcactccagcctggcaacagagcaagacaccatcaaaaaaaaaaaaaaagaaagaaaaagaaaggcaatctaaaataaaactgtatacaaaaaaacaattctatttctcttagtaggaatattttttcccggaatctggaatatccctggggactaaactgaagtagaaatataaaggttatggatttcaaatccatcctggctagcccaaggcactactaatatttatcattaggaaagcatacagatttttctttctagtctgcaggctggagttccagagagaggaatccttgctgaaataatcagtcttgtgttttgtctaatctatgtaagcctcttgggcctcagtcttcacatctataaaatggaattggtattctttgcccaacatctgtttcaaagagcagaactaggtagaaacttgaggaagaaagagagctttggagcaatggagaataaataccattggcttcaaggcttgggactgtctctattcaaaagcaaagttcaggctcgcttcacgatgacgtctatggctcgaaggacacaagagagaaaacaaacaaacaaaaactgtggccgttgaattcagtgagtatttatggagcctaatgcggtaaagactcagccgattgcaaagatcaaaacccaactcgttttaaccaaaagtggaaattattggcccttgtagttgaaaagtccagggttgttttcattcttgcttattgcccccacttctgtgagaacagggaccactctgtgtgattgaccctgaatctctagggcccaggcagtaaacaaccaaacaaatccataaacaagaccatttatgataataaaaaggatatgaagaaaataaaataatcagatgtgagaacaagtgatggggatggaggagggttggggggcagcattcttgagggggccggtccagggaaggcctcttaaggcagtagcacttgaaccaaaggatgacaagcacccattcagatggagatcgggggcagtggggcggggacagcaagtgcaaaggtcctgagtgagaacaagcatgaaggcccctgggatcagagagaaggcatggaggccgaagtgcaggagtaaaagtatggaggtggccaggatagatgagcctggggcaggagatattacagcaatcgaagctcattctaagtgccttggacatctctggggcaagctgatattaagaaggaaaagccacatggtctgggttgtgtgttaaaaagacctctctggctgctgtgtggagaatgggcagtcagaggagaaatgtggtctgggcatggtggctcacacctgtaatcccagcactttgggaggccaaggcgggtggatcacttgagatcaggagttcaagaccagcctggccaacatgatgaaaccctgtctctactaaaaatacaaaaatattagccaggtgtggtggcgggtgcctgtaatcccagctactcaggaagctgaggcaggagaatcacttgaacccaggaggcagaggttgcagtgagctgagatcaagccactgtattccagcctgggcgacagattgaaactccatcttaaaaaaaaaaaaagtaaaaaagaaaagaaatgtggaggcagagagaccagccaagaggctactgcaatagtccaagcaagagaagaaaatggactggatccaggtggtaggaagacgtggacttgagggtgaggtgaagccaagaggacttgctgatagactagatgtggaggttgggggagagagaggtggcaaggactcctgggcttgatctgaccaggatgtgttgtccttcactgagatgggcaaaacagaagaggtgtttggtatgcagtggaggatcccatccccctgtctggggtacgtggggtttgagatgtctgagacaccctggtgaagatgccagatcaggcagcagatagatgagtttgaacctccactgcagtaacaacaccaggcatggaataggcgccttgtggatcttggttgaacctgcgactcaaagccaggtattttgtgggatttctgtgtatttcaagctgatgtcttcagagtcttgccccactctgctgtttctgtctg

SEQ ID NO: 26815 - DNA, 2300 bp, Homo sapien
aaagctaggagggcatttgtaaagaagtgggggatggctgggcctctggagagcaagctcctctgagtgtcagtgggtgctctgcatcttcaggtgagaaagcagctagagttagggacccatctggggctatccagaggacaacagctcccgttgggttgcctgtttggtgaggacattgggtggcatgggtgaaatttggcatgccatttaaataatcctcttgggtccttccatgcagctggcccaactcttgatttgtttttattgctaataagaattttattatttccatttactgagtgtttccttggacactatgctaagcactgcatatagattgtcttgggaggttgatacttttatcagtcccattttgcggatagagaaactgaggctcagagagataaataacttgttcagggtcacaccagtaataaaaacagaaaagcaggatttgaattcatgtcctttggactgcagtacccaagcttttcctatcacatatgtgcttacacttttccttcttgtttccaatcattacctaccagtagcacaagcctaggatcccagaattataccagatctgggtgtttgtattttggcttgtgttcttcctgtgttgccctggctagccttgaactcctgggttcaagcagttcttctgcctcagcctcctgagtagctgggaccacaggtgtgcaccaccatgcctggctcgacttgtgtttttgattgagccctggtggaggcagatacattccccaatgatccagctgatcccccatgccccgggctgttcatggctctggtatttttgcaggtttctttttggtgtatacaagtcggacagtggcaccattcacagtggccattgctctagaatgaagagattgcacagacttgattgggttttctttcctctttctaaaagtttaggatatggtattattatctacagtatgatggcataacatatggttgggggcaggagccgtaaatgggttaaatggaactattgttagaaatgtgcttctgcccatttttgtttgtgtgtatgaaacacctgctagtttgtgcttcttccttttgaaagagacagaagtatgtgacttctctcttgactcctttaccagtggaagagcaatgcacaccgagtggcagttgactttccacgagtgcagggaacaagagggagggctgggcacccgggtcacctggagacaagtgtgtcccccgcctagaggagccagtggctttcctgttccagccaatgcctggcaggctggtgacccagagcggctagattttccgctctttcatcagaagcccctgctttgatttctatatgaaatttcctgatttgtgagttggacaacacatttataaattaaaagcagacaagataccctgtgggccaaaccagtgcctctcgcatgaaacatgtctgcaagctagatgtggcttgtgggctgtttgcaacctctgctttaaggctttggcttattttctttggcctagacacaaaggatcaagaactttaaccctttggaaacccaagggaagagtgttggtggggagccaggaacccggggttctggcctggcctctgtcttgtgtcctagggcaggtgatatccctgggcctctgttttctaatctgtaaattggatcagtttgaacagcttgtccctgctgttcccttccagccctcttcattctcaataatcccaattagttatcaacgttgcaaaaatttggcaccacatgtttagtgccatataaatttaaaatctccgttggtaggtcctgtgtctcctaacaaccaaaaccctctcccaaggcaagtaccacttggcagccgtagccagttgccacttgagattattactggccccatttaggccaatgtgatgcgatttgaaacgtgcttttcttattccagcatttggtgtggaaaaatgtttgcatttttcatcctgctctttattttgtgactacgccacatgctgggttttctttttgaatttaggcataaatgaaatctcggaagatgtctatacggccgtagagcacagcgattcggaggattctgagaagtcagatagtagcgatagtgagtatatcagtgatgatgagcagaagtctaagaacgagccagaagacacagaggacaaagaaggttgtcagatggacaaagagccatctgctgttaaaaaaaagcccaagcctacaaacccagtggagattaaagaggagctgaaaagcacgtcaccagccagcgagaaggcagaccctgga

SEQ ID NO: 26816 - DNA, 2300 bp, Homo sapien
gtgtttagttttagtttgtgttacgatctggtgtcaccgagacttgcaaacaatccgcctgtattgtgaattcggtcccagggatgtgctttatttctcctgggttgttttctcttagatgccaactgttgaaatgggggtaaaatgtaacataagaagtctattttgtcttcttctctttaaaatattggaaaacgtggcagtgttgggtccagattcctacatggttgctttggatagcaactgagtagatactgctttctccctttccaccagacgtgagttttctgcttctgcaaagtcccctttgctccccactgctttctaccgggcttcagtttgtggtctgtgaaatctaaaaggccaccttggaggttgggtgcagcggctcacacctataatcccagctcttggggaggccaaggtggaaggattgcttgagttcaggagttcaagaccatcctgggtaatgtagcgagaccccatctctacaaaagtatacaaaagttaaaaaattatctgggtgtgttgtggcgcgtgcctgtacttccactacttgggaggctgatctgggaggattccttgagtccaggagtttgaggctgtagtgagccttgatcatacttctgctctctggcttgggtgacagagggaaaccttgtctcttaaaaaaacaagcaaaaaagactgggcacggtggctaacacctataatcccagcactttgggaggctgaggtgggtggatcacgaggtcaagagttcaagaccagcctggctaacatatagtgaaacaccgtctctactaaaaatacaaaaattagctgggcgtggtggcacacacctgcagttctggctacttgggaagctgaggcaggagaattgcttgaacccaggagacggaggttgcagtgagctgagatcatgccactgtgctctagcctgggcaatagagcgagactgtctcaaataaataaataaataaataaataaataaataaataaaatgaattaattaaacaaacaaaaaatcccccacaaaagccttccttggaaagcttattctcgccagtttttccagccagaaactgggttgaggccagcagatcatacatggtagccaagttatttctgggatgtccctgtatcagctgcgtggtcacccgcagcagcggttgtggtgtttgcacctcccccgggggccactggctctggttccagaaaagctgctgctggcattgtttgttctgcaaaaacatgctgtcatgggtctttgcagagcaaaattggaatgtgggatatggatgttaggaagatggaactggcctgggatgggaggtggaaagtgcacgcctggaggcgaatgggctcctttttcagtgattttctgtgtgaattatcttacattcaaaaacatgtacctccttttagggatgcagtattccaaagtttccttctgttcctatttcaaatggcaatgggaaaaggaagctttttatgtctgagtgtaacctgaggaataagtctcttttcagaggtgttgtcagatgcagtggctgatttatttttctctactaagagaaaaccaaagaggattgtttctttagtggctcacaatgactaagtctgttgcacttttaaatgttttcgccgaagttttgttgttcatgttctgttatggtagaacatgcttgttaaatggatcattaattaatccttcaaaccaagtttttttttttttttttttaatagaataagaatcttggcaaacatgcttggctaatttggttcacatcaagaaaaaagcaatcttggaaattactgaagttgacttaaactctctttatcttttgcccttctagggcctgggttccaataaataattgctacctcatgtctaaagaaattcctttttctgtgaaaaagactaagagcatcttcaacagtgccatgcaagagatggaggtttacgtggagaacatccgcaggaagtttggggtttttaattactctccatttaggacaccctacacacccaacagccagtatcaaatgctgctcgatcccaccaaccccagcgccggcactgccaagatagacaagcaggagaaggtcaagctcaactttgacatgacggcatcccccaagatcctgatgagcaagcctgtgctgagtgggggcacaggccgccggatttccttgtcggatatgccgcgctcccccatgagcacaaactcttctgtgcacacgggctccgacgtggagcaggatgctgagaagaaggccacgtcgagccacttca

SEQ ID NO: 26817 - DNA, 2300 bp, Homo sapien
aaacctcttaataccagcctgggtaacatggtgaaaccctgtctctacaaaaaaaacaaaacaaaacacacacacacacacacacacacacacacacacacacacacacacacacaaaattagttgtgcatggtggcgctcacctgtagtcccagctacttgggaggctgaggctggaggattgctggagcctcagaggtggaggttgcagtgaggtgagatcttgccactgtactccagcctgggcgacagagcaagaccctgtctcaaatactaaacaaaacctcataataaaagctgggaacaagatatgggtgcctgccttcttggcaactcttgcacattattttggaggtcctagccattaaaaagaaaagtcgtgttaaagtatatgataggaaaagacaaaactgatgttacttagagtaatatgattttcagtcaataaactattggaactgtctatatatgaggtctgtattagaaatctgacagcatttctgtctatcaatgataaccgtttagtaaatccccattcgtagtatcatcaaaaagtatgcaggatctcaccaacgtagaagatatttgtggaggaaaccatcatgttttactgaaggacagaaaagaaacatgttatacagtgagatttattcgagggtagggaatatggttgtggctaaactattctctgtggttttattgccagggaattgaggctcaaagtgggttgagtcactttcttaaggtcacatagctagttaccaggtctttttgaatcttcccacaggacttacatgtgtacttcctaaataggatttcgtatttgtttctgatagacattttcattatgagtttctcctgagtgagtttttgtgttcaagtgtggctttgctggattccataatataccataatattccataatataccaggaagaggtcgacctcccatgagttggccacccatctcatctttctgccattgctgatgtcaaataagagatatgtctccctagcaaaaacaaggacctaccatgctcaagaattatggctttaggaagcctcttgttggctcataaatgctttatgtattgggggtaaacttaaaaattagataactggccgggtgcagtggctcacgcctgtaatcccagcactttgggaggccgaggtgggcagatcacgaggtcaggagattgagaccagcctggctaacatggtgaaaccccatctctactaaaaatacgaaaattagccgggcatggtggcacacgcctgtagtcccagctactcaggaggctgaggcaggagaatggcttgaacccgggaggcagaggttgcagtggagccaagattgtgccactgcactctagcctgggcaacagagcgagactccgtctctgaaaaaaaagaaaaagaaaaagaaaaaaaaaattaggtaaccattttttggtgactgaaaccctattgatctattctctaaatgtctgccatttgaagaatcccagggcaaactactatgcttttattggctttgtaaattgggacttccataagttgggcttccaaccacattagcattgttagtatggtggcattttgataaacaggcatacattatatcaccccatttaatagcaacacagtaccatgaagtgttaggcattatcatctccattttacagatgagaaaattgaagctgagaggttaagagacttgtccaaggtcatgcacctggttaatggtagagttaaaatctgaacctaggtagatgtgggttataggcaatgtgccattctgctagggctgccttgtaactcttagataccagcttttaatcgtggcctcttaaaatagaaaaaagaaaaatcctcataattttaacaacttgctaattatatatttagtagagtaacctaagatagtttggctttttaatgaatttgtgaaatgctgttattttcttttgttgttattgatgtacttgttcaaattccttttgagaatgcacatttgttttgaaaccaaacctgtctttttgcctacatttcagtcagaactaagacatggtccgttttactatatgaagcagccactcaccacagaccctgttgatgttgtaccgcaggatggacggaatgatttctactgctgggtttgtcaccgggaaggccaagtcctttgctgtgagctctgtccccgggtttatcacgctaagtgtctgagactgacatcggaaccagagggggactggttttgtcctgaatgtgaggttagttcctgatgaatgaatgcattac

SEQ ID NO: 26818 - DNA, 2300 bp, Homo sapien
ttgtcattatcacccagtttccccaaagccattaataaataccttcgttaaatatgtaaacatgatcagaaataattcagaggagtccagcgtttactgggtttcctgggtgttcctccatgtctctgcaaacccagaagcctcagagaacaaacttttaccctggttctatttctggtctcctttcacttggattttggaccatgcccgtctatgcagacgggattccatctttattccattttatggctgcatcatgatgtttcacatatgggcatcaatgttggttcctgtctgacttttctacaaagccctgttgcagtggctaccccgtctatccttctgtgcacccatgagccctgtagacaataggacatgttcttagaatcaccccactactatctgagtgatgttaagcatctttatttatttatttttgagatggcatcttgctctgtcaccccggctggagtgcaatggcgtgatctcgactcactgcactccagcctcctggggtcaagcgattctcctgcctcagcttccccagtaggagtagctggtaccacaggtgtgtgccaccacacccggctaatttttgtatttttaatagagacaggatttcgccatgttggccaggctggtctcgaactcctgacctcaggtgatccgcccgccttggcctcccaacgtgttgggattacaggcgtgagccaccatgcacagccgcagcatctttacgtggtggctggccagggtaatttgggtgacatgttgggtctgaactcttcgctccccaaaggaatgtgacaaggtgactgtggagggcctgtcccttcgtacctggcgtttcagtagagaattttgccttctttaggtggcttttagagataccatccagggcagatggggaccttggttggttagcagtggcgcctcttccttcatctgccccctttctgaagctaatttccctttgcttctcccaacccacttctgtgcttcaaatgctgccagcacagaactgtctttttgtttctgaattgccctctgacgccgcgattccccattgcagtttggaagccactaccaccggagatttccagaacccaagccaggcaggggctggataaatagtgccaacgggtgtcagccaccagaaccagctcctcagccagccacaatgtaaaggccagaggcaaccggtttctccacattctttgtggtgttccggtcgagtttgaagggcctcatgtacacatgttggagggagcctttggggcctgggcctgctgagggggtgggtgggtggtgggcagtgcgttctcacagggagtcggatcctgcctcagtaaaattggaaagaacttggcattcttgatccaggaaattcctgttgcgatgttgtcgtttttccagagggcctcatcccagctggggaggagaaagggccgcggttgctattgcctctagttgttgagggctaaacactgaattcaattgtaaatcagcctcttttctgtagattgaagcaatttctgtcctgccaggcgagtttggaagttcgccttttacatatgaatgtgccctttaatcaccacttctgcattattgagagaagggtggaggaggctgtgtctagtgggaaaggattatacctcaagtataaaagatgggttttctcatttctaggagaggggcatcagaactggagaatctgaaacaattactaaaaatgttaaaaacaacttcaaaatgcaaaccacagctgtttccctccccccaggctcccttctgatattgtcacctcggccagcagaacaactgcagttcctcgtatttattcacaatcccacgaaatcaatggctcttcggtgcactgcaccggagactttcagctcagccgagctgctgttgagggtgataaattataggcgaaagcccggggacatgaaggcaagtcgctgggtttcagactgcctgattgcaaagaggtgacagtgtccttgccccgccgggcgacctaatgcgtacaagaccggggctggcctggtaagtggtgactcttagcctgttctctttgcttcttcctcctccccctgggagaggccgctgaggatccggaagcaggaatgtctgctgtgggtgagcctctgttctcttttgaacaagagaggctaggccctctgagcagccgcactttctcaatggcaggtaagtgcctcctcttggcgttccctgcccctcgcatgttctgcctccgaggtacttgatgttcctggtgaaatgccattttccccaag

SEQ ID NO: 26819 - DNA, 2300 bp, Homo sapien
gtgtgtgtgtttttttttgatttagtgttaagaactagtatgttattaggaaaaaaaaatgaatattacatcaaaagtaggcgcaagaaaagatctgtacctgtctgaattgccccactgatgttggtcaatttaggttaagaactgttcagtcatttgggggaaaaaaaacagtcaaataattcttaaaaagaaaaggcagctgcatctggagaaaatactctgaacttctgtcattaacacattaaagtcttagaacatagacagcttatttccttccatatctgctagcttccagcaaccctgatgatttaaatcaaaaacaatgggacaacaagctcttgtttcaaactgacattacttttttccctttaaaggtctgttgaggaaactgggggcccgctacagaaaagggtaaaattagctgaaaagcaaacaatttctcactccaataggaaaatacaccatcaactagttagatacattgtatacaccaccacctcttacactcacatttacccaagtcatttgcctgcagatttcacaaactgatacatttgaggcaattcaaagaaataacagtacctgcaaagataaccaagaccaccccatcccatcccaaaaagaataaaagatttctcccccagtgcctgagcaagaaaacctatgcttacttcttaacctgcatgcactgaaaaaagagcaattaaaagttgcagatgaactactgcacctccaggatgctttaagccttctgattgttaattctgaggactcagggatggtccgtaattcccaggaatctcatctcctcaacacttccaagagagagaaaaaagaaagcatctagttttgacagaaaaatgcctgaatacacaatgcccacatatttcttttccccaagtgcccctactatttgacttttaaagaagagtatctaagccatctagaatatataaccaacatgcacaagactctggttctacagatgaggatcatcgcacagcaattcaagaatcatgcatcattcgaaaggacttttcctggtttttacttttcattcaaaataccaaaatggtccaggctgtaagaaatatttaatccccaaggcataacatcttcctcttctagattacaaaatagtgaacatcaaaattaaaaaccatgcttccctaaatctacaattaattttttaagaaattggggtgggggggaatggttagcagagcagctttatataagcactcacctaaaacaggcagagtcatcggtagctaagctatttatgcaggattcttaaaatggcgtctggcaacactgcctcattcctgtgttgaagctaaaatggtagcagtttgttcaatagctgtagctcttgtttaagcagccctgcgagtttcaaagccaccttcctaaataccagaactaggaaaagctgaaccaaaggacaccaacaacccaacgtttagaagcttaaaaaaaactctgcaatgacagggagagtttgtgaagtcacaggttcctaaggaaaagccttctcttgtagatcctgagccttcaacatgaggctctgtgatgaggcccccttgccctcaaattaggtgggtagaaggttaggaatcgtgcagccccgtggcacaaactgcagacggacaggtgtctgtgcaaacacaaaaatgttcccagggagcagcctgggggaaggcaaggaggaagcccggtcccccttctcttctcagtctattagaaaccagctttgcatccataccaaaaaggcgctaggtaaaatgaaagtgcttcaaggacagcaggcatctgaaaagccaagctaaagggctgcacctcagtctacggcaaaggtaaaataaaaaggctgtttataagcctgcaaacagccaccaaatacccagccctctgaagcagccagtcctaagacagttaacatcaaggaaagacaatccgagtctgcagaggagaaacacaaggaaaacattcccttatccaatgcacaggatactcacaaattagatttctgaccacccccaacagagcctgagaattaacaatgggttttgcaaaacccgctttcagaggccgaactaacagcctgagtggataacgtcatttactgttacaggtctgagcattggcctcagaactcctctggtgctgggagtgaggagtttcaaggtgactgctttttagctccaggggagaaaggagggcacagtgcccaaggccatgccagggcaaggacgggccactggcccccgccggccggtaggtaaggtaatcgggat

SEQ ID NO: 26820 - DNA, 2300 bp, Homo sapien
ccgaattggaaaaaggctcatttaatcagcagaaacgtaccacattctaagttgagaaaagtctgtgcaaggcaggccagcttagcttcttagagtaaaactgcaggcagttaatgatgttatatacttaaaactgaacagtgccactgccccaaacaagtaagttcagacactcagctattttctttgttcttatctccttgctgtaaatggaaattacatatcgaggttcttgtggcctccctagaagcaatatctaatcataagactcctggtttggtgccttcaacgtttgcataatactgtgtttgttgggctggaagggaacttaagggcaaggcatttgtcctctaaaagcttgcattaaaatggctcccacaggtttggagagccaagatctgttttcaaatgtacagcccccagcaagttcccaaccctggaccaagctagccacttttcctctggtactgtgacccctaccaagcatgagtctgtaaaaagttaattgctttcaaagtagcattattttccagtttcaggaaagggggaaaaaaataaatgtctgcattgcagcaggactaggtagggacggcagtactggctcccagagcagcccaatggggttcttctactctagcttttaaaccaatagacttggaggaaaggttaaagattgacaattgcagtggccgaactaagaacgggccttctggaaatttctaccatctttgttccttttaggaaaagcagatctgccaagcagaagcgtctcctaccttccattcctaggtcatctcccttccctgcttccccccaaccccccttctttttctcatcaaggtagaatgttctctctgccacgtttgtaaattgcagaaggaggaacagaatgttgggctgttttcctttttccttctgcctcctcagtccccaaagaggatacacagctgcaaggagcaaacacagacacactgaagcttttgattcctctccttttttttccttcaagaccctccaggatggattcactttctgctttgggaaattaagtggcattcacgtgggggagggggagtaactgcttttattagctccagaaaatggtcagtgttcagtctgtaactaggaattaattatatataatcactcagtaaactttctacagagtttttctaattgctgagcctgatcatagttagcccgttggcgccaagtccagttacttttataattaacagctcaaagatttgagtcagaaagaaacaattgggggcctcttggattataaattagggatgaaaacaatagctttttttcctttctttcttgtcatcccttttattttcaacaaaacatttccccttttctttccctgggagaaccagtggggagactgcatcaggtcttaaataggatgaggggggagacactttttaggaagtggggtgacagtaacctagaaaaccctggaggcaaaggtaggtttttaaaagtccagccacttgcaacgcgtgatgtctttgtttcttttgccctctttccccttctctctcctgtggcagaggcagcagacatttgtcagcctgggaaccctcaatctggctttgcctctggttgactctggaaagaaagatacattcaaaggggccttcgctactgcacagcagagatttaaaaagggaatatgtttcagaaccctttggttactcttaaaatgcaagatctgagcaagggttcacccttggcttcaggttgctaaggttatggtcaccctccccgctacttcccactctccttgcagacaaacaaacaggcagtggccatgccagctctgcagccagtgtgctgccagcctgtcccccccatcccgattaccttacctaccggccggcgggggccagtggcccgtccttgccctggcatggccttgggcactgtgccctcctttctcccctggagctaaaaagcagtcaccttgaaactcctcactcccagcaccagaggagttctgaggccaatgctcagacctgtaacagtaaatgacgttatccactcaggctgttagttcggcctctgaaagcgggttttgcaaaacccattgttaattctcaggctctgttgggggtggtcagaaatctaatttgtgagtatcctgtgcattggataagggaatgttttccttgtgtttctcctctgcagactcggattgtctttccttgatgttaactgtcttaggactggctgcttcagagggctgggtatttggtggctgtttgcaggcttataaacagcctttttat

SEQ ID NO: 26821 - DNA, 2300 bp, Homo sapien
ccaggaagagcaggcccctcccttttggtgaggcccaggcctgctgtcctgagccctggagctttgtcaggttgggtggccatggagctgtccctccctgcagcttggcctcagcagcctaaaacagtaacaacagcaacatcctgtccgtttttataaagcctgggtcctgccctgccgtacagtgagtttcgattcccagctcgttcctgagcctgtttgatatgagattcccggccaggaagaatttatgtacaagcagtgggcatctgttgtccatgtgggggttgggggggggcagggaaagcaagccatcagctcttcgttttctttgtgggaaccgtgtgggacaagaaagcccacaagtcctaattttaggaggagaggggagactttattgctccggagttatgcctcctggcatatggctgcgttaactctggacgctttctccagcctctaaagaatggtgtttatttagcttctgtggttccaggttgctgttttaaaaaatcctgttaattaagcaccttgtcatttaaaatgccgaagaaggaaagagagcgagaaagctggggacattttacggtccttttctatctctgggtacagaccaactgcgaaggcagctttagggaggagaccagcaaagacctcctaacgcaattgaagtgggtagaattgtaagcagctctgaacaaccagttaatattttactggggagcggtgccagagatgggggggtgggggggctgccaaatggagggctgtgtgtgaaatcgctgctccatctgccttgggggacgaaaagaagccgttctctgtgcaaataaatggaagcaagaatccttaggaagcccaggggatttgtctgcccaccgaggagggcccaactcccccaggcacacacatacagggatgattgtggcaggaagggctgacctacgggggtaggcctgacgcataatgggggctcttgtttccgggctgagcgtgccatctttctgtctccctctggattgaaatggcttctcagcccgagaggcactgcctgtgccctggattcacaaggtacacgcctccctgggaagcaaaggctgagagacagcggctctctctctctctttctgcatctgccgggagagctgcagctggtatttttccacaggccttcgctgcgatctcaaggcctagtttttcccagccaggccccgagtccgagagagggttaacaggcaggaagccgaaggcatcgcaggctaatacggaagtcagatttgtgtttaactgacaggtttagcaggtctcggccgcgggggaggggccgggagggaagggaagtttgtagatccaggcatgtggcctgcgaggagggctttgggtttttcttagggtaaggaccgagaggggtcccccttggcatcgtggcagggcgacaggaacccacgttgattttgcctgcaggactggctaagcagggcgcgagaggcccacggctccctggcctgccttgcaaggaggcatggggacaatgactatgcaaacttgaccactctgctcccctcctcccctcagcagctactcctcgctcctctgagaagccagggctgctctctgctgatttttcggggctcccccgggctgcctgcttcccccagcttctcagaggcctgcctcaagcccctttttctggccccttggctgtttccccgggactccccactccccagcttccccttccccttggagagccaccctgctggactgttctagaaaaaggctggccttcctccctggacaagggccgtttctctgggggcaggtgagggtgagccgttccagcccactccaagaaactcccttcccagggacctccgggcctcaggctttcctggagcaggtcaggctggctgccctggctggcccgtgccgggaaatctagccagggtgcaggagaagtgcgtgtgggggcccctttcccaagtttttcttgctgcaaaaggcctagcttagcctgtctttttctatgcacaggatggctcttgctcacccgagcctcacaaagataatcgctcaggaagtgtttcagccaatccggggcggctttacactccgatttgccggggcagccaatcggggatgagcttttattaggcggccagatcatcagccgaagtgccaaaccctttttctgtgagaactaggagcctgtcctccatgttttataagtattgacattacacagtgttaacaatgcatccacagaggtaagctcgactttttaaccatcttttttcccc

SEQ ID NO: 26822 - DNA, 2300 bp, Homo sapien
cccaggctggagtgcagtggcgcgatctcggctcactgcaacctctgcctcccgggttcaagtgattctcctgcctcagcctcccgagtagccaggattataggcgcctgccaccatgcccagctaatcttttgtatttttagtagagacggggtttcgccatgttgggcaggctggtctggaacttctgacctcaggtgatctgcccaccttggcctcccaaagtgttgggattacaggtgtgagccaccgtgcccggcccagaaatgagatatttaattttttaatttttactttttttttttttgagacggagtttcactcttgttgcccaggttggagtgcaatggtgccatctcggctcaccgcaacctctgcccccaggttcaagtgattctcctgcctcagcctcctgagtagctcggattacaggcatgtgctaccatgcccagctaattatgtatttttagtagtgacggggtttctccatattggtcaggctggtcttgaactcccgacctcaggtgatctgcctgccttggcctcccaaagtgctgggattacattcgtgagtcaccgcgcccagccaaaatgagatattttaaataacataagtaaacagaaatatatcatgattttaatgataattcatgctctgaaaataaatgaagaaaggaataggagtagggaaagctgggatcagagtgggcaggaagttaaaatagagcagttagggaaagcctcactgaataagtgacatttggacaatgaccatggggagattagggaatgggttatttgaattttctgggaaaatactgttctaggcagaggaaatagcaagtgcacgatctttaaggccagagtgtgctaagcacgttggagaggccgagtccattgtagctgagttacagaagtgagtggaagagaagaaggtgatgagtttagagagggaagggcagggcaagagacgggctgtatggggctttgcaggttactgcaagaattttgcaggagggacagagactgacttggttcttaccaggattcctctggctgctgtgttgagtatagactctaagaggaaagagtggaagcaggcagaacactgaggaggctgttgcagtggtccaggtgggaaatgatggtgctgaccgtggaggtggtaagtggtcagattattctattttatttacactcaacacatctaatactgactcaatattatctaacatacagtccacattgaaattgccccccaaattctttttacataaaaaaatcatcctgaatccaatcaagtctcacctattgcttttggttttcacctctttcatgctgtcatattttaaaagactccaggctagatgttgtgtagaatgtcccacattctgaattcgtttattttttcaagtaagctttttgtgtgtatgtggcaagaatacgacagaggtagcaatatgctttccccactgcatcatattaggagacacataacaacagtcctgacccattattggtggtgctaagttcgatcacttggtaagggggtgcctgccagatctttccattgtaaagcaagctgttctttattgtaagtcataaatacgctgtgggatgatacttcgggactaaatataccctgaatatactgctgcccaacaacatttcacccagtgactttagcagctaaggaacagcctcgtggcttccgaccttgtgcctcagttcgctcatctgaaaaatgaggatgatcatggtccctaccggatgcttgttttgaggatccgtgcttggcataccagaaacgctccacaaatgttaggtattactggacgaaggcaaatatgaaaaaaattaagggcagggctaggactgcattccggttctccggatcccgagggagctcccagtcgatgctgggcgaaagcggccgcacgagcccacgtcgccacgccctccgccgcggaagccagggtgggggtcgctggaaccctaggccggccgcgcaaggccccctgggaccggtagtgctgggcgtggcctcgggactacatatcccagtggcccccgtgcggcgactttagctgctgctgtctcagccgctccacagcgacggcagcggctgcggcttagtcggtggcggccggcggcggctgcgggctgagcggcgagtttccgatttaaagctgagctgcgaggaaaatggcggcgggaggtgagtggagataaaggaggaggcggtggcgggcgagggggtggagtgcgaggcggagggaagaggggcgagttccccaggc

SEQ ID NO: 26823 - DNA, 2300 bp, Homo sapien
gcaaaagcccccctcagccttgttgccggcccacctgggtgtagcacctgcctaccacctggtgggcagcctccagctctctgggactcaaagaagctaagtggcttccccagtccccgtccatttctacccagagacaggcactgcagggcccctttttcccagtttaaatcaacatttttacatccatgatactttttttcctttttaattgaggtgaagttcagataacatcaaactcaccatttttacaattatatacaatgcagaggcatttaataggttcacagtgttgcacacctctacctagttccaaaacatttcatcaccccaaaagggaaccccgtacccacaaagcagtcactcctcactaccctctcccccagcccctggcaatcaccaatcttctttctgccgctatagatttacctattctgggtagttcctataaatagaatgtaacaatacgagcccgctttgtgtctggctggtttcactccgcctgcttttgacattcatccacgctctagcgtgaatcagaacctcgctcctggttctggtcgcatattccgttgtacagatgatgtaccgccatttgtttacccgcaagcagctctcgcttgaaatcctcttgagtcagtggcttcttggctccaggacttccgtcttgccggtgtgatcacctcgaggccctcccctgcggtccaggatctgcgagcaggcgggtagattccacgacccctcgagtcgcaggcaaagctgagcctcatgcttggaagcccggccctatcttgatgaaggacccactgccctgggagcctggccagcctttcctgcctccctaactctgccactcctctaatgcccacagagtacaaggccagctatgtccgcagtcgctccatccgctcagtggccatcgaggtggacggcagggtgtaccacgtaggcctgggtgatgccgcccagccccgaaacctcaccaagcggcactggccaggggcccctgaggaccaagatgacaaggatggtggggacttcagtggcactggaggccttcccgactactcagccgccaaccccattaaagtgacacatcggtgagtgtccaggtggaagtcgagggtgaaggggacaggacagacctcggcaaagggcttcccacacctcttgggcccctgaggaccaagatgacaaggatggtggggacttcagtggcactggaggccttcccgactattcagccgccaaccccattaaagtgacacatcggtgagtgtccaggtggaagtcgagggtgaaggggacaggacagacctcggcaagggcttcccacacctcttgggcacctgggctgctccccctccaccacctccgagccacacgtgatcccttctctcaagcaggtgctacatcctagagaacgacacagtccagtgtgacctggacctgtacaagtccctgcaggcctggaaagaccacaagctgcacatcgaccacgaggtgagtggagagcgggagaggagcatgctctcggccaccacgggcctggcaggacccccggttcacagtgggagggcagtgaggccagacccagggaagaggctggagaggtgaagtgaggtccccacagattcctcaacgcggggataggtgtcagtcccagcatgagacagatagcttcctgcccaggccgtctgagggacgatggcttagccacgttgtcccccttttgacttacaagaagtctacgctacaggaggcctttcatcaaacccaggggagacactggaggcctcagtgggctcagcgggttcctgcgcaggccaggccggaaaaatgactcggttcccttgcaagggctggctggaggagaaggcgggcttccttcaggcagaacaagtacctcctccccacccagacatgccggtgcttgccctggggcccggggagtgcaggctgccgctgctgagcacagacacggcagcgtgggggcagtcaccaggccaagtctttgttgtccagccttgaaggtttcaaggcctcctcttctgcccctccctcagattgaaaccctgcagaacaaaattaagaacctgagggaagtccgaggtcacctgaagaaaaagcggccagaagaatgtgactgtcacaaaatcaggtgaggcagtagcaaagggacctccctaagaccccactctcctacaggacagttcagttcatcccctctcgtgattgacccctttcattttttatttttatctttatcttctcccctcatggcattaaaaaaatccgta

SEQ ID NO: 26824 - DNA, 2300 bp, Homo sapien
ggactctggacatgaacacagagtgatggggagagcaggtagtgtggcttcagtccaggaaaggattcacacagggctggcataccgcttctgtgaagagccagagagtaaaggtcttgggctttgcaactcagccctgcgactgcagaggtataagggaatgcgagcagctgtacccagtgaaactgtattcacaaagacagatggaggctggcctgggcccttaggccatggtttagggacccctgaatctagagctgggagatggagggtggaaagaggcaaagcagctcacttatgagccgactgagacaaaaggagtggagaggacacgctgggtctatttcctgagcctctcggggcaggacctgcttggcacagggaccatcctcggcaatttgtgtacttgcatcgggagactaaaccgagggagagaagtgcccaggagaaggctgccctgtgtcagaaaaggcccaaggctctgctggagaggggaggcctttcccggcccctcaggatccttcggcccttgtgactctgatgcaaggtgtctgagaactgaaagatacaaaacatcccccaagagtgggggtggcacccgggccacgtgagaagggagccctttcctccctccttccactgccttccgccaccacctgcctccagctggtcctctttggtcaccatctcggggtcacttgggatccaacaaaacctgggtcactaactggctccaggcccttctctttaaatgaggcacatctggagaaggatgacaactgcagtgcgtgcctgctggggccagacatgtgtcaggtgggcagaggttttaaaacaggaaggagtggcgggggctgtggccaacagggaagacagtgggcagccaaaggggccgcccatccccggcccgtcctgaccatatggaactgtgggcccgtgagacatctgtttcctttctggaagctggaaatctggatccctacatcaccgccaccacctcccctttttctttaatgttaccaactcagatttgtttttgagacatagaagatacaggctacctggggtgtcacttcagcctgcacccctgagttttcagcgtcagggcgtatgcaaaagcccccctcagccttgttgccggcccacctgggtgtagcacctgcctaccacctggtgggcagcctccagctctctgggactcaaagaagctaagtggcttccccagtccccgtccatttctacccagagacaggcactgcagggcccctttttcccagtttaaatcaacatttttacatccatgatactttttttcctttttaattgaggtgaagttcagataacatcaaactcaccatttttacaattatatacaatgcagaggcatttaataggttcacagtgttgcacacctctacctagttccaaaacatttcatcaccccaaaagggaaccccgtacccacaaagcagtcactcctcactaccctctcccccagcccctggcaatcaccaatcttctttctgccgctatagatttacctattctgggtagttcctataaatagaatgtaacaatacgagcccgctttgtgtctggctggtttcactccgcctgcttttgacattcatccacgctctagcgtgaatcagaacctcgctcctggttctggtcgcatattccgttgtacagatgatgtaccgccatttgtttacccgcaagcagctctcgcttgaaatcctcttgagtcagtggcttcttggctccaggacttccgtcttgccggtgtgatcacctcgaggccctcccctgcggtccaggatctgcgagcaggcgggtagattccacgacccctcgagtcgcaggcaaagctgagcctcatgcttggaagcccggccctatcttgatgaaggacccactgccctgggagcctggccagcctttcctgcctccctaactctgccactcctctaatgcccacagagtacaaggccagctatgtccgcagtcgctccatccgctcagtggccatcgaggtggacggcagggtgtaccacgtaggcctgggtgatgccgcccagccccgaaacctcaccaagcggcactggccaggggcccctgaggaccaagatgacaaggatggtggggacttcagtggcactggaggccttcccgactactcagccgccaaccccattaaagtgacacatcggtgagtgtccaggtggaagtcgagggtgaaggggacaggacagacctcggcaaagggcttcccacacctcttgggcccctgaggacca

SEQ ID NO: 26825 - DNA, 2300 bp, Homo sapien
agcctccttcaggctttcccaaacatgtcagtttctggctatctctgatacttcccagataattttcttttttcttatgtttttagagacagggtcttattctgtcacccaagctggagtgcagtggcgcaatcatagctcactgcagcctccaacacgtgggctcaagccatcctcccgcctcagctctggagtagctgggacctcaggcatgagccacggactgttcctggccataatttccttaatatttctcttgcaatcaattcactttttaaaaccttacctatatttattttaaaaagccatgtcttattactcctataaaaggaaaaccagtcacaaagaggatactgtcaaagtgaatatggtgaaaataaaataatttaactcctgctggggccttcgtgcaagagagatcggcaagggctagagaggcgctaagggcatacacacacccacgggacacttggcctctgacacggtcagggtccaaaggctgctgagaaatgaatcacttattgtgagcatcatcctgcaccaccaaacagcatcttgggcaccacacggcagcaaaggactacccgttgggaggccctggccctgctggctcagcggctctcagagcctcgcaggtcagggccggctgcagtcaggagggggagccgttgggagggaagggagccttcttacctgtcccagctgctcacacgccgtctggtactcagcacgctgacacaggtccttcacacgctggtacttgggcagaaagttctcctcctgggcgtccaccttgtcattgtctctcttgtgtagcagcttgctatggggcagagagcaggagccgcggggccggcctctcagctctggaggagccccggaggcatgtgtgcccacctagaggggtgccccctcggctccggcttttcctcacagtggagggcgcagggccacctgcccgggtcttctgatgtttaggaaacttaagacattggaattttataagaaacttcccaaattgcatgagttggcaataaattaaataaattgaagacattgtagaggctggacaaagcatgccaaaagcgtacacgtgacctcagaccccaattctgtgtctataggagcagtgaatgggctttgtgtttaggggcctttggaccaacttcagagccatgggcagctcctgaatagcatgatgcggtggggctacagaagcttcctgggcagagggagggaggtgggcaggggtgtccctcccaggacccggcactcaccctctctccaccaagaaggagtcccgccagaccctcatcttctttttcaagtgaaacctggaaaaaagcacggctcctgcttctcagcaacatgagggcttcccacgaccccccgttcccccaggagcagggacggcaccaggagtcagccttggtttacggtcagcctggacagcaattgtggtgagtgtgcccagctgggcactagagcattgcccaccctcctctgagttgagccaccccttccccagagacttgggtctggagacacacacagtagaaatgacccaggtcaaaatcactgtaagtcccacccaagtaactgtgtgtgtgtgtgtgtgtgtgtgtgtgtgcgcgcacacacatctcaagcccctcccaggaagcccagcaactcccccggcactagacgagctctatctcgagttcagcgtcaggcgcagtggttcagcatcaggcgcagtggtttggcgtcttgagctctgtcttgagctcagtgtcaggcgcagtggttgccttgatgtcaggttaattgcattgggttttgggagtattttcttctttggtgctttgcagttgcatgtatgtaatttgtatgtttcatccagtgccacctggtcatttccatttcctagatggggactctgaagctgagaggggaagcttccaccctgtcccctgacccccaggtgtcctggctcccaggccagtgtccccaaacatgtccattttataccattacagcttgcctggcctcacagtcaggggaggagcctcaatggacacggtccccctacagggcagccagatgtgggcacacagtgctcgcctggctggagcctctgggaggccacaggggaagggctccgctgccagaggtgcaagccaggagttgaagtagcacctggaggccaggaacctggtggctgttaagagcgctggccaccagatgtcgctgcggccacaccagcctccccgccctgactcagcccacctcccacctgtctgacttgctcaccctca

SEQ ID NO: 26826 - DNA, 2300 bp, Homo sapien
aaagcaaccactgtcctccttcccctgagcctgggggagcgggaccactggacaagctcagccccattagctgccggttgctgggttctgcagagcgcccgtcgctcagcagtcttcccagctccctcgcctctggattcagttgtagcgcctcacgctggccttcgagccccccatgacacagccccatcttcagcagctgcacacatgcttggcagcctgcccgacgttcacagggcactggactggggagagatgaggggttaaagatgacggaaaccctaggacccaggccctgccctggtccccagggaactagcggggaaggcactcagatgctctgacgggactgtccaccattcaacaggtcctgggtcctgtgctgggcacaccccttaagtcccttaccctacattgggaatgccatcagccagaaacaagagccaggagaggtggctcatgcctgtaatcccagcactttgggaggctgaggcggatgtatcacctgaggtcaggagttcaagagtagcctggccaacatggtgaaaccccacctctactaaaagtacaaaaattatgggtgtgatggcgcatgcctgtaatcccagctactcgggaggctgaggcatgagaatcgcttgaacccaggaggtggaggttgcagtgagccaggatcatgccaccacactgcatcctgggtgacagagcaagacacctctcaaaaaaagaaacaggagccaggaaaggtggcagatgtatgggaattcacttagccaatatttactgagtagctcctctgtgttctaagggtataagtcctggagatacagaagtgaccacctgagccagccttcctgcagcttagagtctaactgggcaatagacaataagccagagaaataagtaaattatatagcatatgagatggtgataagtcttcaggagaaagataaagcagggagggtggggagggggcgcagttccgaatagggtcctcaggaggggccttgtgttgggtatctgtgctgcagaacaaactgccacaaactcagcagcttaagacaacacacatgtacaaactcacagtgtctgagggtcagaagcctgggcctagccctgcagggtcgtctgcttaggctgaaatcaaggtgccggccagggctgtggtctcatccagaggcttgactggggagcatctgcgtccctgctcatggggcaggtcaagtgcaagcagaggacttgaacccatgcagtctgcctcccagactgctcacagtctagctgctgatttagagtggcttgcttcttcaaagccagcaaggggagaaagaaaccagagccagactgctagcaggatagtagttgactatctcataacacaaccacgggagtgacagcccatcaccttcacaacccactggttggcagcaggtgcaggttggtccacacccaaggtgagggggtcacattaaggtgtgatcaccagggacagggattctggggaccactgaggcctgtcacgggcctccttggtcatagagcaaagaactaaaggggtgagggacggtggcccctgatctccagggaaaggacattccaggcagagaggatggtaaagaagaaggccctgaggctgcactgtgcctgggctgtcaaggaacagcgaggagccagtgtctgccccagaggttcaggggaagggttcaggaagggccaggatttgggctggctgtaaagggggggtcgccttcactcaggaagtggggacaggaagggcaggagggggacagggtgaggctgtcagctcacggcatgagctgagacacagaaactaagggggggcgagcacagagtgggggttcagctgaatctgggccgcagaggggagctgctgaggttgaggtgccagactgcagcttccatacctgcagatgtcagcctcccacaaactgctgcccacctaccgctccccaccccccacgcgaggctgaggcaccaccacctgagtgactgagtccccgatctcctgcctcccccaggaatccccacatcgtcctcaacattgacctggcccccaccatcctggacattgcaggcctggacatacctgcggatatggacgggaaatccatcctcaagctgctggacacggagcggccggtgaatcggtgaggacggagcagggcaggtgttgagggggccgggacattgacctgcgggaactcagagcaaaaccctgtgggtctagaacgtggggtctccaagggtcgggagctggggttctcaggtcccgccatgcc

SEQ ID NO: 26827 - DNA, 2300 bp, Homo sapien
taaatccatttctattatttcaaactaaaatctattgcaaaaggatattccgtggtcctaccttaaccacaataactgccacctgccattcaccaaaggtaactgccatctaccaataataggtacaaggcacacaaagcaatgctatggaatttgagttgggtactggttcccgatgaaggctctgaacttgactttcttcccttttttcaaaaggaagacgagcaaagtctagagaggtgttaaagaaacactagcaccaaacagactttgccctgagagagccgacaagggactggctgtctcactttgtcactcaaggtcactgaatgctgtgcctcttaggagcttcccaagtgcacacttcacacgtggagaaacgctgaaacagggtttggataagcccctgacatgccaatgtcccctttcccaccaggagatcacacctggccctgggctgcagacacagcacagggtggctgctcatccgggcgggtctggcgggggccaggcagggtccaggctgtccctgggtttgaccgatgtgtatgtccttgcccaccagcacgccgagctacaactacgcgcccaacccggacaaacactggatcatgcgctacacggggcccatgaagcccatccacatggaattcaccaacatgctccagcggaagcgcttgcagaccctcatgtcggtggacgactccatggagacggtaggcgcccgctgcatgcctcttggtgggcgtggctccgaacccccagccaggccagggccgagacctcctggcccttcagggttttcctggaggaatagaaatcaaaggcagaatgaagaggccccatgtgctagacctggggaacagcttggagcaatccagacaaaagcctcttccttcatgaaacattttctagatctgtgttgcccaatacggtaaccatatatgctagttatattttttcctgctatttacatttttgaacacatttattgggatgtaattcacataccatacaattcccccaattaaagtgtgcaattctgtggttttaatatgcccagagttgtataaccatcaccacatccatgttaggacatttttcttaccccaaagagaaacctcacagcccttagatggcccactaaatctccctcacccccagccccagacaactggtgatctctttctgtctctatagatttggtgttctgcacacttcctataaatggaatcgtacacgctgtggccttctgtgcccagcgcctttctttcacttagcgccacgtgttcaagcttcacccctggtgtcgcatgaatcagtccccctcattccctgttattgctgaataatatcgcattgtatgggtattgtcacattttatttagccatggctatttaaactgaatgcagtaacattataaagtcagttcttctgtcacacaagcctcatttcacatgctcagtaggttcgtgtggctggagccaatatgtgtccatatcggacagtgcagacattaacacggccaccaatgcagaaagttctgccacacggcgcccttccagatcgcaagatcctgccataggctgcagcccaagtttcactcattcattcattcacctgacagcattattgagtgccagtgtacgtgggatacagcaggcagggaacaaaatgacaaaagtgtctgccctaatggaggcagcatgccaaggcagggacacagatgatccacagataagtaaaagagatggatgccaagaagggccatgaagaaccgtggaggggagggcgggccaggggtgacaagaggcaggaaggtgcagtgacaaaggggacagcccctgggaaagttgagcaaagacctgaagcaggggagggacggggcctgagatctcaagcgcctgtcaccccgggtcggagacgggccaggcacccagtccccactgtcccttgcctcctcgcccgtgttgcagatttacaacatgctggttgagacgggcgagctggacaacacgtacatcgtatacaccgccgaccacggttaccacatcggccagtttggcctggtgaaagggaaatccatgccatatgagtttgacatcagggtcccgttctacgtgaggggccccaacgtggaagccggctgtctgtaagtgtgtcatcccccagggacccagggaggcccctgggcccagctcagggcttcaaccatgcagcccaaacccaagcccaccctgggtggcacacagttttcgcagatgtaccccagggccagcggaaagcaattatgtcatgc

SEQ ID NO: 26828 - DNA, 2300 bp, Homo sapien
atgtccccaaaccagggacagcatcaaaagggttgaaatcccactggccaagtttttgactataggcaagaccctttatctctctgagcatcagtttgcttgaaagattgtcaggaggattacatgaaatgacccggtggaaacagccattgaccgcagaacctgccagagttgcactgtccagcatgggacccctgagccacatgtggctggtcccaattgagatgtgctgtaagtttagaatgtacaccagattacaaaacttagtaagaaaaaataatgtaaaaatatctcattaattttatattgattacatgttgaagagatcgattttggatatactaggttaagtaaactatattattaatattaaaattaatttcacctgcttttttcagacagggtctgactgtcacccaggctggagtacagtggaacaatcatggctcactgcagccttcacctcccaggctcaaagtgatcctcccacatgagcctcccgagtagctgggaccacaggcacatgccactatgcccagcctaatttttgtatttcttgtaaagatggagtttcaccatgttgcccatgctggtctggaactcctgaactcaagtgatccgcccacctcggccttccatactgctgggattacaggcgtgagccactgtgcccggccctcacctgtttctttttactttctaatgccactactagaaaattctaaatgatatatatgtccttctgcagagatgaggcggaaggagaggggtctccattatttttcggtctatgatggtgaagcctgacattctgtcccagggcaaagaaggtgggagctgttcagccttatcagtgatgccaaaggtagggccagcacctgacttggaaaagcaagtgcaaggtttttctgatttatttaggctctaacttgattggcgtggctaacagaggttatggggaggagcctagagctccaaacccagtcaggagatccgatttgaatttcagatttaaaaatgaatgattttttagtactaacttcctccccgtggatgtctatatttatttgttaagtctgacaactctaccatggaggatcatatcagagaaaggagatgctaggttgaaaagtaaaaacatcctaggatttaagagcatgagccgggagctaaggcttcttggcttcacaggatccaccacttataactgtgtgatcttcggacagttactaaacctctcttggtttccatggtaaaacgggcatagtaacttactgtgtgagattgtcacaagatttaataagttactgctgtttacaagtgctttcccacagcggcgtctgtttccccttagctagcaactcggctgtgttttctgcagctgctggtgagttctctgcccgctctttgcccacccgcgtcaggccggtccccctccggcctcttctgtggcgcgagggacagcggaaaccacggtagacagcacccccttgagtccaattcctcccctttcggaggaagccggtttctcctttctatgctactcccgggccatttctggacaacagctgctattttcacttgagccgaagttaatttctcggggagttctcgggcgcgcacaggcagctcggtttgccctgcgattgagctgcgggtcgcggccggcgccggcctctccaatggcaaatgtgtgtggctggaggcgagcgcgaggctttcggcaaaggcagtcgagtgtttgcagaccggggcgagtcctgtgaaagcagataaaagaaaacatttattaacgtgtcattacgaggggagcgcccggccggggctgtcgcactccccgcggaacatttggctccctccagctccgagagaggagaagaagaaagcggaaaagaggcagattcacgtcgtttccagccaagtggacctgatcgatggccctcctgaatttatcacgatatttgatttattagcgatgccccctggtttgtgtgttacgcacacacacgtgcacacaaggctctggctcgcttccctccctcgtttccagctcctgggcgaatcccacatctgtttcaactctccgccgagggcgagcaggagcgagagtgtgtcgagtgagtgtgcgtctgtgtgtcccggcgagggtgcgcgctcggcgccgggagcgcggccagccgagtccggaggcatcgggaggtcgagagccgccgggaccccagctctgcgttcactgccccgtccggagctggacttcggggccggggccggggccgtgcgccggggacaggcagggccgg

SEQ ID NO: 26829 - DNA, 2300 bp, Homo sapien
tgacccatagcacctgcctacaatgaacacacacatacatgctcggacacacaggtacacatgcatgcacacacaagatctgtccccgtctacttaaggaaggataaggggccaacatagacgttaccatgtttggtaatgtccagcaacaatggaaacaacatatccaaaaagataagcaaatgccacgtgtccgccaggcccacagccccagaagaagggattgtaagcatcccctctctgactggggttacctgacgagcagagaaggatggagtgaaacattgtgggcaggatccttatgggtatgggagagccatgttcaggaactcgaggacctaagggcacagtgtggtaatgcagtggggttttttttagactttttttgccgtggaaatttccccacccctgaaatattctccagaacccaacataaaaagtaggagggaggcagatcccattcctgggcctccctccaccaccccaggccccagaagcaccaccaaggggccctgaggattcagtaagaaaattgcttctgcagtggggtacatgtccccaaaccagggacagcatcaaaagggttgaaatcccactggccaagtttttgactataggcaagaccctttatctctctgagcatcagtttgcttgaaagattgtcaggaggattacatgaaatgacccggtggaaacagccattgaccgcagaacctgccagagttgcactgtccagcatgggacccctgagccacatgtggctggtcccaattgagatgtgctgtaagtttagaatgtacaccagattacaaaacttagtaagaaaaaataatgtaaaaatatctcattaattttatattgattacatgttgaagagatcgattttggatatactaggttaagtaaactatattattaatattaaaattaatttcacctgcttttttcagacagggtctgactgtcacccaggctggagtacagtggaacaatcatggctcactgcagccttcacctcccaggctcaaagtgatcctcccacatgagcctcccgagtagctgggaccacaggcacatgccactatgcccagcctaatttttgtatttcttgtaaagatggagtttcaccatgttgcccatgctggtctggaactcctgaactcaagtgatccgcccacctcggccttccatactgctgggattacaggcgtgagccactgtgcccggccctcacctgtttctttttactttctaatgccactactagaaaattctaaatgatatatatgtccttctgcagagatgaggcggaaggagaggggtctccattatttttcggtctatgatggtgaagcctgacattctgtcccagggcaaagaaggtgggagctgttcagccttatcagtgatgccaaaggtagggccagcacctgacttggaaaagcaagtgcaaggtttttctgatttatttaggctctaacttgattggcgtggctaacagaggttatggggaggagcctagagctccaaacccagtcaggagatccgatttgaatttcagatttaaaaatgaatgattttttagtactaacttcctccccgtggatgtctatatttatttgttaagtctgacaactctaccatggaggatcatatcagagaaaggagatgctaggttgaaaagtaaaaacatcctaggatttaagagcatgagccgggagctaaggcttcttggcttcacaggatccaccacttataactgtgtgatcttcggacagttactaaacctctcttggtttccatggtaaaacgggcatagtaacttactgtgtgagattgtcacaagatttaataagttactgctgtttacaagtgctttcccacagcggcgtctgtttccccttagctagcaactcggctgtgttttctgcagctgctggtgagttctctgcccgctctttgcccacccgcgtcaggccggtccccctccggcctcttctgtggcgcgagggacagcggaaaccacggtagacagcacccccttgagtccaattcctcccctttcggaggaagccggtttctcctttctatgctactcccgggccatttctggacaacagctgctattttcacttgagccgaagttaatttctcggggagttctcgggcgcgcacaggcagctcggtttgccctgcgattgagctgcgggtcgcggccggcgccggcctctccaatggcaaatgtgtgtggctggaggcgagcgcgaggctttcggcaaaggcagtcgagtgtttgcaga

SEQ ID NO: 26830 - DNA, 2300 bp, Homo sapien
gtagcctcgacctcccaggatcaagcgatcctcccaccccagcctccctagtaactgggattacaagtgtgcaccaccatgcccagctaatttgggtttcgccatgttacccaggctggtctcaaactcctgggctcaaacaactcacccacctctgcctcccaaagtgctgggattacaggcatgagtcactgtgcctggtgcccccttccccaactcttaatcccccaactccccagctccaagattggcaagtgacccagacccagccaatcaaacatactctgtgatggcatcaggaggtgggttcgtgagcccagcttgtctgatctgagtcagtccctggacctctgctggggaattggggaagaggcttctcttttctactgaccttgctgggctgatgggaggatcaggatctgctggggcatctttgccacctcatgagaactgtgtgacccagaagggagcccacccaggaggacgccagcctgagaaatggaagagaacccttcctgatgatgtcattttgcaccaagatccagctgtgcctgtagtcaaatactgccgggacattaagtttctggagtgaagatattcatgttttcactcatttaagtttgagtgggtattctgtcctttgtgatcaagagtgctgcctgatagaggttgcagtgagccgagatcgtgccactgcactccactccagcctggcgacagagagagtctctgtctcaaaaaaaaaaaaaaagtgctgcccgatagatgacagttccccctttttgtctcagtgacttttagagcttttggaggtctcctgttgggggccctaggctgtagggaggagattcatatttgtcctgtattcttgggaaacctttgagctaagattggactgaaatggcctcaggtgctctaatcaaattgagacctggtccaatccctgtgggcccctaaaccaaaggtgaataaggtgcctgcctagcaggaggttgtgacctccaggctgatggtggggtgagagctgggagtctggatggagcagatgtaggcagacaacaggatgagatttgaaggccacagctaagaatgacattgaagatcaagacctgtgctgtcctccatggcagtcactgggcacctggggttatttcagtttatatcaatgaaaactaaatagctttaaaaattcagttcctcagtcacgctagccacattttgagtgctccatagtcacatgtggctagcggctgctatattggacagtgcagacacagaatattttcaccatgtgcagaaagttgtactcaacaacacgagacagacatataaggttttgagtccagaaaacatcaagttggagagaggcagtagcaagaaaaaaagagcaacaataagggggactgtgaccaagaggtccccactcattcattccatccttccttcattcatctcttcacctcacattgattgagctcctatcaggcaccctctatgactgcaggctccagggaaacacaagagaattacacagatgtagcctcagaccacacagagctcacatttagtctgaggagtcagaccctaagggaggtaaataagtcactaaacaagacaattccagaaaataataaatgccaacatgaaaagagagcaggtaataggacacagcgtctttggtgggaggatcaggcctcaagtttggggagacgtgtcatctttgggcagctaaaaactacagggctcagaaaacctcagacatacagaaaggagaggaatgcactgctctatagcccactccctggaaggctgggaagccctggtccagggaaagcacagggttctaggaattgggaacgggacccaaccacaaggacaggaagtggacaggggcctccaggaagcagagaagaaacgaagcacagaagtggccatggggccatcatggagtctgtttcacggacagaaacacaaaggggctgttaggaacagccacctctggccagccccgcctgtgattgtgacctgacaactcgtggtttgtgaaggttgtttgtttcagaggcatttcgcctctctgcttttggaacctccacgagtggacttttgtcttggggctcacagtattttacccccttcagggaggtggctggttgtagtttagcaaaacagccactgacatcgctgctccttcagcctctgcagacagagctgcaagatcctcgaggcctttttaatccccagaaacaaggttcgcaggaggccagagcctttggtggtggggagcggagtcagcaggg

SEQ ID NO: 26831 - DNA, 2300 bp, Homo sapien
cccacgtcacacctgctgacgtcccattggccaatgcaagtcacacaaccaaagccaacatcaacaggacaaggaaacagactctgcctctagatgcacaaactacagagtcacggacagaggacacggatccagggaaggaagatggagaatgagaacaatgaccctcaataacacagcctcccacaggtttccaaatccccaacccaggcatatatccaaggaaatggaatcatgggttcaggttttagagcaagcaatttctgctctccctgcctagtttccacacccttaacacaggggcaatgatgtcacatcaaaacatatcatacaaatttgtgatgatgtttcaacaactaaacaccagaaaaatgcttagggcagggccgggtaggaggggcagaagccaatagtaacttaacatcactgctaacccacaaagttctgggaatttctttgaatgtctaattagagaaccatgtccccaagaattaacatttcttttgcttttttttgaatctgagaaaatactaattgtcacagggtagaatatttatctgatgagcatatagaagttaagggctccttgaaatcacagtgctaggtttgggtctcattcctcctcctacctgcctctctgagcctcagtttctcatctgtagaatgggtacaatcccaacctcatgtgtttgtggcagtcagggttaattgggctaatgattctaaagtgctctgcgcaggcctggcaggtactgagcaaccttgggccatagagagagcactgacttgggagtcaggagctgggacctcaggtcctattccctggggatccgggaaaagtcccttggcttccctgagcttcatctgccccacgtgctagtgaggtggctagaccagtcaggccaaggacgtccctgcagctatctaacttctccttactccctgttcagcaaagggcaggagctgggcctggccaggctcccacaaagcccaggcgtggccgtgctcagctcacgacgggtgtgggggatgcgtttctgccctcaaaggactgagctccagtttctttcttcactgagtcctttactctctgcctgcgggtggttatttaagacatctcctgcctgcaggggcctcttagagaacaaacagatcgttccttcagctgcagtgcaggctttactgggcttgttcctgcatcaagtagacagatccttcctgaatggagtcgccccacaggccccacactcggagaggggcagccaggagcctccgaggctctgcccagcccgtcctgaatgtgctccctgccctgagtggagcgctcacagctccccgcatcaaggtttctgtctccccaaggatcttcctcataaaaacccttcttctcccagatcccacaaaccgacattataaaaaacacaaacacccaataagcaccatgtaaattgatcacatacaaataatatccaaaaataagaactcgtataaccactttaaactatagaacatgtctgttgggatttgtgggagatcatggatcacaggttccccctgctcctggttcagcactgtgagaaatggaagtgaggttcacccagggacgggaaagcgtcagctgccactcatgaggctggggggcaggggaagcccttcatccgtggacacaaacaggcatcctaacatgacttccatgagcagaagtgggcagacagggctgaaaagctgaccttacaaggctgaggacctgccttgagctctgcctgactgcagagaaggaaagttctcttcttgcaacctcaaatcttccagataagaaccaaacgacatccggcctttgcgttctctccaccagctcccggctcacccacccagcagctcagcacctgcgaaatccgtctcccgatgcacacttgctaaccgcgtgggtgtgagcacaacgatgggaaacagcggaagtccccggagtgcagactcaggagtgaacctgcctgaagagtggcgtctaacgcacacactgtggtcagctccaccccactatgggtcccgggaataggagcaagtatgtattttgcttgcagggcaggtgtttcatccacattattgcaggaacagatgaatttaattaaaagaacaccacagtgggcacctcttccagggatgcctccctctaagaacatgacactgagatgatcaaggttctaaaagggcgatcaaatcactctccgaaaatgaaactgctcagacagaatgacaattaaattaataacaaccaagacaatgcccagatttcatctccg

SEQ ID NO: 26832 - DNA, 2300 bp, Homo sapien
ccacctgcctcagcctcccaaagtgctgggcttacaggcatgagccactgcatcccacaaaatgtcagatttctatccctgtctgatcctctcccacctctgcttgctgcttctctagtgtggataaataggagatgcagtgctgcatctacataccacagcttccagctctgcagggagatactgttcattcagggacagtgtattaactaccctaccaggacactgactgtgaagtcactgtaaatggttactgttgtgtaaatgtgagaagaagctgggcattaatgtgctgggtgactctgaaccaggcccccacctttctgaacctgtttcccagatctgagtcttggcttggcttggtctagatacaaattcacatgttgttgttgttatttctattttcctttattttatcatattcatttatttaacacagcactctctcttcaaataaaactttagcaagggcccaggtataaagcaactgaagcagaacctctctgagtgggccctcattcttctgtccccgttgctggacactgcttaggacccctgagacagagatttataacagaaaaccaccctcaagagggtgtgtctccttgctttgcagttcagaatcacagtcatattgggtcactatttctgagtgtatatttttaaagatcagatcacagctgagtgatctgaagggtaatcactccctggcttaaacctttcacctatgttcctttgcttattttgttaacttcagacccttcctcccatgaggccctgtacctctataggagcactcaggcacaccagaagacccctctcctcctcttctgtgtcctagcctggttgcctcctttctcttccttgactgaaccagatacttccctgcttcaaggtcttttccctgattatacccacttcctgaaacgctctcttggagcaaattctttggctgtctctttctacagtgtcagcttaaatgtcccctcctcagagaagccttccttgacccccagtttgaagtggccactcctattcccacttcagctcaccttttgtctcatttcaataacagcatatgttgaacctatgcatttgtttgtttatttatctatttactggtctgtttatggtctcctctaccaaaatggtcataccatgaaggcaggaaccatgaatggctgcctcattaaattccatatccccagcacctacaacaatgcctaacatctgagggctcaaaaactgtgttgaataactaagagaattaattaattaataaatgaatgaatgcactctgggtttgagaagaggatttttttttttaactactgcccttggtatctgtgaagcacaatttgaaagctcagtaatttgtcagttgtcacaaacccaactcagtggtagtaattcttacattcatgtatattaacaataagtacttattcctacattcaggtccataggtcaagcacgacttggcggatccaggctgggctctgctgggcatggctgcaggctgtgggttgggatcaggtctgctccatatgtgtttatcttgggcatagtctaaagggagagcagctcctctctggacacactcctcatggtggatccctggggacaagagcaagcaagcttcatgagcacatttaatgactttagtctcgtcacttcctctgacactctgaccatccttggtcaaagcaagtcacacagccaaacccacatcaatggaccaggaaggcccattatctgctgaacaataactcaaactatcactaaacttatgaccacgaacagtgattcaagaaaccaaagtttaatgcaggattgtttgtgatctaagaggctgtctgaacagggatggctgagattattagagagagaaagagagagagagagagaaattcttgtatctgaattactctgaaggaaaggctctgctgctggcagttaatgcaaacacacccacagccactgccagaagcctccagtctcaatgtgatgacatagtgagcaaaggagcctgggggtttctagcccaattcagtgctgggaagcaagagctcactcactctcccatccccctttcccactacccacccctcccctcctgccagcaaatggaggcagcacattttcactccaatttccacttaaagctgcagctgctgtcgccgcctgggaacccctatctttttacatgttattgtggatcagttgcccgctgctgcaataaagaactctcagtgggttgcctggaatttctaactcagtgccacagaaaacctggtgga

SEQ ID NO: 26833 - DNA, 2300 bp, Homo sapien
gaggtggagggaacactggaaatggctctgccgctcatgtgctgtgtgtccttgggcaagtgatttggcctctctgaaaaccagtttcctcccctgtgaatggcagaagttgggtcaggtgatttcttagggccttgcctgctctaagcatttcatggtctcaacattctcataaacaggacttagcttaggtcagtggtctccatgttggctgcacatttgagtcacctgagggacattatcgactctggtgcttctgtgttctacccagatgatctgatctgatagatttggggtccagcttggccatcaggaatctttaaaccttcccagatgtcactaacatataaccaggattgaaagccactgggctacgcctgattttatagaagaggaaactgggctcacatctctggtcagcaggtcagccaccagcagaatccagtgactcccgcttgcaggtgtgggacctcacagccaccctctgcagtgcagcgcatctctaggacctggggaacattgcacctttccattcttcaataaacttctcctccatctctttccctctctgccccgcccctcgctccaatgagctaaatctctctcaagtagctcctgcctctgtcctgtgaacgtgcctgccaggaggagtcgccatgcctggttacctccttgaactagggaggaaggagggaaatatgggcttagacacgtggaactcagggtctcccatgtcactctgactaccacccaaagcaccttgctctgggtttgtcacaggacaaggggaagctgctgtgatgtcactgagggtaatgagaaagttgaagaagaaagaggagagaaatagcacatctgtaattagacattcttcctggttgcttctttgcatgttgaaaatggcttgctacaatccagtcatgtttagccccttggggtccctggtgcagtgagtccaggaccaggactgggggctttactcacagctgccttcccaagtcctgttgacctttgagcatctcctgccccagggcccaagagagcgctgcagcagccacacacaacatgagatgcttctctgggtgtgcctggcttcacccttctgtgcttctgatggcagaagatagaaagtgtctcttccttccttgcaagcatttccatctcggaagactctctggggaaagaacacgaagggggagaggcttcctaagtcccttcactgggggcttatccgtgaccgacgttcctggggagacatacatttcatcagtcactttccatctcactccactctccctcctcctctctgcaagcttacactgcagcccgatggaattacacacagtgccctgcatatgccaaggttcttccacctctagtcatgctgcttcctgtcctgacacccccttcccaactcgatcctgctgagcagcctgggatctgtgtacgggacgcccctcagagtcacccagacacaggggaagctggggtgtttattccccgcccctcagtcacaggtgcaggcctgctcctggggcactcaccccagcatctccaacgctaaggcagctcagagagccactttcctgtccaaggaacccttagagaccattcccaggaggagcgaatgtccacctgtgtggcgtcctcctggggcgctccttctaggggggaccccagtccctcctgcccttccacccagaatcctcctgtctcctgggtgaaaactggagcccagattctagctctgctgtgtctctcagactctggtgagtgtcagaatgttttggaggccttgttaaaactccgatggccaggcccaccctgaggttctgattcaggaggtctcagcagagcccagagctggctttcccagcagggccccggggtgctgatgctgctgcccctaggaccacccctgagagccctggctctccaccagagcctgctcacctggagacagtgaccacaggccacaggtcacccctcactgcttcactccacgccctctcctgtgacctcatctcctcccacctccccctgggtcacgtggctccagccacacccacctccctgctgttcctcacccaggatcaccaaggtctctcctaccccggggcctgtgcacctgctgtgcctctgcttggggtgctcttcccagggcttgcccacctcctcagagaggcctcctgacccctgacacggccttgcccttcacctctatcgtcctttagaacagcccccacctcccgcacatcatgcagttgcaggttcaatggctactgcttgtcctccagact

SEQ ID NO: 26834 - DNA, 2300 bp, Homo sapien
gttcctttcatggaatcatgaatgatttttcacaagtttctcttctttttataaaaagtgactctggtggccaggtgcagtggctaacacctgtaatcccagcactttgggaggcaagccgggcagatcacgaggtcaggagatggagaccatcctggccaacatggtgaaaacccatctctactaaagatacaagttagctgggcgtggtggcacgtgcctgtaatcccagctgctcaggaggctgaggcaggagaatcacttgaacccaggaggcagaggttgcagtgagcctagattgcgctgctgcactccagcctggtgacagagtgagactctgtctcaaaaaaaaaaaaatgactctggctctggctctatatctaaggggtcaactgcaccattgtcaccacaatgccattttctggaaggaaaagctctatctgacttcacagtccttaggagccttgttatggaacctggtggacaaaccattttaactggacatgatgttgctttttaatcaatgactcctgaaattttaggtgagtatgagtctggagttttagattacaaacaacaggaagccaattcaacccagctttttaaaagaagatttctaattaaatgtgttgattctgttagcagagaactctgggggcagtgtgggttgcaggcatgggtagatccaggtgtcaaatgacattctcaggacccatgctctctccatcattggctctgattgctcaggtttgggctccattcttgggccactctcttgctctgcagcaagatggtcaatggcagctctaggctctcaccctcatcttcacatctctaagtccagaacaaagagctttccacacctgctacagatctgggagaagatgatcctatctttcttgaacctgaggctagtccttactcctccctaagttctaacatatttacttaaaacaaggcactaatgaaatgactatataagtgccccactgcctcagtaggcaaaaaatgtgtttttatatatagcttattctaacagtattcaaactgtggcttgatcttactgagctccagtggccatagagaatatgattctttcagatgttttcacaacaacttttacagcaactatctttacacctgccttccctttctcctcatcagatcaattagtctggtttcttctatttcctgcttactttccgttcccccattactgaacttctgattgaagaaatatacaggactgggcactgaggcattgaggatgctttcaagttagcagtaaagaaatacccacagggtcatcctgccatcccaacaattgtcttctttctgctaggataggcctcatcactcctcagatgattctcgaaggataacacacaggccagtgggcagccctaggccagggggattaccaagacatgaagactttctttctgtctcagcaaccttcatgcttggtcaagcaaaggtgttgcttaagtcaaacccagggcaggggagagcagttgaagcaaagtgagtctttggaggccctgtggttgtggggtctggtgtggagacagtgagaacggaaaaggtgggagaggagcagtcaacccgtgaatggccccattcagacgcctttacctggaagacgtggcaggtgagcagcaagtgagcgggagagtgggagagagaatgaggaagtgagggagagaatggatgagtgagcacctgcttggatgagccgacacccaccagggatcatgagaacaccgaacagctgaggcacggtggcgtctctcagcagcctccccaggcctgtgcccctgggtcctgacatgagagctgatgaccatttattatcactggtgatgtcaagaggtggcttggaatggttgtaaccgtctgttcattttcatctcacctccacatccaccacaaatacacagtgacgttgctctgcaaaagcagcagcacacagccccccagaagccccttccaggtaattgccaaaagtttcttccatatggaaattctgtagttgtgtgacctcaggctagttacacaacctctctgagctttgccatcgtcttctgtcctatggtaagaatgatactgaggtactagggagctgtgaagcatatgctgtgagacaacacagctgagcagcccagccagagccccctggggaagccgtcagaggtcagcagctcccgtctccttccctcttgactcctaatagtctaggacagaactttgccctcccttcttcctgtcccaaagatgcacaatgataatgatgctgatgg

SEQ ID NO: 26835 - DNA, 2300 bp, Homo sapien
atccacagttatgtctcttcagattctgttccctaaacttggtggaggtcctgtgtgtccagtgtgtcgatgttctttataccttgcccatattgtacaaatgcttttttctatttaatatttagaagacagttatacacaagatgcattaaatagcaagatggcagatgaacatcaggaaggaacattaggaacatccatggtgttccatccaggaaccttcaccatggaaacccctgtgctcatgggcctggtctcaagacacagtcagttggggatcagaggccacactcatcgtagcagagaggcaggaacagctgggcgagggtccttctgtgacatctactgcatcactgggctctgtgaagtgactcagctgccagaactcacacaatattctgcaccaaaacctcacgggaaaaatggtaagtttgaagtttctccattagtagcaactctcagattaatctctgtcctccatcgcttctccatgaaacaacgttttatacctttgcttgggtctatttttccatttattttttattttactaactgattgaaagatatatactgtacgtgtgtgattttgtctctatcagccaggataatcatggtttaattcctattattattattaccaacatcctttagtttttttaagcttttcaattcctaagggtaatcaagttctttctgcctcctgagacagaaaacaaatccaaactgtgcaagagaaaaacgaatgcattgatcactaggactcacaagttcccaggtttaatctgcttgagaaacagttacaccaatggtttcaagtggcatcctgtgattcattctctctctcctcctctcttctctctctccttacccaacaccggcaccatatttagcatcacgaacctcagacttaaacagcacaacaggctcctcccaggtctccagctacacaaccctcagacttaaacaacagcagcggcaccagctcctccctgggtctccagctccacaaacctcaaattagaacagcagcactggctacacccagtctccagctctacacctctaacttgaactacagccaccagctccttcctgggtctccggctccacagaccttaaacgaaaacagcagcactggctcctccccaggtccccagctacagaccctcaaacaagaagaacagcagcaccagctccacctaaagtctccagctccacacctcaaactagaacttcagcacccgctcctccccgagtctcaatatctgtgaccctcaaaataaaacagcaggaccagctcctcctctggtcttcagcttcacgaccttaactgtaacagcaccacccgctcctccggggtcaacagctccgacgctaaaactagaacagcagaccagcttctacctaaaacaccagctccgagactctcaaacaagaacagcagcactgacttctctcaccaggtctccagctccacgatcctgaaacttgaacggcagcacccgctcctccccgggtctccagctccacgaacctcaaacttgaacagcagcacccgctcctcccagcgtctccagctccatgaacctcaaacttgaacagcagtacccgctcctccccgggtctccagctccacgaacctcaaacttgaacagcagcactcgctcctcccaaggtctccagctctgcgaacctcaaacttgaactgcagcacctgctcctccccgggtctccagctccacgaaccttaaactaaaacagcagtactcactcctccccagatccccagctgcagaccctcaagctgcaacagcagcaccatctcctctccaggtctccagctccatggaccttaaactagaacagcagcaccagctcctccttgggacaacagctccaagaccctcaaactacaacagcagccctgactcctgcccaggtttacagctccacaaacgtcaaacttgaacttcagcactagctgaagtctccagctccctgaccctcaaactagaacagcagcaccatctcctctctgggtctccagctccacgaacctcaaacttgaactgcagcacctgctcctccctggatctccagctccacggaccttaaactaaaacagcagtactcgctcctccccaggtccccagctgcagaccctcaaactgcaacagcagcaccatctcctctctgggtctccagctccatggaccttaaactagaacagcagcaccagctcctctcctggtctccagctccaggaccctaaaactagaacagcagcaccagctcctcct

SEQ ID NO: 26836 - DNA, 2300 bp, Homo sapien
gtgagagtggacccacattcctgtctggcaataaggagctccagctgaggagccactgctccttccagagtgaacatgtattttttcaccttgccatagtcctcaccactacccactgtcttccactgggatggctacccacttgtagcctgcctgaccccaacaggcatttgtgtttgcaagtcttggcatcaggcaaagaaaataagtgctgatggtacattgtctggcagaagcctagagttcagaaggctctgaactcctgccacacagacagatccaccatcttctgcacctttcccctctctcccaaggctcccactcacctctccccacagcatagacgtacggtggggcagctccacgaatctggaagcacagtgtgtccggctggtcggggattttgatgatcctgcaccaggtagaagaggcagggaaaaaggccatgaggaaaaccagcatcactctcaataaccccggtgccaacccagagactttctgccttggaaacactgggaaaattcagcccaaaatagtagtagcaccaccaggctttccagctcccaaatacagagagaaatgtcaatcaggcagagcccatgccaccaggatctttgattaagcacaacccactggcctgcccttggagcttctgtcctcgaacagaaattccagaccatcctcccacacctccatcattctcctgtcctaagacccttggaggtgagaccagcactccaaccagtcaatagtttaacaatcgcaggtgggagggtgagaagtgatctgctggtacatctcggtgctgaccctagaaaaacacccacacaagtcccctaggaaggcaggtctgggccattctgtgggtcgatccccaaagcagagaggcagcacctgccagggagggcaatgggtgtcactgctcctggagcatcagtaccctgcccacatccccgtctaaggcaggtctccaaccctatgctgcacaattgtccctcccattcccccctgcagataaagccgagctgggagcctgctctcaaaccaggtgtttccacagctttcagcagacacattccaccttggtgctttctgccacttccacataccaacccatcgatcaaccacattttccctaagtcagctcgcctttttactgaaataatcatatttaaaactttccacccctcctgtcaagagaagatctgtgttaaataaaagggaaaagtgaaaaaccagatgcataatttttcaaagacaaaatgctttgctccccggtacctacccctagcacgggtctgctcctcccacccctgctctcgcactctgctgagccaccacctcctcagctcccccgagagccacctttgcccctgacaatctgagctccacttgcagccacaggacttcgatcagaagcttccagtggctccccatgggtccttgccaggggcctccagggctggaccccgttaccctacagacctcactacccagccctccctctcactcactgctccagccccatcagcttccttctgctcttccaatgcgccagacacggtcccacttcagggcctctgccctagctgcttcccctgcctggagccctcttcctccagaaatccccttgactcccccctcatctgcttcgggtcttcaccccgactcgcagtgacgtctccctgacagccatccctctgcacactctggcccctttcccgggtttatagaaacttatctgtgccacgctcaccagcacaggctcagtgtcttacttctgtatctgcacattgtctgtctcctgcctcctcccccaactagatctgagatctatgaatggcaggaaccgcatgcatccccacgtggctggattcccagggcccaaactgccaccaagcacagagtggcactctgtaaacatctgccgaattaatgaaggtccagcttgtgttgtgtgactccaacaatgggtcccagccacgggggaccaggacagttcatgccaccccagccctcagccaccactcagcctgagagggagggctgccggacaccccgccctgggacactcactctttggccttcgtggccaccaggaggcgcagagggcggcgggagcagaaggactggttgaggatggactccacctctgaaaacggccgcaggaacaccaggtcctcattgatggagtagatcttcctccccacctgcaggccagccacctgggtagggacggcagaggacagacgtgcacaccagttactaagctccttccctcctcaccaaggaagctcaaa

SEQ ID NO: 26837 - DNA, 2300 bp, Homo sapien
cagggctgggcttgtttgtcttgttctagatggtgtctccagcacccatgagaactgcctggcccgtgtgatgggcagcatctcaatcaatgtctgttgactgaatgagtgcctttccctgtatcccccgcactggggaacccccagacctgtttctagcatgcctgccatcctgccctggggtgggaccgctcctccctaaactccctgactccacattcttggtggctggacacctttggatccgtgtgattcgttaagccagtggcaggcacagagtgagcactggctctgccaggtgctgtttgcgttttgctctgtctcgcccacctggatctggccacttccctactagacctgggacgaggtcatggtcctgtgggggccacggtggggctggccgtaggcccacctcgctccctgaccgggttccttctgccctgggcccccagatcctgccccaggaggaggactatggctttgacatcgaggagaagaacaaggctgtggtggtgaagtccgtccagaggggctcgctggctgaggtgaggccctcgggggagctggcagggaccgtgtgcaggtggcagagcggggtgtctctcttcaccctccttgaggcagcccagcccaggagattctggaatgatcgctgactcctcttctctcattgctcacgtggagaaactgagtccaggacccactgtctgcagtggctacagtagctgggagtgagtgcagagtcccggggctgtgctcctggtgtgttccaccactgccctctgctggacattgtggggaggtacaggaaaaaagcaggtgtctcagttttctgcaaccagtcacagtggcttgaataagataagctcattgctgtctgatgcaaagcctacaggaggataggttaggagagtgagggtgtggctggccgaggattcagccctggggccttccggctttgcctggggcgtgtgcaggtgggtgggggagatgcacctgccgtgctggctggagcccagcttgcccctgtggcaattaggaatgctttgggctgcaaggagcgacatacccatggccggagcggctaggttgaccttgccagtgatgtgagcggttggaaggaggcagttgtgaatcttggttcgggtcagcaggtcttcatctttcttcgccaggccctaacagacataagatggccaccccggtgtgaccctcgtgtccccacacaacagggtcaggccccagcagagtttcccctcaggaggaatacctttcccagctgccctcccatgagcttccctttgtggctcatgaggcagaaccaggtcccttgtgcccctcaactgcttaccacagacagcacgcagtcacccagtcctgctggatcccttgggccagcacccttctgctgaacacatttgagcttccttggtgaggagggaaggagcttagtaactggtgtgcacgtctgtcctctgccgtccctacccaggtggctggcctgcaggtggggaggaagatctactccatcaatgaggacctggtgttcctgcggccgttttcagaggtggagtccatcctcaaccagtccttctgctcccgccgccctctgcgcctcctggtggccacgaaggccaaagagtgagtgtcccagggcggggtgtccggcagccctccctctcaggctgagtggtggctgagggctggggtggcatgaactgtcctggtcccccgtggctgggacccattgttggagtcacacaacacaagctggaccttcattaattcggcagatgtttacagagtgccactctgtgcttggtggcagtttgggccctgggaatccagccacgtggggatgcatgcggttcctgccattcatagatctcagatctagttgggggaggaggcaggagacagacaatgtgcagatacagaagtaagacactgagcctgtgctggtgagcgtggcacagataagtttctataaacccgggaaaggggccagagtgtgcagagggatggctgtcagggagacgtcactgcgagtcggggtgaagacccgaagcagatgaggggggagtcaaggggatttctggaggaagagggctccaggcaggggaagcagctagggcagaggccctgaagtgggaccgtgtctggcgcattggaagagcagaaggaagctgatggggctggagcagtgagtgagagggagggctgggtagtgaggtctgtagggtaacggggtccagccctggaggcccctggcaaggacccatggggagccactggaagct

SEQ ID NO: 26838 - DNA, 2300 bp, Homo sapien
tctcctcccctttctttcttccctcccctcccctccattcccctctctcccctcccttcccctttctcccctcccctctctcctctctcctctcctctgcctccccagtggctaggacaacagacctgcgccaccacacccagctaatttttgtattttttataaagacagggttttgctatgttgcccaggctggtcttgaactcctgggatcaagcgatcaacccgtctcggcctcccaaagtgctgggattacaagcgtgagccattgcgcctgacctcctgatctcttttcttatcctccagtgccttggggcctccctcaggacctttgtacgtgctgtgtctgctgcctggagcatgttcctccactctttatgaagttttgtttttcatttcgttcaggcctcagctccgatagcaccttctctgcccccttgccgtgccctatcccattaagtgctttaattccaactacgtacactccctgcatcacatcctgtatttcttttgtttatttgtttatagttggcctcccgcactaagcagggctgggcttgtttgtcttgttctagatggtgtctccagcacccatgagaactgcctggcccgtgtgatgggcagcatctcaatcaatgtctgttgactgaatgagtgcctttccctgtatcccccgcactggggaacccccagacctgtttctagcatgcctgccatcctgccctggggtgggaccgctcctccctaaactccctgactccacattcttggtggctggacacctttggatccgtgtgattcgttaagccagtggcaggcacagagtgagcactggctctgccaggtgctgtttgcgttttgctctgtctcgcccacctggatctggccacttccctactagacctgggacgaggtcatggtcctgtgggggccacggtggggctggccgtaggcccacctcgctccctgaccgggttccttctgccctgggcccccagatcctgccccaggaggaggactatggctttgacatcgaggagaagaacaaggctgtggtggtgaagtccgtccagaggggctcgctggctgaggtgaggccctcgggggagctggcagggaccgtgtgcaggtggcagagcggggtgtctctcttcaccctccttgaggcagcccagcccaggagattctggaatgatcgctgactcctcttctctcattgctcacgtggagaaactgagtccaggacccactgtctgcagtggctacagtagctgggagtgagtgcagagtcccggggctgtgctcctggtgtgttccaccactgccctctgctggacattgtggggaggtacaggaaaaaagcaggtgtctcagttttctgcaaccagtcacagtggcttgaataagataagctcattgctgtctgatgcaaagcctacaggaggataggttaggagagtgagggtgtggctggccgaggattcagccctggggccttccggctttgcctggggcgtgtgcaggtgggtgggggagatgcacctgccgtgctggctggagcccagcttgcccctgtggcaattaggaatgctttgggctgcaaggagcgacatacccatggccggagcggctaggttgaccttgccagtgatgtgagcggttggaaggaggcagttgtgaatcttggttcgggtcagcaggtcttcatctttcttcgccaggccctaacagacataagatggccaccccggtgtgaccctcgtgtccccacacaacagggtcaggccccagcagagtttcccctcaggaggaatacctttcccagctgccctcccatgagcttccctttgtggctcatgaggcagaaccaggtcccttgtgcccctcaactgcttaccacagacagcacgcagtcacccagtcctgctggatcccttgggccagcacccttctgctgaacacatttgagcttccttggtgaggagggaaggagcttagtaactggtgtgcacgtctgtcctctgccgtccctacccaggtggctggcctgcaggtggggaggaagatctactccatcaatgaggacctggtgttcctgcggccgttttcagaggtggagtccatcctcaaccagtccttctgctcccgccgccctctgcgcctcctggtggccacgaaggccaaagagtgagtgtcccagggcggggtgtccggcagccctccctctcaggctgagtggtggctgagggctggggtggcatgaactgtcctggtcccccgtggctgggacccattgttgg

SEQ ID NO: 26839 - DNA, 2300 bp, Homo sapien
ctggggtccccagaattctgcttttccaggcagagcttattgtgatccctaagaggcagtggaagtagctctgagacttgggccagctcttcgtgccacgatttccccatgtgtggtaggggacagtggtccatgcttatttccttaggctttcggcatgaactttctgtgtatgtgaagcacaaggcacagcgtgtggcatatggtgggcacatggtatgtgttcttatggtcttattttcacttgaatataagcagggaatttgttttgttgggcagccccccagtgcttggaactgtgcacagcacacagcacacagcacacaatgtgtatttgttgaatgaatgaataaatgataggatgggaatcccttttcccaagagtctggattcatttccagtttgccagggtggtgttgaggaggaatggctggatgtgctggtgggtggttccttcattagttagttggttagttcattcacttacacataatgggcacatagtgagcctgagggacccaggactgtgaagggcatggcagggaaacacagcagaactcatggttcctgccaaacaaaaatggattcttaagttggagcctctctgaaggagagggtagtgcctgtaatgtgattgagagccacgtggaacaaatggccacctatgaaggctctaggaggaagaagtcctgggaattgagagcaggttgggtggcagggatggccttggtgcatgggtgggcttggggtaagggcacatgggcatcatggtttcaatcccagactcggtgtcaacccgcctggctctaggtcccagctctgtgactcacttttctgggatggtcttggagtaaaagactaaacctctcacaccccagggatctaagctgtgagatgagaataatcatagttttcagttgatagggtggttggtggttgggagccctagaggcctgctggacacatgattagctcttggtcagtgtttacgatggatgatagcagtattattattattattatttttattggggaagagaatacattccagagaagaggcatggaatgagccgagagaggcaagggggctgcagggcggaagtattgacatggagaacactgggttgattcatgtggacaggagcttagggctgagcgtgggagttagggtaacggtattccattcctaagagagctgtactttttaactctgcaagccaaaatagaggtatgcatatgacagaatcacgtacactcctcccagctaaagaactaggacattttcagtaacagttgaaggttcttggttcactttccaacccaaaactctccctccacagagggaacccccactggaattgggtgcattcctttaacacgcatgtctttatatttgacctcatacatgctctccataaacagcgcatagttttatgtgccatgtctttaaaagatctctgtaagtggcttcatactgtacatatccttctttcttttgcacaagagtacatttttggggttcgcccgtgttgctacgtgtggccctggttatctcattttaactgctgcatagctagctaccattgtataaatctgctgcaaacagactgaaacaaaaatacagatgtttccattctcaggtgatggatatttaggtcgcgtcccattttttactgttgtaagcaaggcatttttgagtctcctggtgtgtatatgtgaaagcttctctagaccaggaatgggtgaatttttctgtaaaaggccagatagtcaatattttaagttttgccactatatggcctttttttccccaacaactcagctctgccgttgtagcttgtagggggccacagccaatgtgatggatgtggctgtgtttctaataaaacttaccaaaatggggagtaggcaagatttggcccagtagggtttgtgttggttgtagatgatgcacgttttcacttctacgggtcgctaaatcgcttgccaagtgattgtagctgtgctctgagagcgtttctcatggttgagggtggctatgtccctgtgctatccttggtgggtttcatgaaggtctcctgtccctttgcagagctgcatgcttctgggaggccggaagaccacggacatccctttggaaggctacctgttgtctccgatccagaggatctgcaagtacccgctcctccttaaggtgagactttcccgtatttgaagtgacagaaaactctttggcttcagcataacataaaatttgttagttcaagtatctgagaagtctagcagcagtgtcagctttg

SEQ ID NO: 26840 - DNA, 2300 bp, Homo sapien
ctcccccaacaaagagttatgtgactccaaatgtcaatagtcccaaggttgagaaagtctgtattgcatagaattcgctctcacaaagactccccttttacagattagacgactgaggcccagagaaataacgtgtcttggccaaggttaccctgccagttggatttggactgggatacaaatgcaagcccgcttcattccatggtccattatgttccagccatgttctcccctcgtggtagacagaattaatttaaagatgaggaaacggaggctcagaaaggtaccgtgaacagtttaaagtcacaaagcagagatactccagaggcctttattaggaataaaaatataaataaaaaaccagctacctttggacacaattgactccactacccaagcgtgacaggctcacctatctcatgtcctttactccctgcccaggggaacttcactcagcccaaggcccagatcaaatgctaccttgcccatgatcccaaagaaagaagtcagagagggcagaagccaccccattctctccctgtgtccttaggcacttacagtattgagaggccaatgggaggaaaatcctaggcttttggaacaggaataaataagcaatgtttctgtccataaaatgactacagtctagaggcggatactatgtggatcactttatcccctgcagagacgatacaatctctggtccggaaacacgggtgattagggattgtatgggccatttgagagtggggccaggcttagagggccgttcacacatgcaataatagtaagaacaaacatttacagagaactttctaggtgttgggcttcacacatgcaataatagtaagaacaaacatttacagagaactttctaggtgctaagtacttcccatggaaccccggggaggaccttggagctaggtaccatgatcgttcccgttatactgatgaaaacactgaggatcttgaagcaaggaaaccagcccaaggccacccggccagcaagtggggagctaggatttgaacctgagcagctgactctaggccccagaacttcctcccctctccataccttccgataaggcgggtgatgatcaacattgcccagagcaacctgacaagaagctgggtttcccaaggccttatcccatggggtgggtggatggaagggggagcaggcagggtacctgccacttgatcaataactcaagagcaggtaataatttcttctgggaaaggtggaaagggcagggtcagggggcaaagaagttcagaaagaaaaggaaggaaggaaagagagagatgggaaaggaaacgggaaagagaaaagtgagagcgagcgcgcgccacgcatgttccttcccaaggtcgtggtagcaccgagggcaccgcgagggcccggcgttcccgggaggggccgtcactgcccagagaggggccgtcactgcccaggcagcggtcgcccctgacttcccggggccgcggaggcgcgcgtggcggggctggcttgcccccgagcggctccgcagcgagctttcccagcccggtgtttacttggcccgagcagcggccggacctgcaagcaggagcctgcgcgcggcgggtgtcgcgtgtgccgggtgggagtggcgtagcccgcggtgactgcgggttgggggggcgccacgcgtccgggcgcggagttggtacgctcggttcggcgtgcgcgcggcctcggactcccggctccgcggggcccttccggaggctcccgcccgacccccgagcttccgacggaggcgccgagcgccgcgccgcgtccccaggggccccgtgcacgcgcagagcgcctctgcggccgagcgcggcgtggcacttggcagacggtccctggcgcgggggcggggggccagccgtctgggagccccgagggccgccccctcccgcccctcgcccggcccccgcgcgctgcctccgcccccggcccagccgcccggcccccagtcccgcccgccgcgccgggagcccggcccgccgctgagcccggcccgccggcgcgccccgtccgggatggggcgcctggacgcctgagttgccgctcggcgcgacggaaggagccggcgccgcgcggccgcgctagaatggaggcgcccagcggcagcgagcccggcggcgacggggccggggactgcgcccacccggacccccgggcccctggcgccgcggcgcccagctccggccccggcccgtgcgcggccgcccgggagtccgagcgccagctgcgcctccgcctctgcgtcctcaacgagatcttgggc

SEQ ID NO: 26841 - DNA, 2300 bp, Homo sapien
ttcccaggcagtaaaggaagaagtgagccagggctgttgatgctctgggacttgtgcagcctcttttctgtcacattctattggtcaagaccagccacaaggctagtctaggttcaggctggtggagaaacaaactctacctcttgctgggagtgactgcgaaatcgcattacaagcagtggaacttgcagaatttaaggccatgaaatattcaacgtgactgtagaccgggccctggggatatggcctgcccctctgcaaccgtgctttagtgagacaacaaatagtcaacacgtacaaaagctcagaaagtgctgtggaaaacatcagctagggagagagggggctacttgagacaggtcagggaaggcttcccagagacgtctgagctaagacccgagcactggagcatgcctgcctgggatgtctgtgcctctgaggtttccaaggaagacaactgtctttgcataagcccatggctgcccttgggggaaggggcccaggggacaccactaatggttgctgtgatagcatcattgtggaatggagtggaagctgccttggggccagagtatctgtcccccagcactcatttgcaggctgtgtgacactggccatctgggtttcttcccctgactcccaaagcccaggtccagttcactgcactgtgagggttcacaggtttataacaggataaactacagagagaggtcagtgcttcctggtatactatgcacagctgcgacactcaataaacagaagttcactgaactgcaaggtcactgctgctgtgacaggagggtcatatggatgtgtgtatcttgccagtggctgtggtgaaaccctgcttgtggagaatagacataaacacaccttctctctctccctctctgtcttcctttcacctcccctctccctccaccccttccatttcctattctcccagcatgttctttccactcttcctcacctccttccccttcacctccttcctacaccattcctttttccatctctttcctgttttcctaacttgttactctcatctttttctttcttttctgttcttcctgacagctccccttcctacctcctctcccttcaccctttctcctactctttcccctcctctcatttctacctctctttccttttcacttcccctctccctcctgtctttctcctttttcttttacctctgtgcctccctctcacctcttcccacaccacctcatctcctccataactaactcacctcctttttgtttgtttgttttttgagacagggtctccttctgtggcccaggctggagtgcagtggtgccatcacagctcactgcggcctcaacctccgaggctcaagcgatcctcccacctcagcctccccagtagctgggaccacaagcagcgccaccaggcccggctgttttactttttattttgtagagaaagggtctccctatgttgcccaggctggtctcgaactcctgggctcaagcgatgctcccgccttggcctccggaagcgctgggattagaggcgtgagccgccgcgccgggcctccccccttcccctccgccgccgccttctcatcgcccttcctccttcctcctgacgccccttactcccgatcacttctcattcattcaccagcttccagtcctcgctccctcacctcttttctttcctactcgccttctcctcctgcccctttatcatctctccttgtcaccgttcttttttgccaatcctctcgttccccttcctttcctcatctcctctcttacccacgtcatctccattctcgtgctccccttcacctcccgttaccttgcgcttctctcctctcatctccatcaccacctctccccgctttcgcctttctttagcccccgcgtcccctatacccttcgcccatgcccactcccctccccaccttctcttcttccaccctccaccctcgccttctgtctctcgcccacctgactccgctccgcccccagccttaggctccgccccgctgggggtcacggggccgacggacgctaggcggccgtagcggcctcgccagtcacgtggtcacgtgacgcgctccaacatggcggcgccgtggggccgaggtgtcgcttcctgacggggcggcgcggacggacgcggccggtgccggccgggacgccgggcccgcagcctagctcgccatctcgctcacgccgcccgcccgcggggccgtcagcccccgccgggccggggccatgcaggagagccagaccaagagcatgttcgtgtcccgggccctggag

SEQ ID NO: 26842 - DNA, 2300 bp, Homo sapien
ctgctcagaggctgaggcaggagaattgcttcaacctgggaggcagaggctacagtgagccgagaccacaccactgcacaccagcctggatgacagaggcagactctgtctcaaaaaaaaaaactcatgttctctccactgaacattaaattagaaatatgtctgaatatgctgtgaccatgatgtggaaattgttcagtggaaactattttttttgagacagggtcttgctctcttgcccaggttgaagtacagtggggtgatcacagatcactgcagcctggatctcctgggctcaatcagtcctcccacctcagcctcctgaactgctgggactacaggtgcatgccactgtgcctggctaattttttgtataatatttctgcagagatagagtttcaccgtgttgcccagtctggtcttgaactcctagcctcaagggatcctcctgcctcagcctcccaaagtgggggatttacaaatgtgagctaccacacctgattgaaacattttaataactgttttgcctctcaggtcaactttgttttcatattaattgctcccagtcttccaagtgtatggcaggctgtccccaggaggtggcaggattggcaaaggcagcatatcatcattttaaccaaatggacattagaactctctatgaaggcataattagatgctgtttactttaaacgtatctcctatgtggacctgggagccttggtctgttttgctcagtcagtaaatatgtgacccagtttcatctcatattaaaagacctttgttgtgttcttcaaaatttctactgttcctgttatggacagtttggacagaacagtttctagcttcagcctcatatcgtatgaagctgtacatccacatgttgtccttctcttcttgcctaaggcaaaaaagtcagacttcaccaacatattgtttagaacaacataaatattttccatggtatttctactattaaatgttataatgggtaatatagactataaataacagctaaacagcagttttagtcatctttatatctcatgtctagcacagtacatggcacaaaatagatgttctcaggaacaggacaaggtgggggaggcactcaagcgcttagtgtgtgaaatatagtgagatgccctctctcagggtcagcaccaagtgtaaggtctcctgatgtgctcacttgcttcaccctagtcttggccccagatgcttcttagagtctttttaaaaaaaattatttgaaattgctttattcaaagaagcctcaatttttattatttatttatttatttttgagacagtctcgctctgtcacccaggctggagtgcagtgtcacaatctcagctcactgcaacctccacctcccgggttcaggcaattctcctgcctcagtctcccgaatagctgggattatgggcacccgctgccacgcccagctaatttttgtatttttagtagagattgggtttcaccatgttggccaggctggtctcgaactcctgacctcaggtgatccacccatctcggcctcccaaagtgctgggattacaggcctgagccaccacgccctgccaaagaagctaaaatttgatacagattgttaatgagctttttctacactctgggttgctaagtcttgttcagtgatgatgaaagcgtaaaaactcttgcctcatttggaatcaaggggagtagtcggctgcttttctcgtgaagtgtgtctctgttagcattgtaccttccaaaccgcatcaccatgaatattgatgtctcgaatttttttctccaggcaaactctgtttgctagtgctgacactgcttatgtcctagcgtattcaattattatgctgactacagacttgcacagtcctcaggtaaagcactttaatgatttacatgttgtattagctaaataagtggctttacttgggcaattggatgttttttaaatggtttttaattttttttaattacaggtaaaaaataaaatgacgaaagagcagtatattaaaatgaatcggggtatcaatgatagtaaagatctgccagaagagtatctctcaagcatctatgaagagatagaaggcaagaaaattgcaatgaaagaaacaaaagagctaacgattgcaaccaaatctactaagcagagtaaggtctaatggcaaattatttcttttagttctaattttttagtgtatcagaatgcatgattaaatactctggtgataaatttaatgtgcatagctggatatctgaataggaaatgtgattgaattaattattgtga

SEQ ID NO: 26843 - DNA, 2300 bp, Homo sapien
gacagtttgacatagaaaattgctgtcatccttcttccccatgtggaccacatggctcagattcagagtaaaggctctagagcctggcaactggggtctgatttggggctccacctcttcctgcctggatggcacaggcaggttacttagtcaccgagtcccaccttcttcatctctacaatcttcacagggtggttatgaaaatgaagagggcttgggactgtatttggcaagtaataagaactcaatagtgttacctgctgtcatctccgtggcgtatggctttgctcctcttcaccagcctttcctctctctgtcacaactctgagtagtccatgttagaaataactgagttatggctgggcacagtggctcacacctgtaatcccagaacttttggaggttgaggcagaaggatggcttgaggccaggagttccagaccagcctgggcaacatagcaagaccccatatctttaaaaaaaaattatttttttaattagctaggcatggtggttcatgcctgtagtcccagctactcaggaggctgaggcagcaggattgcttgagcccaggagttcaaggctgtagtgagccttgattgcaccactgtgctgcagcctgggcaacagagcaagacctcatctctaaaataaaaaaatatatattttgaattgtgtgctttttaaaatcatttcctgccttctaaggagccataatacgtagagaatcaatgaatagttgctttttcttctaaaacatttttttagcctgggaggtattatcaatatgaggttcctgctgccagccaagtatatggcagaatctagaaatgttaaaaattaattagctacctctgcggttgtcagaagccctgagaaatcagcttggaactaataagcccttgacctttcagtattggtgacgtacttgagattccagctgtccccagcttctgcaaaagggaggacattactagcttactaataataatttaatagtgtgtgaagaaatcaggggatgattctctttggtggaattaagtctatttctcagtcaagaagaaagcaatttataagtaaagatactcggcagtgctcagtggtatagtggagtcctggactctgggactgagttgtaaggtcagcgtaaaaagcaacactgaagttcagtcagaagttcccatgaaaattccttagggtttccctggaggtctgtgtgccattccttggtaagtttcatgtagccagtgtttcctctgacagaagttgggaccagtttctgtttctacagctgagcttcaggtaggagggcccgtgtgcagatctgcattctcaagcaccagaggcacccctcaggaccaggagatccagcctcatctcccactgcatgcctgatgtagagcatattctcattccttcagttaaaccaattaacgattgccaacaactttaagtgccagggacttaagtgttcagcagtgaacaagacagagttaatgccctcttggcacctaaggcaggaaacaaacaaatagatatatggtataatgccaaaaagtggtaagcactaagaaaaaaaaagtatgagcaggacatggtaatgggaaggtacgatctcacaagaaagatctctttgagagggacacacatgtctgagctgggaattgaaggagtgagccatggggagacaacattccaggcataaggaacagtgagtgccaaggccctgaggtgggacaagagatgacaagttaaaggagcaacagtgaggccaatgaggctggtgtcttgtcgtctcacgaggagggtggaaaaaggaggtgggggtgactaaatgatgtgcctattaagtgacatggtgggaggaatccgccgccccagtcaaatgctttttctctctttattgagagcttactaaatttgcataaacatctatatggcataactccattgaaccaacttttttttaatgactaacttaagattacagtgccctttttctagctgtaaggtaggaactcatttcttcatgccttctttctcttagatcttgaaatgcatcagccagctggagctcgctcagctgataggaaccggtgtgaagacgcgctacctgtctggatctgggcgtgaaagagaagggagcctgaagggccacacattggcaggagaagagttcatgggccttggcctcggtaagacaccaggccccacagctaacagtcacggatttgcaagctaacggggatgaaacccttcttgtctcatcaggactgtcctgtaaaccgtctcttcctttt

SEQ ID NO: 26844 - DNA, 2300 bp, Homo sapien
ttatatatggcatttcattcaacatgcaacaaacatttattaagcagctactgtgtgcctagtgctgggggtacagctgtgaataccatcaatatggggctagatgtggtggctcacacctgtaatcccggggctttttttttttttgagatggagtttcgctcttgttgcccaggctggagtgcaatggcaagatctcagctcaccgcaacctctgcctcccgggttcaaacgactctcctgcctcagcctcccaagtagctgggattgcagacgtgcgccaccacacccggctaattttgtatttttagtagagacggggtttctccatgttggtcaggtctcaaactcccaatctcaggtgatctgcctgcctcggtctcccaaatcactgggattaccggcgtgagccaccatgcccagccctatcccagtgctttaggaggcggaggtgggaggatcacttgaggccaggagtttgcctgggcaacatagtgagagctcatctctacaaaaaaattcaaaattagccaggtgtggtggcaggtgcctgtagtcctagctactcaggaggctgaggtgggaggattgctttagcctaggaggtcgaggttgcaatgagctatgattgtgccattgcactgcagcctgggtgacagagcaagaccctgcctcttaaaagaaaaaaaaaaaaaaaaaaaaagccctggccaggcgtggtggctcatgcctgtaatcccagcactttgggaggccaaggctggcggatcacaaggtcaggagttcaagatcagcctggccaatatggtgaaaccccgtgtctactaaaaatacaaaaatcagcggggcatggtggcgggcacctgtagtcccagtaacttggggggctgagtcaggaaaattgcttgaacctgggaggcagaggttgcagtgagctgtgacagcaccactgcactccagccctccagcctgggcgacagagcaagactctgtctttaaaaaaaaaaaaaaaaaagaaaagcccttgctgtatagaatcccttaggttatggatggggaggagggcaggggtttaggaggggagaagcggaaggaggaacaaaataaagaagagacaattagttggagagtgataaataccataatgatatcatggaactaggcttaccagatcaaacactgggcacccagttcaatgtgaatttcagataagcaatgcatgatttttaagtataaatatgtcctacacagtatttatactagaaaattataaatttttttctaaaatttacattgacctgggcagcctgcattttatttgctaaacctggcaaccctaatttgtgtgctgggtggtggtgagtgggcaatttcagataggcctcttttgtggaggtgacatttgagctggaacctaaatgtaaagaaggagccaatcattcaggaatctagaacatcccagcacagggaacagcaagtataaatgctctaaagtggaaataagcttggagcttagaggaacaggaagaaggtggggtggcggagctgagtgagggtgaggagaggagggaagcggaaggtgatgagggcaggcaggctggcaggggccagatcccatatggtttgtgggctgtaataagagtaccaaaacttacataccaggccaggcgcggtggctcacgcctggaatcccagcattttgggaggccaaggtgtgcggatcacttgaggccaggagttcgagacctgtctggccgtgtctccctctaaaatagaagctccaagaggggcaggaagttctcttccgtcttagaccctatgtgcacgaccttggatcgatcaacattgaacacctcctacgtgccaagccctgacatcaaaatgggtcagaagccagcagccgctcgctgaatctgtgttcctctttggaaaacgagaaccgtgaagcctgctggcatggtcagagccaaagagcattgtcacttgtgagatcagcgcagaaacagagcggggccccgattggcccttcgaacttgggtggggccagagcattcctggccccgccccctgcagcgggccgctcgctcatgcgctctggcctcaggctcgctgtcgcgccattttgccggggtttgaatgtgaggcggagcggcggcaggagcgggtagtgccagctacggtccgcggctggggttccctcctccgtttctgtatccccacgaggtgaggcgcggggcgtgcacggcctaccagagtggctcttggggcccagctgaggaagggatgaggcgctcccggta

SEQ ID NO: 26845 - DNA, 2300 bp, Homo sapien
ctctataggtaattactgtagtgaattcggtgtatttgacacccatggaagtgcttttcttacgctttcactacgcatttatgtttctgcaaaaattatttagtattatgtaggttttaattttttttttttagatggagtcttgctctgttgcccaggttcaagccatgctttttttatactttcactatgtgtttatgtttctgcagaaattatttagtatgctgtaggttttaatttttttttagatggagtcttgctctgttacccaggttcaagccattctcctgcctcagcctcccaagtagctgggactgcaggtgcccaccaccacgcccagcaattttttggtagagacagggttttgccatcttggccaggctggtcttgaactcctgacctcaggtgatccacccgccttggcctcccaaagtgctgggattacagtcgtgattcaccacgcctggcctaggttttaaatttttgtttgtataaatgacatcatactatgggtttcatttttctgttttttgttacttgtttgttttgagacggagtcttcgctctgtcgctcagtgcagtaacacaatcaagtcatgcagtggcacgatcttggctcactgcaagcttcacctcctgggttcatgccattctcctgcctcagcctcgcgatagctgggactacaggctaccgccaccatgcccggctaattttttttgtattttttagtagagacggggtttcactgtgttagccaggatggtctcgatctcctgacgttgtgatccgcccgccttggcctcccaaagtgctgggattacaggcatgagccaccgtgcctggccttttctgttttattttgagaatgaggtcttgctctgttgcccaggctggagtgcagtggtgcgatcatagcttacttcagccaggaaattctggactcaagcgatcctcctgccttagcctccctagttgatgggattacgggcatgctccaccgtacccacctacatcatgactgtttgtccttaacatctttttttttttcttttttcttttttttttctgagatggagtcttgctctgttgcccacgctggagtgcagtggtgcagtctcagctcactgcaacctccgcctcctgggttgaagccattcttctgcctcagcctcccgagtagctgggactacaggcgcatgccaccacgtctggctaattttttgtatttttagtagaggtttcaccatgttagccaggatggtcttgatctcatgacctcgtgatctacccacctcggcctcccaaagtgctgggattacaggcgtgagccgccactgcgcccggcctaacatcatttttgagttattcatttagtgcctaaagcgatccagctacctcagcctctcaagttgctgggactacaggaattcactaccatgcccagctaattttttatttaattttttcttaatagagatgaggtctcactatgttgcccaggctggtcttgagctcctgggcttaagcaattgttctaccttggcttcctgaagtattgggattatagacaggaatgaaccaccacacccaggaggcttttctagtttagactaatgaatgtttcaaatttagaggtttttaatgaagattgttctcgtatttgttgctttttgggggtgggaagagaacaaaaaatgagacacaaaaaggttaaataactttttcaagaaatatctgctagtgatgattcttaagtttggtgaaatcttagtctccttctctgtgatattattattttatggtatgttgatttatctgcaagatgttatcctcatagttttgtgctctgaaaaggagaatttagaaagtggaaattgaaccattatgtgcaagtgaaagttttggtttctgggcagcagcatctcctattataacagagcttaaaaatagcaaattgttctttaaatcaacaggtccttctcttccaattgtcttttactcaaatatggaatcattgcatttagagcatgtatattattgtgttttttaggtgccaaaagaacatcttttagtctcgattcctctcttgattaatcatcttcaagctgaaagtattgttgttcatacttacgcagctcatgctcttgaacggctctttactatgcgagggcctaacaatgccactctgtgagtattttattctaaagttttttagcctggggtaggggctgtactgtgctggtcaaagatatctgaatgttttcataatttcactagtgggaaaacaaatgtctgcttt

SEQ ID NO: 26846 - DNA, 2300 bp, Homo sapien
cccctcccccgccttttcttttttttctttctttcttttttttttttttttttttttttttttttttgagacagagtcttgctctgtcacccaggctggagtgcagtggtgcagtctcggctcactgtatcctctgcctcctgggttcaagtgaggaggctgtctcagcctcccgaatagctgggattacaggcacctgccaccacgcctggctgatttttttttgtattttttagtagagacggggttttgccatgttggctggggtggtcttgaactccggacctcagatgatctgcccaccttggcctcccaaagtgctgggattacaggcgtgagccaccacacctggctgcgcctcttttttttttttttaattcattgagacagggtctccgtatgttgcccagactggtcttgaacttctgggctcaaggagtcctcctgtcttggcctcccgcagtgctaggattaaagtgtgagccaccacacccggccctttgtgcttctttttttttttttttttctgagacggagtctcgctctgttgcccaggctggagtgcagtggcatgatctcggctcactgcaagctctgcctcccgggttcatgctattctcctgcctcagcctcccaagtagctgggactacaggcgcctgccaccacacccggctaattttttgtatttttagtagagacggggtttcaccttgttagccaggatagtctcaatctcctgacctcatgatccgcccacctcggcctcccaaagtgctgggattacaggcatgagccaccacgcccggctcctttgtgcttctttaactactgctcttgggtagggcctgagcatatttcttgctggcagtgtggcttgtgccctcaagcagcctggctaaagataacccttgtaactgctttgtgtaactgaatcatatttaaacatgattcccatagcatcatgattcctgcaagacaatgattcccagcatttgtagattacctgattattgggtactttttgacttttgaacttgtgcgttttgtaaatagctttggtgcaataaaatattaattgaaacctgaaaatgccatggattaaaaatcttctgctggcagtaataagacattagtggaggccaggtgtggtggctcacgcctgtaatcccagctctttgggaggccaaggcaggcggatcatgaggtcaggagtttgagaccagcctggccaacatggtgaaaccctgtctctactaaaaatactaaaaatacaggcatggtggcaggtgcctgtaatcccagctactcgggaggctgaggcaggagaatcgcttgaacccaggaagcggaggttgcagtgagccgagatcgcaccactgcactccagcctgggcaacaagagaaactccatctcacaaaaaaaaaaaaaaaaaaaagacattagtggatagatgatgagcaaaatggaattcttcatttccctgctctctgttgggggatagtcattttaaaaatataagctatgaaatggataagaaactgggttctgctagggaaatggataagaaactgggttctgctaggtaggctacagcttattgggatttcttgaaatgagggtccttttgaaagacttgtgcattaaaattcccagcctcctattggagacatgcaaatttaaagctaaggtttgagaaggcagagcaagccaagtttttgtctcagccaaagcctaattcattttagattttgtcagtgcaggttagtgtgataaactcataatttataagccattgtattttgtgagatgtaagtttggattgctaaacactctttgcttatactgtgtagcaattctaatccagtttaagcttttatgaaatctctggatatattgatgaagagtgattagcatcaaacactaatgtgagtaggatcgtgatgaaggaaatacttgcatttgccagagagtgtataggtgacttatcaacttgagactgtaatttgcctaacctccttttatttctaggtacttttacccatttccagttccacctttactttatcaagtggaactttctgtgggaggacagcaatttaatggcaaaggaaagacaagacaggctgcgaaacacgatgctgctgccaaagcgttgaggatcctgcagaatgagcccctgccagagaggctggaggtgaggagttgagcccaggctccctgacgcttcgacagggtaggagggtagtggggagatgtcaccgcacattatcttttctaagaaggcacattgacagctgt

SEQ ID NO: 26847 - DNA, 2300 bp, Homo sapien
ttaagttgaggaacctctagataaatcagaccgcagaatttgagaattaaactcaaattctgtaatgtaaagttcacttctaaaaatgattatgatttggacttattagagataatgtgcttttttcatattctgcaatttaatatgccactatttatgtacccaatgccttttggtaaaattttccataaaattgtatttgggtcaccaagcatatgccaacgacatttacgaataaagtggtaggtataaagggaaagaaaacacaggtttgaaaatcagtcttatgtgatcggacgatatgtaatgtacagttccttttaaaaagcattattgccgggcgcggtggctcacgcctgtaatcccagcactttgggaggccgaggcgggcggatcacgaggtcaggagatcgagaccatcctggctaacacgatgaaaccccgtctctactaaaaatacaaaaaattagccgggcgaggtggcgggcgcctgtagtcccagctacttgggaggctgaggcaggagaatggcgtgaaccctggaggcggagcttgcagtgagccgagattgcgccactgcactccagcctggacgacagcgagactccgtctcaaaaaaaaaaaaaaaaggcattatgaggttgggtgtggtggctcatgcctgtaatcccagcactttgggaggctgaggtgggtggagcacctgaggtcaggtgttcgagaccagcctggacaacttggcaaaaccctgccatttctactaaaaataaaaataaaaaaattagccaggcgtggtagcgggcacctgtaaccccagctactcaggagtctgaggcaggagaattgcttgaacccgggaggcggaggttgcagggagccgacatcacgccactgcactccatcctgggggacagggtaagactccatctcaaaaaaaaacctgaacaaacaaagcctaaacattatgagatattcatattactctcatcagggaataattgggactggaaaaggaaagttctgctgtctcttataaatgtgtctctgcaaaatattcttcacccagcttccaggcaattgtgtcttttttttttttcccagaggagtctcactctgtggcccaggctggagggcagtggtgcgatcttggctcactgcaacctctgcctcctgcattcaagccatttttgtgccacagcctcccaagtagctgggattacaggcctgcgccaccatgcctggctaatttttgtattatttatttattttctttgagacggagtctcgctcttttgccaggctggagtgcagtggcgcgatcctgagtcactgcaacctccacctcccaggttcaagcgattctcctgcttcagcctgccaagtagctgggactacaggtgtgccatcacgcccagctaatttttgtatttttagtagagatgggtttccccatgttggccagggtggtctcaatctctttttttttttttttttgtgacggagtctcactctgtcacccaggctggagtgcagtggtgcgatctctgctcactgcaagctccgtctcccgggttcacaccattctgcctcagcctcccaagtagctgggactacaggcccccgccatcacgcctggctaattttttgtacatttagtagagacggagtttcaccgtgttagccaggatggtctcgatctcctgacctcgtgatccacccgcctcggcctcccaaagtgctgggattacaggcgtgcgccaccatgcctggcagtctcaatctcttaacctcgtaatttcccacctcggccttccaaagtgctgggattacaggcatgagccaccatgcccagcctaatttttgtatttttagtagagatggggtttcatcatgttggccaggctggtcttgaactccgggtctcaggtggtctgcccgcctcggcctcccaaagtgttgggattacaggccatgagccaccatgtctggccgcttgtgtcttttgaagactctactgcatgctgcctcaaaccatgacgtcatgccttcagtcttccctacttgtaaattataggtttccccaaaacttgagcagtatgtcttcagtttcagagaaaagacctaccctactaaattattattattttttattttccagagtttattaaccacttaacctctcagaactgaacaaagacaacattgttcctggaacgccctctttttaaaaaaggtacatataatttggctttataatttctggcctgttgataatcagtggtacttttgaattctttaat

SEQ ID NO: 26848 - DNA, 2300 bp, Homo sapien
tataaaaaattaaaaaattagctgggagtggtggcacatgcctgtggtcccagctactcaggaggctgaggtaggaggatttcttgagctcaggaggttgaggctgcagttagctgtgctcatgccactgcactctagttaggtgacagagcgagaccctgtctcaagaaaaaaacaaaaaagatgcggaaggaggaaagagggaagaaaattgagactggaagtcatagacccaccacttttgtccctatgggtgatagcaaaatcacctttgacgagattgtctgattgtgcgcagctttgggtttagggagacctctctgcatctgctcctttacccaaggaggtatgggatccacactgcttggaagttagaaagaaaagatcacttttagcagagggctggacaatatctgaatgttgcttactactgtcttggatgggcactaaagggacggtgaaagtcctttgactatttttggtgttctgaaattcagtgtcattgcacttcacaagaagcaatgtaaggaggcaagtgtcctcccaggcttcgctaaggctccaaagccttgtttggaggggcctcttcagacacagcagctcgtattttgaatttatattccgttggcaagagagattgagcaattattagattgagagacatttaagaaagagagaattatttttaaatagtggggcggcagtcccagagtgagcgggagagagaagctctgtgcacctgcagttccttcattcattctcagtttcttggacctctcacaacgcgagcataattttcgctgagtgtgcagaagttcaagattctttttttttttttttttttttttgagacagagtctcactctgttgcccaggttggagtgcaatggcgtgatctcggctcactgcaacctccgtctcccgggttcaagagattctcctgcctcagcctcccaagtagctgtgattacaggcgcccaccactgcatccggctagtagagacggggtttcaccatgttagtcaggctggtctcgaactcctgacctcaggtgatccgcccacctcggcctcccaaagtgccgggattacaggcgtgagccactgcgcctggccaagattctttactggccaccctctctccaacctcccatacaatacagctgctaaaaaccacttagtttatctaggtctgggtgaaataaatagtaatctggcacttctcgtctttttttttttttttttttttttttttttttttttttttgagaccagtgtctctttgtcgccaaggctggagtgcagcggcgcgatctcagctcactgcaatctccgcctcccgggttcaagcgattctcctgcctcagcctcccgagtagctgtttacctacaggcgcccgccaccacgcccggctaattttttgtattttcagtagagacgggggtttcaccgtggtagccaggatggtctcgatctcttgacctagtgatccgcccgcctcggcctcccaaagtgccgggattagaggcctgagccaacgcgcccgggccattgtcttttatctcactacacatttttcaattttatttattgtgtattttacttacacaagaatgtaagctccacgagggcagggatttttgtcagttcaccactacattcttagctcttggagcaatgccttgcatatggcaagcatttaatgaacatttacagatggaggaagaaacaactgcaggaaggagagaaaggaaggccagaggcaggacaagaggaagaagcgacagcaaggaaggaaaaaggaagtggaggaggaaagaaggtaggctgggttctcccagacccgcttcgagtccagcaggcagcgcgaaactcccaccagaactacaactcccggcaggccccgggactcaggacgggccgctgcggtccaggcgggacagggcgctcctcccgctgggcccccggcgtgccttgcgagcgcaggctccgccgcagtgccagccggaacttgtggttcggaccgtgggtgggggtggggccggggccgggcctggaggcgggcgggggccgggggcgggcgcctgcccctcccccgtcacttcctgccgggctgcgggcgcctgagcggctcttcagcgtttgcgccggcggctgccgcgtctctctcggctcccgcttcctttgaccgcctcccccccccggcccggcggcgcccgcctcctccacggccactccgcctcttccctcccttcgtcccttcttcctctcccttttttccttcttccttcccctcctcg

SEQ ID NO: 26849 - DNA, 2300 bp, Homo sapien
gatgcacataatttatcttgtgagaaggaacacacataatttatcgtaacatacttaatgctcacagtttcttgtgaaccaagaacacacagcttccatctttttctcaaggtaaagaaaaatgattccttaattacttagcaagactcaagaggtcttcaggaccttggaagagaacttgactgatagtttctaggtacaaacagaagaaaacaaatctaggtgacctactcctggtcaggtatggtggcccacacctggaataatccccccagtactttggaagattgaggcaagaggattgcttgagcctagaatttgagaccagcctggtcaacttagtaacttagtaagaccctgggcaacttagtaaaaccctgtctctataaaaaattaaaaaattagctgggagtggtggcacatgcctgtggtcccagctactcaggaggctgaggtaggaggatttcttgagctcaggaggttgaggctgcagttagctgtgctcatgccactgcactctagttaggtgacagagcgagaccctgtctcaagaaaaaaacaaaaaagatgcggaaggaggaaagagggaagaaaattgagactggaagtcatagacccaccacttttgtccctatgggtgatagcaaaatcacctttgacgagattgtctgattgtgcgcagctttgggtttagggagacctctctgcatctgctcctttacccaaggaggtatgggatccacactgcttggaagttagaaagaaaagatcacttttagcagagggctggacaatatctgaatgttgcttactactgtcttggatgggcactaaagggacggtgaaagtcctttgactatttttggtgttctgaaattcagtgtcattgcacttcacaagaagcaatgtaaggaggcaagtgtcctcccaggcttcgctaaggctccaaagccttgtttggaggggcctcttcagacacagcagctcgtattttgaatttatattccgttggcaagagagattgagcaattattagattgagagacatttaagaaagagagaattatttttaaatagtggggcggcagtcccagagtgagcgggagagagaagctctgtgcacctgcagttccttcattcattctcagtttcttggacctctcacaacgcgagcataattttcgctgagtgtgcagaagttcaagattctttttttttttttttttttttttgagacagagtctcactctgttgcccaggttggagtgcaatggcgtgatctcggctcactgcaacctccgtctcccgggttcaagagattctcctgcctcagcctcccaagtagctgtgattacaggcgcccaccactgcatccggctagtagagacggggtttcaccatgttagtcaggctggtctcgaactcctgacctcaggtgatccgcccacctcggcctcccaaagtgccgggattacaggcgtgagccactgcgcctggccaagattctttactggccaccctctctccaacctcccatacaatacagctgctaaaaaccacttagtttatctaggtctgggtgaaataaatagtaatctggcacttctcgtctttttttttttttttttttttttttttttttttttttttgagaccagtgtctctttgtcgccaaggctggagtgcagcggcgcgatctcagctcactgcaatctccgcctcccgggttcaagcgattctcctgcctcagcctcccgagtagctgtttacctacaggcgcccgccaccacgcccggctaattttttgtattttcagtagagacgggggtttcaccgtggtagccaggatggtctcgatctcttgacctagtgatccgcccgcctcggcctcccaaagtgccgggattagaggcctgagccaacgcgcccgggccattgtcttttatctcactacacatttttcaattttatttattgtgtattttacttacacaagaatgtaagctccacgagggcagggatttttgtcagttcaccactacattcttagctcttggagcaatgccttgcatatggcaagcatttaatgaacatttacagatggaggaagaaacaactgcaggaaggagagaaaggaaggccagaggcaggacaagaggaagaagcgacagcaaggaaggaaaaaggaagtggaggaggaaagaaggtaggctgggttctcccagacccgcttcgagtccagcaggcagcgcgaaactcccaccagaactacaactcccggcaggccccgggactcagga

SEQ ID NO: 26850 - DNA, 2300 bp, Homo sapien
caagttcccgcttcctcctccagtgctccgttctctctcacatgcgccccctgctggcagatcctaacaaggaacttgatggcaaagtacaaacatggttcctggagtcccaccccaggtacatgagtcaggtatagaagggttagtttgaagctgacagtaccgtaataacgggcacagcttattaatttgaaaactattagatgaaactacacaaagaaccaagaacaaaaacttgtgttccccagtaccattttgcatcctttgtatccggagtttttctttagctgttgtatatccttcctaacagtgtctttattttataaataactaggaagttacccaagaccacacagtaaggagcagaagcaggatttgaatcaaggctgtgtggctccaaagcccatcctgttttttttttccttttaaaatatatatatatatatatttttaggccaggcgcagtggctcatgcctgtaatcccagctactcgggaggctgaggcaggagagtcgcttgaacccaggaggtggaggctgcagtaagccgagatcgcgccactacactctcacctgggcgacagagtgagaccctgtctcaaaaataaaaataaaaataaaataaaataaaataatttttttttgagacggagtttccctcttgttgcccaggctggagtgcaatggtgtgatctcagctcaccgcaacttccgcctcctgggttcaagcgattctcctgcttcagcctcccgagtagctgggattacaggcacacaccaccatgcccggctaattttttgtatttttagtgcagacggagtttcaccatgttggtcaggctggttttaaactcctgacctcaggtgatccacctgcctcggcctcccaaagtgctgggattacaggcgcgagtcaccgcgcccagctagcaatatatatttttttaattcacattttccatcactccctacaaagcccaatctttttttttttttgagatggagtcttgctctgtcgcccaggctggagtgcagtggcacgatctcggctcactgcaagctctgcctcctgggttcacaccattctcctgcctcagcctcccgagtagctgggactacaggcgcccgccaccacgcccggctaatttttttgtatttttagtagagacggggtttcaccgtgttagccaggatggtctcgatctcctgacctcgtgatccgcccgcctcggcctcccgaagtgttgggattacaggcgtgagccaccacgcccagccaacacgtttttaattaaaaacaaacaaacaaacaaacaaacaaaaaaaacatgatggggtcttgtcatgttgcccagggttgtctggaactcctgagcacaagcgatgcacccacctggcttcccaaagtgccgtgactaaaggtgtgaaccaccttgcctggtcttgatttttattttcttctgagattttttttcccctacaataaacattaattttaattaaaaagtttcggggctgtgcgcagtggctcacacctgtaatcccagcagtttgggaggccgaggcaggaggattgcttgagcccaggagttcgacaccagcctgggcaacatggtgaaactccgccgggcgtggtggtggcgcctgtacctccagttactcagaaggctgaggcgggaggatcgcttgagcccgggaagtcggggttgcagtgatccatgatctccactgcaccccagcctgggcgacagagccaaaccctgcctcaaaaaaaaaaaaaaaaaaaaaaaagacaaaaaattacttagaattttaccacccagaagcaatcacagctaactgcttattgtattttcttccacagcttttttttgtatctaaatatacacatctagagtttataaatgcaactctttagactctctcacccttccaccctcctcaaatactgccaccgttttgaggccggagacaatggaatttgcttacctaaaaagctccgccccttgatggcgtcacacgaaaccaaccacgccccatattgccgcatgcgcactcttaagaggtcgaacggggagggcggcaggggctctggaacggaagtgacgcatggtacttgcgcaaagacgacgaggaggctgcgaaaagttaagggccggaccgcaggctgtgctcgcttccggaagtggcttctgcgacaacatgcttgcggacctcggcttaatcggaaccataggcgaggatgacgaggtgccggtggagcccgagtctgactccggggacgaggaagaggaggtatg

SEQ ID NO: 26851 - DNA, 2300 bp, Homo sapien
aaaattttttctttttcaagttaattatgaagagtttgttctcttattcgatgtttcaatgaaaatttctttttcacctctttatttttatctgcagagggcagccactacattagatgagaagattgagaaagttcgaaagaaaaggaaaacagaggtgagaagaaaagtggctatttttcgttgttagggcccactctttactctcaccacgaccccagcatctctctggaagcccttatagagcggggcatggctggggcaggcgcactcttctgtgtgtttgctgtgaatctgtactgagaatccccacagccgttcattcaggccggagagcttcctatcgctctacttaggttctggatttctagaagtttctcatcaccctcactttaatttttttcccaggataaagaagccaagtctgggaagttggaaaaggagaaagaagcaaaggaaggctctgaaccaaaggagcaggaagaccttcaagagaatgatgaggaaggctcagaagatgaagcctcggagactgactactcatcagctgatgagaacatcctcaccaaagcaggtagacgttacggcggaggtgtcagtaatggggacaggagatcagaaggcatcctcctttactttgtagggtttcctccactcttctgcacagtttatctttaagctgttctgcctactacattgaactcctttctttcttttttttttttttttaagagatgttggctgggtgcagtggctcatgcctgtaatcccagtactttgggaggctgaggtgggtgtatcgcttgaagccaggagtttgagaccagcctgggcaacatggtaaaaccccatctctactgaaaatacaaaaataagcttggtgtagtggcatgcacctgtaatcccagccactcaggtggctgaggtacgagaatcacttgaaactgggaggcagaggttgcagtgagctgagattgtcccactgaacttaaccctgggccacagaatgagaccctgtctcaaaaaacaaaacaaaagagatgtggtctcactccatccacaggctggagtgcagtagtgcaatcatacctcactggaaggcttgaactcactggcttaagtgatcctcctgctttagcttcctaagtagctgggcctacaggtgcatgcccctgcgcctggctaattttttttttttgtagggacggggtcttgctttgttgctcaggctagtctcaaatttctaggctcgagcagtcctcccgccttgacctctaaaagtgctggcattacaggcgtgagccactgtgcccgctgaatcctttcttttaggttttcttttctcttgggattttgtttgggttgttgtacttcataggtagtttactcttttcccatctagccccatgcggctgccagatgccactgtgatacaaactcatttggggtgacatactcagatgggtccagccacatagtgggtgctcaataagtatttctttctttctttttttttttttgagatggagtcttactctgtcactcaggctggagtgcaagtggtacaatttcagctcactgcaacctctgcctcccgggtgcaagcaactctcctgtctcagcctcccaagtagctgggactacaggcacacgccaacacacctggctaatttttgtatttttagtagagatggggtttcaccatgttggacaggctggtcccgaactcctgacctcaggtgatccacctgcctcggcctcctaaagtgctgggattttaggcgggagccactgcttccgccctcaataagtatttcttgcagaaatgtgtgctaaagcatcataatacagtgtagtggtcgagagcctggtctctggaccagagtcactgggttagctttctctctgaccttaggcaagttacttcaccatgctgccacaaagtgtcctcatctgtgaaacaaggttgacgatggtcacccctcagaggctgaagtgtggcattggcacttaggacagtgtccagcaggatgcaagtgctttgtaagtctgagccgtggtcatcagctaagtttttctccatagatacactcaaagtaaaggatcggaagaagaagaagaagaaaggacaggtgagcttggggctgcaagacagtatgcagcttgttggcaaaccgaaaggagtttaaggtcgtttgggtttcttggctctttttgttgaattctcttctctcttttggttttctggtgtaggaagcaggaggattttttgaagatgcatctcagtacgatgaaaacct

SEQ ID NO: 26852 - DNA, 2300 bp, Homo sapien
ctccctaggatacagtattcatgaaggggctactgctatactcccatgaacaagggcatgtctagtatatagcaggcgctcagtaaatacttgttgaataaccaattggctgactcccccagaacagaagacccattcctgaggcctaaaggatgaaaaagagatcattttaagccaaggggatgtgatctggtttaggttttaaagggggagggaaactattcaagtatgtacctcaaaagaccaaaaaaggcggaggaagtatttgagatttagatcaggagacagctctgtgtgatacctggacctagactgtagcctgcactggggagagaaatgctgtaaggggttgggcttgctgaaaacatggaatccaaggaatctcacagattactattatgtataaagagaaagaggatcctttacagtggcgtgatctggcagacactatagccaagtgaccaacctcacatccacagttctggaacaaaccggccgtcagtatctcatgatggagcgtgaatgcagggcacagctgtgcccagcagcgctgtccccatgaggatttctctgaatccagttactgagaaataattatacgaatccagactgtgagaaggatgaggggccttttcgttccttttttttttttttttgagtcagggtcttgctttgtcacccaggctggagtgccatggtgtgaacaccagctcattgcagcctctacttcctagactcaggtgatcctcccatctcagtcccccgacgtagctactactacaggcacatgctaccatgcctggcttattttatattaaataaatagagacggggtctcgctatgttgtcaaggctggtcttgaactcctgggcttaagacacccttctgcctcggcttcccaaagttttgggattataggcatgagccaccttgcccggccccagctcatttttgtattttttgtggagatgaggttttgctatgctgcccaggctgagggggcttttctagatgcaggaagactagagacgtggcagccagttgcaaggcaggaactttggttcttgcactaaaacaaaaggtaactataaaataaaacttggcctggcgtagtggctcatgcctataaccccagcactttgggaggccgaggcaggcggatcacctgaggtagggagttcaagaccagcctgaccaacatggagaaaccccatctctactaaaaatacaaaattagccgggtgcggtggctcacgcctgtaatcccagcactttgggaggccaaggcaggcggatcatgaggtcaggagattgagaccatcctggctaacacagtgaaaccctgtctctactaaaaatacaaaaatattagccgggtgtggtggcgggcgcctgtggtcccagctactccggaggctgaggcaggagaatggcgtgaacctgggaggcggagcttgcagtgagcggagatcgcgccactgcactccatcctgggcgacagagcgagactccgtctcaaaaaaaaaaaaaaaaaaaaaaaaaaattaagtgggtgtggtggtgcatgcctgtaatcccagctattcaggaggctgaggcgggagaatcgcttgaacccgggaggccgagattgtgccattgcactccagcctgggcaacaagagtgaaactccatctcaaaaaaaaaaaaaaaaagacacttggaacctggaggcagctgaaggaatttgaacgtggcctgtgctttagatattcacgcacttgaaagtcttgggtgtgttgatgaagttgtgtttctgtaagagaaggtcctagtgcttaggagttgtgtgctgaaatatttggggtaaggtgttataacatctgtgactgacttgccacaaaaagacaaagcaaatgtggcaaaatgataattcttggtgaaaagataaaataataaaatagatgagtcctaaatgtaaccaatgacaacaaacagcagccggtatgcaatcccgtgtccctcactgtgaccgaagagcactctctccatttctgccatgtctttctctgctcccaggatgctggatgagtactttgaggagcagatgaaggagatcatccgaatgtgttcccaccaccgccagaccatgctcttctcggccaccatgacagacgaggtgggccgagggacttctctgtggcgggtggcaggtgtgcccagagggggccatgcagaggaccctggctgggcttgagggggtttgcctggggtgagcactgcttcctccttccctaccaccttgcagagagctgagga

SEQ ID NO: 26853 - DNA, 2300 bp, Homo sapien
catgcatgtaatcccagcactttgcaagtgcaaggcaggaggatcgtttcagcccagaagttggagaccagcctgggcaacataatgagaccctgtctttactaaaaaaaaaaaggaaaaagtttagctgggtgtggtggtgcgtgcctgtagtcccagctacttaggtggctgaggcgagaggatggcttgagctcaggaggttgaggctgcagtgagccatgactgcaatgctgcactacagcctgagtgacagacatagtctcaaaaaaaaaaaaggcaagttatggaaacatatatactagacaatgtgttacttagatacagtataaatgtggtaacattattatcttttaaaaaggaaatgagtaatataaaattcgggttaggaaggctaacaaaggtcttcaaaaaatttgtcagttttctacttaaattgggtggaaggtacttgggtattcattttatatatttttattatcctttatattacatatttacattgtatgccctccattgtatatgtatttggtataagtaaaacctttatttatttattgtgtatttattttatttatttatttatttatttatttttttttgagactgagtctcacagtctcactctgtccaccaggctgcagtgcaatggtgtgatctcggctcactgcaacctctgcctcctaggttcgagcaattctcctgcctcagcttcccaagtagctgggattacaggcacactcaccacacccagcttattttgtatttttagtaaagatggggtttccccatgttggccaggctggtcttgagctcctgacctcaggtgatctgcccacctcggcctcccagagtgctgggattacaggcatgagccaccacgcccagccttatttatttatttttgagatggagtctcactctgttgcccaggctggagtgcaatggcacgatctcggctcactgcaacttccacctcctgggttcaagtgattctcctgcctcagcctcccaggtagctagaaatacaggcatgcgccaccacacttggctaatttttgtatttttagtaaagacagagtttcaccgtgttggccaggctggtctcgaactcctgacgtcaggtgatccacccacctcagcctcccagagtgctgggatacaggcataagccccacgcacagccaaaacctttctttaaaaggcatatattcgtatgattttttaacgtaaaacgtaacaaaaagtatataaggagaccttaagcctttcctaactctcctctcattccttttagtttctcttctcaaaaataatcacatagggctgggtgcagtggctcacacctgtaatcccagcactttgggaggccgaggcaggcctgaggtcgggagttcgagaccagcctgaccaacatggagaaaccctgtctctactaaaaatacaaaattagctgggcgtggtggtgcatgcctgtaatgccaactactcgggaggctgaggcaggagaatcgcttgaacccgggaggtggaggttgtggtgagccaagattgtgccattgcactccagcctgggcaacgagtgaaactccgtctcaaaaaaaaaaaaaaaatcacataaacccttgataatgtcttcatgcatctgagctcttgcaggtgccgtcttctgtcccttagcttcaagagtttccatctctggccaggcacggtggctcacgcctgtaatcccagcactttgggaagccaaggcgggcagatcacgaggtcaggagttcgagaccagcctgaccaacatggtgaaaccccatctctactaaaaatacaaaattagcctacaaaattagccaggcgtggtggtgggtgcatgtaatcccagctactcaggaggctgaggccggagaatcacttgaacccaggaggcagaggttgcaatgagccaagatcgcaccaccgcactccaccctgggcaaaagagcgagattccatatcaaaaaaaaaaaaaaaaagagttttcatctctctcctgcctgtttctctctcttagcccaggcagaaggggatgaggaggaagaaggggaggaggagagttcgctgatagagatcgcagaggaagctgacctgattcaagcagaccgggtgattgaggaggaagaggtggtgaggccccagcggcggaagaaggaagagagtggagcagaccaggagttggctaaaatgcttctggccatgaggctagaccattgtggcactgggacagcagctggacaggagcaagccacaggagagtggcaggtaaa

SEQ ID NO: 26854 - DNA, 2300 bp, Homo sapien
aagatcacaccattgcattccagcctgggcaacaagagcgaaactccatctcaaacaaaaagagagaatttagcagtttttagcctaattaattaattaatggccatttactaatgagcctataactcttattccaatgttgatttctacaagttttcccctcccatcacaaaagcaaatctaccatgtatataaaaagtatttctaatttgccacaagattggaaacaatatatacagcatcaatagaaaactggctaaaaaataccttaacagctgtaaaaaggaaaggggggggtgggggggatgggattctcctatgtattgatagagaatgaccttcaagatacattaagtgaaaaaaatcaagatgtagaatggtaaaaattgtctgttactattcatattttaaggagaaaaggggaagtctagaaaaagaatacacatttgtattgtttgtatatgcgtggatatactgtctctgtaaagttacaaaagaaactggtaacattggttgcttccacccagagaactgggtgacagagtgcaagagggacttttcacaatatacaatgtacgcttcttagattttaaactatcttaatgtattatattaaatttaaaaaaagattttgctctgagtaattactttatttagaaaatgtctaaattgttaaattcctttttccttattttctaggcaaaacctatgtgggtctaaaaattgttcaggccctcctaaccaacgagtctgtttggcaaattagcctccagaagttccccatcttggttgtgtgttatactaatcatgctttggaccagtttctggaaggtaatacttataggcaaatttgttctctatcaagatgttgatgattgaaccatcagcaacttcagtagctttctattgctcttcaaacaaagtcaacagtccttatcattacttacatggccgtttgtgatctgtcccagctggactgtgaaccacagctcctacttcttaaccttgttctccctaactccagcaacactggttatcttcagttccttgaaagcctctacgtcctccattggcccatgccatcctctggcctggaatagttttttccctctccatcttgagcttattcaacctggccctactcaacctggccctactcattcttctggtcccactttaaatctctcttctcaggtggactttttctatagccccaaagtgaagtctcttttgcattttttatttttttataatctattttatgtatcgctaccctagatgaggattggtccttttcttgctgtattcacatatcctggcacatattaggcactcaaaaaatactaaataacattaatggatgaataaatatatgcttttcctttatttttattcttctatacctccctttcacctagataaatctttattcttagagtctgagtttaaatattagattcttaaaaatagatccctaccccacccagactaggtaatgtcccctgctaccagtactcactacatttattgctgccgtattaattatttaatgagtaacttcctgccagagacaaagaaatgataacaaatcagaaactgggcctatgtttctactgctatatcttcagaacttggcacatgcctaaaacatatgagcaatcagtaaatctgcagagtgaaaaatatgtaacatatcctgggtgcttgctttgtgctgggccctagctaggagctttaaagattttctttcatttatccagactgtagccctatatgggagatattgccatctctaaatcacagacagagaaactgagactcaagtcacttgccccaggttacacagcaataagtggtagagctaagagttggatccctagttgtctgattccagaacctgtactctttaagtgctacactttactgctctgcaggtcacatcttctcggggaccttctcactcattaatggggtaaatttcctttaagcacaagtttattctctaagggaccagactagatcccaaatacacacagctctcacctgagagaacctagcataagctcctctcaaccctgccatgctccactttgttccacaggcatctacaattgtcagaagaccagcattgtgcgggtgggtggaaggagcaacagtgaaatcctgaagcagttcaccctaagggagctgaggaacaagcgggaattccgccgcaacctccccatgcacctccgaagggcctacatgagtgtaagtcccagctctgaaatatctggggtagttcaagagggacctaaaca

SEQ ID NO: 26855 - DNA, 2300 bp, Homo sapien
ctctactaaaaacacaaaaaagtagccaggtgtgtcagcaggtacctgtagtcccagctactcaggaggctgagtcaggagaattgcttgaacccgggaggcggaggttgcagtgagccaagatcatgccactggactccagcctgggcgacagagccagactccctctcaaaaaataaaaaataaaaaataaaattctctacaaaatgcaaaacaaggaagagtgtgcataaatcaatttagtatctgatgtcaggaaatggtataatcatctcaaatataacatgcatttgaagcttttacaacttttttatcaaatcattgtatacagtcgtattttatttgtttttaaaatcttcatgtcattctgctaagttaggtcagccccagaatcagttttagcaaaaaggaaagtgaaaaaaactggactttgggtatgttaggcttcctgtataagggttggtaattggtaagtactatgagggtgaagttcatgctacagaaaggaggaaaacttgagtttcatttttcagtttctttcatagtctgttagctcaaaaacatcttggtaaggaaaccccacctttctctttcccattcaaactgcatttgctgatgctggacagcattcaggtagtacttccctttgtaatattatttcacttgatgtctctgttggctgtgataattgtttagtggtagaaccagtggcccccttagaatcaataggatattcccaattattgctactagtaataactaacatttattgagagtttttaatgtgtccagtactatactaagcactttataaacatttaatctttataaaatccccaccaggcacggtggcttacgcctgtaatcccagcacttccagcactttgggaggctgaggcgggtggatcacaatgtcaggagttcaagaccagcctggccaagatggtgaaaccccatctctactaaaaatataaaaattagccaggcgcggtggcaggtgtgtgtaatcccagctgctcgggagccgaggcaggagaatcacttgaacctaggaggcagaggttgcagtgagctgagatcgcaccactgcactccagcctgggagacagagcaagattccatctcaaaaaaaaaaaaaaagcagaaactgagacttagagaaattatacaacttggccaaggttatatagtaaggcagtggccaggccaatgtttgaaccaagtcagtttggcctttaaactcatgttctgactgttatttggtactggcatgagattagaagcaatgagacatactgtatgtatttattctctaacacacatcaggtactcaataactgtttattccttttcccttttgcgtcctttgtaaaaataatattttcctaacctctacagcaacagtaattatctttcatttatcatatgacttggtagaaaccgtttttcttaccgtataaaacctgagctctttagttattttggaaaatgaaagcacgttcattgtcgttctgttgggtttccaacagaacttggttcttgtggttactcaatatttcattgtgtttaggccctgtggatggagagttaccaccaagagctagaaatcaggccaataacccaccagccaatgctctccgaggaggagccagccaccctggaaggcatcctagggccaacaaccatcctgctgcttactggcagagggaagagagatttagggccatgggcaggaacccacatcaaggaaggaggaaccaggaggggcatgccagcgacgaagctagagaccaaagacatgaccaggagaatgacaccaggtggagaaatggcaaccaggactgtaggaaccgcagaccaccatggtccaatgacaacttccagcagtggcggactccccaccagaagcctacagaacagccacagcaggcgaagaaactgggctacaagttcttagaaagtcttctgcagaaagacccttctgaggtggtcatcacacttgccacaagtttagggctgaaagagctcctttctcattcttccatgaaatctaacttccttgagctcatctgtcaggttcttcggaaggcttgtagctccaaaatggatcgccagagtgttctccatgtactgggcatattgaaaaactccaaatttctcaaagtctgcctgcctgcttatgtggtagggatgatcactgaacccatccctgacatccgaaaccagtatccagagcacataagcaacatcatctccctcctccaggaccttgtaagtgtcttccctgccagctctgtgca

SEQ ID NO: 26856 - DNA, 2300 bp, Homo sapien
ttcacaatttagctgatttcaagagatagaattcccctttcttttaccctggcactttcttggggtagagggaatgtcatcaattcccattcaaaactgctgtttggtttatgcctttagccaagttacttaatcagttgctaggtttcattttcctttcctaagaagcagacaatattgttgccaggacaaaaaggagtacatttttgttaatccaaaaccatgtgctcaccaccttatctggcatttacatatctgccacttatatagtacccaatagcttgcagtaccctacagtttataaataattagtgagcagttatccccttagcctactctttggaatggagccaaatgattaagctctctgctctactgaatcaagagaaagaaattacatgtttcaataaccaggaggtttggcaactacgaggtgctgtttcctcaggaccagctagaaatctgatattctttcttcctcctcattcttctaccttggtgatttttgacactggtcctgtaagaggaagaggaagcccctttaagggagcttctcaacccaactcatacacatggtgtgggctggggctaaggaaagagtgggtgactcagagtcctcagcaaagggatttttgagactgtcttcactgagttctaaaatattcataattggaaactgtgactacatttggcattatatgaggggcagcttttttcctcatctgaaaaaggagtctcttttcttccccctgggaatatctctggtgagtcccctccctcatcttatcaaacccagccctcctggcgcaggctcagtatttagagtttgtttgtttattttcaattctccgaggggaaaattccttcttccccttgttgaaaaatgctaaaatagaaactccagaaaatttaaaagaaacggaagaaaagaaaaaaagatgttaaaaaaaaggcaagggaaggaagggaggagtagacatgaacaggaaatgctgggatcgaaaacagactgaagtgtttttttttggtggggggaatcaaggcctaaagggcacgaagaagaaaatcagtgatgatcaagctggcctggagtcagaatgagaggggctagtcatcaccagagtgggacgcaggaggctgaggtcggaggcagagctgggtttgggggaagtctccagggtcctggggaatccctgacccagggagcccacggtccctaatggaaatgttatggggtcagggagcgccaaggctgtgaggtggcggggttatgggggccttggggagagggtggtagcgagcaccagggggtgcttgctgaggacggaggcggcggggtgggggcagggagcaggctgaagggggtgccgaggtgctctgtagaagagggggattgataaggtgacaggaggtgaggccggaggaatgaggggggtgcgagtggcagaagggagggcacagacaggggtaggggcagaggagatcgaagtgctgagggcagaagcggtgacggtgtcgggggtgctggggagagcgacgggccagctgaggggatggggacactaaagagagtacaggggagccgaaggggcgacggggcgctgagatgggccaggggctgagtgggtgacggggcgctgagtaggcgatggaggtctggggtctgagggggagacggggcgctgagaggcgctctgagtgggtgctgatgccgctgggggccaaagaggtgacaaggctctgagtgggtgatgggggtctggggattgagggggcgacggggcgctgaggggccaggggctctgagcgggtgacgggtgcgttgggggcttgagagggtgacaggtcttacgggcagaggcagtggcgggtcggcgcgggcgccggggttcgcggcgaggcaaggaagaatcaggggcaggggcagttgcggggccactcacccggctccggcgcgtcctttcactgccgccggcgagtgctggggcttcggcccaggcaggtcggtggccccgcccggcgccgcgcactttcggtttccgttccccgcagaccctgggcggagccgggcgggcggcccagaggaggagaaggaggaggcgggggcccagggtggagagcacgagggcctggcccaggcacggccggcgcctccgccctcgaggagggcgtcacctcagctccccccggcggcggagccggcgggctcaggcgggcgcggctgaggggagcggaccgcggggggcgggagatgactgcgcccaaggcctttgcgggcctcagccggccccagaggaagg

SEQ ID NO: 26857 - DNA, 2300 bp, Homo sapien
catcctggttcaatcaaagcctggttttggccaacaataaacctgaaatgaaaaaacagaaaaatgagctcccatcagctagatgcccaggggagctgggacaaaggagctgctcaagctggcatatcagacagaaactggcttagaaaagttagatcaacatagtcgatctgtcggggaaaaaagctaagtcatcatatatgccagcaggaagttcttgagtgaggagtaagatttgaaagccatgaggagtaagatttggttggtatgcttcatatttgcaaatttgcattcggtgtttgagcacttctgtgttgtatcctgtagctggcaataacttggtagccaaaccaaacacccctgtcttcagtgcttacactctgagtacaggcccatgatagaagccagtgtggctggaagagttgaggaagtagttggcatttactgagttgggaagtgaacaagtaccaagagattgcattttaacacaagttaccacaagttacctgacaaaagaacaatctggaacaataagcttcacatgtgttcccatgaagcccagactttgtaaacgcctcactcctggactctagcaaaaatattagttatgtagtcgggcactggtttgagtggctagttcaacagaaaaacacatttggctttccaaaatatgtcaataaatcatccctccacttggaaatttaagcgccccaacacacaggaagaatggaatccaaaaatatgtttaagtggcattaaaatgttaaacgcctcttcactaacaaggttctttcacttcaggcatttctcttaaacctgtttcttcaccagaaacctagttccaatatttgaactgtgagaataaaacattcagaacatgtttttcttttttttttttttttgagacggagtctggctctgttgccccgactgtagggcagtggcgcaatctcaactcactacaacctccgccgcccgggttcgggcaattctcctgcctcagccttgtgagttgctgggattacaggcgcgtaccaccacgcccagctaatttctgtatttttaatagagtcagggtttcaccatgttggccaggctggtctccaaatcttgacctcaggtgacccatctgccttggcctccccaagtgctggggttacaggcgtcagccacagcgcccggccgtcagaacacttttttaaatacctaataaatgctcgatagaaagtgctttgttaaatcccacgttttcctagaaaactaaagcttctcaaagcacgtgttttctacagtagacccataggagacaaagacttactcgtcaggagatcgaaggttgtagatgtctgcacgtggcttccttggaggtccagtggtgactccctcttccaaaatccattctgtacccgctggctgctctaacctgtgaaccaacaaataaagggcgttaaccgccatcttcccacggtcagaaacgaacaaggccgggccttttgaggccgatgtatcagaactaactggcaaaatataagacgtcagcattgtcgatctgatggggaaaaaagtgaagtcatcatttacaccagccaagggcttctcaggcccgtgcagaaggcagtggcttttccagctccagaaactcatttctcccacgcccttaaggcctatttggggtcagagacggagaagccacgagaaggagattagggctggccgcagagacgacggcacaaagaagggaagggaggaccagaggtctccaacgaagaacatggagtttccactcaccacacacaaaacgggaacttacgggcaggacaatagcgtatgaagcctgactgcaactaggagaagtaccacactccgggcaccgcagacgcgaaagaacgaatggcttcctgaacctcccttatataaccaaagatggctttcgcacctgcgcactggacccgaaacgctctctttcccgcccgctccgcgcgcgtcgctctgggaaatgtagtctcgagcagcacagcccgaggcgctctagtagttgtccaggccgcgtctagccccgcccccttccctctacacgccgggccacccgggcttgtccgcttcctcgccatgtcgcgcttcacacgcaccaaaccgctcgacgggttccccttcctctggggccggctgaggcccgcaaaggccttgggcgcagtcatctcccgccccccgcggtccgctcccctcagccgcgcccgcctgagcccgccggctccgccgccggggggagctgaggtgacgccctcctcgagggcggaggc

SEQ ID NO: 26858 - DNA, 2300 bp, Homo sapien
atggcgaggaagcggacaagcccgggtggcccggcgtgtagagggaagggggcggggctagacgcggcctggacaactactagagcgcctcgggctgtgctgctcgagactacatttcccagagcgacgcgcgcggagcgggcgggaaagagagcgtttcgggtccagtgcgcaggtgcgaaagccatctttggttatataagggaggttcaggaagccattcgttctttcgcgtctgcggtgcccggagtgtggtacttctcctagttgcagtcaggcttcatacgctattgtcctgcccgtaagttcccgttttgtgtgtggtgagtggaaactccatgttcttcgttggagacctctggtcctcccttcccttctttgtgccgtcgtctctgcggccagccctaatctccttctcgtggcttctccgtctctgaccccaaataggccttaagggcgtgggagaaatgagtttctggagctggaaaagccactgccttctgcacgggcctgagaagcccttggctggtgtaaatgatgacttcacttttttccccatcagatcgacaatgctgacgtcttatattttgccagttagttctgatacatcggcctcaaaaggcccggccttgttcgtttctgaccgtgggaagatggcggttaacgccctttatttgttggttcacaggttagagcagccagcgggtacagaatggattttggaagagggagtcaccactggacctccaaggaagccacgtgcagacatctacaaccttcgatctcctgacgagtaagtctttgtctcctatgggtctactgtagaaaacacgtgctttgagaagctttagttttctaggaaaacgtgggatttaacaaagcactttctatcgagcatttattaggtatttaaaaaagtgttctgacggccgggcgctgtggctgacgcctgtaaccccagcacttggggaggccaaggcagatgggtcacctgaggtcaagatttggagaccagcctggccaacatggtgaaaccctgactctattaaaaatacagaaattagctgggcgtggtggtacgcgcctgtaatcccagcaactcacaaggctgaggcaggagaattgcccgaacccgggcggcggaggttgtagtgagttgagattgcgccactgccctacagtcggggcaacagagccagactccgtctcaaaaaaaaaaaaaaaagaaaaacatgttctgaatgttttattctcacagttcaaatattggaactaggtttctggtgaagaaacaggtttaagagaaatgcctgaagtgaaagaaccttgttagtgaagaggcgtttaacattttaatgccacttaaacatatttttggattccattcttcctgtgtgttggggcgcttaaatttccaagtggagggatgatttattgacatattttggaaagccaaatgtgtttttctgttgaactagccactcaaaccagtgcccgactacataactaatatttttgctagagtccaggagtgaggcgtttacaaagtctgggcttcatgggaacacatgtgaagcttattgttccagattgttcttttgtcaggtaacttgtggtaacttgtgttaaaatgcaatctcttggtacttgttcacttcccaactcagtaaatgccaactacttcctcaactcttccagccacactggcttctatcatgggcctgtactcagagtgtaagcactgaagacaggggtgtttggtttggctaccaagttattgccagctacaggatacaacacagaagtgctcaaacaccgaatgcaaatttgcaaatatgaagcataccaaccaaatcttactcctcatggctttcaaatcttactcctcactcaagaacttcctgctggcatatatgatgacttagcttttttccccgacagatcgactatgttgatctaacttttctaagccagtttctgtctgatatgccagcttgagcagctcctttgtcccagctcccctgggcatctagctgatgggagctcatttttctgttttttcatttcaggtttattgttggccaaaaccaggctttgattgaaccaggatgaatgcgggtgttggaagtagaatatatatatacatataaaattggtaagtggtgccaacacgtcttccctggctgagtagacacaggctctggagggggtagtagctgcttttcagtgtgggtttgtcaccctacttcttgtacgactcaaatgtggcctttgcagctgatgatacagcttctttcccc

SEQ ID NO: 26859 - DNA, 2300 bp, Homo sapien
cactgggaaatctacttaagagtcttcactgagaagttcactcgatagaaaggtcttgatagagaagagaagaggaaagcaatggtctgaaggcaaatcctgctttaacttggtggtccatttcccattcattcctgaaccaatgagagcagaaagaaacaagtcaacccaaacaagcaaactaggggctggacgcggcgaatggatgctggtcagtttggcaaattcactgaaactcatcaagaacccagctgaacttgcattccaacttccacaattatctgaaagggctagggaccaggtagccatgtgtcccaatcacacgggggagagtctgccaccggcggtgagagaggtggggaagctttggaggagacagtatattcacctttttatctttgggtaaaagaaaccaacaggactttggtgcagtagatttctcagtgccttctttaggaattctatcttaagcacacttcaaggggaaagaaaaaaggaggagagaacatttgttcccgtgaagtccctttctccaaaggactggggatcaagaaggaagaagagtaagaaggaaaaacaacaaaatcctgaggaggccatttcttttaacccacccagcttgcccctgaaaactgctggtgatacaaactttttcaaactgacttccagcttctccatgtgtcttggtaactgtagcctcgtctctgccctttctcctaataagatccatgtttctaaggagaaaaacaaaacagtattctcttctgtaaaactgtaatgtattgttgatatttgtaactattgtatatttctgtcttgctccagtcccagctggagtgtctagttccatggacaaggggatatttaaaattcaccacggacaagagccactaaagccaggtctctatcgctaatctctctcctattcttatttctctaccaactaatctcaagtaacaataccccaggctttttttcagcctcaattcaagtaactttgaatcaaaagagagcaaggcaaaaagcctccggacatgcttctttgggaaaggactttttctgtagctgcagagtgggcaggagggagaaggggctcccctgagaccccggcaggacaatggaaagcttccagccccgagctgatgtttcctcacctatcactgcttataggacagcatccaaatgctttcatgtcactcagcccaggcaacccaaaccagtcctggctacacccagaaataagagttacctctgcattttctgttgccatttttctggctctagaagtatctgatgcgcgactatgtcatagaatgtccacgcatctcagagtagtctatttttctgttcagataaaatatatatatatatgtatttttagcaaatttataatagggcaattgagtctaatttcttcttttgtaatacagaacaatatcttaggagtttcattgttggtcattatcgtagctgatgttttctggtcttttgcagttcctaccattgtcccttgggctgtttgggttttcttccttttgattctgatttcttgagggtggggaaagactttggggtttgacttccttgtgtaggcatttcttgacactaggcctggactctgtcaatgctgtgactttcctcattcatttctgtgtgtttctcccattcgttgttcttaagaatccagggcatgaatgcaggaatgagacccagggaagcagagctacagatggccctcaaaatcaggatgggatgtgggctggtttcacttatatcccacacccctttagggatctgaagggactgagttttctcatccccagagatcttggaaccaaaaatctcatgcaagcaaactcatcactggcatttctgagatccagaacacatgtgagtccctcctggctgggctgctcccacatgtccagcaccctgtcggcctgtaacatcaatcagagctgaaggtcagaggtttttcaggttctcgtgaacctcacaagaacatgctgggcctccgatctcaccaacttgtttatcagttccttgtttcgatctgtttatttatttatttttttgttattattattttgagacaaagtcttgctctgttgcccaggctgcagtgcaatggcgcaatctcggctcactgcaacctcctccacccaggttcaagtgattctcatgtctcagcctcctgagtaactgggattacaagagcgcaccatcacgcccagctaatttttgtatttttagtagaggcagagtttctccatgttggccaggctggtcttgaactcctg

SEQ ID NO: 26860 - DNA, 2300 bp, Homo sapien
gcaagggctatttacagttccgatctgccccctcccaccctctgacccttcctcctgtttcattatttcccccagcgcttgtcaccgcctcatatatcctttcgcttttttgtttatgatctgtttccaaccagctccacgagggccggatgtttgtgtttgattcacagctgtatctcagacgcctgtcaccgtgccctgcaccgcggctcgcgcacaggaggcgttcaacacacgttgttgacgggacgaaggaaggcgggatcgcgaggccagctgtgcaggtggcctgggtggagagggatgcacggccacgcgcgtctccttggcccgatcccggagcccgcccccggcctccccggcaggctgggccgggcaggcaggagttaagccgcgctcgcttccgacccgcaggtggcgccgtcctgccttggtgcccggctccgggcgctccgaagtgcgggacagaatagcagcgagcgcggagccgaagctcagccccgacttgttgatctcgcccaggcagccgccgccgccgccgccgcgggagcaggaggaggaggaggtggaggaggtgccgcgcggccgcggtcctgcccccgcgcccccggcgcccgccggcgccccccgcctcggagagcgcgccccggccccgcggcgcctgcagcccgggcgagttgcctgcccggccggggtaggcccggctcagcccggccccgggaccgccgctgcccacgggcgggggcgcccgggcggccgggacgatgcgcggtccctggccccaggaggcggccgccctgggggtgagtgttggggcgtacggccttccgtgggggtgcatggggacacggacagggggtttgcctgccgcagctcggcctgttggtctgctcgggctccgcagctccaggctggaggggagcggggtgggaggcaggcaagggctgaggcctgaggggacgcgcaatccccattctggggctaaggcgtgagccctacatgcagggggtgctcaggggaaccccccgaaatcactagtgcgcggtaggaggatggcaccttttgaaaaggccagaaaatttagctcatttccccgcctcccacctcccccaccccttcccttccaagcccggggaaaggcgcagaacccggagttataaaaagccatcgcgggagaggaacgaggaggaggagtaggaggaggaggaggaggaggaggaagaggaggaggagggggagaaggaagaggagggggaggagaaggaggagaagggggcggggaaggagcgaggggaggacggagcaggcggatcccgaggactctgcccgcccctcctgcggtagggttgggggctcagagggagaggcgagagcgggcttttcctcctcgcggctcaccttgtcgctggagcaatctcaggagatgctccagtgtttgggaagaggggtcgctccaggacagaggggctgttgtgcacaccccgtctgttgtgacctcggacaggtgggcacctggaacccccggaattcccccaaatcttttaagatttggaaaaaagcccgctgccattcccccacccccaaaatcttgattatctcgagaaggggaaggaaaagaagagaactcgttaaaaaaaaaaaaaagaaggaaagaagaagaagaaagaaagaaaaagataaagaaagaaagttttcatgcagctccccctctctccccatggcggggccaggttcgggactcgatcgggagacccataatgaagagagtttcagcactctaaggggcggacagcgccccgggcggctgggtcgcgcctgggccgcagaagcccagggtggggcctcccgggctccaggggcatctcttggggccctctccccgccccgaggggcggcccctccctccatccatggggtgcggcggacttcagcaccggcgggagggacagcgaccatccgtcctaccccactgagccgcttaagcgcgggggaaggtcaaggccggctgggagcctggtggagaggtggggggcggggggacagcatgcccagctccccgtttgctgacccgcgtccgctttcgctttctgcctcgcagccgtcgggatggaggtgagaagacggccgtgacgcgcgcccgcggggccccctgcacccccagcagcccacagcgctccctgcccccctcccccgcagcagcgggccttgccgtcgagtgacagcggcctgggggggcagggggggcgggggcggccggatcagcgatgccggcgggcatgacgaagcatggctcccgctcc

SEQ ID NO: 26861 - DNA, 2300 bp, Homo sapien
gcctgaaactctctctttaaaaatttacttttttagttacctgtcttcctccactggtctacaagctcagaaaggggggcgggctgaattagggcaataggccagaagtttaggttttagtctaaagcaagggaaagtcttgggaaggttttaagcagatgagaaacatggtccaacatttcatggtccatgaaatgtagcagttgttttggtggccatggggagaatgaactgtaggaggccaagatgggagccaggcatgggagccagggatgaggccaagatgggagccaagttgcagggaggttgcagggagacaagacgatggtaccttggacaagggtcatgatggtggagatgataagtggacaagtaaaaaatatataataatattatgtgcaactctatggaaattatggaaatgaaccccttaattttagaaaggaagaaaagggccagagaggaacctgtgttggaacactgtatcttgttcagtttttgtcctccagggcaggggagctcactgctgtacccatccccggcacttttttttttctttttttttttttgcaacagggtctcactttgttatccaggctgaaatgcagaggtgcaatcacagcttatagtggctttgacctcctgggctcaagtgatcctcctgcctcagcctcctgagtagctgagaccacaggtaagcagcaccatgcccagctaattttttattttttggcagagatgggtctcactatgttgcccaggctggtctccaactcctgggctcaagccatcctcccgcctcagtctcccaaagtgctgagattacaggcatgagccactgtgcccggccgctgacacctatttacttatcatgcagtaaatgaatatttgaaagaataaatgagtaaacacaaggcccatctgtggcatccttagagaacccttgcctgcctctccaggtacctcctccagttttcatttctgggattatgtgatgggttttgcctcccccactggatggggagctccagggggaagactttcccttcacggagcctggcattctgcttgcacataggaagctgtcaataaccagatgtccaacttaacatgaataaatgaatgaatgaatgaatgaatgaatcaccagactatataaaccagctcactcttcaccctctcttccccatacctcgctttatttttcttcttagcggttatcaccacctgccacattgcatatgtactgatgtattcattgtccgcctccgtcccccacccccgaccccccgctaaaatctagaatggaagctcatgaaagcaagggctatttacagttccgatctgccccctcccaccctctgacccttcctcctgtttcattatttcccccagcgcttgtcaccgcctcatatatcctttcgcttttttgtttatgatctgtttccaaccagctccacgagggccggatgtttgtgtttgattcacagctgtatctcagacgcctgtcaccgtgccctgcaccgcggctcgcgcacaggaggcgttcaacacacgttgttgacgggacgaaggaaggcgggatcgcgaggccagctgtgcaggtggcctgggtggagagggatgcacggccacgcgcgtctccttggcccgatcccggagcccgcccccggcctccccggcaggctgggccgggcaggcaggagttaagccgcgctcgcttccgacccgcaggtggcgccgtcctgccttggtgcccggctccgggcgctccgaagtgcgggacagaatagcagcgagcgcggagccgaagctcagccccgacttgttgatctcgcccaggcagccgccgccgccgccgccgcgggagcaggaggaggaggaggtggaggaggtgccgcgcggccgcggtcctgcccccgcgcccccggcgcccgccggcgccccccgcctcggagagcgcgccccggccccgcggcgcctgcagcccgggcgagttgcctgcccggccggggtaggcccggctcagcccggccccgggaccgccgctgcccacgggcgggggcgcccgggcggccgggacgatgcgcggtccctggccccaggaggcggccgccctgggggtgagtgttggggcgtacggccttccgtgggggtgcatggggacacggacagggggtttgcctgccgcagctcggcctgttggtctgctcgggctccgcagctccaggctggaggggagcggggtgggaggcaggcaagggctgaggcctgaggggacgcgcaatccccattctggg

SEQ ID NO: 26862 - DNA, 2300 bp, Homo sapien
actttccctgatgctcatggtgtgacaggcactcacataggtgtgccccatggaccaggtcgtttgttcctgacctcaactccatgaggttctcttttccccattctgtcaatgaggaacctcagcttagggaggtggagcagtctgcttggggtcacaaagctgaggatcggccaagcccagctgtgaaccccactgctagcagacagccctttggagctccccaaatttggagaaaatcctctggacccgttctatggccttcttgggattgttggcttctctggcagataagctggaaaaataaacaagaggatcagaaaactccttttgcctcctgctgttctgaatctgctgaggccacaagggggtcatccagctgcctcgacagccaacattaagcaggcaaatgaatgaatcttgagtatgatagcaggacatgtgaagtactgccagaaaaaaaaactatcaaaaaaacaaagaaacaaaaatcagtaagaggagatgactgttttagaccaggtggccaaagacagcttctctgcagtgacagctgagcagagatagaggcaccggggaggtggtggaaagagcaggctgtgcgaagaatgctccgaacagagggaacagcacgtgcaaaggccctgcagtgggacctctagggaaagatggggagatcagtgtggctggagcagagtgggtgagggagagagtcgggggcatagggtcaggcaggtaaaggtgagaaggggcggatcatgctggttctcgaagggccttgtcaggaccctggctgataaggatggaagccaggagaccaggaggagcaacagcttctccagagctctgctgggactatggaatgaaacgtgcctaagctcacccggcactgaatgggtggatacaggactagaacaagacctcctgggtcttacctccaggttcagcccatggtttcataaaacttagtgtgccaagcactcaacagtttgtgattccttttagtgtcaagctctcatcacttcctcacaacagccccagaggtaagcacaactctgccctccctgtttccagataatgaggtgagctcagagaggttgagctacctgcccaacgcttcccagggtgggaatggggatggtgggggcaggggcgtggagtgaggctggattgacccccagttctcatcagcaccctggggtggtacattgcagagccgcgggcacagggggctggcaccccaagcaccaggtagcgatgacaatggccaccacatccggaggccctaacgtgcaccaggtagagggtgcatacttcacgggcactatctgtccccaaagcaggtgaggatgaggggactccctgagacacccttgtaccccctgcccagtagttactgaagatactatagggtgcgatataatccagaccagccctcccagcccagaccacagaatggaaaactccaggtccccagcacgcctggggtgggggatggggtgaggaggagccttggggggtttcctctgtctaggtggaatgtggaatgtggtgggaaagctcctcctgacccccttacactcctcctccatgttcgtcccctcccaccacattttctcctcccactgtgccccctcctccccatacctccttggctgtttccccatcgtcccgccgtcttcccacattccctcctcttcccttccccaaaagtcctctcccatcttccccatccctcttccctccccgcatataatctcttccttcctgtaaatcctctccctctcccctcccttccatcaccccccagtccaccacatccccctcagtcccccatctatctcctttccccttgatcactccccagcccaccacatcccttccgccccctccccctccccctccttctcccctcccctccctcccacattttccatcaggcctgagctggggggagcagggtttctaacagagcgccccggtccgacccctgcggacctcggagggccccatcccccaccccccccaccccgccccaaagcgggctggggtgggcggagtgggaggggcgcgccgggtgggggcggggaactttacctgggagtgggccaggccgccagccccgccagccccgccagccccgccagccccgcgatggcttgggccgcgctcctcggcctcctggccgcactgttgctgctgctgctactgagccgccgccgcacgcggtgagtgtcctgctccgctcggccccgccagacaaagggggcggctcccgcccgggctgcagcccaagggtc

SEQ ID NO: 26863 - DNA, 2300 bp, Homo sapien
gtactattctttcaacttttctgtatgtttgaaaatgtttcatagatacgagggttgggaggggccattgtgtgggccaacaaaaactatttgcaagttagatgattccggctagtctgggatttctggtccagggccttacctgcactatttcatcgaatccacatcacatccccgtggggtgggcagcactgggtccgattcacaggtgatgaatagagaagctcagagaggtaagtgactttcccagagtcacacagccaggagatgccaagccgagatttgaactcacatctatctgagtcaaaattctctgctttcctttttgatcgtttaagcctcttctcttccaccataccattctccaggggtattgaattaggtgacagctaagcactcttactatgtgcactttgcatgtattacttaaatcctcgcaacaacctgatgaggttgctaataacctcctccattttaccgaggcacagagagtttaacttgcgtgaggtcacacagctaacaatggaaaagctgggagtcagagaacctgggcagtgtggctctagactccccacttaaaggatcaaagaaacactgtaaaaagtagaaatcactttaggaatataaatcagaattattgttgattctcacagaatccctgcaaagtcctctcccctccccactgcttctggcattccaagacagtaccctagtttcagatatgtctacacagggacactggcctcctcagtccagctccttgaggctactgcttcttgccataaatttctaggactgttcattgccttctgaggtcctttgagctgatgctgatctgaaagcatttttttggatatggtcccatacccaggtgatggggataggataccgatttgcctgcaggataagaattagaggtcatacagactgctgagacagttacaacctagaggtcaagggcctgacatgggagacaggccagttttgatttaagcccttactgcaaggcttgggtgaattgcctttccatctagaaacctcagtttcctcatttgtatgatagtaataataacagcacacatctcaagactggtgggggaatttcatggcatgagtgaagtccatgtttctcagcagaagtctagagacattgacaattgttatcattatgctatttctgatacagtaggatccctgactacagctccaagctcatccctatttccccccctacttcactggattttatccatgttggccttggattcaactcgggggcagatcagcccttttcctacctcagggcctttacacctgctgttccccctggtatgactgctttttccccagcttattcaaaaaagctggcgctttctcacccttttatatctcagttcgtgtcactgctcagtgaggccttccttgaccactccagcctgcctgcaatacatcctcctgttttatcgtattcatatgtgttaccagtacctgatattactagctgatttgtttcttttatctctcacataatgtaagtttcaagtagacagagatttttatcgttttttttctctgtagcatgcccagcgccaacaactgtgtctggcattcaataaataaatggtgaattgaatgaatgaatgaatgaatgaatgagggtgtataccaggccgaacccccaagccttgcagtccccactcttctgctgcagtgggcaacgagatgagtcagactttgtagatggccccttggcccccgagatgggggacgagctagcgcggagcacttgggagacattccccgaaagcctgggcggtggccgcactgggagagggtctgtcgccatttggcgattactccatgcgggctgctgtgggcgccgagcgagggtcggcggcgagcgcaagcgcgcgggtcttttgcgacggtgcccggcggcactggccccgcctcccgcgcgtgcgccccgcctccgcccccgccgctgcgcccgctcggggccgctctggcccccgcccgcttcatgtggcccggcccgcgacggccggcggctgggagcggcgaggcggcggcggcggcgagtggcggcccgcgaggcccgggaggcggtggccgaggcccaggcggtggcggcggcggcccaggaggcggcggacggggagctgcgggagcaggcccggcctggctctctagcggccgcctggctgcagcatgcgcgcccgccgggggctgctgcggctgccgcgccgctcgctgctcgccgcgctcttcttcttttctctctcgtcctcgctgctgta

SEQ ID NO: 26864 - DNA, 2300 bp, Homo sapien
agaggaggccaagggcagtaggcaagacaacggatagagaagagtagtgaattccagctatgtggagtttccagcttggcgaattccagccatgtggggtttattggtgctggtagaaaatggtagcctcaagccctcagttgacaagtgtggccagagagaaccccactctcaatcctttgtagaccaggtcattcccgccaggctctgtgctaacggaggagagtaggttattagtcccatttaagagccagagaaattaaggcagtggagagtagcagggctactggtttaaaaacactggctctgtgcctgaatcccagccttgtcatttgctagctgtgggaccgcaggcaagtgccttgatttctctatgtctgtggataatgatggtatctacctcaaagctatgtaaagaattaaggaaacaatagcccaacaccacacctgcaggaaggaagcaagtttattattactcaataaacattggtggatcctgatgacattctctcagtcagctttagcagtcttaagagactgcagaggatggagaacccaaggttagagccagatttcttctctacccagttcctcggggccaaaaccctgacaccatgcttaactcctcttttatacgccatagtccgtcagcaaaccttgtcttcagtatgcgtccaggagtccaaccattcctgccacctccaccgtattactttcatccagactgccatcagctgtcacctagattattgcaaaagcctccttgctggctttggggcttccatcctctctctctcgccaatccccagtcaactcccaacaggcagcaaagcttaggttacttctcagttcaaaacccttctaggtgtgctagaattaactgatttatttactcaatgattatttattattgagtgtctactatgtgccaggtactgttgtaggcattgcagataaaatggagaacaaaacagacaaaaatttctgcattcatgaagcttccgttctcatggagggagatggttaacaaacaagtgtatgagtaaaacatatggtaggttaggtgtcatgtggaaaaatagtttagggaaggcggggggccttggattttaagtagggtggtcaaggaggtctaacacacaagataagggttaaataaaaggccaaacgtaggagaggtgggagccaaagagctacccagaagaagagcattctagataaaggctcagtaagtgcaacggtggaagtattcctggtgagtctgggacaatagtggaaagtcaaagtgtgtgggaggggagatatagagccccatgcccccctcccacacacttcagaggggaaaagggggcaggattgagtcctgtacattccccacgttttttttttctctggagattggaagccattggagggtctaagcagaggagtgatgagttaagctgctgtgtggaagtccgtaaggaacaggggtgagtcagagaccctgaatggagccgttgcaattatccagatgagatagagtgccttggatcaggaagggaggtagcaacagaagcggccaataaagttcaaagtcctcagccccagtcctcccgatgggggtctcacctacccctctcacctcaccttgttcctccctgcatccccaccccaccggtcactgctaggcacatagaagcatctactaagcatgtggtgaatcaatgaaccccttaatgaatggtccacccctagatcatcagcatcctttttaacgctaggcatatagtctgaactcaacacatgtttacagatggaatgctgcacagtcctgccaagtccaggcggttattcctctccacagccgaaggaaactaaggctcgggtggggaagtgtccccctggggtctctccgcttaggctgcaggctgggcatcctttttcaaactcttttagcacagcgaagtcgagggcactgggtggagggtgcttgcttgccctcagggtgagtcacagtgacctcagaggagtttccccaaaacgtccccgccctgtgatggggaaaagccggaatctctcggtcccaggtggtcatgtggcccaggccggacaagcgtcccgaaagccccgggagagactaagaagcaatcctcccacgcgctttctcccaccctcgggccactgagacggagggacagagggccgccctcgcgcggccgaggccccgcctcccgctcgcccgcccgcgcctccagcggaagccggaagcaaaagcgggtcctgctagccccgcggctccgaactcggtggtcctggaa

SEQ ID NO: 26865 - DNA, 2300 bp, Homo sapien
cacgacacacacacacacgacacacacacacacacacacacacacacacacacacacacacacacaccccccggtcatcccccctgagaaggaggtgacggaacttgagttctgaagcatggctcttggggtgggggtgtctggtggccttgtgacctgccgcagccatgggggctgtggacgaccccatctgctccctctctgaagctccatggggcaccacaggagtctggacctgtgccacaaccacagcagtgcctctgccctgccagcagctgagacacctgtcagggcccaggtttgagggtttcaaaatcctgtcattccccagtatggttttactaaaaaccacctgttgggggcctgaggaggggaggatgtcttgcggtggctgtgagggccgtgagaggggtactcccccaaggacagacatggtgtggggctggaggtacccaggccccagctgtagggagagctgaggttctgcagcctgcccacctcttcttcctacaagccaccgcccctgccaccaggctgccttcccgccctgtcttcaccctcaggacccctgtgcaaagctaggccctctgaccgaagcagaggctgctgtaggctccagcccagagcatcccctgctgatcaccatgcatttctggacatgcatctctttctagttcccgtattctaggcctcagtaactttaatcagtcatcagaggcccaggagtcctcacgtggccatccacggctaacactggagtcagggctggcaagaccatggcctccaatctccatgctcagctgggcccctcacccagtgcagtgctgctgggaggaaacttccagatggctgtgaggcctggctctgcagaacttccaccacactaagaggccctttgcccccaccccctatctaccaacttttttgtttttcacaaaagctctagcttaggcctttctgggtatcagaatcggtggggggcttgctacacacaggctgctgggtctcacaccagcatctcataggtatggtatggggtccgaaagaatttgtgtttcttcttatttatttttgagacagggtctcactctattgcacaggctgaagtgcagtggcgtgatcgtggcccactgcagcccagacctcttgggctcaagcgatcctcccacctcagcctctggagtagttgggactccagacaggcgtgaccccacccagttaattttttcttatttttagtagagatggggtctcaccatgtggtccaggctaagaatttgcgtttctaacaagttgccaggtggtgctgctgcagctgatcctgtgaacacgcttggcgaagcacagcactagcagaaacaggacagctcctctgaggatgaaccgctgagtttctggaatgttttctgtggcagtcagtgtgcttgcgttttccttggatgatctcagattgtccccatagcctgccagaaactggcgctttcattatacccactttgcagatgagaatgccgaggcaccaagagaatcagacagctgtgggcacagactcccgagcctgtcctctttactaccacgctgatcagcagtcctcaaaatgggctccccagactagcagcatcactggaaacctgttagatctgcagattcccaagcccattcagacctactgaattagcacctctgcaggtggctgcggtgggctcagtattttgtggtttcacaggccccccaggtagattctaatacagaccagtgtttgacaaccactgcttcacagcatctaaatgccctcccctccccggccatcctctgccctccctgcacctgccccgtccccctccccaccacctgcagtgaagctgcagagcacacttcactgtggccccactgagactcctccagcagagcaggcgctgcactcagagcctgtctgctttgctcctacctatgacccgagtcccgcctctttacctccgtctctcccctccacatggggtccttttcttcgtccctccccaattcctacaggatgtgttcctctcccctctcctctcttgacttgattggcaaaagcctgtccacggtggagtcctagctaatagagccacaggcaaagagacaaaaagcctccctgtgcgatttgctgctaatgaaaagcccagaacagcagttctggtcctggttgcatgatagaatcacccaaaagcttgaaaagcttaaagaccaagccccagcctggcccagtccttctgttttagctgtcctaggtggggtcctgggcatccattgtgccctga

SEQ ID NO: 26866 - DNA, 2300 bp, Homo sapien
gcacagtgtatgtttctctagcagattttgagaaatccaattgctgggtcatggggtagcttttctgttttgctttttgttctatactcctctgtattgttggaatcatgtattactttggtgatggaaaaaaaaactaaaaaatagaaagaggtaggtagattgttcgtgttgttggctcttcggaagtagaagtgcctaatcattgtcacgtgacccttacataatctggtaatcattatataataaagtcgggaaaggacgctcctgtcatttctacatcaccaagtagagaaatcacaagccttcaactgtgtttaaaagatgagaaacatggccggacacagtggctcaggcctgtaatcccagcactttgggaggccgaggtgggcggatcacgaggtcaagagatggagaccatcctgaccaccttggtgaaaccccatctctactaaaaatacaaaaaattagccaggcgtgttggcgcgtgccggtagtcccagctactccggaggctgaggcaggaaaatggcgtgaacccaggaggcggagcttgcagtgagctgagattgtgccactgcactccagcctgggtgacagagcgagactccgtctcaaaaaaaaaaaaaaaaaaaaaaaaaactgagaaatgtgactgtctttggagactttgggtcttttctgatagtagatgatgaccagggtttcctactggtaaagcccttcttcaaaatctttgtttctcttttgcctgtcatagacccacagagctggaggggacttttttaagcagccccacgtgaaaatgcaatattgtaagagctaccaaaccagagtgctgagttgctgtaagaggcagacttaaggtgggacagtttgtctcagatggaattcctgtgaacatcatcacattgcagataattaagagaggagcttaaacatgagctgataaagaacacagggactttgagcggtgctcaggcaacgacaggtaaacacagtaatgctactgtttggacagcagcagattgctggttctccaaacgtttcccagtattgtgtcactgactcatcacacaagccccaccggttttagctggggtcaccaagactcagagtgagaatcctacaatcaatgaacatctgttgtgtgcctcctcatcagacatgtgcagagctcggggggaaatagatgaataagaagctcagggtctggtggggatgtcagattatatatatatatagtttatccgaaagtgctgggattacaggcgtgagccgccgtgcccggcttttttttttttttttttttttttttttttttaagagacgtggcctcgttatgttgcccaggttggtctcgaacacctgggagcaagccatcctctcgcctcagcctcccgactagctgggactacagtcgcgtgccaccacgcctggctttattatttaatattacaggttagaaagctgaggctcagagaggttaggtaacttgtccaaggtcacacagctagtaagtggcaaaactaaaaatagaacccacgctcttaaccgccgcccacggcccgtaacacccgcagccctagcaaggctggattccaatcacgcgtgatttcagcatctcactggctctctttgagcctcggtacttctgtccgtaaaatgggggcgagggatccgaccgtcagcccctgcttgcttgtgcggagtcatgagtacagctcgtggatcatgataagtggcaggtccgggaagtggaggccgagttcacgcagtcagcactcatagctcccagctccctgctcctgagcggtttccatgacaacccggccagccaccatccctaggccgagcggcttgcgtcacgtccggcctgtttacttccgggtcccagtctcagacgcagcgatggctcgttaggctccaaagtgcggttccgccggtttcgtcctcgctcttcggccttccgctttgtcctccgcctctgggttgtagtctccgtcggccgcgggcatcgaccgcttcccggagccagcgcgcagccgtggtccaccctctcttcgggcccgcctcatggtgacatcatttccgggccgagtgtttccgggtcgctgctggcccccgggtactggtctcagtacccctgcagccggccggagaggctagagcccgacggggcccggctccggcggcagccgcgcctctcgcttgcttccctcggccgggccgtcctcggcggcagtgtcagggtgagtgacgggcggccgcgggcggaaactgccttcggggcttcccca

SEQ ID NO: 26867 - DNA, 2300 bp, Homo sapien
aaggagaaagagagaaagataagaaggaaagaaagaagaaataaaagagatcataccaaatatcttctccaagcacaattggataaggctagaaatcaatatgggggggttaaaaaaaaaaagaaatcaatatcaaaggaaaactggaaaattcacaaatttgtggaaatttacacactcttaaaagaaccaatggatcaaagaagaaatcacaagggaaattagaaaatactcagaaacaggccaggctgggtggctcacacctgtaatcccagcattttgggaggccgaggttggcggatcacttgaggtcaggcgtttgagaccagcctggccaacattgtgaaaccctgtctctactaaaaatacaaaaattagccaggcgtggtggcaggcacctgtaatcccagctacttgggaggctgaggcaagggaattgcttgaatccaggagagggaggctgcagcgagcagagattgcaccaatgcactccagcctgggcgacagagtgagactccatctcaaaataaataaattaattaaataaatagagaaaatattgagaaacaaatgaaaacaaaaacacagcatgccaaaatttactggacacagtgaaagcagtgctcaggggaaattttatagctataagtgcttcaaaatcatagacagaaaattgccagggcctgggggtatggggatgggaggagggaagaggaagttattgtttaatggggacagaatttcagtttcagtttagcaagaagaccagaattttagagatagctgatggtgatgattgcacaatatgaaatgaatgtactttgttgttggggtttttttgttttgttttgttgttgttgttgttgttttttgagagggagtctcgcgctgtcgcccagactggagtgcagtggcaagatcttggctcactgcaagctccgcctcccaggttcaagccattctcctgcctcagcctcccgagtagctgggactacaggcgcccgccaccacgcccggctaattttttgtatttttagtagagacagggtttcaccgtgttagccaggttgtgtttttgtttttttttttttttttcagacggagtttcgttcttgttgcccaggctggagtttagtgactgttggagtgagtgagccatcttggcccacggcaaccttcgcctcccaggtcaaaggcttttcctgcctcagcgtcctgagtagctgaggctacaggcatgggcaaccacgcctggctaattttagtattgttagtagagacggggtttcaccatgttggccaggctgctctagtactcctaggctcaagcgatccgcccacctcggcctcccaaagtgctgagattacagaagtaagccaccttgcccagctcctttgtataaataaatgatattgattttcttcttgcagctcaggaattagatctgttattagaatttgcttaaatttaagaaatggctgggtactgtggctcaccgctgtaatcccagcacttcgggttgccgaggcaggcggattgcttgcgtccaagagttcgaggccagcctcggcaacacagtgagacccgcccgctctctgcaccactccttccccccctcctttccccgtctctacaaaaaatacaaaaataaataaattagtccggcatggtggtgactgcctgtggtccagctacgcaggaggctgaggtgggaggatcgcttgaaccccggtggtcgaggctgcagggagccatgatcgcgcgcgccactgaacaccagcctgggcgacaaagcaagaccttgtcccaaaatagattaaataaataaataaataaatttaaggaaaaagcaacttgattcgaagataaatagtgatagtgcaagtggtgccgaactaacgataaatttggaaaacagcggcccacgcgcagagcccgtcccaattctggcagcctttggatttggcttccacgttttccagatttccctcggcctctagctcgcttgcgtcagaggggccccgaggggcggcccacccgctagccccgcccccaaccgctcaccgccccgcgagccccgccccctcggcctcctcctcatcggccgccgttgcgcggcgcagagcggcagcaagatggcggcgcaacagcgggactgcgggggtgctgcgcagctggcggggccggcggcggaggctgaccccctaggacgcttcacgtgtcccgtgtgcttagaggtgtacgagaagccggtacaggtgccctgcggacacgtgtaagcggcgagcccgggcctggt

SEQ ID NO: 26868 - DNA, 2300 bp, Homo sapien
tgccaattacctgtggtgatggctgggctggtttgttttcataaccttactggtttttgtttctttttttaagagttggttaagtatatattttaggtttgaaagccatagaaatcagttatcccagttttttcctataaaagatcaattatggccaggcgcggtggctcattcctgtaaccccagctctttgggagtccgaggcaagagcttgaggctaggagttaagagaccagcctggacaacatagtgagacctcatctttacaaaaaaataaaattagccgggtgtggtggtatgtacctgtaggcccagctactcaggaggcagaggccagaggatcacttgagcccaggagtttgggattacagtgatctatgatcatgccactgcactccagcctggctgacagcaagaccctgtctcttaaaaaaaagtcaatatgaaatcattggattgtaataacaatagctaacatttgaaatgcatccatgctcttgtataatcagagtcaagtatatttattttcatacctgttataactgctactggaaaggagaaatactgttgtcttattttccaagagatatacacagccttgttgattttagaatcattaaaatttttaaaattgcagaccatacaaaagtacacaataatgtaggcttgttcctcattccagagattacttcaaaattcgttcaacttaaggcctggcaaggtggttcatgcctgtaatcccaacactttgggaggccaaggtgggtggattgcttgagtccaggagttctagaccagcctggacaacatggtgaaacctcggctctactgaaaatacaaaaaactagcagggcatggtggtgtgtgcccgtagtctcaactgttcgggaggctgaggtgagaggatggcttgagcccaggaggcagaggttgcagtgagctgagttcgtgccactgcactccatcctgggtgatagagccggaccctgtctcaaggaaaaaaaaagtgatttaatttcgaaagctgcataacattttctgccctttgacaaacactgtagaatttttaccaaccaagttgtaggatttttgcaaaatgagattatactataatatatatatttcttcaacttttttcacttttttaaatgtacactcattcccaactttttttttccacttttcaggttttttttctcttacatattggacagccttgcatgtcagtttcattatttttaacacttcggtatggatgcccatagtaagaatataccttaccatctccttttcagcgtgatttagtattagggatgcatagtagggccatttcaatgctgaatagggctattttctgtgtcttaattgggggcttcactcttgaggctgggcatggtggctcatgcctatatcctatcatttggagaggccaaggcaagaggatcactgaccccaggagttcgaaatcagcctgggcaacatagtgggactctgtatataccaaaacaaaccaacaaacaaaaccagctgtgtgtagtggtgtatgcatgtagtcccagctccttgggaggctgaggtgggaagattgcttgagcccagaagtttgagagcagcctggggaatatagtggacccagtttctacaaaaaaaggaaaaaaaaattgaggattcctcagtttgtagcttaaagtcaagttcttgagctggaggtgagacaatcatcatggtaagctggagctcaaatattggagcatttttttccccctttgaagtttacttttagaaactcaaaatattgaaatacaattccctactgtcttctttttttttttttttttttttttttgagacggagtctcactctgttgcccaggctggagtacagtggcgtgatctcagctcactgcaggctccgcctgttgggttcacgccattctcctgcctcagcctcctgagtagctgggactacaggtgcccatcaccacgcccagctatatatatatacacacacacacacacacacacacatacatacacacagagatatatatatatatatatatatatatttgtatttttagtagagacagggtttcactgtgttagccaggatggtctcgatctcctgacctcgtgacccgcccgcctcagcctcccaaaatgctgggattataggcatgagccattgcacccggtctcttcatctttatttatgcatgcataatgtggtttttggttttgttttgttttttttctgagacagggtctggctttgttgcccgggctggagtgcaattgcg

SEQ ID NO: 26869 - DNA, 2300 bp, Homo sapien
tgaggacagacagggagaggagtcacctgttgctagctgatgccaaacttttccaaagtgactatgcccaccgaccctctcgccagctctcacctcctcatcaactcttgatagtgaccaaatttttccttgttgtccttctgatgggcgtgaaatggcagctcactgtggcttgaatttgccatttctctcttcactaaacgaggctgagcagttagtgaagttgctgctgaaacaaagaatgaaaggaagccagcgtgaagatctaggagcaagagacgtaggggagaggaggaagagcagcaggtgccaaggtgggaaaggtctgggatgttggaggaacagaaggaaggctgggggtgggatccttgtgcatgggggagggagagaggctcaagccaatgtcagctggggtcagagcagcggggccgagttggctgaggagaggactttggcttttactctgagacaggcgcatgggagggtttgagcagaggagggggtgatctggcctcactttggcttcaagcaaaggatcctgattggagctaaattgacacgggacggggagtattccgcttaatgactgcttactgcctctgtcccccaccctactgcccgctctccagctagaaccaggggaggacgattttgttcacggctgtcacacccggcaccaagtgactaaacagacagtagttctgcccttcaggttggtggtggtggtggtgtggggtgcttataggtttttatagtcttccttcacaggtggaaacaagaacggtgagacctgtgaggtttatttcagagccacccccgggcctggtacgcctcccagggaagctggggtgggggtgcagctgcccctcacttgggcccaccccacatgcattcagtcagggcccctatggagccgtgttacagcctttagacacaggatcgaggatcttcacggggtgaggagacacgcccggcccatgccttctttctcccgccagcctacagggatctttttcaacgaaactctaaccaggtccctcctcagctgaaaatccttcggtggctccccagtgcccttgaggcaaagtccaaactcctacgaggccctggggcccagcacatctgacccctccgggcatgcccatcccaccccatccctggaagctgctctctaggagttactctgaagcagttgccacttcttccctcgggccttttcccttgataattcttcacttcctctgggaagtcaccccgaccccctgtcaggtgacccgcctcttaacggtcgccgcgtcccgtctctcccccaccaaagcacacttccctttgcattgtaattatctgtttacttcgtctgtctccctcactggaccagaagctacccttcgggagaggctctgagtgttctgtccggggctgtgccctggccccaggtacagtgccccacacgtgctgggcgctccgtaaacactggataagggaaggaacgggtgctcttggctagctgggccaggctgctttgcaaaaaggccgtggcatttcaagccgccgagagccacgtgcggtgtccctttcctcgcttcctccccagtgatgtgcgtttccctcgtcaatgccacgctctccaggcgccagccgggcggaggaaatttccgccccctcccaagcccgaggcgggggcgggcgtcggaaggtcaggtgtcccggccggcgcgcagcgccagggggcgtcagaagcgctcagaccaccgggcgctgagccggtgggcgcgcggcgtcctgccggggtcccacctcgcagaggcctcgcttcgctcgacgtcccgccccggacagccccagcaccggggacgacccgcgctgcgccagcgaaccccgcctcggaggagtccccgcccgggctctcaccgccacgcggcgcgagcccggccagcagccggcgcacctgctcggggagtggccttcggcggagacgagcctccgattggcgcggaggtgacaaaggggcgtggcagataaggccccgcccctcccaccccccaccacccccccggagtacttaagggagttggcggcgctgctgcattcattgcgccgcggcacggcctagcgagtggttcttctgcgctactgctgcgcgaatcggcgaccccagtgcctcgaccactatgccgcgctctttcctcgtcaggaagccctccgaccccaatcggaagcctaactacagcgagctgcaggactctaatccaggtgcgttggaggggttctgggctccaggaggtttgggggagacaggc

SEQ ID NO: 26870 - DNA, 2300 bp, Homo sapien
agtcagggacacaagagagagcctgaaaggcatggggaagggaaaagggatttgctgtatccagtttgcctgtttgttctgtctgtaccaccctggtaacagcccttcatcctggcatcagcagtgtgtttcaacctccagctttctggggacattcacaaaaccagcctcatcacatcccgccaagccccctccttggaggttctagcagcagccaggcagcaccccttcctcagagttctgagttcaactcttcagacctcttccttagcctccaaccctggtaaactcaaccctggtaaactccagcttatccccccctcccttaagagtttccatcctgcttcatttcgttattacatctgtgttagcttagattccctttgaacattttcagtccactgacgcctgtttaagcaatgtcttatattaaattctgttataaaacctagtgtggagtcttttttcctgatttatccctaactgccatatccccactcttctccccaacagttactgtgatctgcattctaacatagcatgtacccacattgtacattaaacgtaatttgtatataactatgtaagattggaactgaatagcaggtgactggttgacctaatgtttcctttttgtatgtttagattttgtaattttccttgcatatttttgtaattaatacctttttccttttctcatatctcatacttttttttttttttttgagatagggtctcattctgtcacccaggctgaagttcagtgacacaatcacagctcactgtagccttgacctcctgggatcaagtaatcctcctgcctcagcctccgaagtagccaagaccacaggcgcaccaccacacctggctaatttttttttactttttgtagagacagggtctcactttgttgcccaggctggtcttgaactcctgggctcacgcagtcctcctgtcttggcctcccaaagtgctgagattacaggcgtgggccaccgtgcctagcctagctcatacatttttaaaacaaattttattttctaatacttacaggcttatagaaaagttgcaaaggtagtacttcctgtgctaccttttccctgttgctagcatcttatgttattatggtacatttgtcacaaccaataaaccaacgttgatacattattattagctaaagtccatactttattcaggtgttcttagtttttacttatatctgttttttgttccagaatcccatccaagataccacattacacttagtcatcatatctctggctcctcgtggcaatgacatttctcaggtttttcttgtttttgatgcccttggctgttttgaggagtactggtcaggtattttgtagactgtctctctattggaatttgtctttttttttttttttttttaatgattagactggggttatctcatatgtatgcatttggcccaggaaaaatttataatctccaggctctgggcctgtagtgcctaatggacaaagtagcctgtgtgcacacaaatatatccagaattggaagaaagtgtatgtctgcttttataggctatacatatcctacaatgtatcgtctatacctggtgccatgttttgccagtctttcgtatgtgtgtgtgtgcccaaggagtgtccctcggcctttgagaaggctacgaagtctccgggttatatgaatatgccatgttcatatagtcccttgcaaggagacatgtagattgtagttatttttgctattgcagacagtgcttcacattttgtgcacaagtttgcgtctctctgaaggaaattgctaggaaggggcctgctggtctgagcatgcccatttcacatgttgatgagcactgccaaacggctccacaaagcatgagccatatcaacaaagtggaaagtgtttgtttcatgatcaaataatgaatcttaagagcagtatttctcacagacgcagaatgttccagcaattctccttcaggcacatttcctttgctgaaacctttttagcaggtccctggagcactcatgaacaaaataaaaaaaccagaaaccctgtaaccctggtttctattaaagtctagcttggggctttttttttttttttttgacaaagtgtcgcaatgtcacccaggctggagtggagtggtgcagtctcggctcactgcaacttccacctcccaggtttaagcagttcacctgtctcagccccccggttagctgggactacaggcacctgccaatatgcctggctaatttttgtatttttagtagagacagggtttcatcatg

SEQ ID NO: 26871 - DNA, 2300 bp, Homo sapien
gcagatgaaaatgccagtgttttccaaacaagcagttcaagtatgcttgcaggttttgctgtttcctttcaaataccatatgtagtactatttaatatttttcttgtaatcaactgactcttttgcttacatttattttaaaggaaacttttaccattattataaatgggaagttagtatattacttaccctaaataagttattcttaaacataaatacgtgactgtaaaacgaagtgttcaatcacataccaccgaaagtcctctaacataccactaccaactctgtccttcagttgcttggaccaaaaacctgggagctgtagttgactcttgtctctcacacctcacaggcaacctgatagcaaatctccacagctcagacctctgaaatgcctagaattacgccactcctcactactttcctgctatcaccctggtccaaacgggtattatcttttgctaggattattgcagtagcctcctagctgcttctgcccttgctcccttcactctcatcctcacacagcagtctgagggatcctattaaaaacaagacagatcatgtcactcagtaacagttggcatccttaatctcctcttgctctctcatcttcctcacttggtttgagctaaattggcctccttgctgtcctttgacaccctaagcagcctctattttagggcctttgcacttgtttgctctgtctcaaagactttctcctcagctatccataaatcatgccctctcaccttctttaggtctttagttatgacacctgattgcaataacacttttcctttatccctccatttaaaagtatagcccctcccgtattactccctcctccggaacaccaggatctgtcatactgtataatttacatattcatttttgtccattatatgtcttctactagaatgtaagctgcaggcatttttgttttattcactgcttgttcttcagtgcttagaaaagtccccgatgtatactaagtactcaaatatttattccaattgaattaatggcgtgtgtcctacactttgggaaatacatatactggcaacacctcccacaatctggggtccctccagtgagcctctcttcacagtcacatggttagtcctgtttgtctctgagagtctggccaattgagagctcagcattcaaggcagagaacttgaaacttgactggatcctgagttttttccagagaaaatagtgcatatgccagggaaaatggaggaaggagagacagtcaggattggttgggagtgcaaccctaggagagatgatttgttccccaagcacagaaggaaagtccatctctctctcctcccatagccccctcccttgtctggccccagtacctaggttctgttctggaagacacctagaaatggctcaagcctcagcctgaacccggtactgtggcttgaacctgtgaggtgttttcatgcgttgctttcaagagctacttgccaggctttgggatttttggaaaacaattgagaaccagctattcccttttagcttttttgtaagttaaaagagaaactatcacttaaataattgaaaaacaatagaatattttatccttggtgccttcagttgactcttagttgattaagaggataccatttttatttcccatatccatggtgactattcctcctaaaggttgtttgagagtcatgccaacaaataagcgtagtcttagcctcttgtcttccaaggtacttttgttagcacctgatattgatggttttcatctcatactagttgaccccaattcatagacatttagacatgtaagccccttaggaggtttgtccaaggggtaggggtggggtatctttctaagtttggttatctagccctagtcacttcacctgtcagagaaccatgtgccccttccctctggttgtgctggttgatactgatagctttataagtagcaagtttgaggtgtgataactttccgtgatttttttgcatgttagcatcttgattcccagggagagataatgagcagctagctctaggcttacaagttcccctggagttgctggtatcttgaatttctttccatttattttaggagtaaaagtccctcgcaatttccgactgttggaagaactcgaagaaggccagaaaggagtaggagatggcacagttagctggggtctagaagatgacgaagacatgacacttacaagatggacagggatgataattgggcctccaagagtaagcgtcgagctacggctataaatgtcaatgtcttaaattcactgtgc

SEQ ID NO: 26872 - DNA, 2300 bp, Homo sapien
ccctgaggggatggtgctggatctgagaactgaagagtgggaacagcacaggcaaagcccctgaagtgggagagggcatgtgttccagggggcttgcaaagggccagtgtcgccgcagaggtacagaaagtctcagaggcgcaggctgtgccaaggctatggtgaggcaagtggggtacctagggtgcagattttttttttttttttgagactgaatctctctctgttgcccaggctggaatgcaatggtgcaatctcagctcactgcaacctctgcctcccgggttcgctcgattttcctgcctcagcctcccgagtagctgggattacaggtgtgtgctaccacgccccgctaatttttgtatttttagtagagacgaggtttcaccatgttgaccaggctggtctggaactcctgacctcaggtgatctgcccacctcggcctcccaaagtgctgggattacaggtgtgagccaccatgccctgccctagggtgcagattttaaggagtcactcacctgcagcgctgtgcaagtgcggagtcaggacctgagtgaaagccccgttaaatctgaccaccccatcctcgtccctgccctgggtgcagagcctggtgcacagggtgtccaggcatcctgctttgccctggagagccctggtttccacttgtcctggtgagattataataagtccccttttaatctgatgtgtgtcctcattaggtgataattctatggtcgctcaacttgtaaagtttgtattttatccagagggaatggggagccactgaaggctttagctggagggtgttttgagcagatgttggtctatatggagaatgggccataggggagagaatggaagctgctggggtcttccaagtgggagataaaggcagcttgccctgagtggagaagtgaacggagtggagagatgcagagtaggcactgctatcagacaaaggtgatgaattggatgtgctgggtgagggcttccagcttccttgtccctctatgtttagagtcctggtccttctgccagtattttgctctgtgaccttaagccagtcccttcacctctctcagcctcagtgtctacatccatataagggcttctcagacaatttataataaaggaggagtaccttcttgggtttatttatttgcaaaaatatttcccaagggcctttgcacaagctgttccctctacctcctcattgttacggtctctgctgaaatatgaccaccttaggaggcccttcctgaccatcctctgctgctcttgtcttggtttatctctaccctatcagaattatagtttcctgtttatttacttgctgtctacgactagaatgtaagtccctgaaagcagggatttgcttcttcagagatgtctatccatccccagcgcctagcacagtgtctggtacatagtaggtgcttaatgtttgtttgtttggttgaatgaatgaatgaacgaatgaatgaatgaatgaatgaatgaattgggtagatggttagcaaatgctttccctgccaccttaatgcccctaaatcatttagctgcacccactccaagccttctctggccggggagcatcaatcctaggagccagatcatctgacctggagggtgatgattcaaaaaatttgaacctggaggttaaaattctgcctgtctctgccacttaacagctgagtttagataaatcgcttgatctctctcggctgcatttttcacattaattctgaccttgcggagatgtggtgaggatctagataggaactagacaggaaaaagccccaagcgaattcggcgcttttgtttgaagctatattttctttttctttcacaatcgcgccttcccaagcctagtcacccctgcccttctcactaagcacatcacaacctccctcgcacccgatgtgtggggacttgcaggttgctgggccctcgagcacgcagatatttcctttctctaaaagggaaggaaaagagccttccaggccacgggtcgtgcaggtctccggggcgggcgtcagcggcggcgtatgtgcgtgcgcgcgcgcctgcgcatcagggccgggggacgggtaaggggggggtgaagaaggggccggccttcaagcaagagcgacgcaagatggcagccaccacgggctcgggtgagcgggggcgccgggcccggccggccgagggggcatgggcttgggccgggggccggggaccctcaaagcctcctgcagcggagccagggtccccgcgccgcctctgtctgctgggctccgcggcagccacc

SEQ ID NO: 26873 - DNA, 2300 bp, Homo sapien
ccattgatagagtgagttaatgaagtacaccaagaccccctgcccacccatccccaccgctttttgactgtatatttcggaaactacatcagacattaaataagatgtctcagcgccatggctagacacacctcagggagccatgactccacataaatgccatagaatttcactagcaaatgcatcacacatcctgtttgtttgtttgtttgtttgtttgtttgtttttagatggagtttcgctttgttgcccaacctggagtgcaatgctgcagcaacctctgcctcccaggttcaagtgattctcctgcctcagcctcccgggtagctgggattacaggcatgagccaccatgctcggctaatttttctattttcagtagagatggggtttcaccatgttggccaggctggtctcgaattcctgacctcaggtgatccaccggccttggcctccctaagtgctgggattacaggtgtgagccaccatgcccggcctcatcacacactctgttaaccacacatcccttctcctctctgtcttctgcaagtccacagtccttcctgtcgacagtttgtcagctttactttctgcagcttatgctacaaaaactgtagcacgaggttgggggggttccttaactataaataggaaattgaaggttgtggataacattatataatttttgttttttcaccttttgaatatactttttcaaactactcatgccttttacatcccagagattccaaaccagccctagtgttttcccacttgaaaagagagttcacgaatggacattgtggatctgtcaggtctacatgcctctcaaccgaaccactgcgtcagcttcctgtatctattaggtatgctttttggtggtaggtaacaaaaacctacctttaagaacaacttaagcaacaggcacattatctcatgtcttcagatgtctgcagttgggcagccctgcaattccttcagcagctcagccacatcacccaggattctaattctaaccattacaacctcatattgtaggaaggaggaaaggggacaaaaataggctttttcttcagcttttttgtttgagacagtctcgctctgtcgctcagactggagtgcaatggcacgatcttggctcactgcaacctctgcctcccaggttcaagcgattctcgtgcctcagcctcccgggtagctggtattacaggcctgagccaccaagctcggctaatttttgtattttcagtagagacggggttttgccattgtggccagggtggtctcgaaatcttgacctcaggtgatccgcccgcctcggcctcccaaagtgttgggattacaggtgtgaaccagggcgcccaaccttctcttcagcttttatgaggggagggaaagtttccaaacacccaccttgccatgtggggccatggcgactggaatggcggtaaacatgcccaatacaccttctctctgggttccctgctaccaatattgctgctgcccaattgggtgtcctcgccctgtctcctcatggcagcacgatgcactttgtaaaaaggcaaacctgcccacatttagctcaaaacctcccaggctccacctccctcatcacgggagagccagcgggtgacacagggtaaagagaactggattccaaaactgattttactccttccttgttgtgtgaccttggaaaagccatctaactcctctaagtctcagttttctcatctcacaaatggaaatggtaacagctactttgcaaggttcattgaggattaggtaataatagcagctaatacttatattgcacttagtgccaagccctcttctaaattctctagttctattaaccattttaatcttccccaaaatccgataaaacaagactcttatcccatcagctgagtttatcagctcaagcgcagagcggtgatcaggcgcaggcgccggaaggaatcctgctctggggaccggctgtgacgtccaggaatggggcagaaactcttcgagggagcgtgtgcgcgggacgtactacaactcccatcaggcactgcgccaacgctagactacaacaaccagcatgcctcgggctgtcccgcctaacctcttcctgcgatgagctcggcacgggaattattattgtcaattttacttgcaagaagtttcctacaagagccaaggaatccatgcgagtaaacatttacgggcaccatagataaaaggcttgtgttttaatcctcatcctctccacctgttagctctgagtctcagttttctcatctctaaaaatgggg

SEQ ID NO: 26874 - DNA, 2300 bp, Homo sapien
cagaaacaaggaaaaggctgctggagaccaaatgatcatgtttattgctgataaaagctggaggggtgggggtggagcagcgaggcttctatctgcaggtaaggtactttctttttttttttttgagacggagtctcactctgtcacccacgctggagtgcagtggtgtgatctcagctcactgcaacctccgcctcccgagttcaagtgattctcctgcctcagcttcccgagtagttgagactacaggcgcatgccaccacacctggctaatttttgtgattttagtagagacggggtttcaccatattggtcaggctattctcgaactcctgacctcaagtgatccgcctgcctcagcctcccaaagtgctgggattacaaagcatgagccaccgcacctggccgaggtactttctttctaacaccaaacccagaaggacattgctgcagttccaggcagcactggtgcagagcaggctttccttatatggggcagagagaagggcacagcctgctcctaatagggaaaggttgagctgatctgagcatgcccagtttatgctctccagactctccaagcacatgagtcttggcatctccccgagcacagcaagtaacaggcaggaggagtgttaagcctgaggctccatcttcagggaagaaaacatcccaactagagaagaagggacaccttcccctcctaacaaatgaatgagcgggcaagtgagtaaatgaatgagtgattctgattgggggggtgcagggatgtcccttcactcaccctcttgtccacagttgcaggggctctcattgctgacttcttgtctggcctggtacactggggtgctgacacatggggctctgtggagctgcccattgtggggaaggtgagtatgttgacctaaccatgtcctcaagaaggaggttgggctgtatggccttgagtgagtcccctttcttctctaagactgtttccctatctgaaagatgggaaccatcattgcagcctgtccctcacccctgtgctgcaagactagaacaggagtcccttgggattttggaagcaaaagcatcaggcttgggatggtccaagagtttagatatgtgcctgcctcatcagaacccctgaatttgggggtgtcttgcttttccattgtctcccctgctgcttcttgctgttttaactgcattttatcctgtattagtcacttttttggttttgacagaaaatctaaactggcttaggcaaacaagggtactgattcatgtaactgaagatttcagggttagagccaaattaaggaatggctgcatccagtaggaccgacagaccacattcttcaggcccagtcttcttccatctctatctctactttcccctcataaggtggccagtgtgctttctcaccgcccagagatccatccttccagctcccaagaaaagagaactgtccttctccttccaggagaacagcatttctccttccctgtagtttccgccaactgaagtcccacggctcactcccattggcccagattgggtcacgtgctgggccctcaggcagtcactggctagagggaggagatgctatgattggccaggcctggtcacgtgttctttctcagcccggggcgaggtcagccttgtcagaagagcctggactaaggaggggaggctgttaccccagcaggtgcagggggtccagagggtcccaccttttacttagagggacctcctcaactgccttggggtggggaggaagggcggaggttgtctccaagcccccttacagcacaggtagggagactgaggcccagaggcagacagtgccaacccaaagcccttccagggtcatttcggctcatctccccaaaggctggatggggtctgtgtctggcagtgggccaggtgggaatgttcaagcatcccgggtggaggaaacttaggatcaaaggcgggaggtgagcccagggtgaatgtgtttagggggctgtggagagcagctgaccaccttaggctgactgctggggctgtgtccccctcaactccaggctttcatccgacccttccgggagcaccacattgacccgacagctatcacacggcacgacttcatcgagaccaacggggacaactgcctggtgacactgctgccgctgctaaacatggcctacaagttccgcacccacagccctggtgagacacccagctagtggtgggctgggagggggccttgggggcagaggccgacccccaggagccttctggggcttatgtgtttggctccttatggtat

SEQ ID NO: 26875 - DNA, 2300 bp, Homo sapien
caccaaccgcgcccccccccccccgtccgccgccccccacccaagccttaagctcctgggttaaaaaatccaactgttggattaactgtgctgttaatactgatgcaaaaccagccagcttcaccggaattcaccaggacttgggttgcaacccatccctgccactggaaggtggcttttccttcctgggagcaggtgtgggaaagaaacggagggagcataggcctgggtggggacagtggctgtctatggtaggaacactcaggaaacagccctggggtgactggtagtgcaggaatccaggacttaaaccctcagagaacctggattctggaaggggatcttaccttccctctctgctcccccagcacctttcaggaccttccacagcctctagggaggctcctatgtgatctcactgtatggattttttttttttttgagaccaagtctcactcttgtcacccaggttggagtgcagtggcgccatctcggctcactgcaacctccacctcccaggttcaagtgattctcctgcctcagccttccaagtatctgggataagtagcttgcctaatttttgtatttttagtagagacaaggttttaccatgttgtccaggctggtctcaaactcctggccttaggtgatccactggcctcggcctcccaaagtgctgggattacaggcctgagccaccgcgtccagcctgtatggaattttttttttttttttttgagacggagtctccctctgtcgcccaggctggagtgcagtggcgcgatctcggctcactgcaagctccgcctcccgggttcacgccattctcctgtctcagcctcccgagtagctgggactacaggcgcccgccaccgcgcccagctaattttttgtatttttagtagagacggggtttcaccgtgttagccaggatggtctcgatctcctgacctcatgatccgcccgccttggcctcccaaagtgctgggattaccggcgtgagccaccgcgcccggctgcctgtatggaatttctatgagaaattattgcatactttgttgtcggttagacctggggtaaatccctgctgctgtcatttatctgccgaagtattagacgcatctggctgagccttaattcattcatcaagcatttattgagcttctaccatgttccagccccgatcctggcacgggggccctgctgtaaacaaagctgttctctgccctcaggagcttgctctctgataggagagacagggactgcaagctcaatccccaccagaagcgctgtgaagacaaaacagggtgatgtcacagtgactggaggagggggcacctttgagcagggtggtggtggtggggctctctgaggaggcaataccattggtgtttaagagtcaaataaatgttgctcgtctagctcttggtccagcacctgacagatattaagcgctcagcaaatctcatagtgaccctagttgtcattttcattagtttactgtcctcgccaccgggagaacatgagctggggaggatgcggggcaggctcgacgtttctcctctttgggcgcacagcacagagctggcacacagctgatgaacacatggcacccgaaacctctgcacacagtagggcttgataaaccagcccactctccatcggcctcgctagggagcatcgtacagagcacccgccaaatgcttcctggcctcggccccagcccggcgccctgccctcgcgttccttgcacacagtgggcgcttaacgctgccggctcaagaaatgcccatttctgggccctgcctcggcccattgcatgggcccgtgaaccgaagcctagctgggcggcgacgcgccgcgagctcccagtgggctggagccgggagccctgccggggctgagctgggaaggcgggcacgcgcctccgccccaagcttccgcgcccagctgcgtccagctgcgtcccagcctccggctcgcggcggttggctgcggctcagcgacgtccgattggcctgcgcggctccggcgcgagccccgattggctgtgacgcgcggccgggcgaggaccccgcccgcgccgccgccgcgcccggcgctgggcggtcattgggcggcgtgatctcgccgcggttccgcggccctgccgccgccgccgccagcagagcgcaccgggccgatcgggcgagtggccatggcgggcgccgagaactggccgggccagcagctggagctggacgaggacgaggcgtcttgttgccgctggggcgcgcagcacgccggggcccgcgagctgg

SEQ ID NO: 26876 - DNA, 2300 bp, Homo sapien
gggaaggtcagggagggtttcccggaggaggcagcttttgggctgagacctgaggagctgccttgggcagaggtggggtgacagtgttcttggtgcacagggaacagcaaatgcattccttcactggtaaatgttgagcgtgctgtgctcaggagtccctcgtgggccagccctccccaagtggcagcctgcagggagactgaggtagacagctaggataatggtggctggcgatagggaaggaaattcactagcaggtgggacagggagggcctctcagaagccgtggcctctagctcagccctgagtgtcccattttgcagtgaggaagggctggccgggtggccctagggaagctgccgcacccctctgggccttgatccctccccaacccagaggctgctgggaagacccagaaagccagcaggctgggccagtgttttatcccctccctccctgcctcctacccaccaagggtgcccagagatgtcatttctccagctcttgggggcggaggtcaccccagctcagcagataacaccaaaggttgagcaatgcccgcctgcccgctggggccagggctggggtcagtgggctggggatcagccccgggcaggctgggagctcctgcctaggtggcctgggctaggagtggcagagaggtgggcccagggagctgccccaatggcctaggaatgggtccgggagggcaaagggccctctaacctgagcctacccagcagaggcgggcaagtggtcagaaggccttgggcctgtgttcaagtccaggcgggccgttgtcgctttcccgtctgtgaaatggcagcagcaaaagcatcttcctggtggggtgaaaaaagttgaacctcggggtgcaggcccaccgtaagcacagggcagggacttggtaaaaacttatctttctctttccttctctttcctgcataccaccccctcccgtgaggcctcgcttaagtccctccctagcaacttcagaaacagaagtttttggcctctgggactggcaataggtcttagggctcagatgagggcatttcatttgggatgaatgggggacatgcggccatgtgaccttggtatgccacgccatgctctctctgggcctccactggcacaatccgtgggggtcccgttctctctgatgtgcagcccacaacgtaagccttaggtttgggagtctggtgggaacaatgccaccaccactgacagtagcgacacccttcatggattgcagctgggagaagtgaagtgactcacccaaggtcacacagtgtggcagggccgagcaccccccgcccctgccccatcccagggcccaggtcgggtggcgcagcgcggggcaagagaagacccgggcgtgtccaagcctcgagcaggcggcaggtgtggtgggcggggctaggggcggggctccgtggaccagggtccagccccaagcggggcgcgatcctgcccggtcgcgccgacccccggggtcctcatattgtctgtggcttaagaggggagtcgtcacaggcgtcaagtcttctttctaaagccggggacctggggaggaggtgggagtttacgggaggaagggccacggagatgggtcgcttctcctggagctagagctgcgggctggggtctccagggttcggcccggggagccgaccctggtcggccgtcggggctctgctcggccctcctgaaacctccgcctcctccagcagggggcgggccggggccgcgtctcggggggaaggcgatcaggtcgccccctcctccgattcccccgccttccaggacagcctccagcccagaggggcggtccgggggcggggtcgcaccgccccctctcgctcccaatcccggggcggccgggcgggggtgggcagggggcgtgaggccgcccctgcgtcccgggggccccccgaaaacgcgctccgggtgcccggtccctccgctgcgccctgccgccgtcctcccgggggtctcgggcggccgcggccgtgtccttcgcgtcccggcggcgcggcgggaggggccggcgtgacgcagcggttgctacgggccgcccttataaataaccgggctcaggagaaactttagcgagtcagagccgcgcacgggactgggaaggggacccacccgagggtccagccaccagccccctcactaatagcggccaccccggcagcggcggcagcagcagcagcgacgcagcggcgacagctcagagcagggaggccgcgccacctgcgggccggccggagcgggcagccccaggccccctcccc

SEQ ID NO: 26877 - DNA, 2300 bp, Homo sapien
ttagttgactaaggcgagggcagcttttcattcacagctctccacgccaggcaggcactggtaatccactggtgagccccacgggcatcagctcatctgccgacagtgtggccaggctgtgggaggagtatgtggtggcagggagcccagaagaaagggcttcctgtgtttgtttaagtaaggggttagtgatggctcctcagaggtgggactatttgggcagggccttaagggatgcataggagttcctacgaggagaagtatggagatgggcttgccagacagaggaaactgcatgataagcgaaactgcctggtagatgcagaaactcctaccagcatccacttactgaacacctactaagtgccaggcactgtactacgtactttacaagtcattgctgcatttcaactcttgacagttgtaggctattactagtcccattttacagataggttagttgaggttagataggttagaaaagcccagtaacttgctcacagcaacacagctacaaatatcgaagcctgggtttgaacccaggcgacttgggctcttggccattctactatcccacaagggtcaaagggtagatggcgaggtcccgaatgctagatcttgacctttcaaccttcccagctcgggtcctgcccctgctcagaggcccttagttgttccccactactccaggactcatcggcctgagctgccctctccctccagccagggtgggcacctggggcagcatcagcctttctgggtctggctgggtgtgctgggtgctgcaggaggagccacacatggtactaatggagccagggagcaattaggggggcatataccctggcctgtgcccactgaccggttttggatgtagttggagatggaactggccctctaggctttgtcccctggaggcctagggactctgtcttcagggcagtgctggctgtcactttggcccagcccctctggcttcctggttgtgagcagcctctggacccagagaactgttctcccgtgtaccctgttgggcactgggcctggggctttttaaacctcatggattctgcaacgtgggaattcatccctccatttggcagatgaaaaaaagaaggttcagaaaggtgaaacgacttgttcaaggccacacagcgaggaaagggcagagccaggacaggaatccagaccctgagtttgactcataaccaccctccactcctgcctccgtgcaagaggattttccaacctgtctgctgcttggcaggggcttaatcaacctccctctctctctctctctcctggtcttcaggaaaggggcaatgagcccattgccacggggtacggcggagcttggatgctgcacccaggactgaaagggggacctgtgggcggcctctgcctctccccgcgcagcgtcaggacacaggcccacattccctcctggcttctccctgaagggagagagaataatagttggttcaaatgtcaggcctgctccgtgctggtggggagactggttgagcaggtccgcaggagggacggagggaggaaattattaataattgcaaagcaaccagccacactacaggccttgagttgtgtctgcgtttgtctttggaggtgtggagttgggggtgctgatcctggggacccagcccaggggtcaggacagcctggggaccagctgcagcttcccagaagcctgtgtgggtaggggagatgatgggggcacagagtcagccacctacccctggcaaggtgggacacatcccagcctccccatcttccactgactcagggaaggatctgtcaacatctaggggagggaggaaagagcctactacgtaccttcaggaagcttctcattaggtgatggatttaatcctcacaacaaccagatgaggttggccttgctattatctccagttggggaaactgaagcacagagggtctaagggtctaattgtacagatttgaatccaggaggtctgagtgcagctggatagtcctttgctgggatgggaggatccccattccctgggaacagccacacccattcccagaacatcaccacgatccctgctgccttcccttggaggacaggagttggtgtgaagcttctctgagcctcagttccctcatctatggaataggagccagagttcctccctccagggtcagaaggcagctagctgataaggggagcaggtaaggaggtgaagggtcggtttgctggctgctgcctccacctcccttccagaaccagtcaccagtgacagtcccttcatcaagaccct

SEQ ID NO: 26878 - DNA, 2300 bp, Homo sapien
gctgggactacaggcatgcaccaccacacctggctaagttttgtattttttgatagagacagggtttcaccatgttggccaggctggtctccaactcctgactgcaagtgatccacctgcctcggcctcccaaagtgctgggattacagtagtgagccaccacacctggccagcagatttctttaagtattttagaggcaatattttttccccaaaatctcccttgtgcaaattttctacctcacagctgccaaaatttgaggtggtggacaaaaatagttgatatataatgatagaaagacgtaagtgaggtatatatatagagagagtctagaaagagttcgctttcaaaggggaggatcagggcagtctccctggaggaggaggttttgaatacgtgcgttgaagggtgggtgaaatccagaccaggcaggtgggttagggaaagtgagggcatgccgggtgaagggccctgtgtgtgcacaagggtgaggtgggaatgatgagtgtgagagtttgtaccaagggggctggggctggggtgccaagaaccaaagagccatgataaggcctgtctggggctcagccaaactggggagtagtacacgagaagaggaatggggagccctagagggttttaagtaggggaggaacgtggagtccatagcaaggcagagtggctggtggggaggtggggaggatgccatggcaaccattcacgccaagcctcagccccgaccctcaaggaggcaggcaaggctgagcttccctttccagattgtttgtgggtgcaaaagggcagcaaagaatgtgggtgccttgtccttctgcccatggtctagtgtccttcccctcaccccagtcccagtggagccatcataggtgaaatataagaacaagtcacctgcgttcagtggctgcagaatacctggcctcgcacagaaggctgcggggatttctgctcattcattcttcccacctgccgcatgagggaggtgctatgtccattttacagaggacactgagtcccagagaggctaagcggcatgcccgaggttacacagccaagaaggggcacagcaagattcaacccaaaagtctgcactccagccactgccctatcatgacactcacgagctcccaccaagtctggctccagtgtttccagtaccataatcatccccatttaccagatgggtaaactgaggctctgagaggtggagtcacttgcctgaggccatacagcaggaagggtaaaagtaaagatttgaatccctgggtctagtcgactctggagcctgctgttctcccaccatacacctcagctgctcgccctcctgggcatctgtttcctcatctgatgaacaggggtgacggcgatgcctccctggcaaggtccgcagaggatcccgggtggtgtatgtcaatcacccagctcagtgcctggcactcagtggatgctttaaacgtgatgcctgtgtttattcgtataaaggtggctgaatattaaatgggtggatttatggaaggcacttatggtaatgccctgtacataatagatgctcaagaaacactagaagcagttactatgattataggatcgaccacaggggacagcccagtaacccctcaaagttgcttccttcccaagttgccttccatttatttctcccttcatccaacacactggccttagggtccaggttaggatttgggggcttggggggcttaggttacaatttgaggtgatttgtccccccctgcccatcagtcagagtgatgctgagagcactggatgataagaccagaattctaggtccgcgccccggacctgctgtgtgatctctggcaactgccttgccctctctgggccttggtttctcctttcatctgcagagcctgggccaggctgccctgggaggtgccagccccgaatggggccgggggcagttcctgtgtccccttggccaccagcctccatctcctgcctcttgagctgcaggcccgcccggctcagctgtgacgacgaaccagccaatctgtttactgaactggctgaccccttccgggaactcggcccaagcttcccagaactcgggtattaatgacccggagccacatgacggagcatgacacagcacttttgggcacaaggcagggcccagaggggtgcgtgggggccgcagcccagcccccaagccccgccagcgggtgagtcacctgggccccctgcagcttcctgatcccggccactcagctgtcctccccacccccaggatatccccagttgtcagggctgc

SEQ ID NO: 26879 - DNA, 2300 bp, Homo sapien
gtgagggccccttggcacagcatctggcacacagtaggcacccaacacagatgagctgttactgccagcattcccatcactctgactcaaagctctgcactgtctggaactcagtctcacccctcctctgtaaggcaggccatgactccggacccgccgtgtaccagcactaactgttttctacccagtgattgtttatttaactgtcctcctaaagtaactcctcagccatcaaagggctgtttacaaagcccacaattagccttcttggaacaacaaataaacagaaacctaattaggcatgtttctcctggctcaaggcacggcaaccccaaggcttgggcatcacagctgtcattcaaatagacatttgtgggctgtatggatgaatggatgtgtagatggatgtgaggatgagtgggtgggtgggcggatgaatggatggatggatgtgtgggtggatgagtggatggatgaatgggtgggcggacggttggatggatggattggaggttggaaggaaggagaggtggatagatgatatttgaactgatggacagatggatgaatggaaggttgaatagatagaaggcaggaggaatagaagaatggatgggtggatgaatagaaggacaggtggagggaagtcttgatgggtggagggatggctgagagttggatggaaaggatagatggaataatggaaggacagatggagagatgtttggatggcggatgaatgtgtggatgagtaggtaggtggaggtatgggtaaaggaatgaaaagatggactggtgagttcaggttagtggaaggccagagggagagggtgatgtgaactgaggctccaggctttttcctgcgtctccttcccaccctgccctgttcttcactgagatgctgtgtcaccacccagtagaagggactctgaccgtgtggcatcagaacaatcctgggtttgaattcgctcctaccatgttctgcctctgtggccttgagcaagtcctgccaccctgagccttagtctcctcctctgtaaaacggatgtttgtactgtccccacttcacagtgtggctggcagggtgaatgggttaagtgcccacgccatggtccctgccctacctgtgtgaattcctgtttggtggctgcccagagcaggggctggcatcacttggggctgggcaatgttggtagactgcccagaccctctgctctgagctccactccaatggagggaacaagcaccagcctgtgctgcggcagggccctccctctgggaggttcttcccctggagagagggggctggcctctgcctggggagacttaaaatcccactgtggggacgggcactggaacagagcccaggacctggctcccctccctcccagctccctgcgttccagcctcgggggcctccactcggttctcagagctgggggtgagaatgcgactcaatgtccagctgcctagattcacatcccttcctcccactggctggctggtagccttgggctggatactgaccactctgtgccttgggaaatgagagttcctacctcataggactattgtgaggattgaatgagttaaaatgtgaagtgtttagcacagtgcctggcacacagtgagcatggctagctgctattattcttgtataacagttgttttcattactgttgctggtattattatcattattttacctctcccatatccttttccccttctggccagagggcatttgatgtttcctagcaggagatggccctcaaactgggccttgaaggaacagaaaggcccccagaggcagaagaaggcacccctcgggaagactccgcctggggcagctcccacagcagaaggccaagaggttctggccagagggaggcgtggctcccagcgcaggggcgggatagagagaggtgagtcagtgtctggcccagccaggccctcacagccacagctctgcttcccatcaaggggcggagcagctgcggctcccctctggccagggctgggggtctgagtcagctggagtcaggtaagcagaggaggatgtggggctttcccacccgcagcctggaagcccgtgtgtgcagggcagggctgcctcccacggcaggggcaggcagaggcctctgcgccaggtacagcctaggtaccgcctacccccatggctgaccctgggccccaaatccagcgggaggcctgggagcatcttctccgcctgagtcaccgggctgggcccaggaccccagccaagggctttgcctctgggaagaaaagagctttggagt

SEQ ID NO: 26880 - DNA, 2300 bp, Homo sapien
gtggagattgaatgggaatgtgtacttagaattccaggcatagtgcctgccacaagcactcaaggaatgagctggagttcagctgataataccaggcagtgtctctgggcaacacggaatgaagacaattctctcttccaggttttcaaacctcctggaattcacaacgtccacatgacatgccaggcccagagggggatggtttaaactggagcctgcaggaaggcaacctgaccaacctgctcatgggtgctttaaggatcataggtacgagaatcagctggagttgttggtgaaaatgcagattccgggtctcatccctagaccaaagatatctgaatcatttggcgatgggtccaggaacctgcattattcaacacacttcccaggtgaccgtaaatgtcaaaagacaaaattacaacaaacttaaacatcttaattggcttcattcatgattctagaatcgggcaagacttcattcctcaaaatagcacaagtgtcccaatgagctgagcagaggaggttggttttatagacagaaaagggctgaaaaaagcagaaacaaagaacaaaaagcagattggtcatttcaaagttactttccttgtaaggcaggaacagggaaacagaacaagagagaaataactgattggtcgcatcgggttacttcaggttactttttgttgtaaggattaaagcaaagggaacttcattatgttgattaaaacggtctgcttgggaaatcagggtgtgtatctctcttctgattttgtgaaaggttatcagtctgatgatgtagaactttagcatgagtgactccattttgatttttagtctagtctgttgagaccctaatgccagaactttttttgtttgtttgtttcgctcttgttgcccaggctggagtgcagtggagctatcttggctcactgcaacctctgcctccagggttcaagcgattctcctgcctcagcctcccaagtagctgggattacaggcatgcgccaccacgcccggctaatttttttttttttttttttttttagcagaaaccgagtttcaccatgttggtcaggctggtctcggactcttgacctcaggtgatccacctgcgtcggtctcccaaagtgctgggattacaggtgtgagccaccacacccagcccttttttttcaagacagggtctctctctgccacccaaggtggagtgcagtggcgccaaaacagctcactgcagcttccacctcctgggctcaggtgatcttcctgcctcagcctccccagcagctgggccccaccacaccggctaattttttaacttttagtagtgacgaggtctgattctgttacccaggctggtctggaactcctggcctcaagacatccgcctgcctctgcctcccaaagtgctgggattacagatgtaagccaccgcgcctgggctcctatgatttttatttaacataatgcaccatggaatttgtgctctgcttagttcagtctgagcaggagttccttgatacttcgggaaacactgaaaatcattccatccccatccattcattcctgcagcacccaagtggaaattctgcgtttcagacagggacactacccttagagagcagtgggcttccccagcagcgtagtgaaacatgatactcctgagtttcatgaaaaaagggcagacatctggccagagctgggaggcaggaaatagagcacggtgccctcctcccatactccagcttggattactgaggctggggcccaggccctgcaggaaaggaggtgcatgactactttaaggccactcactctgtgactcaacgggccgggtcggggctggaactcaatgccctcccgggcctggagagcccacgcgccgtgggcggggctcccggggtcgcctaggcaacaggcgcgcgccgcgcccgagcccagagccccaaagcggaggagggaacgcgcgctattagatatctcgcggtgctggggccacttcccctagcaccgcccccggctcctccccgcggaagtgcttgtcgaaattctcgatcgctgattggtccttctgcttcaggggcggagcccctggcaggcgtgatgcgtagttccggctgccggttgacatgaagaagcagcagcggctagggcggcggtagctgcaggggtcggggattgcagcgggcctcggggctaagagcgcgacgcggcctagagcggcagacggcgcagtgggccgagaaggaggcgcagcagccgccctggcccgtcatggagatggaaaaggagttcgagca

SEQ ID NO: 26881 - DNA, 2300 bp, Homo sapien
agtggctcatgtcctgcggccaccctgtgcccaataccggacctccagcagccaggagtggagtggctgtggtccacgcgccctgttccccaaggatgcggaagcgctgcttgccaacaggaggctgcatccacagggtttcagtaccagcgtgtgtttctagaacagaaagtcatttcccctcaccccaacaagctgggacccaatcatattacctttcgatgccgtagggtgcggcatttaaggggcttcctttttcttccttgatggggcagtctttatcctcctgggtctcttccttcacccactggtgatttgggaagaactccctgcatttcccattgtgtggctccaggattcgtttgggtggccggggaggtggggggatatgctcgggtgggggctccaggtcctcgtgggaaagctccttccactgatccttgaaagagcagcaagaggaagtcctattagtgttcacttcggctggtttgtcaggaaatccctttgcatgagcagaggtgacggcttggcgaggggctctcggcctctcagggctgcagccatgtacttggaagatgaaatcttttgaaaataaagtctcgtcttcctatcaatgctctctatgtgagcacttcaaaggcacaaagtgcaacatggtgaacattttgacaactttctagctattttaaacatgaagggtagctatttcccctgacaccagacggtgtttgaacttttacaactgacagcctccttcaaagacaaaaaagttaaaatggtcacacctggattcaaacaaaggcaatgctgacctgcacggaagagtcccccatgatgaatttggcaccttcgatcacagccaggtaggagaagcgcagctggtcggctgtctggatcagccccatccgaaacttcctcatttctaacagcactttcttgatatcaacggaagaagggtctttcctcttgtccatctgaaagccagagaggagatataagtcagccaggtccaattctcaagggcaacgttaataacaccgttagatgtctgtcccctcccaatctcatgctgaaatgtgatccctagtgttggaggtggggctgggtgggaggtgtctgggtcagggggacaggtccctcatgaaaggcttggtgccctccctgaggcaatgcattcacaagagagctggttaagagtctgggacctcccccatctcttgctcctgctccccttcaccttccaccatgactggaagctccctgaggcctccccaggagccgagcagatgctggtgccatgcttgtacagcctgcagaaccgggagccagttaaacctcttttctttacaaattaccgagtctcaggtacgcctttattagtaacgcaaaaacagactaacacagtgagtctctgtattttggaagaggagcgcttcagtttctacttaggaaaaaacatcacagcagagcaggtagaggagctccccagggcacccgcgagggcctccttaccagcaagaggcaggtatcagccagacagaaggttccagacctgccgatgcctgcactgcagtgcaccacaacgggcccgtgctccgggctgagtgaccctgactctcggactttgaaaagaaagttcaagaatgaggctggtgattcagggactccaaagtcaggccatgtggtatagtggaaatgtaagatctctcgagtttcttgggtctgaaagagaaaaatactcatgatgattctaaaagaatcatctgtacagaaatcactaattccaagtacacacagagtcaccttccactctctacctctaagaggaacattcattctcagactttctcccagggtccacacacccagtcaacaaataccacaccctggggccaggccctgggcttgacactgaacctgcagggtgcgcctgcttagacttcatttcccttcggattgaagagtcccctcacctcttttctccctatcacttccactgtctacatggttacaactggtttctctctgtctcacgagtcacaatgatgctgggcagccacccataaaatcttgtcataaagccctgcaaggcctcccgtgaaaaagtgaacaaggaacagcaggtgaggcactggctctgggcaactttcagacgggggcttcaagatgatctggaggtttcagaggattgtcactttagagaaaaaagtagcagacttggtctccaaagactggtgactccaaggtgtggctcaacacccagctgaagaggcagtcaatgcgaacggcatcagcccatg

SEQ ID NO: 26882 - DNA, 2300 bp, Homo sapien
gattataggcatgagccactgcgcccggcctgtttctagtttttgacagttgaacaaaggtgcttggcctggaatagccaccaccaggtcacctcactccctcagtgtcaggggtctctctccaggctccaaatgctctcatctcatctcagtccctcctgcctgtcctcatccttatcactgctcctacagctggagaccagggtgaggcacgtttgagatgggattcccaagtcagcctgtgcttcttggaggcccagcttcccccgctccctcccgctaccccatctttatcttccttcatcccccacacccccacgctctcttccctagcctgggcaggccccagctgccttcccacctggcgccccgacacacagccaccccacagtggcctcaaaggcttctttcccaaagagaggctttgtcttcaaggtgacccctggctgacccctggcatggctggtgggagtggtgacgaggcagtgatggggccatttgaattaaaatgccctctggataattcaaagaaattcatgagtcatctttatctgggaaaaccccaatggagtgagctgggacccagggctgcagactgatagacagagggaagcggcctccctggatcccggtcctcactcccgtgcctgctgttgactattctgcggtcaggaggcgtccctttgcctgcagtcctgggacagtggagcgcaggggacactggggcttcccaaggagctgcttgttcttctcttaaatcacaaatcagggcactcattgtgtgtctatccgtcaggccgctgtcctctgcagagacaccttgggtgtcccctcctggctccaggtggttctggaggatggcagagccaggaccatgggctgccctgaagctggttccaacctgctctatttaaaccaagggtcctttaaatttgtctcttttcatttaaatatgctctttaaaaaccagcaggctgggcatggtggctcacaccatgtggatcgcttgaggccaggagtttgagaccagcctgggtgacataacaagacccatctctataaaaataataataataataatttatgtatttatttatttaaaaaaatttttttttgagacgaagtcttgctttatcacccaggctggagtgcaacggtgtgatctcagctaactgcaacctccgcttcctgggttcaagcaattctcccgcttcagcctcctgagtagctgggattacaggagcccgccactacgcctggctaatttttgtatttttagtacagatggggtttcaccatgttggccaggctgatcttgaactcctgacctcaggtgatccaccagactcagcctcccaaagtgctgggattacaggcgtgagcccataattataggagtgtgcctggccccaaaaacttttttttaaaaagacagaaaaaccccctgctccctggagcgaagattcttgagaagcatacttgattaactgatgaataagacaatcagaaccatgagttatttgaaggatacgggtgaggggcaagtccacgttagccaagggggtcagggaggacctctctgaggaggtggccttggttgtgaggcctgcaagctgggagagagtgatagggaagacctgggggaagggaggcgtgtgccaggcagaggacacagccagggcaaaggctggaggggggctccagctgaggcctgtgctttggcagggaggagtagtttgggttcttctggctcttccagtcgcctttgggtggtccaggcaagttgtgtgaccatcctgggcttagtcttgacatcggtaaaatgagcgagttggactgttggactccacactttctcgggccccctctggtacaggcgaactggttcccagagaagcctcctcgggcgcctgtctgtcttctgtgtaaactcacattcctcttcctgggctattttgccatttcctttcatgcgaaaccaaaggagctattttggaaactcctataaacaaactaagccctagctggcatttgagtggataaaaaggagccctaagtgagggactcaggcataaaagccacccagccccaaaagcccataacgttaaatttagatgttttacctctaaatgaggtgaaattgcaggttccctctggctggcggtggggaggagacgcagggcagctttggccagcagtgagcggacagacttagcgggagtagactctgcttcctccagccacaccttggggacggaggcccaggacagtccccagtgtctgggagcatctggcttcct

SEQ ID NO: 26883 - DNA, 2300 bp, Homo sapien
aaaactaagatgtcatttgttctcatcattcccattgtctcacgagtatacaatggagttttccagaagggacaagacatgtgatgacatcatcactctgatgactgttggaatgcatgcttgtgtactcccatgttttggacacatccgttttaattctaagataaatattgaaagacattacacataaacaaagtactttggggtcctccatgatttttaatagtgtaaaggggtcttgaaaacaaaaaggttgggaactgctgtgctagtccaaacaggggagttacaggccctgacatgcactttatttccggctgaacttgagtcacctcctatgtgctttcaaacagggggtggaggcagcttgcttatttattatacagcttggattggtgtcctttccacctgtgctgccacaggtggccagaaaaaccttaaatcctcccacaaaacgtctggttacctgaatcctccagagggaaaaaaatgagcttctcgcctttgaacccaagtggggcaaagagcctgcagaagggacaccctcagtggcagcacccagcaaagacccatctgagtacccgctgggagtcgggttctgtgccactcaatgccagcaaagcacaagccgtccctgcgccttcgggagctttcattctaggctggtggcagattactcacaaaactcagatgcacacaaaaatgggaaacctgtaacttgtaacaagtgctgggcaacaggggtacaagtgttaggaggcctccgaggtgggcagggagatgaggggaggaaggtaccctaaccactcttcttgccaaatctcaggttggaccttcccctccacctccattcccctgcccccttcctggcttgcaggtttcaacagctcttggattcccgggtcccacagggagaccttgggacctgggaatctcctccagccaaaagcttcagtcttctcctctcctccccatgacccacagggtctgtgtgaagagaggccgggctctgggacgttcagagaggaggattcagcgttttgttgctctgggacacagcttggtcactccgggaaacgaacacaacctagaggctgtcatttgtagaaacagcgaatggccaaggaatggcgggaggagggaaaaggaagacttttaaagaaaaaaaaaaaaagccctgaaagactggactagaaatcctcagggaggctgggcctgcaaggagccttcccgcgcctcagcccactttccttccctctcgacctgacggacttaaggcgtgcagagtctcttcggacaaaatgaagccaagagagccctaagcttctcccccagcaaccgctgcagaggcgggaaaacttgaattttgcaaccaagagttgcagcgggacgcctaagcaacgataaggggcggtggaggggcgtcgttgggggctgcagcatcccaaagtggaagcgggaagggggcccggctggaaccgaatagccccgcagcgcctcggcaaccggacgggcggcgcatccaatcccctggaccgtgcgtgtgactggcgcgcgctaagcggcgcgagccccggcggagccgggcaaccaggcgcgcgctcgcgcgtgcgcaaaaggcccacccagccgagcccttcttcaggtgcgctcgcgcttccggccggcctccccgcgtgccttcccggggcggaaactccagcacccgcgcatgcgccttctggctctccggcctgaagcggggcggagggccatggcttcaggtgatcccgcccctccctcgtagcgcaggaccaatcgtgcggtggtaggcggggttttgaggaggcagcccgcccacgcaccgcgcgaggcgtgtatcgattggttggcgccgcgggcgcaggtgcgcgctttctattgggtgtgggcggaacgcgagggattgcggcatcttcgggggctgcaggtgagcgcgcgcacgcgccgcggctgtggtccgctcgggtgcgcgcgcgcgggctcgcgggggaggcggcagagggagaggttgcggcgcttgtggcctccgctccgccccctcctctcctccagcgctgtcgccgtcgccgccggggcccggagggagggagctgcttccccgcctgccgcgccaccagtccgaccctcggtcccgccgtgtgagcagctggtggagtggagctcagcgcggacgccggagctgcggccgccccctctgcaggtgcctgtgaggaggcgcccgggccgcaaccgctttccgagatccccagtcgcgcactcgctccccgcgctcctgaggg

SEQ ID NO: 26884 - DNA, 2300 bp, Homo sapien
agtttaaaatgtaatctggacaagttggacttagaggctagctttttcttctggcttatctgtgcctgttcagaggtagctgggttgtcttttgcttatctaaaacaggcttatctttttgtttgttttgtctttctttcagatgatactagtaaatgcttttctgctttttttctgcccgtaaaaatacagactatatggtgccatccttgatgtggtagctctgcagaactaccatagacaagctccactaattcttggtgtgccagatcctgcagactttaccttgagcctgctaaactgggactgtcatctgttgggtgatgccattgcactccagcctgggcaacaagagtgaaactgtctcaaaaaaaaaaaaaagaaaagaaaagaaatctgggttttagtgtatccatcacccaaataatgtacaaggacatctttttcagttagtgttggtaggaaaattggattgccatagtgcagaagaatgaaactagacccctatctctcaccgtatgcggaaatcaactcaagatagaaaaaagactcaaagtgagacctgaaactagggaaacctgggggaaactctcatggacattggtctaggcaaagaattcatgactaagacctcaaaagcacaagcaacaaaaccaaaaatagatgggacttaaactgaaaaagtttctgcacagatacaaatatcatgcatatggttttaatttatctgtagcctagggcctagatgaatcttagattttcattccagctgtctgactcttgctttgtaagaaagcacatgaataggatatgggcctggattagtaaaacgttaatgtttgggccctaatcagtagatgtgggtataatttgcaaagactaataggaatgagtatggctagttcactcaacagtgttagtctccagaattgaacgttggctgggcacggtggcccatacctgtaatcccaacactttgcggggccgaggtgggaagatcacttgagctcaagagttggagaccagcctgggcagcatagggaggacccctattaaatttttttaaaaaattagctgaatgtggtggcgcatacctctagtctcatctacttgcgaggctgaggcagaaggattgcttgagcctggagaattgaggctgcagtgagctgtgatcataccactgcactccagcctgggtaacacagagtgagaccctttctcaaaaataataataattgaatgtttacatgtagttcatcagatggcatgtgcttaccaaaaagctagttactctctatttatttagaggcagggccttactctgtcacccaggctggagtgcagtggcacgatcattgcccactgcagtcttgaactcctgggctcaagtgatcctcccacctcagccgcctgtatatctaggaccacaggtccacacccatgctttcttatagaaacataggtcttgctgtgttgctcagtctggtcttgaactcggccctctaacatgctgggattatgggtgtgagacattgcacccacacctagttactttcagtcgtaaataaaatacttgcaaatgttaattctgttattaataggtcattgagctttctctgaattctagaatttagggtgtttaactcttctcatatagtgttttttgtttttttacttcatgaaatcagagtcaaagcattttttagagtaactttcatctttcaaactcctgttctttctactagactcagttcacaagtgtaattattttgcataaataccctatcttccctcttatttattcactttctcttctgtgtccgcctgcccagtgggtctgtcaagacttttggttgtgggtgacaagaacttagcttaggcagaaacgataatgtgtgtgtttatatattggaaaaggctggcatagggaagtgctgttcttcgggcacagctggattgaggaccttaaacaatatcaataggaattgttccctttgcttccttcatgtgatggcaggtctcaactctccttttcagcgtcacgtcatccctgttcgggggacatgtccaactctactggtcattatcttacatagatgaaatattcttaactagtcaaactgagtcatgtgtactctgctctgctggaaaagtgactttctgtcttccatcaatcgtggcagaggcgtttccaagaggaggctgggcaggcaaaaacaggtgtctaaaccctactgattgagggctggctatgtgtattctaagctggaagaaatggactgttgaaggggaagaagaac

SEQ ID NO: 26885 - DNA, 2300 bp, Homo sapien
atgtggagcagaaattaagtaacaaccttagagaacctaatatagatagtactgccttctcagatactcactagagtagataatgtttgccttttaaatctttttagttattcacacaatcattatcacaacactgtcactcttggaatttaccatagagtatttgagcagtgaagactcatagcatttggaagtcatttagaaaagaatctggaatatttagatgcatttttgtagtaaatctggtgcttaaacactgtaaaattaaatatttacatctgaatccagcatcccattttgctttgtaaatgaggccaaagatgaaatccagatgttttcccttgtatttgtattatcactatatggaatctaagtatatctaagaaaaactaaacttaaacttactttgcttatttcatattagtttttatctgtcttctgcagtgtgtaattagattctttagttttctgaatcaaatgctttgccccaacccctttttccacgacttttttcagctgttttcccttgaaatactgacttggcttttaaagatacattttatcacaattgcagaaatgtgttgtataaaagtttgttaaacagggctaactgaagtcttagatgttgaacagctatgtgtaaccacaatttatactacttgcagcgaactcagattattttcggatgttaagtatggcttgaaactatgttaacttgaaatgtaaagaaacagcaaaagacaggtgtatttacctaaagatcacatattaaggaaacaggcttggttaattcctcactattgacatctattacttgtcaatacatttaaccaaccaatgatactttaaatcataatgttactttgaacaacctactttaaaaggttggttcaaaaatgttgaggagataatgtattggttgggattgacctaaatttacaaagcaaccatgtgctgtcttatgctacccagattgtgggagcaccaaaagctatgtccctaggactacaaagtgtgttgtttaaggatcttgcagagagccaatgcccctattggcaacatcacttctcatccttaagtttcaccagttgggtggcctcaaggcactaggattcccatttttttttttattcaggtcagagaagagtccatcactgtgactgggaagaatgtcaagtcacagggtaacggcggaccttaataaaatctcggcccctctgcaccgaataccccaccaggaagggctaaggcatccatggggttgtgtctcatctcaagtcgctgtgtgaagcacgaggccctcacacctcatttaaggcaggaggcgtcaggggcgaccggccaggtgtcccggcgccttcccgccgcttctcagccgtggaagcgcgggcatctgagcacgtggagccgccccaggccgccccgcacacccctcccgccagatgtagtccaggcccagctgggcccgcgcagggatccccagcacggccacctgactgagtgctgggcgtgctgcggcccgctgcttctgcctccgccgccggcgctgcggccagaggaaggcgcccgccgagcacacgggccccgggagcgcactgcggccattatccgcggcgcctcctagtgggtcaatggcaaatccgcctggttctcgcgagagctcccccctcagtggggattatataatttccctcaagcgggggtgggggtgctgagagcaccctccctcaggaaaagttaggtgcaagcaggggtgggagtaagaggaaccccccctggggaaaagggggttaggggtgctgtccccactgcccccccctatttagctggacaatgagtcctcttatgctaatgaggcacttacgtcacttccgctctttctcggccgccattttggctagggcaggttcggggactcggtccgaggcgcttgtattgtctgctgaggggagacgcgggatcagccccctcccccgcccgttgccgccgccgcctccgccggcccggtctcccctccgccgcccgccgggatccatgagctgaactcccgcccccccccccccggccgccgccatcttgtgccccctccccctcccgcaggcagcgctaagggggattttggcgtcttctcagacacagctccctctctcggtccccgctgctgaggagcgagaggagcgcggccgccgccgcccgcgccggtgaagccgcctctcccacaccctccgtctcctccctccgcccctcctttgtctgcaccgctcgacgacgccgccgccgcccgccgctctgctgcgccc

SEQ ID NO: 26886 - DNA, 2300 bp, Homo sapien
gtgcctttacatgccaaaatatgtaaggtgattttaatagacgtgctgaaagagaaattccataaacaaaatggggtcgttaaaagcaaattactgtcccctaccacttcaaagcagctacaccacctgagggtgaggcagctcaaaggtaccaagctgggctgacttcaagtaatttgattgcatctgaaaagttttgtttcctttatcaaacttcattttgatcttaaaagattgattcacaaaccattaaaaggaaacataaattgtactacataaaaaaattaaaacagcaaaaaaaaaaattgcaaaattagaatacaagccctgaacgagatcggttgtatgatagttactttctttaatttagagcttatagaaatcaaaattaaaagattaaacaggaaaaataaaaattttaaaactctgaggggcaaggcatatgaaggcagttattcaaggaaatacaatcaaaacagcaatggttttcacaaatgagtacttccaacaatgttaagtctaatgctcaggcgggctggttgatagggaaacaggcactctgaagaatggagagtccaaacttgtacaaccttttttttctttagagcaatttggcagtaactgtccattttaagcacatttctgtcgacccagcaatcctacctcgaagaatttatccctagtacacaagtaaaagtatgaacgcgtctgctgccaacactgatgcaataaaggagcaccgctatgtgtcaagcacttttctaaatttagctggaaaatatggtgtgaacaaagtccttgttctcatcgacaaagcaaaagccaaaaaacagaaacaaccaaaaggcgctggaaataatccagttcattgccatgacctgattaaataaataacacagccatatggaatgttacctaacttccaaagtaatttgctatgtttgtacatgttaatatgagaaaaagtcttcaaagatttcacagcatgatcccatttgtgcaatcgtaaaacaagttacttcgtactgactccaggattttttgcagtttttaaaaacactgcattaacacttccaaattcgaactccacccaccccccatcccggttctaacaatcacaccaaacatccaccagtgatcagcgaagatgctcttctgctttctcctttccagaaaggttatcgtgcccagcaatagctccctaacccacacacaccaaacctcatgcttatgtaagcactcggcaccggagcggagagtgagagctctcgcttggactcccggctcttgccgcagatcctgaccgcctagagggaggagtgggatcacgctttcagcctcgcttccaagtaaaagagtggccaacctttctacggaaaggcgggggacgggagtactacataataaagataaatgagagtctcacaaaacccaagggcaggaatgagaacccaggacacgaagaaaacccaacaagcatccgcctctgcttccctcgcagggtggccctctccccgggccttcctgtgtgaggcaaagaaggctggacagggccgcttcgcgcagccagctgccgacacccgggccggggaagccagctcatctcattcttcggggagggagacctggtgcgctacctctcggagaagcttttcaccagcagccacacgatgagcggcaggttctcgcgctcgttgtaggtaggtaaaagcaccgaatatttgttctgtcgtggactgcgcacttccagctcccgccgagacctgcgaggactacgactgacttccaaggaggccatggcggaactgagccagatgccggaagcggaattacgtaatgtggcgcggaaaaggacgggtcggaccgtaccaaattcggaagcgggggatgacctgtgtgattgatcgctagttcttctagggccattgcgtggttcaattagaaatattctggatttatacatctttgaagtttaatctgaaggtttcttcaggaagtaaatatctattcatcaccttttcccaagctccataaagttttttagtttatcccagtcgctaggagacagaagacggaagcggaaatgcctttcacgacaacttccggaagaggtcgccatggcttcccgggaggaggtactcgccttacaagctgaagttgcccaacgtgaggaggaattgaattcgctgaagcagaagctggcgtcggctcttttggctgagcaggaaccgcagccagaacggctggttccggtgtcgccgctgccgccgaaggccgctctgtcccgagatgagattctg

SEQ ID NO: 26887 - DNA, 2300 bp, Homo sapien
gtattctatcatctgaaatattaataagatccaagaatttcttaactgaacagtaaacagatccgaagtatataatctgtgaaaatgatttagaaagcattttgactgggggaggtggaaaataaggacatgtaaatgatctgcagtttaaaatgcaaaatcctgtcacgttacatctcacatgtccaagacatcctccgtgtgctgaaaaaaaaaatgatggttctcagaaacggtataatccattaataagtcattcatccaatacataacaatttttaaaactccttataaaaaggagtccacgtattcacagatactgtagaatccccagctcctatgtatattaccgaaaaatgcaaacaagtgtatctttgaggtattatggcaatccacatctttctcatcagactataccagtcacctcagtactgtggaaatgttccatcgattttggcagcccaggccatgaggccccccacaacatcccgaactgttaaagggtctaactcttgagctgctgataaggactggaggatcttcacggctttctgtgagtcatttcccagtttgcaaatcacataaatggggacagcagccccttcttgtgtgccctgcttctcttcccagattgcttcttttaagagtttcaggctctccgcatccctgcgttccaaatgtttcagagggatgtgtagggcatgaggcaaacgacaaatgtccacctccacctgaggcctgacgtccagcaacaggtggaatgccccagaatccagcagtcgcttatagtcggtgacagaaacacgctcctctgggctcagtagttgcagggagcggcatttatcagtggctgaggagccacagaaggcttcatagtccagcagatcagtcacagtgggccgttccccgcaagctgcacagtcgagcctgcggctccgcagccgaatagagcggaaatgccctctcagggcatcaaagagcaacaagctgccactgtaagaggggcccagacccgcagcgattttcagcacttccaaggcctgcaggcagcccaggaccccggtaacgacaccgagcaccccgccgtccgcgcagttggtcactgtctccgctgggggtggttgggggaatatgcagcgatagcaagggccaccgtcataatggtagactgtgatttggccctcgaagcgcaaggcactggcagacacgaggggccgacccgccagcacacatgcgtcattaaccaggtagcgagtgggcacgttgtccgagcagtcagccaccacatcatatcggcggaccaggtctagggcagtggctggcgtaagggcctgagtgtacggcacgcattccactgccgaattgaggcggcgcagcgaggcggcggccgaaaaggccttggcctggccagccagtgcctcgccatgcagcacttggcgggccaggttgctcatctctaccacgtcatagtccacaaggccaaggcggcccacgccggccgctgccaagtactgcgctagtggacagccgagcccaccgcagcccacgattagcacgcacgcggtccccaggcgcagctgtccgtgcacgcccagctcgggcagcactagctgccggctatagcgcagaatctcatctcgggacagagcggccttcggcggcagcggcgacaccggaaccagccgttctggctgcggttcctgctcagccaaaagagccgacgccagcttctgcttcagcgaattcaattcctcctcacgttgggcaacttcagcttgtaaggcgagtacctcctcccgggaagccatggcgacctcttccggaagttgtcgtgaaaggcatttccgcttccgtcttctgtctcctagcgactgggataaactaaaaaactttatggagcttgggaaaaggtgatgaatagatatttacttcctgaagaaaccttcagattaaacttcaaagatgtataaatccagaatatttctaattgaaccacgcaatggccctagaagaactagcgatcaatcacacaggtcatcccccgcttccgaatttggtacggtccgacccgtccttttccgcgccacattacgtaattccgcttccggcatctggctcagttccgccatggcctccttggaagtcagtcgtagtcctcgcaggtctcggcgggagctggaagtgcgcagtccacgacagaacaaatattcggtgcttttacctacctacaacgagcgcgagaacctgccgctcatcgtgtggctgctggtgaaaagcttctccgagaggtagcgcaccag

SEQ ID NO: 26888 - DNA, 2300 bp, Homo sapien
atcaacgtaggcggcatcaagtactcgctgccctggaccacgctggacgagttcccgctgacgcgcctgggccagctcaaggcctgcaccaacttcgacgacatcctcaacgtgtgcgatgactacgacgtcacctgcaacgagttcttcttcgaccgcaacccgggggccttcggcactatcctgaccttcctgcgcgcgggcaagctgcggctgctgcgcgagatgtgcgcgctgtccttccaggaggagctgctgtactggggcatcgcggaggaccacctggacggctgctgcaagcgccgctacctgcagaagattgaggagttcgcggagatggtggagcgggaggaagaggacgacgcgctggacagcgagggccgcgacagcgagggcccggccgagggcgagggccgcctggggcgctgcatgcggcgactgcgcgacatggtggagaggccgcactcggggctgcctggcaaggtgttcgcctgcctgtcggtgctcttcgtgaccgtcaccgccgtcaacctctccgtcagcaccttgcccagcctgagggaggaggaggagcaggtaagagcccacgccccgcggggaaacgcgccaccacgagggaagggactctgagcattgtcacctcctccagaaagcctcctctgattgcacactggctgaatagcatccctggtccctcctgacatcaggaatgtttgtgtgcatggtctgcctccctgttaatatgtgagcatcatgggggtccacgcctgtgcctgtcctggcctccactgtgcccaccactgccctcccccttgccagtgtttagaacagtgtccagcacaaacaggcactcaaccactatttgttgaatgaacaaatgagtgaataaatgggtggtgtgatttttgacgtgcctggccctgagcgaagcacattacatatatcatcaaatttatctcaaccattcggtcctttctcaacgttcctaatcctttgcatcatagtagcccagacacattttctgggtcctgaagataatttttattgataggtatatgtgtgtctacaaatggtgagcatttctttttgttacataagagaatgaatggaaagtttatttactccagggcctgacacggggtgtgtgctacagtctaagggctcccactcatctgggagttcacgggagccggagctgggctgcatgtgccaactacgtcttatctccctagggaatgctccagcaaccctgtgggggaagtgttttcacacccactaggtatttgaggacactgcccaaccccaggtctaagtccagtctgtctttgtaagcatggaaatatggtgtccacgtggcagcttggggacctaatatagccccacaggactatgtgattggcccacacaaggtttcccaaaaatttgacttggttgccaacaataaaagtgaagttttttcatataaaaattcaaaatctcagcttcttttaaaaaaaatcataagatcaggccaggtgtggtggctcacacctataattccaacactttgggagctggaggcagaaggatcgcttgagcccaggagttcaaaatcagcctgggcaatgtagtgagaccccgtctttacggaaaaaaaaaatttaattagccaggtgtggtggcttgcacctgtagtcctagctacttgggaggctgaggcaggaggattgcttgagcctgggaggtaaggctgcagtgagccatgatcacgccactgcactcctgcttgggcgacagagtgagactccatctctaaaacacaaaatttttttaaaaattgtgaggttgggtccctcccctccccctgccccgccaccaacatatacaccagcctgcggtcctacatggcacctcctggggagatccaagtccacaggggcccagttcagtctccttgtgtatgagatcatgggcctttgagttggtgactccttccctgtatatggggattctggaagcttcaagaaagaccaaaagttttcagaggtacaaattgtataggcagtggagaaataggtatggcggtgtgaactgaacgtaaatatcatgccagccaatatttattgagcactgactgtataccctgcatgtgctaagtgctttacgtgcactctcgaatttaacattagaagtactcaccatgtcaggatttttccacttatgtatgtggaggaagtagcagtagctgttgcattaataatccacagaggcttactggtacttttggtatacattgaatttatttatttatttttaaaaga

SEQ ID NO: 26889 - DNA, 2300 bp, Homo sapien
taaagcacgtttcttcccccagggagcaggctgcctaatgaaggagccaggcttgcacacagacaattctagaactggtggtaagtgccgtgaagacgggtgcaccagttgtaaggggaggggtgctcattttagctggaagagccaaggaaggcttcctggatgaacatggctgtccagttcagccctgcatcctcaaggtgatgtttgctgacccctgagcaaacgtggcattgctttcatagttgtgcatttctttgtccattgcttctgatttatggcaagtggtatctgttttccattaatggaaacaatattagttgtccctttaagataaataataataggccgggcgtggtagctcacacctgtaatcccagcactttgggaggccaaggtgggcagatcacctgaggtcaggagttcaagaccagcctggccaacatggcaaaaccatgtctactaaaaatacaaaaattaaccaggtgtggtggcacacctgtagtcccagctattcgggaggctgaggcacgagaattgcttgaacccgcggcgcggagattgcaatgagccaagatcgtgccactgcactccagcctaggcaaaagagcgagactctgtctcaaaaataataataataatagacaatagttactgaatacctactatgtgccaggcactgcattaaatgctcctatgtacataattcacttaggcctcccagcaatcttatcaaatcacgtggctgtacccattttacagacaaggaaattaagacacatcaaggttgagtcacttgcccaggctgtgtggctccaaagtctgcgttcataaccattaaccaggcttctccacctcagcattaaggacacttgggaccagacaagtgtctgttgtggggactgtcctgtgcattgtaggacatgcaacagcattccctggcctctacctactaaatgccaatagcaaccccagtcatgaccagcaaaaatgctcccaggcattgccacatgtcttttgggagactaaatcagccctatgagaactgtaggtctacactaaattgtttttccaagccaaataaataccaaaaaaaaaaaagttaatttaaaataaaatgttaagtaaataacagtacatgtgtcacctgaaaatccactaggatgtcagctgcctgggatcagagaccccttcacattctgcacacggctgcatccccagtgcatagatggatatgggagaattgtgaaggctgggagatgctgaacaatgttgttgctatttcactattaggtgaatgtctttgtcagctcaggctgatgtaaccaaatattaataccacagactgggtggcttcagcaacacttatttctcccagttctgccggctgcaagtctgagagcagggcgccagcagcactcttctctgggtttcacacttagatgcctccctgagtgctcccatggcagagagaaagccctagtgtctcttcctcttcttcttttttttttgttttgttttgttttgttttgtttttattttttgagatggagtcttgctctgtcacccaggatggagtgcagtggcatgatctcggctcactgcaaccttcgcctcccatgttcaagcgattctcatgcctcagcctccctagtagctaggattacaggtgcacgccaccatgcctggctagtttttgtacttttagtagagacagggtttcaccatgttggccaggccagtctcaaactcctgacctcaggtgatccacccgcctcggcctcccaaagtgctgggattacaggcgtgagccaccgcgcccggcctgtcttcctcctcttataagaacacgaatcccatcgtgggggcgttgctctcataaccacatctgaaccaaatgacatctcaaaggccccacctcctaataccatcccattgagggctagggcctgcaacctatggatgtgggggacaaagattccatccctaacagtgaatatctgcggaatctgcattctcagcaaggtgaagctaggggtggtcactgagggtcttccctcccttctccccacaggcccgagagggatgtgaaggcccaaaatgaccctcttaccgggagacaattctgactacgactacagcgcgctgagctgcacctcggacgcctccttccacccggccttcctcccgcagcgccaggccatcaagggcgcgttctaccgccgggcgcagcggctgcggccgcaggatgagccccgccagggctgtcagcccgaggaccgccgccgtcggatcatcat

SEQ ID NO: 26890 - DNA, 2300 bp, Homo sapien
agttgcagtgagctgagatcacaccactgcactccagcctgggagacacagagagactatgtctcaaaaaaaaaaaaaaaaaaaaaaatttcagatgggaaaggaaggcagaagcctgatccaccacaagaggagtgtttctcaatatgtaatccagggaccctctgacaacaaaagcccaccccaccccactcaggcccctcccccacactgctggttggtctctttgatgtttctcagacatgcctccttctctcctgcttgaaggccagtgcctttgatgttctgtccacctagaaagctctcttcccatcttgccagatgggctccttctggctcagggctccatgtaaccatcacctccacaggagccctcccccattattctatctaaagtggcctctctggcttcattctgcaatcacgtatttcagcagtttcccaattctgccaagcccccagtagaaggtgagctcttggaaacaggtccttaggcagatccttgtctgtccaggcctccacctcaccagtaagccagtgtttttattcttgttgttttagaggctggatctcgctcagtcacgcaggctggattgcagtggtgccatcatagtgcactataacctggaactcctatgctccacccggctgggactgccgcgcaggctagtgtgccctgcgctcatttcttagggttaaccctaacccacttaatgagcacccacgactccccaacccgagccccactcaagcagaaggcctcaggctggtcggcagcagggtttcttcatgtcctttcttggttctctgatgataggcaaaggcagtagagacagaaaggaaaagaggaacggagtgcaagagacagaaaggagaagaggaacggagtgcaagagacagaaaggagaagaggaacggagtgcaaggcaagccaccctaagaggccagccctgccagcagcacagatccctccaaaccaataggtccctccaactcagtagattcctccaacccaatagatccctccaacccaacctccagcatctgtgcagcatcctaccaactccgaggctaggcggccacactgggagcaagaccccaggacctggtccaagtgccctgcaccggccaggggagtggacgacgaagtgcggctctgctagcccgggagggctctggggcctcggccccgcgggactggaagggaaaacacctggcacggtacgtactggccctaggaatttggcacagcaagatgctggcagtccctgggtggcggtggcaggaagggcccaagggcaacattggtctaggaggtcgagaaaaggcgcgcgatatatggcccccaggatgtggaagcttgcttggagcgttcggctccagggcagcagcgcgtggagggcctcaaggatgcagtatttgcccggggtaggggggcgagggacccagaggcagcagtgcacttggacttccaggacttccagggaaaggcaggagacatggcgcatgtggttcccaggatgtgtaagcgcgtggagcgcggccccggggcagcggagagtggggttttaatatctagcacatgtagaccctggggcggtgctgctaggggcgcggacccgggaccaccggagcacttgcaccgcggggaaagctgacagggcgcgcgaccctaggaggctgccgcgccgcctggtgcgtgaagctccagggcagcggagcgcggggaccttgaaggctgtcgcgtgcaggcgaaggggccgcagggtggtcgctcctgggagagcagacggggaagaaggcaacgggagggagggcgtagcgcgagcagtcccggacgcgggctcaggaactggccgcgaggagcgcaatccagcaggcgcgccagggcccccggatccaaggtgcggggtcccgattgggcgcctggacgccccgtgacggtggcgccgctgccactgtcccgaagcgaggcgaggccaggcgctgcgctttcggctgcccgccccttctccccgccccgcgctcagtcccctccctccgtcccgcctcctgcctcgctccctccctcggcggctgctgcgccgcgctcccggcgcactcggagcccggcggggaccgggaggcagagacggggcggccgtggctccgagggcgggagctgagccgggccccgggaccgaagtttggcggcggctccgggaggcagagcgggctccccgggcgacttccaggcccctctcgcgtcctcgccccggacccgtgggcagccggggggaacggaagccgcggccgggcca

SEQ ID NO: 26891 - DNA, 2300 bp, Homo sapien
ccacacattggaagcatctggtgagcttttacaaaatactgatgcctaagtcccaaccccaaacattctgatcaaatcgatgtctggtggtgctcaggtcgttgaatacaaattttaacagctctccaggtgattctaatgtgtagtctgggttaagaaccactggtctgagtgcaattttgaaaaccccgttcataactgtgctactttgctttcagggcataagcatgatgaagggagaggctgtggcttgttgatggttgcatccccaacatcttgtggcagtgccaggcaggtgctcaataaatatttgtggaatgatggatggcttggcacaaatccccttaatggagctgagatggctcccctgaagaatgcgtgtcctcaattcctcctggcacatggggaaggattcgaatcacttgaggtcaagctgtggttctcacgaggatcttaagacctctcccgtctaatcttctcatcctcaacactggctgcaccttagattcatctgaagtttaaaaaaattttcaggccgggcgtggtggctcacacctgtaatcccagcacttggggaggccgaggcgggtggatcacgaggtcaggagatcaagaccttcctggctaacacagtgaaaccccatctctactaaaaatacaaaaaagtagccaggcatggtggctggcgcctgtagtcccagctactcgggaggctgaggcaggagaatggcgtgaacccagaaggcagagcttgcaatgagccaagatcgcgccactgcactccagcctgggcgacagagcgagactccgtctccaaaaaaaaaaaaaaaaaaaaaaaaaaaaattaggaattctgcttcagtgggtttggattgcagcccagcacgggagtttaaaaaggtgtcccaggtgattctaatatgtgggaagggttgaagaccactgttttgatcttttctacctctgtgagtctgtttccaacttcagctaagttggtggagccccctggcagagttttattggagggtgttctttagttactgggtccttatgcagtgtttgccaaatgtacctgttcattaatgctcacgttgggtgcttaattaaaaatacacattcacgagtctgtattcagacttatggaatcagaagctccagggaggggcctgggaatcatgctttaaacaagcagccaggcgtgtttgtcacttgccaaccgccccatcagaactgtactcctcgttctccctccagcacacccagccccttcgagctctggctctgtgttttggttctcactgccagaacacacttccccaagatcgcctcatcaatcaggtttcttcaaatgtcacctcctcagagaggtcctccttgaccacccaagggactaaagccaccccaacctttatcccataccctggtgagttctctcctggccccataagcagatgctttttgtcctgtttctctccttcaggcctctcccactaccagagcctgagcttccgagggcaacagtgtctggctccggctgggtgcccagcacctggcacgtggtaggtggccaggaggcatagctgtaacgggggggactagtgctgtcagtccgattccttcctaggcgctggggagttgagttcagggccatgcaggtgtctgaagtactgtgaaaatcatgccgcccccgtgggcacacggagacgcctggagacacgggtctgcaatagaagggggtggatacccccttccaccccatggagaagaaaagcaggaaaaagtgtggggccagtgggtcccttagggcaaaagtcctagtggcggcagctttcttgtctagaccctggttcgcgcagcgcgtgtcgcactcacccgtggagggtgggagacagcggccgccccagcgcccagcggtggcccgggacagtgtggtcaggtccgcggacagcctccttcctcccggcaccggccagcccaggccgcgcgcccctcccctccggtcccctggtggcggccccgcccccgccggcctggccgccctgtccccgcctccacgccccccccccccccgcctccccgggctgcaacaggtgcctccggagcaggaagctcgcgccgccgtcgccgccgccgctcagcttccccgggcgcgtccaggacccgctgcgccaggcgcgccgtccccggacccggcgtgcgtccctacgaggaaagggaccccgccgctcgagccgcctccgccagccccactgcgaggggtcccagagccagccgcgcccgccctcgcccccggccccgca

SEQ ID NO: 26892 - DNA, 2300 bp, Homo sapien
caagtaacagagcttggctgctgtgccacagtgacagagatggtgtcacttgggcctttgcagcctgcaaacccacccccattactgacctggaacttcaggatgatccttctgaccttttcagagaatgtgctcagtctctgaatcacccaggtaggtggagtttggttaccgagtgccctagatacagacacatgcagctgaggccacttctggttatgaggagacggcgggtgcgggaaggtcagctgcgctctggagagtctcacagagtccgctttccatcctactgtgttggctgatgagttcagcctgagaggaggcactagaattctgcctgcttctaactggaaaagcgggctgtctttcgtcgggttctggaagagtacaagaacattacagaatatagtcaggggttccctgagctgtgcgccgtgcgaccttccgtggtctggtcccatctttcccgtgggtcctcatttcctcttccgtcgccctcagccccagccccactggccttatggctgttcttcagacatgacagccactcccgcctcagtgcctttgcactggtggttccttctccctggaatgctcttcctcctgggattggcttggctggccctcaccttttgtgggtgttcactcaaatgttctgttcctcagcctctaaaattgtaccatcaccccctacacacacacacacacacacacacacacacacgtcttatttcctctaccccattatatttttctctttagcacttctctaacacacatagagtttacctaatttatttgtttattgactcgctgaccgggatgaaagctcttcagggcagacatttttgtccatttttgctcatgggtttctggtgcttacagccagccccggagcataatagacaagcagtaaatatttgttagaggcatggttgggacttgggtgccggaggctggcacagcacatagctcctatcgcgtcagccaggtcttacctatggcggttttctctcccaggtactccacaatttacaccatgtttcctgtgttttctctggtcctggacaaagatgtcaaatcggaagttgccatgctgtatcctgagctctacaaggatcttctcaaggttctgttagcttttcagtccctccttcctcctttcctcctttgcttttcccttccttccctccctccctgctttttttctttgaatttatttcacacagaccctccaattctgatttgaacacacttgaactggtagcttttttacttttggggggaaggtgtgggagtttacattttttcttaaagcagtaatatattcactggtataaagaacgtgaaaaagtacagtaatagataaactgaaaacaagccaactcacgacttgcaaaaagcccctgacagttccgctttgcagttgcaacttaacgtttgctcccagagatgttcttgtgtacagttccaaaaagtgtgtgtggtggcgtgtgcctaggcaggtgtataattttatttgtcttcagggttttttacccaagggaaggtttattcccatgtaatgttaattttaatgttaattctttttttttttttttttgagactaattctcactttgtcacccacgctggagtgtagtggctcgatctcggctcactacaacatccacctcctgggttcaagcgattctcctgcttcagcctcccgagtagctgggattacaggcgtgcaccaccatgcctggctaatttttgtatttttagtaaagaggaggtttcaccatgttggccaggctggtctcaaactcctgacctcaagtgatccacttgcctcagccttccaaagtgctgggattacaggtgtgagccaccatgcctggccaattctttttttaaagaaataattcctccaatgtgttcagatgtgtgcgagccactttattgatgaagacagatgggttgccttatctcgttagcgggagaataacgtgaaagctgatggcatgctgcgtgagccccccgcgaaaccggctctaacctttctctgtctctcattcagggacggccgttgtcctacaagacattcttaatatgggttttgattagcatctatcaaggtaaggatgagtggagacacctgtttgtcttgtgctctggtactgactcagggtgtccccttcttgcctgtagaacaagaagagaagaaacgaatctgaaatagcaggaaggagggtggcagtgggacccaggggagaccctgctcaccctgtataaggacttgaacatcagacatgcac

SEQ ID NO: 26893 - DNA, 2300 bp, Homo sapien
cagttctacttattgtttaatgacaagatttaacgacacacaaaaattagttaaaaacaaatcttatggaaccgattaaagagagttgtttcaataggaaaacattggaatgctctgaaaaatctcaatggtagtgaaatacttaaaaaataaatgatattaaattatgttaaaatgtaaaatatgtgagacactaaaagtctagagttgtgcacttatattatttcgtgtctttaagtctttaagttctttttttttttttttttttttgagattgagttttgcttgtgtcgcccaggctggagtgcaagggtgagatcttggctcactgcaacctccacctcccgggttcaagcgattctcctgcctcagtagctgagattacacgtgcctgccactatgccttgctaatttttgtatttttagtagagacaggatttcaccatgtttgccaggctggtcttgaactcctgacctcaggtgatctacctgcctcggcctcccaaagtactgggattacagacgtgagccactgtggtgcccggcctataattactttttatctctctcttagctgaacatttgtaagttacatgggcttgttacaagatagcagcatcataaagattttgtggtgttgctcctgtatgtgaatttcacctatcaccagaataaattctctcttcctctctgggctccctcacagggtgtggggccacctggccccaactggccccttccactttcatctctcgctgttccctgctttcctgatgctttacgtcttgctgaaggagttctagcctttggccgtgtgcatgctgttagctattcacctgtcccactttctcacatctcagggtgcctttcgtctgttattggtaaacacagtgtccttcgtctgtctaattctggcctcaactctcccacagagtttgttgacagccacccctctgattctccaacccctttcatccattatttgtttattgcctcctcccctccactggaattgagtttcacgtatccccagcccttagaacgcctggcatacagcaggcgttcagtaaatgctgtctggctgttgagacagggtctcactgttgcccaggccggagtgacatgatcacggctcactgcagcctctatctcctgggcacaagcgatcctcccacacctcagcctctcgaatagccgggactataggcatgtgccaccacatccagctaatttttatgtttttggtagagacagggttttgacatgtggccaggctggtttggaactcctgggctcaagccatctgcctgcttcggccttccaaagtcctgggactacagatgtgagccactgtgcctggcccagtcatgttttttgggttgaatggaactcactgcttttattctgtactgtggagtcagatgcaggtgtgaatcccagcactgacctgttctaactctgagactttgggggaaggtgggacatcctgagtctcctttcctcgtctgaaagctggagatggaactaccttcttctgagggctattgtgaagattaaatgaaaccttcaaaatctgtacagtgctgagcacagaattagcatttaatgttagcttttactgtttatctaaacatccagcaaaaattatatagtctgatcataatcctataaatcaaagcatgtagcaattataaattaaaaagtaaatcagtcatttggaattagttagcttctttctttttggtggtgttgaaaattaagacttttttcccccggtactttgcatctaagtcactgttaagtggtgttgaaaattaagacttttttccccccactactttccatctaagtcactctgaaggcaaataaatgatctttcatgaagggctgaagttattccagtgccctgtgaagtgggcatttatttctgcaacggcctctgtagcggttgaaccctttcctggagaggcaggaaataatggtgctggagtcactggcagctgtgtgtgggagcgtgtacttctgggtgtattgtgtgtttgcaggctgggcactctgtaaagacgtgttgaattgaaatgaattaagatggtgatgtatcttgaacctgctgctttgcaggcacagtgaaggtgaagagttctaacatccaagttggagaccttatcatcgttgaaaaggtgagcagaatctggaagcttgtgtgtggataccacttcatgggtcctaatgtgtcatttgtgtatctggtagacgaagtgaatgttgaattttgggattctatccaaaaactttgcctg

SEQ ID NO: 26894 - DNA, 2300 bp, Homo sapien
tatggagttgaggtcatgttgtggacatagctttttttttttttttgagactgagtctccctctgttgcccaggctggtgcacaatggcgtgatctcggctcactgcaacctccacctcccgggtttaagtgattctcctgcctcagcctcctgagtagctgggattacaggcacgtgctcccatgtccggctactttttttattttttagtagagacagggtttcatcatgttggccaggctggtcttgaactcctgacctcgtgattcatccgcctcggcttcccaaattgctgggattacaggcgtgagccactgtgtgcggccatttaactttttaaaaattattttttattttattttttgagatggggtttcactttttattttttgaggtgggggactcattgtcacccaggcgagagtgcagtgacatgatcttggctcactactatctccgcctcctgggctcaattgatcctcccacttcagcctcctgagtagctgggactacgggtgcatgccaccactcttggctaatatttgtattttttgtagtgatggggttttaccatgttgccatggctggtctcgaactcttgagctcaagccatttgccaacctcgccctcccaaagtgctgggattacaggcatgtaccaccacgtctggacatgctgtggacgtaactttttttttttttgagatggagttttgctctgtcacccaggctggagtgtagtggcgcgatctcagctcactgcaacgtctgcctcttgtgttcaagcgattctcttgcctcaacctcctgagtagcctataggtgcctggctaattttttgtatttttgtagagacggggtttcaccttgttgggcaggatggtcttgatatccttacctcgtgatccgcctgcctcagcctcccaaagtgctgggattacaggtgtgagcctctgcgcctggctggacataactttttatttctttttgcactcaaccttatagcataagcattttccgcaaaaacctcctcctaaacaacagagcaaggctccgtctcaaaaaaaaaaaaaaaaaaaaaaaaaaagaaataacacagtctggacgcagtggcttaggtctgtaatcccaacactttgggaggctgaagtgggaggatcgcttgagcccaggagttcaaggccagcctgggcaacatagggagaccctgtctctacaaatagcaaaaaatttagctgggcatggtggtgcatgcttgtggtttcagctacttgggaggctgtgacaggaggatcgcctgagcccaggaattcgaggctgcagtgagctacgatcacgccactggactccaggctgggtgacagagcgagacctggtctcaaaaaacaaaaccaaaccccaaaacacacataacatagttgatgcccctgtgtgcccctccatgttagattttaccccttccccaggaagtaactactcttctgaatttggtatttacaatttccatgtatatcattatttactctttcttttacaaatgatacttttattacccatgtatgtttttctaaacaacatatggaagtgtttaagctctatgtgaaaagtatagtgtaaattgtattataaagcaggatttttttttttttttttttttttttttgagacagagtttcgctcttgttgcccaggttggagtgcaatggtgcgatcttggctcactgcaacttcctcctcccgggttcaagcaattctcctgcttcagcctcctgagtagctgggattataggtgcctgccaccacgcctggctaatttttgtagttttagtagagacagggtttcgccatgttggtcaggctggtctcgaatcctgacctcaggtgatccgctcgcctcggcctcccaaagttctgggattataggcgtgaaccaccacgcctggctgcaggaatgtttttagatgttattcatttcccaccaaatgttccagatctcatcagacaagccctgaatgtctttctctgttgtctccctccattccaggtgctgttcaaccagttcaaatactttttcaacctctatttcttacttcttgcctgctctcagtttgttcccgaaatgagacttggtgcactctatacctactgggttcccctggtaagttaatcggcattgtttgttcagtaaccttagaggtttggaaacagaaagttctttgtttctctcacttaggcatctggaatgggatggtggccttgtaagggaaaggatgcccttaggccaatacattgggagtctc

SEQ ID NO: 26895 - DNA, 2300 bp, Homo sapien
gttgagaagagggtgtggagtttgaaagggggatgtctagcaaagcagatgggagatggtgggacccacactgatgccataattggtgtgtcagggtgtttatccttcttccatgcaagaagcctttattgagtgccaacttgtgccatgctatgtacgaagcatcattttagatgtagaagagacagcaggaagcaaagcacaccaggcctgttggctggagaatgctatttcctctccaaatgtgcaatgcagcaattactaatgacatgcttcttttcttgaggaacttctctggtgcatgagataagtcacacttcttggtttgagatccacctcagacactgggatatttggtggctccatcctgtgtgacagcaaacacaaaaggcatccacttgctggcagttagcactaacttaaaaaaacaaacaaataaaacaaaataaaagggccaagcgcagtggcccgtgggagcagggaaaggcttctggtgagagttggaaaggtggactgggccggatgctcttccttcatcccaattaaatctctatggcatttagcaaatgccaaggaagagcccagcactttgggaggccgaggtggacagatcacatgaggccaggagttcaagaccagtctggccaacatggtgaaaccccatctctactaaaactacaaaaattagccaggcacatgtataaccccagctacccgggtagctgaggcaggagaattgcttcaacctgggaggcagagattgcagtgagctgagattttgccactgcactccagcctgggcgacagagggagattctgtttcaaaaagaaaaaaaagaaacggcgtccaacatgatcagtcattagatgtaactatgtaaaagtcagctttagattagtttatatggtattattacaatttcaggctctttagttacatattgatttttaaactccctcactttgttccttccctctgttttttttttcctgctctcataactttatcaggcctttgaaaagttcatgggtcccagacactgtgtgggagggtgtggaagtgagtgtggatgtgggctgcggtggagataggtgtgtgtgtgagaccgtgaatcacagtgacaggtaatgcagggtgactgtctgaggcctgagagtggggcccatgtgcaagcccaagaaagtggctggtgtgagaatgagggtgttcagactattgaagggtgtttggatgaaagaggcaggtgcgtgtgtgtcatggtgagttcccagaatccagatagagaatgagggtgaggatggtgaaggtcagagggtgaaggagtctgataagctgagggtccctgtgtgactgtgatttctgcaggcacatgggtgtgaggcttgagaaactgggtgcatggatgatggtgaccaacaggagggtgagagtgttatgtgtgtgtgcaggactcacatgtgattgtgaatgttagatgttgcaggcagtgagcagtggcaggtgtgtgtgtagggcctgggcgtgaatatgcacgttggtgcaagagtgagtgagaatgactgactgatggggtgagcgtggccgggtgcccgtgtgattgtgcatgtcagatattggtggggatgagtgtcacagcgcgcgtgtatagggctgggatgtgattgtgaatgtgggattttgcggggggtgcggtggcagggtgcgcgcacggcgggcgtgggcggggggcgcgtggccgggtgggcgcgcgtggggggcgcgggcgcgggccgggggcggggacactgcagcggtcgcggcggcgcggacacggcccggccgccccccgtggcaggcgcggcgcggcgcggagcgagcgggcgcagcgcggagctcgggcccatggtgcgcccgtgtccgtcggtcgggccgcgcgggcgctccgcgcgtggcccggcgctcgcgagctcgccccctcgctgcgggcccggcccgcccgctgccgccgcctcctcccccggggcggcgcggcgccggcgggcggcggcgcggaggccggaccgggcggcggcccaggcggcgcggggggcgcggcggccaaggcgggcggcgccgccgacatgacggacaacatcccgctgcagccggtgcgccagaagaagcggatggacagcaggccccgcgccgggtgagtgggcctgggcccgtgttttcctttgtccgcgcctcccggagcccggcgctcgggccagcctggccgggcctgacaggttggccgcgcgccgcgcccggcgccatgagcctggggcagggctgggga

SEQ ID NO: 26896 - DNA, 2300 bp, Homo sapien
ccagctcagccagtttctaattaagtcacttcatgtctttgagcctcagtttcaaaatggagaggacaatagggccaacctccatgggaagataaaacaaggcggtgtgcattcatttaatgcagtctgtggcatgtacaaggggctcaatcaattattattattactatcacttggagagtcaagcggcacaattttgtctcgtagtaaggctaacatgttacaactatcatctactaaaataaatataaacaactatataaatgaaattttccttaacccaatagtattttttgagccataaacccactgcacattcgtttagatttgtaagttagatctcctgccacactatcttacacagaaaaggtgttgagaatattagtagattagtcagcaaggcaggtgctaattggcctttttactcagtatcagaattctaaactgcttctatgtattattaaaccaaattcttaccttttcaatctggctgttggctataattctgtcttacttgctttaaatattatacataaaataaggcaagactttttcagagactcaaaaattgaaggttaatcttccttcaacaagtttttactgatggccacgaatataaaaaagatgatcaagctgatttattttctgccttgggttgtccaaatacccaggtgaacacattgatgagcccagcattccattttgcttgtattcctgatgagtttacaagctgggaacgtgatgaataactaatcaagagaatgcaatgcacaaatgtggagggagggtttatatctgcacagtcccttacaatgaagtaaatgccaaacaaagacgcatgcccagagcagttatggaaagaccaatcaaagacttagcaggttgatgatttcatcattcatttaacatttattgagcatgtacattgtgtaaagcagttagccaaattaagtatacatgaatttacggtataaatgtgtatacatgtaatatatcatatacacacacacaagccccactttaaaaaattccaggcatcatgtgtcaatgatacaatcactttgaacgatacaccttttctgtaataatgtgtgtattgcacaaaaaaattccaatagtgattagtaacaaccagatactgtgacagtgccccattgccattccatgggagatgcaagagcattgtctcagtaataaaatatgatgttatcaggcatttatggctcctggggaaaaaaatgcaattgcttgctgttttgatattatctctgactatgcttgcttatcatttgccatttctatatttagtagccagtcattttgaagttaaaaaaaaatcaaggtttgcattgtaaccacaaaccagtctttgtgaacaggaatcctggaggctattaatcagcttttaaaggaggtaagtcatggtggtggtggggtatctgaaattttggaagttccgagctcactttaagagttgagatgggtgggagggctgaaaacaccaccattcatcattcttcagttatctcgagactcaacttaaacatttttaatcaaaaagatgggaggggacacgggtcacatctcaggtttgggggaatgtgtgtgcgtgtagatgtgaaaactgagccaaaatattccactgtgaagagatctcccttctcggctggtggacatcaaccttaccaagtaatctttggagcaagtaactaccaaataaagccgttccaaaacttctacgtaagctcctactttttaatgagtacgcatttctccccattttcttttcctctccaaggactgagatagctggagcaaggatgggtccccctctgatttcgtccccgccccagccaatctgagcccggatgctaattagctgcgctcccctgatgaacacgcctttgtcacaagtaggcccggactacaaagcccagaatgcctcacccctccctgatcaatgagggcttatttaaatgatctctgaggtcttggacccaggccaatcagctgtcagggctcatgataaatcgcaatgcattattgataataataattactgggacatgcgcgttccggccgaaggggggtaaatttcccaactccaggaatttgtggcggagagggcaaataactgcggctctcccggcgccccgatgctcgcaccatgtcgaggcgcaagcaggcgaaaccccagcacatcaactcggaggaggaccagggcgagcagcagccgcagcagcagaccccggagtttgcagatgcggccccagcggcgcccgcggcgggggagctgggtg

SEQ ID NO: 26897 - DNA, 2300 bp, Homo sapien
gagtctcgctctgtaacccaggctggagtgtagtggccagtcttggctcactgcaatctccgcctcccaggttcaagtgattctcctgcctcagcctcccgagtagctgggattacaggtatgtaccaccacacccggctaacttctgtattttcagtagagatgccatgttggtcaagctggtcttgaactcctgacctcaggtgatccgcctgcctcgcctcccaaagtgctgggattataggtgggagccaccgtgcctggcctgaactcattttaaaggtcattgagcctctacgataccccaccaggactcaccaggatgcctatgggggacgtcactgtggctcagttgaaggggctgcgtgaggacaagtcagagaagagccttccaggtagagcctgggtggagagctggagacacaagagaccatttggagcagggcatctgctgggggtgcagagcaactcagaggcccctctgaatgttcttttctgggataagccctgcaggggatatttatgctattcctggagacatcatggcctttcttagaaaaggaagcctttttgctctttcaatttctattctgtgggttggtttcctagggatattgctcctggtgagaagacctgctcatggacctcccccaaacctggccaggacctgttcatagaatcttccgccacccagatctgagcttggagcccagaccagtaccttcagaagttgttcgcattgctttgaaagaatgtaatgtcagaaatgcttagagaaagagtatacttttctctccaaatacaatttctataattaggcaaggcgcagtggctcatgcctgtaatcccagcactttgggaggcgggcggatcacttaaggtcatgagttcgagaccggcctggccaacatggcgaaaccccatctctactaaaaacacaagaattagcttggcgtggcggtgggtgcctgtaatcccagctacttgggagtcaggagaaccacttgagcccaggaggcggaagttgcagtgagccaagatcacaccactacactctaccctgggtgacagagtgagactccatctgaaaaaaaaaaaaaaattcaataaatagactctcatcatggatccattgtacttacacaaattcagctacatacatgcattaagaaaaaagaaaaatgggccgtgcgcggtggctcactcctgtaatcccagcactttgggaggccgaggcaggtggatcacgaggtcaggagatcgagaccatcctggctaacacggtgaaaccccgtctctactaaaaatacaaaaattagccgggcgtggaggcgggtgcctgtagtcccagctactcgggaggctgaggcaggagaatggggtgaacccgggaggtggagcttgcagtgagccgagatcgcgctactgcactccagcctgggcaacagagcaagactctgtctcaaaaaaaaaagaaaaagaaaaatggtggtggtggagatgataaaacacacaatcatttggagaactttcaccttttcagaatgtatttggtaatgcagtttggtcctcccaataactctatggaagtcatttattttttcccccatttcactgaggttcagaggtttttttcatttctgagtccaaggtctcagacccagaaacagtgacgttcagaggcaaccccaggtcttctgacacttctgcccagggacctacttccgtcttgccagaaaaccagagcatttgcaattcaagcaaagcctaaagactctcaatgcaccagcctgtccttctgcagcccgggagtcatgctcccagcagaagaggcagtgagaaagcgaggggctcagaaatgtacccactggatggatcaaggccataggagcgtatgaaagaatttgctggttctccctccatggccatccccacttttgtgtagtaatagatgtggacacatggccaaccagaacaaagagctcagctcccctgtgcggtctcgtgactaaatcctaggctatggggagagcattccagtgatgtgagaggcctcggaggcacatccttctggggcgtgccttcccttcattgtctcccctttctgctggctggatggggatgtggaggagaggacccttggaccatggggatgggagcaacgtgccaggcatggcagcgcaatagaggtgggttctaccaaaggagctgctctacccatcctggactgcttctatctggatgttggtacgtgagaaagacatggattactttctttcttttctttttttttttttttt

SEQ ID NO: 26898 - DNA, 2300 bp, Homo sapien
aaggaatacatgtaggtacaataaaacttgctaaagagacaaagcaaatgaatgagatctgtaggagtcaggctgttgattcttaagttgtagggcagaggaggggaggggacatcaggaggccatataaagagagatgtaggttgtggttaaggtcctactttggggcagtaggttccctagtacttattatatcataataaacagaggtgcaagcaagcagcctaaaaaatgtaggcaagtgtaggctaacaataggccagtaataatgcctcatgtaccaataattgattgtgtacacctgaggtgaaataacaacaaagcaaatgcaaacacatgtacacacctcaagcagtataagagggtctcagatgtctcccatccccccatgcacccctctttcaacttccccagaggcaaccactgtttatccagtctcctcaaaaggagatatgataaacgtgtgtgtatatatacatatatattttttgtttgtttgagatggagtctcactctgtcgcccaggctggagtgcagtggcgcgatctcggctccacctcccgggttcaagtgattctcctgcctcagcttccccaggagctgggattacaggcgtccgccaccatgcccggctaattttttgtatttttagtagagacaaggttccatcatgttggccaggctggtctagaactcctaacctcatgtgatccgcccacctcggcctcccaaagtgctgggattacaggagtgagctaccgcacccggccacgtgtatatattttcaaatgtctttacagatccgtgtaactacacatacatcccaaagaagacttgaagcgttgtgttttttaaaaagtttaagtctcggaaatttaacctgacatgacttcaccgggcattacacaaatattcccaagtcgattcacaacctgaaaatcaaggggaagtttgaggaaaacaggtcagcttttgagaaatggaaacaattaagcaaaaatgccgttctcgcaggccccgccgtggggttcgccaacggtaacctcacagaaggctcgttacagatgctgctaaccccacaggaccaccccgtaaaactcatacgcggcgctgttaaaaatacagattctcaggccccgccccaaaaactcggagatgagcctggctgggtctttttgaaacaagggcccccacgtgattctcaggttcgggcaagcttggggcacaacccagtcttaagtaactccctaatttgaagaaagtaaacacctgggggatgtaggtggctttcttgcttcccattggatgtcaattacgcggcgcaaggaggggtctccctcgggtctcatcgaggtcccagccagtctgagcatgaacgctaattagctcaaccccccgaggaccacgcctccgtcacctgctgggcggggccggcgccgggttggccccaaaagcactcctgtgtggtccaagagccggtgcgcccgagtcacggggcgggagcgggcgcgtgctatataaaaacacacatttctggcctcggccacctgaatccagaactttcggaatctgcatttctccctgcagttggagacactcctcatttaaaatttaaatttgggtatgcagcagggttgagaaccaggagtggaggtcgtgcttctcagcttggatgcacatcagaatgacctgtgtgtgtgatgggggtggtgagggagggagacggcttttttaaaaaaacatcccagtgcccaggtcccagcccagaccaattaagtccgaatctaaaagcgcagcctgtgcagcgcagcagccacagcgccacctgggagctcgttagaaatacaggagctcaggccccaccccagacccactgagtcagaatctgcattttaacgagatccccagtgactcgtgcgcacattaaagttggaggagagctgcgcttctgaaattttaatgggcaaacgaatcacctggggatctcgttaaaatgcagacacggtttctcaaactttaatgtgcatgcgaatcacctggggatcttgttaaaatgcagattctgattcagcgggtctggggtagagcccgagagtctgcatttctaacgagctcccaggtggcgcgggctgcccgggagcggaccgcaagtccgcgggactcctggggtcttggctccaggccaatcagccgtcaggactcttgataaatcgccctgctcggctgatgagcagaattgccgggacatgcgcgttccggccgaaggggggtaatttccgaactccgggaattcgttgtgt

SEQ ID NO: 26899 - DNA, 2300 bp, Homo sapien
cacagccagttacatctagctcattcctgccccagggtttttgctcccaccagttcctcaggctggaattgctcccccctcatcctcacatggctgcatcctccccggctccttgttcagatattacctgctcggaaaggcctgctatgaccagttctacagccactattacagccccattttatggtctttggagcccttatcactagcaaaatgttgagaacacatggacacaggaggggaacatcacacaccagggcctgtcagggggtggggggcaacgggagggagagcattaggacaaatgcctaatgcatgtggggcttaaaacctaggtgatgggttgataggtgcagcaaaccaccatggcacatgtatacttatgtaacaaacctgcacgttctgcacatgtatcccagaacttaaggttaaaaaaaaaaaaggaagttttatatatattttttatatatataaatatataatatataatatataatattttatatataatatatattgtatatatttatatataatatatatatacataaatataaatatatattaaatatattaaatattatatattaaatatatatatatttacagtactgatttgattatttcatgttgactgcctccctggtctacctccagcagctagcccagtgcctggcacttcacaaacacttgagaataaacagctgctgcaggcagaaaccaagccttagaggcagcagcagggaaaatcccattcattatacaagccatatttactaagcctactatgtgtcaggcaccagccaagtcactggactacatcagtgaagcaaagagatttttttaatccccatttttacagggacttactgaaaataagggggaggagaacacagataatatacaactaaattatatctaagcagatatactcgagatacataatatgttccatctaacaccttttaaggacaaagcaggccaggcatggtggcttacacctgtaaccccagcactttgggaggctgatggaggatcgcttgaggccaggaattcgagaccagcctgggcaacatctctacaaaaataaaaattaaaaagtgagccagggtggtggcccacgcctgtaggggggattgcttgagcccaggagttggaggctgcaatgagctaggatccgaccactcttccagcctgagagacagagaaagaccccctctctaaaaaaagaaagggagaaagagagagaggcagagagagagaaagaaagaaaagaaaagaaaagaaaagaaaagaaaagaaaagaaaagaaaagaaaagaaaagaaaagaaaaagaaaaagaaaaaaacaggaaggagacagggagtggttgggggaggaggagggggctgcaatattagaatgattagattaggccaagcatggcctccctgagtgtgaatttgaatgctgaccttcagaagcaggacagactctatgggcaaatccctcgaggctgggagaggtctgaggcttgggagggtcggcagagagacaatagggctgacgcaggagcccgggggagacagtagtagtaagacatgagggacagagcagagaggtcactgtcctcagagtgtggacgccgaccaacactaggggcatcacctgggaacttagaaatgctcgttctcacgcctcgccccagacctactgaagcagaaacgctagggtgggcccaacagcgtgtgttctaacaagcctttcaggcgactgcgatgcacgataaagttggcagctcctggagcaggggtccctccgcgctacgaccccacctcttcgcggtcctctcagtctccctagcggggcaagggacccgcccagcgctttgctgatttgcccagcgctcacgcccaacctgggtttctccggagctcgccgcgccccgcgcacccaccccgcaacggcagccgcacgtgggtctccccgcaaaccacccaggcgtcccgggagcagcgctgctgcacggccgcgctgggggcccaacgcctggggttgcaggtgcaaaaggcgccccgagccggggaggccaatcgcgtccgcggagaacgcagagtgcgggcaggggcgcatccctcgccacccgcggtcgcccagcacgccgggacgcgcgtggccatccagctccccgggggcgttggggggctccgcgggcctgggcctcgggattcgcccgccgcttccccggggagccgctgctgcaaagccaggttggggcgccgggcccggccagcgccctctaggcagcggaagtgcagct

SEQ ID NO: 26900 - DNA, 2300 bp, Homo sapien
aatgagactacaactatcccagtttaaatcttcagtgctcttagaacctcattcttaagatgaggctctttctttatgaatggaattgatttacagaaaacgaagcatttggctgagtttgtgacttacttgagattgcacagcaagtctgaattaaatctgtgtaacaggttctaatcccatggtccagcaattagaccattctctctaagcttcttggaaaattaatttctcattacaaataaatatattctgcaccatggtctgaacataccaatgctaagcacattttctgacagacatttcaaagatatagatgagctcttgcatcttttcaaaagcaatgcaagggacattcacacagcaggtgctggaagggtccctctggcagacagaggagatgcagaagttctgctcaatcaggttttcctgaccaagcctgtctgtgtagctgcggtaaacatgcacaggtctagcgttcaaaaatgggcccctggctctcacaatgaacctgacaacctgaccaatcaaattcaagtctaccacgttgccagggtaactaatacacagtcacaaaaacagaacgatcacagtgagggaaaaatacaaaatgcagcattttcatgcttagagaaagaaagagaaaacacaggctgaccgtacatagcaggaactgatacttgcttcttccttaactatgagccattcatttacagccatgtgcaaatgcctatgtgcagatgtatgcacctatcctctttcacagaaaatatgtgcctcacttctggaacattattagtgaatttagaatgggagaaagatggcagattatggtttgaggtggaaagatctggaggcacacacacaaaaaatgagcatccacccttcttccttgagcaactcccgggttgaaaggtgcttccagactcaactcagtcaatggtcctttcttccagtatttaaaggatgctactgccagggtaataaaagccaccccatgcccttagcaatgactatctccaggctaaactgtccctctgttttgctatgtgcccccatagtataggtgccgaagtgattctgaaaaacgtagatcatgtcctgcccccgctgacagctcctcccctgacttcccttgcaggctgagcagcaggtggtgtttacaccatggcccaccaggtcctgctgagtctgcctcttcctaactctctgcccttatttcttgactctctcccccacagtccactgtcaacaatcttcctttctgtcccttgaacatgccaagcttatttccacttgcattagtttcctggagttgccataacaaagacccacaaaccaggtggtgaaaaacaacagaaatgtattctctcatagttctggaggcttggagtctgaagtcaaggtgtctgcatggccgtatcccctctgaaggctctaggggagtctattccatttccttctctgagttcctgacgttggcaattcctggcattccttggcttgtgggtgctttgtccccatctctgcctccctgtgtgtttctacatcccttctcctcttcttatgaagacatcagtcactggattagggcccacctaaattgagtagaactcgactatatttgccaaggctctatttccaaatagggccatatttgcaggtactagcagttatcacttcaacatatcttttcggggacacaattcaatccataatgccacctcaggacttccaccttgaattctcttctactagcccttttcatggctggctccttttatcttttgggagtgagctcaaaagccatcttgtccggaagcttcccagatcacacatttttgacttcccacccctcaacttcttgtcatcaatgccctttgtttctttcttagaccttatcccactggatatacaactcccctccctctctcaaggagaatatgaactcccaggagtaacttctttgcatgtcttattcacagctccgttcccagagtgtagatgagtgcctgcaacaaaataggttcttgataactatgcattgaatataaaatctgaatcagaaaatttgggaagtaggagaagttgtagaagagaaggctgagttgaggtggtactgaatttatgacaagcattcagcattttctgtgacaaatatctgttggacatcaattatgtgccagacactgttctaagttacagctcagctaagacagacacaaagccttgagctgcatctgagtgagagcccgagcacctgccatatgttgagtgcttgctatctgccggcacagtgc

SEQ ID NO: 26901 - DNA, 2300 bp, Homo sapien
gtgaatgtaaattagtacaatctctatggagaacagtatggagatttctcaaggaattaaaagtagatctaccatttgatccagcaaccccactactgggtatctacccaaaggaaaaaaagtcattatgtcaaaaagacacctgcaggcgtatattcattgcagcacaattgcaaagatatgaaatcaacataagtgcccatcaactgattattgtataaagaaaatgtggtatatatatctatatatgtgtatttgtgtatatatatgtgtgtttgtgtgtatatacacacatatatatacaccgtggaatactactcagccatagtaaagaacaaaataatgtctttcacagcaacttggatagagctggaggccgttattctaggtgaagtaactcaggatcaaaaaccaaataccacacgttcttggttataagtgggagctaatgcatgggtatgcaaaggcatatggaaagatatcatggacattggcaactcagaagcgaggagtatgggaagggggtgaggactgaaaaactacctattgggtacgatgtacactactcgggtgacgggtgcactgaaatcccagacttcaccactatgcaattcatccatgtaaccgaaaaccacttttacccctaaagctattgaaataaaaaaaataataaagcaaaaaaaaacacctctagtcccagcctgcatcaaatgccctcagttgctttgccctctcactggaaggagcactccttgagggcatggtctaggttcaccttgttcacagacttgcccccaacacctcaaaaggtgcctggccgatagcagaactcaataatcacatgtttgtttcaatctctctgtgctcaaatgccatatcctacattgaatctagagccacccacccccttttagacactattacagcactcagcttaacgtcttcatggagcgaatcactcaaagtatcctgtttatttgcttgcttacttttcattcattcaacaaatattttactgggcacttattatatgtcttgtgctttgccagcacttggggatataagagaacaaagaggcaaaaatccttccttccattggagcttacattcaagaggggaacttgtacaatcaacagaatagaaaactgtctataacctgtgtgacactcactgatcagctcactggggaataacaaaatggagaaatggggcagggagtgtgtgtgtgtgtgtgtgtgtgtattttaggtgaggtagacctttgggaaaaggggacatttaagcaaagattggatagctggggggcacttgtctgcactcccccattagaatataaataccaacatggccaccaccttccctttctctgtggcctctgtgtctccagaataggcacatagtagatgctcaataaacattcttcaaaggaaacaaaaagaggagtatatgattagaccttaaagtagacagaagggagatttttgtttttgtgaccacccattgattagcgagaaagtgggagggacaggggcactaaattgaaggggtcgtggggagcacattttggtgggggcaggttaagacttacaggatggagatcctcactggataaggtcccctcccccttcccagccccgagcaaacctaagttctccctctcctaagattgtgcatggtccctgctggtcagccaacctggcccccctgaatctccctccacagcctcccagcttcagagttcagccatcatcacactgcctccttttctcccgcaccccttccctcctcacctcctttcctcccgcccccgccccttccgcctcccggaggggtgtccccgcgcccggtgggcacgccctcgccccggcggagagggcgcacagaggggcctgggccggcgcgccggggcccccgcccccagcccctctcccctgcgggacgctgtccctttaataggctcccgctgcctggcgctctgcggctggggagtaaatttctccctgtcatcaggtcgcggggagaggaggaggaggaggagtttgttaatgttcagtttgttcagcgggatcgatgtttgctggcatcgcctcgccctgtcttgtgtgtgtgtgcgagggtgtgtgtgtgtgtttgtgtgtgtgtgcatatgtggggggtgtgagtgtgtgtgtgcgaggaagcgggggtgcgtgcgcgtgtgagtgcgtgtgtgagtgtctgtgtgtgtgtctgtgtgtgtgtgtgagtgagtgaattccagattttctgtctttccaaaacccgctcctgtcctctcgcat

SEQ ID NO: 26902 - DNA, 2300 bp, Homo sapien
aggtgcctggccgatagcagaactcaataatcacatgtttgtttcaatctctctgtgctcaaatgccatatcctacattgaatctagagccacccacccccttttagacactattacagcactcagcttaacgtcttcatggagcgaatcactcaaagtatcctgtttatttgcttgcttacttttcattcattcaacaaatattttactgggcacttattatatgtcttgtgctttgccagcacttggggatataagagaacaaagaggcaaaaatccttccttccattggagcttacattcaagaggggaacttgtacaatcaacagaatagaaaactgtctataacctgtgtgacactcactgatcagctcactggggaataacaaaatggagaaatggggcagggagtgtgtgtgtgtgtgtgtgtgtgtattttaggtgaggtagacctttgggaaaaggggacatttaagcaaagattggatagctggggggcacttgtctgcactcccccattagaatataaataccaacatggccaccaccttccctttctctgtggcctctgtgtctccagaataggcacatagtagatgctcaataaacattcttcaaaggaaacaaaaagaggagtatatgattagaccttaaagtagacagaagggagatttttgtttttgtgaccacccattgattagcgagaaagtgggagggacaggggcactaaattgaaggggtcgtggggagcacattttggtgggggcaggttaagacttacaggatggagatcctcactggataaggtcccctcccccttcccagccccgagcaaacctaagttctccctctcctaagattgtgcatggtccctgctggtcagccaacctggcccccctgaatctccctccacagcctcccagcttcagagttcagccatcatcacactgcctccttttctcccgcaccccttccctcctcacctcctttcctcccgcccccgccccttccgcctcccggaggggtgtccccgcgcccggtgggcacgccctcgccccggcggagagggcgcacagaggggcctgggccggcgcgccggggcccccgcccccagcccctctcccctgcgggacgctgtccctttaataggctcccgctgcctggcgctctgcggctggggagtaaatttctccctgtcatcaggtcgcggggagaggaggaggaggaggagtttgttaatgttcagtttgttcagcgggatcgatgtttgctggcatcgcctcgccctgtcttgtgtgtgtgtgcgagggtgtgtgtgtgtgtttgtgtgtgtgtgcatatgtggggggtgtgagtgtgtgtgtgcgaggaagcgggggtgcgtgcgcgtgtgagtgcgtgtgtgagtgtctgtgtgtgtgtctgtgtgtgtgtgtgagtgagtgaattccagattttctgtctttccaaaacccgctcctgtcctctcgcatatcactcacagacggggatctgacagcagccacaaacctacagtgagtgatcgctctccccccggcacgaatccgccatagagatcggcgaggaggaggaggaggaggaggaagaaaagaaggaggaggtggaggaggaggtggaggaggaggaggaggagggaaagaggagaaggaagaagaagaaaaagaagaaacccactaccttcccaggattgccttttttttttccttatctttacgcgcgagtgtgcctgtggcgcgtgtgcgcccctcgtcccttccatccgaacccgggcttggatgtttaataaagaaatcaagtgtctcaacagtcaccaaaaaaaaaaaaaaccgcaaaaacaaaaccaaaaaaattccaaaagcaaaaacaaaaaagagagaggaaaaaaaattcaaaataaacaaacaaacaaacaaggcagaaccaacctctacttcaaagcagccggcacaagccacccgtgtctgccacccagagaggggggtctctggcccgtggtggaggagttgcaggggggatcgtcagggggacagaggccgagtgacgtcctaggagccaccgggcaagaggcggaggagacccagagaggccagagagacagcgggccccagcgcgcggctcggggctggggcgccagaagtgggactggagcgaagtagaggatgccgaggagaaaacagcaggcacccaagcgggcggcaggtaagagaaacggctccgcttcggggctgccctgtgcgccgagctcctcgcccgccctccttgcccctgggtgcccgggg

SEQ ID NO: 26903 - DNA, 2300 bp, Homo sapien
tcccaaagtgctgggatcagaggtgtgagccaccgtgtccggcccacagttgttaatttctaaataaaagcaacgaccccctactcctcactcctcagagcccctgatttgttagatgcttttctgtgtctgtgggctcagtccatctttccagacctcttttttctgtccagtgtatttgttttcaagagagatgctgaacttctgtttgtttcctttgatctgtcagaaacagaatctatttagactgtcttccagtctgttgtttgtggagtaaatatgtacacagcagcaattacaccccagacactcttcttggagctggggtacctttgtgaaaaaagaacaacatggtcctttccctgcggagtctattgtcttgttggggaaacagataaggaacaaacacacccatgaacaatatcatttcagagagtgactggagctatggaaaagagaaaaagggatgtagagaagagattctttatctagcggggccagggtaagttcttccaggagatgacagtgaagttaggagaaacttaactgcaaaaacactgagacagcgaagagctggggaaaggaggaacatgtgaaaaagaaaggtgagaaatggtggggtacactcaatgaaggggagggaccaggaaataaggcaattggctggggttttagctaagtctaaagggcagaccctcctatccagacggtctggatatgagatcgtggataggagatcatgggatctaatttatattattctgcaaaacaaaagctccaattcctaggagccacatgtctgactcagtaaggcagctccttgtccctttttgctttgtgttaacaagtgatcttttcattttattttataatttttttaatttaaaaaatatatttaggggtaaaagtgcagatttcttacatacatacattctgctttggtgacatctgggcttttagtgtacctatcacccgaatggtgtgctcctaatcaaatacatttcagcagtgttaggagaaggatgttggcagttgtggcccctcctacatgagttttagaactacagagttctccagggttgctttatttatcctgagcatgcaagactgaaccaaaatcaggaagggctgccctggtgtgatctctgcataaacctgtatctcaccctggacttcagcaaattaatttgtaaaactgaaatgaaacccaattggctgagtgaccaagccatttcttgggggtttcttctacttcggattgttccctttgagtattctgctttagacaaagcaaaccatccctctagggaaaatgccatcatcctgggaattggaacaaagtttgaatagagtaatagattctacccaaatgcaaaaatgtaatgaaagatggattttggtaatgtgctctttctgctgctgtgcttatcgagatacagtgtacaattctatcaacatgcccaggagaagatccaaagccctccctttctcccaatctctttcttttgtcacagaatctctgaagctactgaagtaattaatggggaaagtactcaatgccacatgaacctcctccaatcatttccaaaatggttcgacattctataaatgacagtttatgtgcctataatatgcatctggtgaaatgcgtattttcctttcagaaggtgtttccattacggttattctgaacatcacgtgatcttacagttgctagggtaactccatcttttttaaaggagaacaacagagtaaataagcacgtaaatcgactttggtgctatgtaaattctagtgaatctcttatcgttaccttgacgataaaaaagctggcatttatcttctctggcccccagcacgctttagtttgaacttaaattttataaaatacacgtgtgggtatgccaaaggctctacagatatccaggaagcagtgctggtcaagcgatatgttcaacaggcaaggccgcctggacaatgacgatgggtcacagaagaaccaggggagggagtaaatgggagaccagatgttcagagtcaagaggtaatacctgtcaattatgggctatcactcagtaagcctactcaggtggcacgtgagcttctggaacagccggaaaccttgtcaactgtccaggtagtttgtccacctgaagtctcacctatgacttctctggatcctttggcatcctagcactgaaatctgcaaagctgcttatgtactttctgtaaggtgaaaattacggatgcagcacctgtgattaagtcatgatggctggaagtaaatcttggtgaatatt

SEQ ID NO: 26904 - DNA, 2300 bp, Homo sapien
gctgaaaaaaatgtatattctgttgatttggggtggagggttctgtagatgtctattaggtccgcttggtgcagagctgagttcaattcctgggtatccttgttgactttctgtctcgttgatctgtctaatgttgacagtggggtgttaaagtctcccattattaatgtgtgggagtctaagtctctttgtaggtcactcaggacttgctttatgaatctgggtgctcctgtattgggtgcatatatatttaggatagttagctcttcttgttgaattgatccctttaccattatgtaatggccttctttgtctcttttgatctttgttggtttaaagtctgttttatctgagactaggattgcaacccctgcctttttttgttttccatttgcttggtagatcttcctccatccctttattttgagcctatgtgtgtctctgcacgtgagatgggtttcctgaatacagcacactgatgggtcttgactctttatccaatttgccagtctgtgtcttttaattggagcatttagtccatttacatttaaggttaatattgttgtgtgtgaatttgatcctgtaattatgatgttagctggtgattttgctcgttagttgatgcagtttcttcctagtctcgatggtctgtatattttggcatgattttgcagcggctggtaccggttgttcctttccatgtttagcgcttccttcaggagctcttttagggcaggcctggtggtgacaaaatctctcagcatttgcttgtctgtaaagtattttatttctccttcacttatgaagcttagtttggctggatatgaaattctgggttgaaaattcttttctttaagaatgttgaatattggcccccactctcttctggcttgtagggtttctgctgagagatccgctgttagtctgatgggtttccctttgagggtaacccaacctttctctctggctgcccttaacattttttccttcatttcaactctggtgaatctgacaattatgtgtcttggagttgctcttctcgaggagtatctttgtggcattctctgtatttcctgaatctgaacgttggcctgccttgctagattggggaagttctcctggataatatcctgcagagtgttttccaacttggttccattctccccatcactttcaggtataccaatcagacgtagatttggtcttttcacatagtcccatatttcttggaggctttgctcatttctttttattcttttttctctaaacttcccttctcgcttcatttcatttatttcatcttccatcgctgataccctttcttccagttgattgcatcggctcctgaggcttctgcattcttcatgtagttctcgagccttggttttcagctccatcagctcctttaagcacttctctgtattggttattctagttatacattcttctaaatttttttcaaagttttcaacttctttgcctttggtttgaatgtcctcccgtagctcagagtaatttgatcgtctgaagccttcttctctcagctgatcaaagtcattctccatccagctttgttccgttgctggtgaggaactgcgttcctttggaggaggagaggcgctctgcgttttagagtttccagtttttctgttctgttttttccccatctttgtggttttatctacttttggtctttgatgatggtgatgtacagatgggtttttggtgtggatgtccattctgtttgttagttttccttctaacagacaggaccctcagctgcaggtctgttggaataccctgccgtgtgaggtgtcagtgtgcccctgctggggggtgcctcccagttaggctgctcgggggtcaggggtcagggacccacttgaggaggcagtctgcccgttctcagatctccagctgcgtgctgggagaaccactgctctcttcaaagctgtcagacagggacatttaagtctgcagaggttactgctgtctttttgtttgtctgtgccctgcccccagaggtggagcctacagaggcaggcaggactccttgagctgtggtgggctgggcccagttggagcttcccggctgctttgtttacctaagcaagcctgggcaatggcgggcgcccctccgccagcctcactgccgccttgcagtttgatctcagactgctgtgctagcaatcagcgagactccgtgggcgtaggaccctccgagccaggtgccggatataatctcgtggtgcgccgttttttaagcccgtccgaaaagcgcaatattcgggtgggagtga

SEQ ID NO: 26905 - DNA, 2300 bp, Homo sapien
gaccttcttgtctcctcaaaaaataaaaataaaaaaaattacccgagtattgtgctgaacacctggggccccagctactcaggaggctgaggcaggcaggaggatcacctgagcccaggaggtcggagctgcagtgagctgcgattgcgccactgccctccagcctgggtgacagagcaagaccctgtctcgaaaaaaaaaaaaaaagttacactaagggcaagaaaccagacacaaaaaccacataattccagtcatatggaatgcccagaataggtaaatccatacagacagaagctagattagtggttgccagaggctaggggagggaaggatggcgggtggtggcctaactgggcttccttttgagacaatggaaatattttgaaacttgataatagaggtggtggttgcacaacgttgtcagtgtactaacagctattgaattgtacactttaatatagtttttctttttgaatttttttcttctttttacatatattttgtttattggcctccagctttgcataatgtggtatattttatgttttgtaaattttacctcaatataaataaacatatacattttcaaaacatttttaaatgtgtgtgatgttctgatgaagaaaactcaggccctcgagcccagcagtctgtttccagtcccaactcagccatgtgccagcttttgtgtgtgtgtgtgtgtgtgtgtgtgtgtgtgtgtgtgtgtcatggagtttctctcttatcgcccaggctggagtgcaatgcagcaatcttggctcactgcaacctccgtctcccgggttcaagcaattctcctgcctcagcctcccgagcagctgggattacaggcatgcaccaccacacctggctaattttgtatttttagtagaaacctcaggtgatctgctcacctcggcctcccaaagtgctaggattacaggcatgagccactgcgcccagcccatgcgccagctttataaccttgaacatgttccttaaccactcaaaggctcagtttcctcacctgaaaaaggaaggatatgtagttccttttcttttggttttgtttagttttgtttgagacagggatctcatgccgttggccaggctggaatgcagtggtgcgatcacagctcactgcaaccttgaactcctgggctcaagcaatcctcccacctcagcctccagagtagctgagactacaggcacatgccaccagacctggttaatttttaaactttttgtagagatgaggtctcactacgttttccaggctggtctcaaactcctgggctcaagcagttctcccgcttcggcctcccaaagctctgggattacatatagttcctttccatgagtttgttgtgaagattaaacaacacatttatcacaattaagatagcatcaggatcagagtgagggttttgtagcaaagtttttgtttggttttgttttgttatttggaatcaatggagcaaaagcaaacacacacacacacacacacacacacacacacaaacacacacagagcctttgaagtgagacacgcgtttgaattttggctctgccacctacaacctggaccacattgggtaaagctgtttagactctcgaatcctcagtttcccagctccttaagtacaggatctcatctgaccttcctcattaatactgaatgacttcaatttaagcaacgcctgcatatatgactgctcactaaaatattatctgttgaggctggcgtggtggctcactcctgtaatcccagcactttgagaggcccaggcaggcggatcacttgaggccaggagttcaagaccagcctggccaacatggtgaaactccgtctctactaaaaatacaaaaattacccaggcatggtggtgcacacttgtaatcccagctactcaggaggctgaggcaggagaattgcttgaacccgggaggcagaggttgtagtgagctgagattgcgccactgcactccagcctaggcgacagagcgagactccatctcaaaattaaaaaaaaaaaaaatcattgaaatgataaaatagaatcttaacttttccagttattttacaggttatgataatcaaacatgtgacaacattaagcaccctggtagaggcaagatttgccaggcggctctcacatacccctgcctcccacaatactacccccgcctcccatgatatgatgagatgacaaggcactttacctctgcattatactccacaaaacccgtaatcccagacaatcatgagaaaacatcagacaaacccagatcagcag

SEQ ID NO: 26906 - DNA, 2300 bp, Homo sapien
caaaattacagtttcacgtattagtcaagtttctaaaatacagtaataatgttgagagctgacatagggactaacttagtttttttttttttttttttttttcaaattctcactgaactttgattttgctaaataaggacattaaaaaaaaaaccaaaaaactccactattgcctattgccactatttgattttttaaaaaataagcgtattttagcatctaaaagtaggaaggacctcaaataaatgagtctttgttcttggccagggaaaacagcgttgtcagaatttgataactgtttttctagggtatgtgctgttattcagttaaaaccttgcctgggacgctagcattcagtaaatacttgttgaataagcaaatgaaacttaagcttctatgtatagaaacctaagtcacttcacattctgattagcagagtaattgaatattcttttcaatgtgtagctctatccccagaaccacagaatattggaactgtaaaggccatcctatagtttaaccaactgcgttaaatagataatagaaagatgtggtatgtggcagtgacaacttgaaggttgtgactagaactcgggtctctggagtgttctattatatcacaccaagctggtcaccagcccatgtgttgatcctccattgtgatagcaacaaagaaaagacttcaggacattctttcctttaccctaatccttgatctgcagtcttatttagaaaagcttaatgttaaagatctagtttattcaaaactaaagataacaaggagtatgagaatttctatttcggagtgtaaaggaggagatgtttccttggcttctctgagcctgcaggccttccttgctctttaaggaagtagagagagggaggaaagtaaagtatgcttttgttttttaaggttactttgctgggagtagtttgcatgccttttggttttcttgggtggaattaactgacttaagttttaagtagttgggactatttaaaaacaatgcctatccaatgtttgccataaaggcagagggtattggctttagaagttaattcttctccaggagtgaaaattagcttctaaaccagaagcagcagagctaaataaagtaattttccacctggccagtgcatgatgtgaaaggtagattaaaaaaatgagagggcccattttctgatgaaagactaagccatgttgaaacagccctgttgaggattttattttaaatctatacattcacaaaggagctttgtgtatgtctttccctatttgttgtttggactaggaagccccacccagtgcttgttgaaggcagaaagtcgttgaaagcaagctgggatttgaacagtggattgaggtttcgaatatccagtgaaccaaaatatatcagggttcccctggccaagatgagtgaccattctgaggtgttaagtatttcttgaatggggattttaggaaaagtttctgtatttctgtgctcattttgttgacctctgtatgtgcaaaatctctaagggggtgtttgggcacttagatttcttggatgcagatttgtttgtatatgaaacaaattttaaattgttttgtatacactggatttaaaatagtttactaaagtgttttaattttttcatcttaattttcacagttcttatagtctttagatttagggaggctgttgatggcatccacatgtgcattttagtggcatttaaaatgtattcagctgaatttaacaatttctgacctaaaacttgacattttagatttaagtcggtaaagcactgatttaaactggattttaactggatgaaattctgatttaataagtgtactgactggataaaatgccaatgatttaattaacaagcacgtttaacaggatgccctatatattagttaaaagtgaagcaattgaattaggtaccttctctgctgcgtggaaaagaccgtatgactcacccacaccagccttctcttcgctctgagtgtagctaaccgtttctgttttttttcctctagggtttggaaatcccttgtctccaggttgctgggattgacttcttgctcaattgaaacactcattcaatggagacaaagagaactaatgctttgtgctgattcatatttgaatcgaggcattgggaaccctgtatgccttgtttgtggaaagaaccagtgacaccatcactgagcttcctaaaagttcgaagaagttagaggactatacactttcttttgaacttttataataaatatttgctctggtttttggaacccagggctgttagag

SEQ ID NO: 26907 - DNA, 2300 bp, Homo sapien
ctgatgcttggtgatggtctacgttttgccagacacactgctgagtgcccccacctgaatgatttttcttaatctcctaaatcactcatatccctaaaccttatgtttttcttctgtaaaatgggagcaaaagatcttaatttcactgtggacataaatgaaatggacggataaacacaaaaggctttgcaaagactaatgccatccaaatggcagttactgccatgtataatttaaaagagagcaagacaatggggagtgttagctcacgcctataatcccagcactttgggagactgaggcgggtggatcacttgaggtcaggagttccagaccagcctggccaacatggagaaaccccacctctactaaaaatacaaaaattagccaggcatggtggtgcacacctgtagtcccagctacttaggaggctgaggcaacagaattgcttgaacctgggaggcagaggttgcagtgagccgagataacaccactgcactccagtctggatgacaaagcaagactccgtcttaaaaaaaaaaaaaaaaagaatgaacaagtccaatcagccaggagttgcagagtacctactctatcatagagggatccccatcctcgttttgcagggtgccaggagttggggatacaagaatagatgcaaaataaacacaaaggagcacacagctgagggggctgacagagacttagggaagtacagtagcttgctcataattccacagccgatcagtaagaatcaagatccgagcccttgtctgtctcaacccagggccagagctcaagctcctgagcctccaggcttgggtcagcacagagcgtgtgcatggcagctgcttaataattgggtttactacattccagattgacatgtacagtgctgagctggaatcgactttacaaccctaattacggtgtgcctggttgtgtattcagcatttatttaaatagtattttttttcttaaatgttgatttctgaaagaggccttccccagctctctctatttctctcccttagctgccttggcttttcttttataatgagaatcacaccctgtaattctatgtttatatttacaggattctatgtccaatgacactgagtgcaagaagggtagagacccagcatcttttactcacctctttaaactctggcttatatatatagcctggtgcttgacaagtattcatgataggggttaagctgagtatactgttgaataaaaccacaataattattggtcgcaattctcttgaatgtcttctccagagcactaagtagtgtaacttatcaagtttcctttcttgcattggctgttaggaagctcaaagccatatctgcaaacccttcatagcaagtctgtaaatcaacaagagcatttatttttgatcctgttctcatttgatgttccaaattttgttcttcaatcttcttttgttacatgttatttcatgctctcataatctattgtatatgtccttgtaagacactttaaacaacatccttgcttgaattaaataaattgcatagcctgtcgaatttctggcctgcaaagaaaaagaatgccctttccaacatcatggtatgtctccagagcaataaaccaccctcaggttacctgatttctggtgtccaaacccctttgggaataaggtttacatgactaggggtagttgagtggatgagaagctatttccttccaattaggtggttaggtggtggtggaggtggtgttctgaagtcagcagacagaactacaaaatctcacagaacgtgttttccctgctctgaccatgacctacggttactggggaaggaaactgcttccccaggtcaacccggcagcctcagtaggtgaggggcactgggtagaatacttggggtgccagggaggcattaatgcgagaggagtcaggtgctcagtttttattggagttgggagggcagccccacatcaggaagagaacctgtttctgcaggatggtccggggagaagggaggactccacccaggcttgtgtttgccctgctctgtgtattcagccagcaggctctgcacaaggaagcaaagtgcagggagccaggctccaccgacagccaggcactgggcagcacgcactggagacccaggaccctgtgcaggagcagctccgggtgacacgaggggactgaagatactcccacaggggctcagcaggtaactgctttcagatcctttaggcatggctggagggtttgctgtttgtggtagacggtgtcatatagaggccaggggtcagacagg

SEQ ID NO: 26908 - DNA, 2300 bp, Homo sapien
gctaatttttgtatttttggtagagatgggctttcaccatgttggccaggctggtctcgaactcccaacctcaggtgatccgcccacctcggcctcccaaagtgctgggattacaggcgtgagccactacactcagccagagctattctttttcaccaccgtcagcacataaaacgtttgcctcacactgccccacacatactgacatggtaggcattctgatcccccccactttcctcttggtgataattctcatttaagaaatacttccaatattctgagacactctggtttaagaaaaagtgacataacatagcatgatgtatatgggtgtactatttagggcccagcctagaatcagaaaatattgggtctgaatcccacctgagccaatggtaacgtctgtgacattgggcaaattacttagctctgtaagagtcaagggtttttttgtttgtctttgatttttttttgttttttattttatttcattttattgacattgggctgagatgagaactaaacggaaaaaatgatgtaaaatgtctagctcagtgcctgacttatcataagccctagaaagctttcatgagaatattatataacatatggaatctacatactgtatgcaatctatactatattatgtatatttagtgtgtattgcatataacataatctatagtgtatgctgtaacatatataccatacaatgtatatataaatatgtacaagattcataaagtttagtatatatcaatagctattatttttattaacataaacagtcattagcccctccagacaaatcagaaatgatggtgttaaagcttaagttggactgcaaaagatttttaagaaacaaactagaggcttacaaaagaatttaccagggaaggatttgccaacacttggggcaaaaatgactgagacacgtaattgaaaagcagggcgaggaaacagaatgtccctcccctcctccctggctggtggtagttttgtattggatcaggttgaaaggattcgagccactttaaaacaatcaacaaaaatctccaacttccgttcctgaattagcaaagcgagttctactcttgccagccgcggtaactctagaaattgtgtatgtttgtcactggacctgcctaggacgcaccttgggggagagggggagtactgggggcggtggtttcaagctctgtgtgcccctcctttgcacaaggtagtcggtgtagaagaacagaggcgggcagtggacataggggaggtggcccagcctgaattcaagcatcgttggtgcaagccacgctctcaaggcgcatttcctaacttcctaaagaagtaacaacagcaactaacttttattgactgttgactatagacaaggcttcgttgttgccgctttacgtgcattaattcatttaatctgcaaaacaaccaaacatgaaacagcaggaaggaaattctacaaactccccttcttgctcaagttaagaaagtctcctcttctggtgcatttcagtaagactcaaatcctccccaccctgggaggcgcagaaagccaaacttcctccaaaaaaaaaaaggcaaaaaaaaaaaaaaaatcacttcagtccaggctgggggtatctggctccccgggaggcgcccgggctccccggggccctggcagacgccggcagcttttctgggcccgcactcggggacctcgcccgcccggcatcgcgattgtgcaagcgccgggcggcaaccacggccgccgctgccggctcctgcccgccgggggagggcggggaggcgcgttcgaagcacacccggtgaactccgggcttcgcatgacttcctgggggttatctccggggtggagtctgccgcccccaccccacctcccgcgcccagcgaacatagccccggtcaccccaggcccggacgccctcgctcacctcgctgactccatcctccttccaccccccctcccctgggtcccgcgtccctcggagtctggccagccgggggccactccgccctcctctgcgtgctcattggccacccagggcatgctctgtctccataaatgcatggtccctgggcataggaacatggagagggacaggaggaaacgcagcgccagcagcatctcatctaccctccttgacacctccccgtggctccagccagaccctagaggtcagccttgcggaccaacaggaggactcccagctttcccttttcaagaggtccccagacaccggccaccctcttccagcccctgcggccagtgcaaggaggcaccaatgctc

SEQ ID NO: 26909 - DNA, 2300 bp, Homo sapien
caaaattcctgctccgctgttcctcagctttcaactcagccatttctcaataaagctttgaaaaagtcagaattctttctctctttctctctctccctcccccagtttggcctcaccaagttctaaaacatgcccagatctggcccctgccttgcaccccagcctcgctccatgctgctctgtcctttctaccatgtctcaccaggctctttccctctcagccctccacccctggggtccactttcgtctcctctccccatgctgaggcctcccattttctcttagcttagaggccagctccagagctggcccccacccctcccctctgtgctctgcctcagcacctcatttatctccttcatgcacttggtaccatttgtgacaattttgccctttatttctgtctccctctccaccatttgtttcttgcagtgcttttacattgagctctggaataaacagatatcactgatggagcatctcctatgtgccagacccggtgctaagatttaaccctggaaaaacatctttattcaacaaatacttttttgagcacatatgagctacacactggaaagtcccaatactaagggcctggagagcccagaataggcaggagaacaggcgatgcccgtggcgggctaggtggttcggtggggagggcacagggtgctataaggtctcattcccctcatttaaccaaagaggaaattgggactttgagaaaggaggaggcttgtcaggggcagttctcaagctgtggcccatgaacctcgggggtccctgagaccttttcagggatccatgagggcctccctttcccaactacatgatttgtatgaggctggggtttttcatacctacaactaggcaactaaacagtgtatttggagagactgaatgcagaagtagacatgagaatgtaaccttccattaagcctgatattaaagagatcagtgaaaatgtaaaatgatgacaatcttctcaatttatttttgtcttagaaaatatagttatttttaaagtgtgatttttattaccatggaatggagttttatattattttaaatgaattaataaatacattttaaaaattctgctttaatttctaatacagcaaatatcgataaataacccacataaacaaaagttctttggagtcctcagtaatttccaggagtataaagaggtcctaaggcaaaaaaaaaaaaaaaaattactaattgggagacacaagtgtcagaatatacagtaattgttcagtaatattgctgtaaattaattaataggattgcctagtcacaacagcaaaggcatggaatcaacccagatgcccatcagtggtggataggataaagaaaatgtggtccatatacaccatggaatactatgcagccataaaaaagaacaaaatcatgtcctttgcagcaacatggatgcagctggacatcattatcctaagtgaattaacacagaaacagaaaaccaaccactcatgttcccacttatgagtgacagctaaacactgggtactcgtggacataaaggtgggaacaataaatgctacggattccaaaaacggggaaggaggcaggggaaaggggttgaaaaattacctgtggggtactatgttcactacttgggcaacgggatcattagaaacccaaaccttagcaccatgcagtatatccatgtaataaaccggcacacataccccccgaatttaaattaaaaaaaaattacattaaaagataggagtacctcctttacaccacctgaattatcatggcacataaatctcacaccctatttgccaaggccattcgttcctagctgttttacaggtaggttagctttctcaatgcaagtctgtgggacggatggagaaaaattccccgagccctttgatcctgccccagctgggccccgccgcgctgagccttgggcgcgccccctgctgcccgcggccggagccgttcgccacacccccgtgtttatgtcggtccacgggggttgcctgtccctttaattggcatgtaccaagtccttccaggtcacatttcctccctacgtcccagccgtttggactcactggccaaaagtccaagaggacggaatgtggagacagtgttgtatttttgcggggagttctaggccgaccgggagcgagagaacgctcgggggcgaagcgcgccattgcggccctccccgccgcctgcggtagtccagtcccaagatggcggccaccatgaagaaggcggtgagtggggagctcggggctctggatgctcgggcggc

SEQ ID NO: 26910 - DNA, 2300 bp, Homo sapien
ctctttgctcttgctgccagggcttgtattgcacaatttggacaagtgtaaatgtcctatgaatagtatatcacagtctgtacgttttgcatgtatgtcaattggatttcaccaaacaaaaccatatattggattcagtcttgcaatttaaaaaagaaatcatttgttccttcacgtctagtttgatattttctggtttgattctagtttcctcagctccagttaaattatctatggatgttgattatagtcagcattaactatcaagggatggatttctcgccttcagtttttgtcagtaattatttccgttattgtgggcccttcatttcaagctccttatgccttaatttcttcattttttgtttctataatactgtggacttggtctataaatgatgtgttagataaatgccttccatgaacacctctattttacagcaaccatgggcagcatttttttttttaagttccaatccttcaaaaggagctctccaaatgattttaccatttcatctcttttggtgagagatttaaaattaaaacatcattttccatagaatggcaacatgaagacagatggtttactatgtagcaaaaatagttctccctgccagaatatctcctttttgattgtccccatttagtctcggttctcctatgacacattcttggaggtttctgttctttaactgaaactcatcaagccaaggtgactaaaagctaatgttcccagtgagaatgggaagattcatatcgtcttagagttgaaagacctgtggatgtcatcaggtcaaacaatccactactaactgaatcctcttctcaatggctctgagcagtgatctctagctttagctttgtcgcttcccagtgagtaagaatttttgtctaatttctgatgattatctttgcctttgtgaatagtgcaaatgattagaaagatcttccttggaaatcaactagtaacctctctttctgtgagatcctctcttcagaagaggaataggagaatgtttaggagcagagctgggcactacacacacctcccttcaatcctagctctgatagtggccagctgtgagaccttagcaagtctgtaaaatgtggatgctggtgcctaattcattattcccttaacaagattagcacaatgcccagcacactggtgctcaatgtgtgttagcaattatcaatcaagtatgctttagggaggtaatgcagtcaggggcaggtgagtgtgaaattcagtccccttcttcatcttattgtataggcagtatctcataatggcaatgagagctctattgccaggctaaggaggcttaattaaatatgggcctggtgtatacattaacagggcacctacctcaaaaagtgcaggggagtttgaatgagtcaatccatgcaaaaggcttggagagtgcctggcacctaggtggccatcttgataaccacaaggatttactgagcacttgctctggggtcaggctttggggacagacagtgatgaggccaagtctcagccccctgggaaacacattccggcgggaaagaggctgaaacagggaaactgtggcaaatgataccagcgagggctaggtccctgacacaaggaaacccaaggaagcatttggcttaagcggtgacaatatccctctcctcagatgccaaggtcaaggcgagccgcggcaacaccatctccccagacacacacgcaaaatcggcccttctcggggaaagggcaggggctgaagggggaggcggggtgggcggcggctggaaaaaagtgaaatttcctctcctcctaaaataagtcattggagcgaggagagcgagcgctatctcagtaggctgtgggcgaggtgcgggggtggcgggggcacgctccgggtccgccaggaggggagggatcggaaggggaagcggggagggaaaggtgggtgggaggcgcggggagcgttccagggcggctgctcacgggtggccgcagcccagtgctgggactcgcgcggctcctcctcttagccccccaccccttcctcctctttcctcctcctccttcctcctcctcctcctccttcttctcctccttctcggccgggaggaggcagggctggatccctcagccgccgccgctcctcctcctggcaggccggccgcggagtcagctgacgccggcgctccagcctcgcctccccgcgccgcgctctgcgctccccgaaagtggctgcaagccggccgcccactgtcagggttggggggacagagaaagtgatgtgcgccttctaaagcctcgc

SEQ ID NO: 26911 - DNA, 2300 bp, Homo sapien
gtgaatccacgtggtaagtaaatcttgtacttaccttaatgagttgtaacacacaatgactatttttattgagaaaatctcactactactaagaaaatttagtcatcaaacttaaagaaaacaataaatcggtagaacttcctcttcgtccactgttacctgttttctgcttcttcccctcccttctctccccacattccccaagcattgaatgagtgtctttctgcatcaggcagtgtctgagacacaatgagatccagtcctcatcctctcggggcttcagtgtagggagtacaacaacatgataagtcccatagcagagactggaaaacagcaagaacagctacagcaaatagcaggaaaccagaaaagtgactttacattagtcaattacttgaaacaattagcaagcagatgttattttaggggtgttttgtccttggaaaagatattgcttgtacctttgttaaataattcaggcaagttttcagtcagtaattccagttgcctccctgtaaatagattactggaaagctacagcaattgagtcttaccttatgataacacctgaaatatgcagcacgttcatcagaaaatttctccagtctttttggacctttgcttgaagctttcttgaatactaaccagcatcgctgataaatctggaaggaaatacaaagactgagctcagcatctcccctgactgacatttgcatttaaatgttttctttttgatgttttcacctgtgaaatatttgcaagccagaaatgtgatgttgctttgtgaaaataaagttttaaaaatcaaaattgtttccacaacgggcatattatgtgtcattcagacaattactggaatcaaaagaaaataagtatttgaagataaatttcttcatgctttgatagcaatatcactaggtatatttcagaaaaaagtcccagagataaaaatcccaaatgtacaaataaaataggcattcaaggaacatgctagaatttcaagtgcaattaaatctgaaaaccatgggcttggtctatgctgaagatctcattgcccatcctagaatctggcagctcatggttgtcgtgatattcctcataatggatggtgaagagttggaccagacactaaactaactagctaataattggctgattaacaccaaccagattcttgcttaggatattcaacccagagacttgaagattactaccagaggtgcagaccaaattgaaaggtcaatgctggtaggtttaaacagaagttgttggccatgttgaatcacttgcaggagagttaagctgtggaacctgctacagggaactagatcatttctactctaggtaaaagagacattttagttcttcacaatctttcaattcctaatactgagatctagcctttcctctgggtttcttggaaatcatctatatccccaggaacccatcaccatcaacatcactgcaacttttaattaagctagcttgaatgggggtctgattctagcaaccaaaactatcctgaagaaaataactagtaaaaggtacactagcacattaaaatattaataatgccagagagagaaaatgcaaagagctaatgagcatatgaaaaacaatattctccaaaagcaaaataaaatgagacatttttaaacctaaaaattactaagtataattttttttttttttttttttgagacagagtcttgctctgtcacccaggctggagtgaggtggtgcgatctccgctcactgcaacctccgcctcctgggttcaagcgattctcctgcctcagactcctgagtagctggaattacaggcaagcacaactaggcccagctaatttttgtatttttttagtagagaccgggtttcaccatgttggtcaggctggactcaaactcctcacctcatgatccacccgcctcggcctcccaaagtgctgggcttacagacgtgagccaccgcgcccagcaaatgagtataatttaataataatagttactgatggcaaatgtctgagtggcactattatactcgactggtcatctttaaaggtcgcttgacaataaataacctaaaaagaatagaaatcaggccgggcgcggtggctcacgcctgtaatcccagcactttgggaggccgaggccggcggatcacaaggtcaggagatcgagaccatcctggctaacatggtgaaaccccgtctgtactaaacatacaaaaagttagccgggcatggtggcgggcacctgccgtcccagctacttgggaggctgaggcaggagaatggcgt

SEQ ID NO: 26912 - DNA, 2300 bp, Homo sapien
gcccatgttttcttctagtacttgcatagtctcactttaaaaaatttgggtgttatttggagtctattcttgtatatagtgtaaaatatggacctaattttacttttttccaagtggctacccagttgccccaacaccatttattaaaattttcttctttacctcaatgctttgagatgctacctttattatataataaattttcatggatacttgggactatctgtgggtcttcccttctatcccactggtctattagtttattcatgtacccgaaccatgttgatttaagtatagtgactttatagtgtgttttaatgtcttctagggctactccgcctagagccctgctctagggctactgtctttcagaaaagaaagaacacctttcttttctattattttttttttctggttattcataatatttgttttcccatatggactttagtatcaatttgtttaactctgtaaaataactcacaaatgagtaacttaggaaaaagtttagaaggaaataaagaaggacagaaaaaaatggaggataaagacagggaagccttcctcctcaagattcttataacccagctaggaacacatctcatctcctagtatagactcatgattggacacctactctatccctccctatgctacaccaggcactgaaaatagagcagtaaaatgaacacagagggcgttcctcaccctgaagaggtgggcacaagtcttggcttgattaagcacaatttgaaaatggtctacaggcttttttctttttgctaaatattcccaggagagaaaatagagaattttgaaataatgtcataaagttcaaaacggatctccatgtctgcagcttgtcaagtcatgcatctctaagtcagtcttgacatcttcctctttcactgccaacacctgatcaatcactcttgtctgtatatttcatttttgtaatatctctccagtccacccacctctttccagctcactgtcactcttccggaccaggtctccaggccaacataatattttatctgaattactacacttatgtcctaagttacctctctcccttcctcttcctgtctcccctcatccagaataatcttgacaatcctgagtcagattctgtctctcactagcttcacacccttcaatggcttctgactgttcttgagcgaatgttcaaactctttatcaagctttacaaggctctgcattatctgcttctgccagcctcatgttgccactccccttgtcactacgcaattgccactctggcttccctccgatgtctagaaagtacctgcttctttctgtgagttattcccatgcctgtaacctcctctgagttctacccttctgcctggtaaactcttaccaatcccctcatccagatttaaacattccgtcttagaggaagacttctctgtcttcctatccttcatttaggtttcttactcctcatattcattgaactgtgtacttcctgagatcacttaaaaacaactctaacattcattgattgaaggaagaaaggaaagaacaaagaaagaaacaattgaactcaaaactgaaagtttccaacatttgagcagtaccatgtcatcagtgttttgggtgatagtgttgatggggtagttgctgtggaaaattgaatacagtttacttacttgcagatagactcatttagatgtatgaatttaaaatgtatacctttttgtactgtcttctataattactgtggtttggattacaacttgccatttgagatttttatttcaagcactcaaataacaaaaggcgaccatttcttacattatctccaacactgccaggtgttcttccatcatcaaattgttaaagaaaacacacaaaacatatggtttccattgctccctgcataatctggagctatagaaatgcaggatgctcacgctctcagcagaaagcagtgagcatgaaatattcataagcttggtgtttgtgattattaagtaaaggccaattctcgtgagtttgtcattttttaaaaaatatgtagttatttattaagcagctaaatatttgctatatgatagttctcattataatactagctgagacagattccctaagaggtatatggaagactcttgaaaataaaggacagaaaagccttaggaaatacagatgcattcaggaatcagtacgaccaatacatatcatctttaaggttttaaaaaggtatctgtcataatatttattttaacttccagtaaaaaggtagagcatgaggctttgggatttgggatttg

SEQ ID NO: 26913 - DNA, 2300 bp, Homo sapien
tttcttttcttttttttttttttttttgagatggagtcttgctctgtcgcccaggctggagtacagtggtgcaagctccgcctcccgagttcacgccattctcctgcctcagcctcccgagtagctgagactacaggcgcccaccaccatgcctggctaattttttgtatttttagtagagacagggtttcaccgtgctagccaggatggtctcgatctcctgacctcgtgatccgcccctctcagcctcccaaagtgctgggattacaggcgtgagcacgtccggtatggagcttttaaattaaaattaaaaagccacttctttagtcgtaatagccacatttcaaatgtgtaggtatctcacgtgactagtagataccataccggacggcacaaatacagaacatttacatccttgggagaggagctgccacataaccttttgaccttcaaaatgttgtattacgtgtatgtattaattattcaaaattaattatcgtacatttaaattttaagtagtaatgttaattgttttatataatttgtatttgaaacttcaaaaagattacccatttttcatctggggctactagggtcacagtcacaagcacacacttaagtggctgaattcagaaatattataggctgttctctccacagcaagtgtaacaacttaaaaataatgtaaggcacattttaattataatgatgaaataaaaagcgctggttttgcttcaaaggctaataataaattgcttttttaacatttattttcactcccaggtacaggaactgtatcacagatggagagtataaccagagaagtgtcaaatggtatatattgagcattagattcaaactgtgcacagcagggccatagagtgacactcacaggtatgtgatgcctggttatctccctccctgttgtctgtatgaagcagaaaatcagaatatttagtaagtaatggcatttgcagtattggtctctttcagcattaacaggagtccaaaatagccttgtgaaattctctttcatactatttgcaggggagaaatgatgcatttatgaagttatttatttatttatttaaaaatatatattgattgcaggggtagtggctcacacctgtaatcccagcaatgtgggaggctgaggcaggtggatcacttgaggccgggagttagagaccagcctggccaacatggcaaaaccccatctctactaaaaatataaaaaattagccaggtgtggtggcacacacctgtaattccagctacttgggaggctaatgcatgagaatcacttaaacttgggaggtggaggtggcagtgagccgagattgtaccactgtactccagcctgggcaacagagcaagatgctgtctcaaaatgcacgtgtgcatgcacacacacacacacgtgtgtgtgtatatatgtatgtacgtgtgtgtgtacatctatctgtgtgtgtgtgtgtatgtacctatataaataatgcttactatgagtgaggctgtattccagcccctggaaatatagcagataaagcccccatctcacattgctcactttctaagctactaagttgagtcaatgaacaaataaaatagaaagcatgtcagagagagggatggtgtgctggtaaaggcatgctaacttacacaaagtggctgtcctccaaggatgtccatgttgtaatttcaggaacctatgaatatgttaccctacatggcgaaaggggcttaggtatgagtaagttaaggttcccgagatgagaagattatcctggattatctggatgggtccaatgtagtcataagggtcctaatgaggaggcagaagagatgtggagatgggagcagatgttgaagaaatatcactgcttctggaagggggccacaagccaagaaatgtgggcaacctctagaagctggaaaagacaaaacaaacaactgacaacaaaaaacccagttctcctctatagtgtccggaagaaacacagatctgctgacaccttgattttagcccaggagaaaatatgtgggactctgacctctagcagcataacataataaatttgtgggaggagccaagatggccgaataggaacagctccggtctacagctcccagcgtgagcgacacagaagacgggtgatttctgcatttccatctgaggtaccgggttcatctcactagggagtgccagacagtgggcgcaggccagtgtgtgtgcgcaccgtgcgcgagccgaagcagggcgaggcattgcctcacctgggaagcgcaaggggtcaggg

SEQ ID NO: 26914 - DNA, 2300 bp, Homo sapien
aaaaggctggagacgaggttcaccttgttttgtggagggctcgaatgccacgctcatgagggcgtccttcactcaggaaggaatgggagccgtccatcccaaggacctccctcaataaacatcccttccattcataactagccaatgccattttaggagctccgaatgcctggaggggatactgttttggttaaagataccatacgtgtctgccctctggcagctggaagtgtagaagaaattggggaaggggcgccatgaccccacagcatcacagaattggaaagctggcgggatgggggtggggaggaccttagttaacgccgcgcccccctctcagagagggttagtgactcggccaagttcacgcagccgggtccagacagagacaaacctcccttccccgtggtagctgcagaagaggaagggaactcttgcaaatcagaggccaagatagcagtggagtggcacgggggcggaaagcgcatccaaaggggagaaaaatgctgtattcctaggagtgggattgtcttttatttttatttttatttttatttttttattgttgttggcacggtttcggaggacttattcttgctgagttaactccctctcccactcttttttttggccatgcctggggaggattcgcggtgtggggggaaggcgcgcccctgcggcttctgaggctcatcttcccggagcggaaggaaggaatcaggcacctcctcccagccgcccccacgggctctggtccgccccaaggcttccctgagctcgccaggccccagggctgtgtggggcgggctcccggccaggcgcggtcgggacgcccgccggtccccaggttcggggcagcgcgcagcgcgggtccgcggcggcttatcctttttcgcgacccggcctggcagcgccgcgctccgcttggagggcactcggcggcagagttccgcgctgggaggggtgaggggaccagccgcctcctctgcggactcagatcgagcaggagagagtgggcgcggagctggggccagcgcagggccgtgggctcctctctgggcacgcatcctttacgccacgggctttcaggggctgaggggcctcgaaccttgccaatcaccagtgctgtgcgccccgcttgctttggggtgcgttaaacgtcaggagagagctgctcagatggggtcaccagacgccttctcccccttttctcggagcccgcgggttgcgcgataagccaacccagccggacgctgcgctcctataaatagagcgcgtgtgcccgcttcgcgctctccgggctgcacgagggacgagaaagttgtgcgcagggactgggggcgggcggccaggcaggagaggaccccgccggaccagccgccctgaacgctgcgcccggcgccctggacctgatcctgcgaatccgcgctttcggtgcgagggacctggctagccgctgcctccctccctacctctgggtgacaccaggtttgggggatttttttgaccaggcgaaagtgggagtcgctggcgtcctggccatgaacacagcctcgcgttcttctcagcctgggaaggaccttctgcctctgtaactcgtccctgccgcaagccagacaggactggcacccgcgccgctgggcacccgccacccttgtggcttctctttgagtcccctctttttgttcctgctccgtggtttagctggtggtgcttgagtttggggtgagaatttattattattattattttttgccttgaggtgtgaatgtgagggtttgatgactttcagatgtctaggaaccagagtgggtgcaggggccccaggcagggctgattcttgggcggaggagagtagggtaaagggtgctgcatgagctccttaaaggacaaaggtaacagagccagcgagagagctcgaggggagactttgacttcaagccacagaattggtggaagtgtgcgcgccgccgccgccgtcgctcctgcagcgctgtcgacctagccgctagcatcttcccgagcaccgggatcccggggtaggaggcgacgcgggcgagcaccagcgccagccggctgcggctgcccacacggctcaccatgggctccgggcgccgggcgctgtccgcggtgccggccgtgctgctggtcctcacgctgccggggctgcccgtctgggcacagaacgacacggagcccatcgtgctggagggcaagtgtctggtggtgtgcgactcgaacccggccacggactccaagggctcctcttcctccccgctggggatatcggtccgggcggc

SEQ ID NO: 26915 - DNA, 2300 bp, Homo sapien
agagaatatattggaattggtgaggaagatagcttattttctatttaacaattcaacacagttttttttttttttttttttttttttttgtcaaacttctcccagcctgaaattgaacaaccaaagttctagttattgaacagctgtcccagacaaggaaggcagggtgcttacccctacaggaaataaaaggaactaaattcaactcagcacccaccctcaaaagactgcatcaaatgagaagaaattgctgctgttaaccaggcagacatccctaaaatctggaagagagttacaaagtgcagagagggatcaggtgaagattgtgctgggcttagggtggggcatcaaagctgggtaaatggtggccatcttcagaaggcactagttcaccttgtttggttgtagcttagataggtaactttcaacattttaacaaatagcatggtactagcacctgccagccggaactgacaccggcctgtagtctcagctactggggaggctgaggtagtagaatcgcttgagcccagtagttttgcatctagcctgggcaatatagcgagaccaccccccaccacaagtaaaataaaatcataaagtcaaaacacctgatactggccccactggagcagaatctgaaggcccctgtggcaccaagtattaacactttagttgagagattatagggaggtgagggttaggggattcctcgtagtgtcttcaattttaacagttggagctggtgcttatagctcaatgcccggcccttctgaaggaagggaaaaaggctggagacgaggttcaccttgttttgtggagggctcgaatgccacgctcatgagggcgtccttcactcaggaaggaatgggagccgtccatcccaaggacctccctcaataaacatcccttccattcataactagccaatgccattttaggagctccgaatgcctggaggggatactgttttggttaaagataccatacgtgtctgccctctggcagctggaagtgtagaagaaattggggaaggggcgccatgaccccacagcatcacagaattggaaagctggcgggatgggggtggggaggaccttagttaacgccgcgcccccctctcagagagggttagtgactcggccaagttcacgcagccgggtccagacagagacaaacctcccttccccgtggtagctgcagaagaggaagggaactcttgcaaatcagaggccaagatagcagtggagtggcacgggggcggaaagcgcatccaaaggggagaaaaatgctgtattcctaggagtgggattgtcttttatttttatttttatttttatttttttattgttgttggcacggtttcggaggacttattcttgctgagttaactccctctcccactcttttttttggccatgcctggggaggattcgcggtgtggggggaaggcgcgcccctgcggcttctgaggctcatcttcccggagcggaaggaaggaatcaggcacctcctcccagccgcccccacgggctctggtccgccccaaggcttccctgagctcgccaggccccagggctgtgtggggcgggctcccggccaggcgcggtcgggacgcccgccggtccccaggttcggggcagcgcgcagcgcgggtccgcggcggcttatcctttttcgcgacccggcctggcagcgccgcgctccgcttggagggcactcggcggcagagttccgcgctgggaggggtgaggggaccagccgcctcctctgcggactcagatcgagcaggagagagtgggcgcggagctggggccagcgcagggccgtgggctcctctctgggcacgcatcctttacgccacgggctttcaggggctgaggggcctcgaaccttgccaatcaccagtgctgtgcgccccgcttgctttggggtgcgttaaacgtcaggagagagctgctcagatggggtcaccagacgccttctcccccttttctcggagcccgcgggttgcgcgataagccaacccagccggacgctgcgctcctataaatagagcgcgtgtgcccgcttcgcgctctccgggctgcacgagggacgagaaagttgtgcgcagggactgggggcgggcggccaggcaggagaggaccccgccggaccagccgccctgaacgctgcgcccggcgccctggacctgatcctgcgaatccgcgctttcggtgcgagggacctggctagccgctgcctccctccctacctctgggtgacaccaggtttgggggatttttttgaccaggcga

SEQ ID NO: 26916 - DNA, 2300 bp, Homo sapien
gagagaaaatctggcagccccaagtcatctggccaagttggaccatacaaatcttggacttctggtatcaaatgcattgatggtcctagaacccaggggctatccgtgtttaatcaactgttgtgggaaaaagagtcaggaccctctgattcacaatataagataacttctcttagcgggggtccacagaaaatgctgtgttccttatcttcagaacactttgaagagcagaacatcctttagtaaggaaccgagacccttatccccaattattaaggaggctttgaatttaaattttactgagagagactcatttaaagcagtttatactataatatgagtgataattaccttctattaggaagcattcagtcatttctcaattattgagtctttactatggtcactatgcagattttgggactaaaaatgaatatttttggtgagagaaagaataggtttcttcaaatctcagttcttgcgtgcaggaagtgcctggagaagaaaaggaggtagagagaatatattggaattggtgaggaagatagcttattttctatttaacaattcaacacagttttttttttttttttttttttttttttgtcaaacttctcccagcctgaaattgaacaaccaaagttctagttattgaacagctgtcccagacaaggaaggcagggtgcttacccctacaggaaataaaaggaactaaattcaactcagcacccaccctcaaaagactgcatcaaatgagaagaaattgctgctgttaaccaggcagacatccctaaaatctggaagagagttacaaagtgcagagagggatcaggtgaagattgtgctgggcttagggtggggcatcaaagctgggtaaatggtggccatcttcagaaggcactagttcaccttgtttggttgtagcttagataggtaactttcaacattttaacaaatagcatggtactagcacctgccagccggaactgacaccggcctgtagtctcagctactggggaggctgaggtagtagaatcgcttgagcccagtagttttgcatctagcctgggcaatatagcgagaccaccccccaccacaagtaaaataaaatcataaagtcaaaacacctgatactggccccactggagcagaatctgaaggcccctgtggcaccaagtattaacactttagttgagagattatagggaggtgagggttaggggattcctcgtagtgtcttcaattttaacagttggagctggtgcttatagctcaatgcccggcccttctgaaggaagggaaaaaggctggagacgaggttcaccttgttttgtggagggctcgaatgccacgctcatgagggcgtccttcactcaggaaggaatgggagccgtccatcccaaggacctccctcaataaacatcccttccattcataactagccaatgccattttaggagctccgaatgcctggaggggatactgttttggttaaagataccatacgtgtctgccctctggcagctggaagtgtagaagaaattggggaaggggcgccatgaccccacagcatcacagaattggaaagctggcgggatgggggtggggaggaccttagttaacgccgcgcccccctctcagagagggttagtgactcggccaagttcacgcagccgggtccagacagagacaaacctcccttccccgtggtagctgcagaagaggaagggaactcttgcaaatcagaggccaagatagcagtggagtggcacgggggcggaaagcgcatccaaaggggagaaaaatgctgtattcctaggagtgggattgtcttttatttttatttttatttttatttttttattgttgttggcacggtttcggaggacttattcttgctgagttaactccctctcccactcttttttttggccatgcctggggaggattcgcggtgtggggggaaggcgcgcccctgcggcttctgaggctcatcttcccggagcggaaggaaggaatcaggcacctcctcccagccgcccccacgggctctggtccgccccaaggcttccctgagctcgccaggccccagggctgtgtggggcgggctcccggccaggcgcggtcgggacgcccgccggtccccaggttcggggcagcgcgcagcgcgggtccgcggcggcttatcctttttcgcgacccggcctggcagcgccgcgctccgcttggagggcactcggcggcagagttccgcgctgggaggggtgaggggaccagccgcctcctctgcggactcagat

SEQ ID NO: 26917 - DNA, 2300 bp, Homo sapien
tcagggtgtttttccatactaaattttggattgctcatcttgcttaagatctttccaccccaaggatcctaagttttcttctatttccatatgcatatttttaatatttctcacacctacacacacatacatagttacatggagagatggatcattaattcacctagaatgtgcgtgtgtgtgtgtgtgtgtgtgtgtgtgtgtgtgtgtagggatgagaagactcagtgttttctgagttcatatgatctacatggggaatcagatctaacatggaccaagtgttaaaccatacttccaagaacaacactacattagtaggccacctgctaacttctgcctttcacattttccagcttaaaacatctccatcctccccattatgtaagaaagaagtacaggtgtttctgactgctccctctcccatgatcccataacccatcagttctgaagctgcattatccaaccttctgaatctctctgaccaccctccaagtcttccaagtccccatggccactcccttgctccaggccaccatcatctcaccctgggtctttgcaacaccctctgccccggactccctggcctacatgctcagtctgtctaattcattctccaccctgcaaccaggaatatttctaaaatgcagaccccatctcattcctgccctacctatgtttcttccacagtccccattgctgtcaaggtactgtccaaattctcacatctggctgaggctgtccttcaggattcaggcacctctcaactttttaagaaactgtgcagcctcatttctcagattgtgtctcctatttccatgctctgaccagagcagactactttcagcactttcaaaagcccaagattctttttcagtggagctcaactgtgactatgccccagctcacctgtcaaaaattgcaaacacacttgttcaggtcttacacctgggtgattctgactccgcgggtcaaatgggatctccacatccacaatctgtgatgacttctatggccagggtgctctctgcctccaggctgcagacgtgtgattccctctgcctggagtcctcttctacctcctccagctccagcccccaccccaccacccaccccaaactggatatgacctcttcctccttgaagtcaaagcataggtgctccttcctccaggaactttgacagtccgggttagggctcttcctctttgcatccctggtttcctggactttcctgattcaagcatttattgattcctcttcttccaccccagactctgagttcggggaagcctgagatagtggctgttgtcttgctcaccactgtatttcctgcactcagcagagacctgacacatagtaggcgctcaataaatgtttgctaaacaacaacaacaaatgaatgaactaacaaataaacaaacaaatgaacagatgagtggatgcctgtggcagtttccatgacaaacacaaagggctaagccaagccagcaagcagacagccgtgcggcctgcagagggcactagtctgcttcttaatctccctgcagaatcctcagggccaggtacctgctgtcagtcagagaggtgcccgatgctcagtggtcattctgctgcgctgaagattaagtaggagttgtttgcccttggccaatatgaaaaacctgagtgttctcccttcacttctagcgacaagtaacacatcccctgtcttgccatgaaaagagctgtaactgtagcagccggtggcaggttttctgttcccaggtggggaagtgaggagagacaaacagaggggtgagagggagacagaaggaagacagctggtaagagaccctatggtgtattttttctatgtaaacaagataaaaactgctcctcctggaacagcaaagttctccctatgtctccaagctacaaacttgcatgctagctactaactagctactctccctctctctctctcttcccccttcgctctttctctctgtgtgtatgtctctctctctctctgtctcttcctccaccctctctcactatctgtctctctaccctccccatccttttattctagaggagaataaactctaaggccagattgaatgagcatccaaaagacgtatctggagggagattttgtctttcctgtgagcagcagcagcttcctacggaccctgctggagccccagctcggatcagcccttctgacagcaatgaatgcttcgtgctgcctgccctctgttcagccaacactgcctaatggctcggagcacctccaagcccctttcttcagcaaccaga

SEQ ID NO: 26918 - DNA, 2300 bp, Homo sapien
aaattagccaggcgtggtggcgggcgcctgtagtcccagctacttgggaggctgaggcaggagaatggcatgaacccgggaggctgaggttgcagtgagctgagaccgcgccactgcactccagcctgggcgacaaagcgagactccatctccaaaaaaaaaaaaaaaagaaagaaaatcatgggaaccatgaggaagtcgagatcagatgccatctggaggtggcactgtcaccgggtgacagaggggcttcaggcaaggcatctctacaacatcccagctaacgtgtgtgccctctctgtgcaccaggcactgagtgaagccctttccaagaactgtgtcaaagaattatctcaacaatctcatgggggaaactattattatcttcattttacacatgaaaagaccaaggctcagagaagttgagtcactacttccaaatcacacagctggacttctagggccaacctgacagacaatctgcacccttaagcactcttccccagcttcttgcagacacttaaatggaaggattcccatccaggggcactttaggacctccctccaacagaccctgttactttcacagctataactccatcttatgtaataaatattttttaatgcatatgtgtttaatatcatttctgtgcctgtgtaagagcttggttgagttgaattgcagttgactaatagaatattacatcttttgtaaaatatatttctttttctttttctagagagacagggtctcgctctgtcacccaggctggagtgcagtagcaccatcgtggctccctgaaacctggacctcctgagctcaagcaattctgcgtcagcctcccgagtagttgggactacaggtgcatgccaccacaccaggctaatttatttttatttttgtagtgacagggtttcgctatgttgctcaggctggtcttgaactcctgagctcaagtaatcctcccacctcagcctcccaacgtgcttggattataggcatgagccattccacccagccagaacatctttattgaagtataatttacacagcataaaattcatccatgttaagtgtacagtcccacgagttttagttacacagctgtcaccatccctacaatctgggtttaggatccttccctcaccccaagacgttcctcccactccttggcagtcaatctcatttcccactcccagccctaggccaccacggatctgttttaggtctctgtgattttgcctattctgggcacttcatgtagctggaatcctccagtgtgtgacttttgtgcctagattttttcaattggcataagagctttgagattcatttatgttgtgcatgtatcagtagtctgttccctttaattgttgcattgcgtcccattgaagacttgtgccacagtacgtcccagtttatgggcattcctaattgttgactaatatttataagatctctacaaacattggtgtcttcacattttagtctttgagtgtcgagcctttgtttctcttgagaagctaccgaggagtggagttgctgggttgtatggttagtgtatgtctaacttttcaagaaactgccacaccatctttcgctttacattcacgccaacaatctatgagggtcagaggactttttattaaacatgtactaatatcaattctcatatttattttcttctttggagctaacacgtaaacatatctataattttttttcagatttcacccatttctgcagggagaaaagctcataagccacggccctacgcccacctttgtgcccgcagaataaggaaacccgccaactacacaccacagttagaaagcccaagaccctgaaaagacctgcacccacccccaaaggggcggggctggtgggcggagaggaggcggggcgcgctccttcagccccgcccaccagccctggactccggctcccgaggagcggagctagcgggtgagccaaggggatgtgcacaggcctcctcagtcccgcccagcgcgcgcgcgcggcggcgaagccggcgggcggggccggggagggccctcgccgggtcagctccgcccaccctccccggcctccgcccgcctcccgggtcagcggcgcgggtgctgcgcctagctgcgcaccatggccgggttgctggcgttgctgggtccggcaggcagggtgggcgcccgggtccggcctcgcgccacctggctcctgggcgccaccgccccctgcgccccgccgcccctggccctggccctgctcccgcccaggctagacgcccggctgctccgcacgg

SEQ ID NO: 26919 - DNA, 2300 bp, Homo sapien
acgcccagctgattttgtatttttagtagagacagggtttctctatgttggtagggctggtctggaactcccgacctcaggtgatccacccacctcggcctccgaaaatgctgggattacgggcatgagccaccgcgcccggccttcactgaagtttcttatcaaatatccccgcactctggcctgggcaatggagtgagaccctgtctcaaaaaaaaaaattaagattaccattttacaattaagcaaataattccatgatgaagccaggcccagactacaggctgcagcccttataaaaaaacagtgggtaagtaaaagttgataaacagcaacaaggaaatgcacacttgtgttaatcaaatatttaatttcacacatgctctaatgctttacttcccttacaattctaagtagcagtctaatgagatcacataggcctaacaacatttattcaacattcttctgacagaagctacaggcatttgctccaatttattctacctttctttctagggaaattgaataacaagcagaatggaataagattctaatccagaattctggagacaacgccaaggagactgcccttcaggtgactctaatctgcaaccagattgaagaaccagatgactttcacaggatccattcagttcaaaccagaagtcctactattttgaatagaaaagctgttaggctaatagcgcaggaggtttatacggtttattccttcctccctcagacctgtgcatgtctgcagagatgaagggaaggacgaactgagtaggttgctgaaaaacgtttaattcaagggacaaggaaggttacggaagaggaagagacattacgagagttaaggacagtggctacgtctacctcagccggatggttcttagaaatggagactctgaggcctaaccccaggtctaaaaaaacagattctgcattttaacgtccccagacgatttgtatgcaccggtctgcatccctagttctcaatgaaacctaagaatcatctggagagtttgttaataactagacacctgggtcctacccctcagagattctgatttaccgggctctcggtggagctatatgtttaacaagcactgcaagttatcccggtacaactgctccaaggtctacggtctgagaagtacggaccgggaaggcctctgcaaggaggttctcattcatcaattcacccactcatccagccaggacaagggccttcttaggctattctatctaaagcggcccccgttaaaccgcactcctgcttttcctctgtaacacccaccccagctgcaagttctccgtacgcttaccgtctgtctccccacccactagaacgtgaactccaacacagcagagaccttctgtgcttttcttacccaggtgatctcggaggacaaaatccaatctgaagcccacccacccctcccgcgcatgtcaacaccactcaacaaaccccttgtacctctagctgtaataagtaacaagcagtatcctacagggcgcctcggtgcccaggagcggatgcaaaggcgctgggcgggcacaaggcagcgccaaggacactcagggacggaggaaccgacaggggacttgacgctccgccactccgaccagccgccccttgtccccgccgtcctcgtccgccactgagatatcccccacggtctacccacccgtcggctcccacctgcgacccaaggacccaagtcttccaagagctcagccgttagaattcaaaggttcttctttttaaataggagttaaaccctctagctagaaagccgattggcctgcgctcgagcgaggctgccttgtgattggttgacaacaaacccgacgccttgagtcgcgtttaagggcgcacaccgcgcgcaggcgcacttgctccctaagaacccggaagtggtggagccaacggccagccagacctgtggcagtcccagccccagggtgctctccgcggtcggccatttatcggtgaagcaacagccccttgacgtcaagcttgacgcattggagataaagtccaaggaggtgaactaacctttgaacgtgccagtaagtaagatggcgagaaaagcaagagagagtgggaccgatcgatagcgcagcggtcggcttggcgccctttcagcgtgcgcagtgaacgtgcgctcggagcggtagattgggcaggattcgcgcctccatttttccaggagagagcgggataccaagagaaccggaccagctggtactgggacacggggagagtagctggtgcggtcggctggggcatttag

SEQ ID NO: 26920 - DNA, 2300 bp, Homo sapien
tttctctaaatgccccagccgaccgcaccagctactctccccgtgtcccagtaccagctggtccggttctcttggtatcccgctctctcctggaaaaatggaggcgcgaatcctgcccaatctaccgctccgagcgcacgttcactgcgcacgctgaaagggcgccaagccgaccgctgcgctatcgatcggtcccactctctcttgcttttctcgccatcttacttactggcacgttcaaaggttagttcacctccttggactttatctccaatgcgtcaagcttgacgtcaaggggctgttgcttcaccgataaatggccgaccgcggagagcaccctggggctgggactgccacaggtctggctggccgttggctccaccacttccgggttcttagggagcaagtgcgcctgcgcgcggtgtgcgcccttaaacgcgactcaaggcgtcgggtttgttgtcaaccaatcacaaggcagcctcgctcgagcgcaggccaatcggctttctagctagagggtttaactcctatttaaaaagaagaacctttgaattctaacggctgagctcttggaagacttgggtccttgggtcgcaggtgggagccgacgggtgggtagaccgtgggggatatctcagtggcggacgaggacggcggggacaaggggcggctggtcggagtggcggagcgtcaagtcccctgtcggttcctccgtccctgagtgtccttggcgctgccttgtgcccgcccagcgcctttgcatccgctcctgggcaccgaggcgccctgtaggatactgcttgttacttattacagctagaggtacaaggggtttgttgagtggtgttgacatgcgcgggaggggtgggtgggcttcagattggattttgtcctccgagatcacctgggtaagaaaagcacagaaggtctctgctgtgttggagttcacgttctagtgggtggggagacagacggtaagcgtacggagaacttgcagctggggtgggtgttacagaggaaaagcaggagtgcggtttaacgggggccgctttagatagaatagcctaagaaggcccttgtcctggctggatgagtgggtgaattgatgaatgagaacctccttgcagaggccttcccggtccgtacttctcagaccgtagaccttggagcagttgtaccgggataacttgcagtgcttgttaaacatatagctccaccgagagcccggtaaatcagaatctctgaggggtaggacccaggtgtctagttattaacaaactctccagatgattcttaggtttcattgagaactagggatgcagaccggtgcatacaaatcgtctggggacgttaaaatgcagaatctgtttttttagacctggggttaggcctcagagtctccatttctaagaaccatccggctgaggtagacgtagccactgtccttaactctcgtaatgtctcttcctcttccgtaaccttccttgtcccttgaattaaacgtttttcagcaacctactcagttcgtccttcccttcatctctgcagacatgcacaggtctgagggaggaaggaataaaccgtataaacctcctgcgctattagcctaacagcttttctattcaaaatagtaggacttctggtttgaactgaatggatcctgtgaaagtcatctggttcttcaatctggttgcagattagagtcacctgaagggcagtctccttggcgttgtctccagaattctggattagaatcttattccattctgcttgttattcaatttccctagaaagaaaggtagaataaattggagcaaatgcctgtagcttctgtcagaagaatgttgaataaatgttgttaggcctatgtgatctcattagactgctacttagaattgtaagggaagtaaagcattagagcatgtgtgaaattaaatatttgattaacacaagtgtgcatttccttgttgctgtttatcaacttttacttacccactgtttttttataagggctgcagcctgtagtctgggcctggcttcatcatggaattatttgcttaattgtaaaatggtaatcttaatttttttttttgagacagggtctcactccattgcccaggccagagtgcggggatatttgataagaaacttcagtgaaggccgggcgcggtggctcatgcccgtaatcccagcattttcggaggccgaggtgggtggatcacctgaggtcgggagttccagaccagccctaccaacatagagaaaccctgtctctactaaaaatacaaaatcagctg

SEQ ID NO: 26921 - DNA, 2300 bp, Homo sapien
aggctggtctcgaaactcctgacctcaggtgatctgcctgcctccgcctcccaaagtgctgggattacgggcgcgagccactgcgcctggcccagagcctgatttcttacacactgtatgacactgatggtgttaataataaccaataacattaagcacttcctgcatgccagataccgtcatgctaagtactttgtaagcatcagttcactgaataaaatcattcaatgtattcaagtatatgaagtagtacatgaacatagtaggtctatgcttgagtagaaaatcctgggacacaaataaagatgatgaaatgggttcaaggaggtcaggacacctactcaacgtaaaaagtggctgagttacttgtccaaggttaaagcacaccagaattgccaactccagatccctgagcttaaccactgaaggagttcaggaaatgccagcccaaaacaagatgctttggcgggctgattaccttgaactgagggcacctggagaacagcaggcgggaagaggctttccctgtgctttccttacctgcctaaagtctgaccctccaaaaatacctcaattgtcacgaatccttataaaccagggaagattaactcggatcacatgagagattagaggctgacaccacccagaagatcacctattctgtctgcataacaaacttgattcaccatacatttcctccgttcaccgtcccataacttgtgttagagctgcttcccgccccccgcccccaattctctattcattcctttcagtagctcaggatgccatgtaggctttaatcatctgacttcaacttttagtctcgtattttgtgggactcctgtacgtaattaaatatcgtttttctcccatggacaatgttcagttacccgaaaaaaatgggagattcttaagtaccaataaagaatgaaaatcacaagtgggtagtctggcaaagaaaagttgatgagagattctactgttaacgttgggttaatatgactcgaataatttccgtatgctagctcaatgctttacatgcacatcctgtttaccctgcagtaatctgttaattcgtcttatgtgaatttaactcttagtcctaataaggtacctggaaggatggagggaagccatttttggttcccctacaccactgttctatccggtctcttcacttctgctgagcacatcccgggtgtacatacacacacacacacacacatatgtgtgtgtatatatatgtatatgtgtgtgtgtgtgtatatatatatatattttaagtggcccacccctaacttctcaactcccacagaacgttcactcgccaggtaaacagaagcctaattatccccaatttgcaggtgagcacacgaggacaagaacccgatccaggaccggatacatcgcagttggaaaggctagaacacagatgccccctcactatatgcgccgcgaccatctggatgcagaggcgaactaaggactgggtgggaatggaagcgaggcccttcgagaagaggaaggggtgcaggccaagccgggcaacttaggaaacgcaaagtagaggcgcatgccaccttgctaactctcgactcttccagtctcgccccagtcgtttctgtggttttctctaaatgccccagccgaccgcaccagctactctccccgtgtcccagtaccagctggtccggttctcttggtatcccgctctctcctggaaaaatggaggcgcgaatcctgcccaatctaccgctccgagcgcacgttcactgcgcacgctgaaagggcgccaagccgaccgctgcgctatcgatcggtcccactctctcttgcttttctcgccatcttacttactggcacgttcaaaggttagttcacctccttggactttatctccaatgcgtcaagcttgacgtcaaggggctgttgcttcaccgataaatggccgaccgcggagagcaccctggggctgggactgccacaggtctggctggccgttggctccaccacttccgggttcttagggagcaagtgcgcctgcgcgcggtgtgcgcccttaaacgcgactcaaggcgtcgggtttgttgtcaaccaatcacaaggcagcctcgctcgagcgcaggccaatcggctttctagctagagggtttaactcctatttaaaaagaagaacctttgaattctaacggctgagctcttggaagacttgggtccttgggtcgcaggtgggagccgacgggtgggtagaccgtgggggatatctcagtggcggacgaggacggcggggacaaggggcg

SEQ ID NO: 26922 - DNA, 2300 bp, Homo sapien
tgtcttacttttctagttgaggttgttttccctagaaaaaacaacttgtgaattatagcattctgatctgtattatgagcttaagggcaggctcttcagtatagggaagaatcactgccgggagtctgccaagttgatggaaaccatctgaacttgagttactgtggagtcttttctaagagacttgaattcagtttctgggtctgttactttactctgtgaccttgggcaagtttatccatccttccttttcattacagagaatttcagacataaaagtcaacaatacagcagaaacagtggtttccaggggctgggggaagaacaagtaactgctaatggggtaaatgtccaggaattgaaagaggattactttttgaaatggtggttgcacaactctgaatgtactaaaaaccactgaattgtatacttcaaaaaggtgcattggccaggtgcggtggctcacacctataatcccagcactttgggaggctaaggcaggtgaatgacgaggtcaggagatcaagaccatcctggccaacatggtgaaaccctgtctctactaaaatacaaaaaaattagccgggcatggtggcacgcacctataatcccagctacttgggaggctgaggcaggagaatctcttgaaacctggaggtggaggttgcagtgagccgagattacaccactgcactccagcctggtgacagagcaagactccgtctcaaaaaaaataaataaataaaggtgaattttatggtacctgaattatatcttaatataatattaatatattattattaatataatttatatcttaatatctctatggatctcctccttgaaccaaactgttcattgcgtggggtcattgttccctccctgttatctgctatcgcctgcagcatgccaattacttggccctgaagttaatttctaacaatgataacatttaaaaatgtggactgtctcagccagaaatcagtcagctacttcaatgggtaaatacatcctggtgcccagacttgtggggacgacacatgggacaaccagaggacaagacgctaagtgctatctgttgaacttgcctcagaggtgtggtaaaagaaaagaaaatttaaaaataaaaaattaaaaaatgctgtctgacaagaagatagcggtaagctatcccccacagctggttggggatagaacttgagcctggcttggaagaatgggcaccattttgtctaaataaaaatgcaggccggggccaggcgttgtggctcacgcctgtaatcccagcattttgagaggctgaggtgggtggatcacttgaggtcaggagtttgagaccagcctggccaacatggtgaagtcctgtctctactgaaaatacaaaaattagccaggcgtggtggcgggtgcctgtaatcccagctgctctggaggctgaggcaggagaatcacttgaacccgggaggtggaggttgcagtgagccgagattgcgccactgcgctcccacctgagtgacagagaaagactccgtctcaaaaaaaaaaaaaaatgcagacttattttgctcagtgtctgctatgctgtaggtcctctctagagattggatctgaatttaggaaaagtaaaaagagttggcaagtgatgataaactgcatgagctagcaggggtttcaagtacaacacacacgataagtttatttgatttaagagagagaatacaggtgcggggctcagcatagccctcagtgcagagccagtacccagaagatgttattcattaggtaccatgagcaaagaccaggagatgagcatggggttccgagcagggtgaatgcacaactgacagggtgggtagagtggagactgtgtcctttaaggcagcctgtttgactgcttttatcctggctgtcataaggcaagttttagggagcaggaaggaagaaatgctgaccgctatcagaaatttggcctagtggcctctcatcagggaaatgagcttggtctgttcggttggagttgttccacagagttcaaaggacaagaatgctgtgtgttcatacactgagctcttcgaagtaggaacttcgccctataaagcagaagagtggtgtttttttcttcttcttcttcttttgtggtttcacatagcaaatgagtgacagtctctacttacagacaaagtgagacgtcaggcattgagacgtgagtgtggcttgtatttctggtcctcccctgcttcactgctttcattttactcttatcgtgctttccagaaagtttgcctgctgggagagtcttt

SEQ ID NO: 26923 - DNA, 2300 bp, Homo sapien
aatgagaaaagaacactggtttgagtctttctaaagatgctggtgtttctgctcttctgtatttgactttctttcctttgctgtgagaaagaactaatcctagcactcattcccgggtctctcactgcctatgtgaccttgaaggagtcatttgatctttccacgcttctgtttcctcaccagtaaatggaattctaatagtactaaccagttttagtatctgccaaaactaggcttttcacccctttctcaatgaatctgtactttcttttggtttactgaggaaatgtactcatatattgagtgtgccaaagactcttctaggcactgatgatacaatgtggaataaaagtcctggccgggcttggtggctcacggctgtaatcccagcactttgggaggccgaggcaggtggatcacctgagatcaggagtttgagaccagcctggccatcacggtgaagccccgtctctactaaaaatacaaaaattagcccagcatggtggcgggcgcctgtaatctcagcgactggggaggctgaagcaggagaatcgctttgatcctgggaggttgaggttgcagtgagccgagatcacatcactgcactccagtctgggcaacagatcgagactctgtctaaaacaaaacaaaacaaaatgaagtccctaccctcatagagcttacagttattgtggttagcatagaaataaatcataaatcaatcagagaccaactaattaaagggattattttttaaaattctcattaatcacagtaacaagtaccccaagcttacatatagcccttgaagtttccacatccacgtattttctgggcaactcttcccaagtaaaaaatattttcagcgtttttatgtttcacgtaggtcaatagggtaatatccaatcataaagatctgccttcttggcaatggagaaattttcccatcatatatatgtacaaatacatacatacatacatacatacatattaatgacagagtcttgctctgttgcctaggctggagtgcagtggcataatcataagctcactgcaaccttgaattcctgggctcaggcaatccttcctaccccctcagcctccggagccgctaggactacaaaagcttaccacaacgcctggctaatttttctttttctttcaagatggtgtctcaccatgttgtccaggctgacctggaactcctgggctcaggtgctcctcccgtctcggcctcccaaagtgctgggattataggcactttcccataatatttataataattaaaggaacaaacagagagatagacaatcgcctaagagcagacagacaatcatgaatttttagcaagggatttgtgttcttatagataaaatacagcctgactcttggaacgggcatggcaacatcagtgtatattttataagaactattatatcgtctattaatgatacttgattgttaataaaatttttttagcctgggcttcaggaaactgtgaatgaaatacacacacgcacaaactgtatgcaaaatttcacacacatgccatctacaatatgcatggcaacaccagaaagttccaggccttaagggagggtcttacttcctagaatctgttgtaacatcacttcacaagatttgttgtgagtgcttgagtcacagttggcgctcaagaaagatgcgttctccttttaaacacaaaaatgtccattgatacagcagattccgttcataggcatccttaatcgcagaaacaggagggcggcccttttcctcaaggcgctctcagtccagggatgtgcccgctccgcagccacacaagctggcgtgggatagggtcaaagagcggtggatgcgcacgggccgcccacgccctcgctgccctcccggagcgtgggcgagtgattccgattgtgcagcagaaacccagggtctcacgggaacgaggaaacccgcccacgcccagcctccaagcgacgctctccatgacaaccggcacttggtaacggcctcgccctgccccgctacgccgcgcctagcgtgccgccccgccccgccccgctacgccacgaccagcgtgctgcgtcacggcggtgcgccggaagtggctgcggatttcgccggaaatcccggaagtgacagctttgggggtttgctgctggctctgactcccgtcctgcgatgggttgcgacgggggaacaatccccaagaggcatgaactggtgaaggggccgaagaaggttgagaaggtcagtgatgtgggccggctcttggcgaccgggggtggtgggaattt

SEQ ID NO: 26924 - DNA, 2300 bp, Homo sapien
gtgtggggaaaatcccatacattttgtccgaagtgttctggaagtattgagtgttgtgagtgaaagtatagaaaaaacacttgtctggccaggcgcggtggctcacgcctgtaatcccagcactttgggaggctgaagcaggcggatcatgaggtcaggagatcgagaccatcctggctaacacagtgaaaccctgtctccactaaaaatacaaaaaagttgccgggcatggtggcaggtgcctgtagtcccagctactcgggaggctgaggcaggagaatggcgtgaacccaggaggcagagcttgcagtgagccaagatagcgccactgcactccagcctgggcgacagagcaagactccgtctcaaaaaaaaacaaaacaaaacaaaaccacttgtacttgtctttccagtacagatatgtaaaaacttaaaagaagaaagaccctaggaaagaagagagaccctggtaaacacattttttactgctttttcgggggaaacaattttcaaagccctggataaggagtgatttgtcacttttctccctgtccccaactctctgaggtgctttttgaatataacctaatctcttggtgcctcactttcctcatcttcaaaagtaaaaatactaactcatagagtttttctgaggattaaaaagttatggaaactgcttagcacagtgcctggcacacagtaagcacttaagcagtttttactttaaaaattaaattcagagggccaggtgtgttggcttacgcctgtaaactcagccctttgggagatcgaggcaggagaatcacttgagctcagcagttggagaacagcctgggcaacacagggagacctcttaacaaaaataaaataaaattagctgggaattggcgcttgcttgtagtcctagctacttgggaggctaagggggaggattgcttgagcccaggagaattgaggctgcagtgagctgtgattgtgccactgcagcccagtctgggcaacagagcaagaccctgtctcaaaaaataaattaataaaataaattcagcaggattgtttttgtcttctttttttcttttctcttcctattttcttccaaatgtgctgtcctgttaaattattcagatttggcatttgaagaatgggaaagagtggtgcagtctacacagtgaaggaaaaaacaagaacgggaaggagtgggacatggaatatgatgtatgtgaaaatgtcattcgagggccagggagggtcttatgtctggattttcatactggggataaagtttgatgtatcccttagtgaataagccccaaaacacttatttctgttaaattgaacattttataaagaattatgtagtctttgttctgaactttaaaaaaaaaatgcttgtcttctcagttcttaagtctttaaattctgccgcaacttagcaggctttcccattgttagaaattaatctaacacacttttttttttctcttttgtatggcctccctaagttattattaagattcagatgttaatatttgtatgtggcttgcataaacagtttaataattttatataatcttctttttctttgtacatgtcatatttagatgggcgtttatttgatgtagtattaattacttgtgacttttaaaatcctgacttcagccaggcacagttgctcatgctttcaataccagcagtttgggtggctgagatgggcggatcatttgagtccaggagtttgggggcagcatggcaaaaccacgtctctacaaaaaatacaaaaattagccagccctggtggtgtgcacccatagtcccagctactccagaggctgaggtggaaggtttgcttcagtccaggaggtggaggttgcagtgagtgaagattgcgccactacactccagcctgggcaacagagtgagaccccgtctcaaaaacaaacaaacaacaaaccaaaaacccaacttcctatgtcattatctttgatttaaaaaacaaaaatcattacagtgcggtattactgaatatacttttatatgtagaattgtgaaccatgtgtctttcagagttgaaaattaattgaattttttgttttttattaggtcgacaaagatgctgaattagtggcccaatggaactattgtactctaagtcaggaaatattaagacgaccaatagttgcctgtgaacttggcaggtatggtttttacacttaatcaagatgagtttgttaagtgattttgagaattttgatgtgtaaatgcagttttccattcatcaagcgtggattatcccaagcaaa

SEQ ID NO: 26925 - DNA, 2300 bp, Homo sapien
ggcaccactcttcaaggctcctggccagcttgagggaagaaggtatccatgatctgtgctcctgctgggcatgaggcctcaatacaccaacggctggggagggctgatcattcgcattatttttagggctcactgagcagccaagcacttgacaggcttcttcccctgggactccccagccacccagtgcaatgggaagatggccatcccccactttataggtgaggtgcctgaggcccaaagcagcaaggcgaatgacagttctgcctggccacaccgcaccttctccccattcagtccgtaccaaatgaaggaatcagtggcggctggggcaggctcccacccaggcgccgagaccacgggttcaggtgctgtgcccaagaggaaagtggggcatctcctagctctccctcctcctccgtccacctccaggacccaagctgctttccaccaaggagggagctgggaggagaaaattgaaaagatgttgaaattctccaaaatagcatctattcaatttcccacagtatcggaggaaccagcccccaatatttcaatgtaggttcttttctcttttccctaagcatcggccggtctgagaaagagtacaaaagagagaaattttacagctgggtctctgggggtgacatcacgtcagcaggttctgtgttgctcccgagccgcaaaaccagcaagcttttattagcaattttcaaaggggagggagtgtacgaataggttgtgggtcacagagatcacatgcttcaaaggcaataaaatatcacaaggcaaatgggggcagagcgagatcaaagtccagggcaaaattagaattgctgatgaggtttcatgtcccactgtgcacgcattgtcattgataaacatcttaacaggaaacagggttcaagaacagacaaccgatctgactagaatttcaccaggctggaatttcccaatcctagcaagcctgggagagctgcaggagaccagggcgtatttcatcccttatctacaactgcataagacagacactcccagagcggccattttagagacctccccctgagaatgcattcttttcccagggctgttccttgctgagaaaaagaattcagcgatatttctcctattcgcttttgcaagaagagaaatatgactctgttctgcccggccccgcaggcagtcagaccttaaggttatctcccttgttccctgaaaattgctgttatcctgttcttctaggatgcccagatttcatattgttcaaacacgttttacaaacaatttgtacagataacgcaatcatcacagggtcctgaggcgacatacatcctcagcttacgaagacgacggaattaagagattcaagtaaagacgggcataggaaattataagagtattgattggggaaggaataaatgtccatgaaatcttcacaatttatgttcttctgccgtggcttcatccagtccctccatttggggtccctgacttcctgcaacaccacagcacttcatttccaacaaatgaaatgaaagctgtgccaaaatgaatgaaagaagtgccgccccaccccacagcccagacaagtttggctcaaagatctggtctgcttacccactggtcctgctctattggagagtgctgtagacttttgaatacatataggaaaaagtgattcccattattaaagactgaacatttccaaataacaaaatcacatgtggcaaaacttgtgagcatttctgttgtttggggccattcctgtaaaccacgtctgtttgccccttactgctccatcgcaccacagccaccaaacttcccagccgacttaagacacgggctgactgagcactgtggctcctgtctgcagtcccagcactttgggaggctgaggcaggaggactgcttgagcccaggagttttgagactagcctgggcaacacagggagaccctgtctctaccaaaaatgaaataaaaattatccagaccctgtctctaccaaaaacaaaacaaaaaaaaaaacaaaaattatcgaggctgcagtgagccaagatcattccactgcactccagtctggatgacacagcaagaccctatctcaaagaaaagacacaggctgtgtatggacatgggggcctctgaaaataattagccatccctcaaagctgctggaatggggaacactggggacagggagccgcatgatgccaaggacaggcctccaaactgaggtcacagggtggcccaaggccctggaaatcagggcagctgcctctacagtgggtgtaattccagg

SEQ ID NO: 26926 - DNA, 2300 bp, Homo sapien
atgacacagcaagaccctatctcaaagaaaagacacaggctgtgtatggacatgggggcctctgaaaataattagccatccctcaaagctgctggaatggggaacactggggacagggagccgcatgatgccaaggacaggcctccaaactgaggtcacagggtggcccaaggccctggaaatcagggcagctgcctctacagtgggtgtaattccaggcagtagctgccaagctgagtgggcccctgcaagaagagaagtgcccgtcttctggtcaacctggagatttgcatctctccatcgtgcccagtctctggcaggaagccccactccccagccgacactgcaccatgctcatggaggaagaagctgtgcagcacagcccaacagcgttttcccctttcggttttctagagtagtcttgcagaactattttttggtttttttttttttgagagagtctcactctgttgcccaggctggagtgcagtggcaccacctcagctcactgcaaccaccgcctcctggattcaagcgattctcctgcctcagctccagagtagctgagattacaggtgtgcaccaaaacacctggctaatttgtttttattttcagtggagacaaggtttcaccatgttggtcaggctggcctcaaactctttgacctcaggtgatctgcatgccttggcctcccaaagtgctgggattacaggcatgagccactgcccctggccatagtcttgcagaactactttgtcactccacagagatcagtagtttaaggcacagcgaaggtgcccagctgaactttgattatttcctgtgcagcataaagttctgctcctcgggagtaaatctgcaaatcagagccttcctcaggaagatagctctacagatgacccaggggaacaagtacaagccgtgcgttccagcacccaggatttcttgtttcatgtcattttaaagaacacatggtttcgagtatactatggagtcctaggtttattcccagccttggcctcagttgtcaagctagctgttcctttttacttgggggattcagccccttcccattttacccaccaactcttaatcatctcccctgctctactcaaccatctttttctggacactcttcctgcttcctgcataacctagtttagagcagtccccttatgctagtctctaaagcttcctgttcttatcacaattttaatcaaagtatactctctctctttttttttttcttcctgagatggagtctcactctgttgcccaggctagagtgcagtggtgcgatctcagctcactgcaacctctgcctcccaggtccaagtgattctcctgcctcagcttcccaactagctgggcctacaggcctatgccaccatgccgggctaatttttgtttagtagacatggggtttcaccatgttggccaggctattctccagctcctgacctcaggtgacccacctgccttggcctcccaaagtgctgggactacaggtgtgagccaccacacccagcccaaagtatactcttaacccagggtgggcacacactgctacgatcaatgatggtgtgaggtaatagtgagtggtggggactgtggagggaatatggccaccgaaaggacggtttcacttggctgcagcagagagactggttccatgagggtgtgcactcattgtttctggacctcccatattttcaaaggaagccagaatgtggagttttaaagtgaaatgccccccaatatttaagtactgacaatttttaaaaacaatgtaggccaaacaaaacacataggtgggccgggcgcagtggctcatgcccgtaatcccaacactttaggaggccgaggcaggtggatcacctaaggtcggaagttagagaccagcctgaccaacatggagataccctgtctctactaaaaatacaaaattagccaagcgtgatggtggatgcctgtaatcgcagctactcaggaggctgaggcaggagaatggcttgaactgggaggcggaggttgcggtgagctaagatcattgcactccagtctgggcaacaagagcaaaattccgtccccaaaaaaaaacaaaaacaaattttttgtttgtttagtttgagccacataggtggctccaaatttgtaggtagcctgtggtttaatatctttctctcccgtttaactcagctccacggggcacatggcatctccctctgctcatcacaatgtctggatcaaacaaatgaaaaacaaaaacatgatggcctctcccagcaaagctccaggg

SEQ ID NO: 26927 - DNA, 2300 bp, Homo sapien
aagtgattctcctgcctcagcctcctgagtagctgggattacaggtgtcttccaccatgcccagctaatttttgtatttttgatagagacgggttttcaccatgttggccaggctggtcttgaactcctgacctcaggtgatctgtccaccttggcctcccaaagtgctgggattacagacataagccaccatgcccagccaccatattcttcccgggaagatgctgcccacccttcagggcccggggttgggacccttgagggacgcctatgccttcgaggcagggcctccttcccctgaggccccaggcatctgggctgctgtctgccctgcctccctctcctgcttctgctgcagccgcagaagccatggcctcctgcctcatggtcttggtcttccttgcgccctgggtgactttgatgcttgtgagggtgacagcactggtcaactgggtaccggccccagagatgcctatgcactcattcctgggacctgtgggcctgcagttcatgtggcaagagacattttgcagatgaattaaatgaaggattttaagataagtcatgatcctggctgcaggagggcaggtcaccattctccaagaaagggaacctggccccttggggaagtggctgattccaggatgaaggcaggcaatgaaccagatgagcatggagcatcttgggttgccagaaagtaaggaattgctcaaaagaggaaggggcttgctcacagaacacaagtgccaacccgaagcagctcctaacgccaaaggtgggaaaggtggagccagaaaataatccaaaaaaaaaaacacacctgtaagtccatacagaaacccatccatcaatcatcggcgaaggaacagctcttcttacagcagaattccaatcaataaacactgtaggagagaggaaaatagaaatcaccattaggcaagcacctaagtatgtacagagatgccatcagccacagtaacatgtaaaatatccacattttgaataagtaggataaagaacatgtcaattaatctgggagcccctggttagcacacttgtatccaaaactccaatggcataggatgaatgaatttttctccgttttcttgttaatttaaaataatagagatggggtctcactatgtagcccagggtggtttcaaactcctaggctcaatcagtcctcctgcctcggcctcccaatgggctaagattacaggtgtgagccaccatgccgggcctctcctttttgtttttttcttttgagatggagtctcgctctgtcacccaggctggagtgcagcggtgcgatctcaatgcaacctctgcctcccgggtttgagcgattctcctgcctcatccccctttttttttttttaaatccaattattgacaaatgtaactgctagtgtggtagaaggaaaagtcaatatacacggaacctttgacagggaatgagtgaaaggactcttgtggtgagagaatcagataactctagaatacacccctcctaattgaatcattttaccattttaaaactatcattaatgctgtcttttgtaataaatcaaagataaaaagcagttctgcatcttgcacaaatagatgctatagagagcaagagtttgtatggaagtgacgtcagcatcttatcccagatttccctagctccatcgtccacccgcggccattgaacagaagcacgagctcatcacgtactattatgtagctttcggtgttcttctcaccacccacagctctagatgacgtgagagaggcaaaaacaaaaccatcactgctatggctactggtctcccattcactttttcttctagtgaaaaaaagaaaagaagcaagctctcaaacatggaagttcttttcttcagaatagttttattagtttgcatacagtttgtcaacactcaacttttttctctcctgacacacaaatccattcagctagagctttcttctccccatatttcacagatcgtgacatggtatggatctgcaggcatctctgactttcgaagcctgaggttactgccactacctgttgccatggcacgtttaagattccgcactttggacacaaatttcataagctccacctcgagttccattaaggtattgaatgcacagtctttgttgggggaagcatttctttttttctttaatggagagtgaagttggccgcctcgaaggccaggaggactctgctcctgtcaggaaagatactcaaggtcagtaatattgtgaactttgttggttttgacacagttcgtgttacaacagcagac

SEQ ID NO: 26928 - DNA, 2300 bp, Homo sapien
agctcattgcagccgcaactcctgggctcaagcgattctcctgcctcagcctcccaagtagctaagattacaggcatgcaccaccacactcagctaatttttttttttttttttgtatttttagtggcgacagtgtttcaccatgttggtcaggctggtctcgaactcctgacctcagatgatctgctcacattggcttcccaaagtgctgggattacaggcatgagccactgcccctggccatagcttgtagaacttctttgtcactccacagagctcagtacaatttaaggcacagcgagggtgcccagctgactcttgattatttcctatgcagcataaagttctgctcctcgggagtaaatctgcgaatcagagccttcctcaggaagatagctctacagatgacccaggggaacaagtacaagccgtgcattccagcacccaggatttcttgtttcatgtcattttaaagaactcatggtttcaggtatactgtggagtcctaggttcattcccagccttggcctcagttgtcaagctagctgttccttctcacttgggggattcagccccttcccattttacccaccaactcctaatcatctcccctgctctactcaaccatctttttctggacactcttcctgcataacctagtatagagcagtccccttgtgctcgtctctaaagcttcctgttcttatcacaattgttttttcttctttctttgttttttttttttttttgagatggagtttcgctcttgttgcccaggctggagtgcaatggcacaatctcagctcaccgcaacctctgcctcccaggttcaagcaattctcctgcctcagcctcccgagtagctgggattacaggcatgcaccaccatgcccagctaatttttttgtatttttagtagagatggggtttctccatgttggcttggctggtctcaaactctcgaccttaggtgatccacccacctcaccctcccaaggtgctgggattacaggcatgagccaccgtgcccggcctcttaccacaattttaatcgaactatactcttttttcttttctgaaacacagtctcactctgtcacccaggctggagtagagtgtcttgatctcagctcactgcaacctctgcctccaaggttcaaatgattctcctgcctcagcctcccaagtagctgagattgcaggcgtgcattgccacacctggctaatttttgtatttttagtagagatggggtctcgctatgttagccagattggtctggaactcctcctgacctcaggtgatctgcccaccctggcctcccaaagtgctgggattacaggtgtgagcccctgcccctgtgcctggcccaatgtatactctttttttcttttcttttcttttcttttcttttttttttttttttttgagactgagccctgctctgttgcccagactggagtgcagtggcgccatctaagctcactgtaacctctacttcctgggttcaagtgattctcccgtctcagcctcccaagtagctgggattacaggcacatgccaccatgcctggctaatttgtgtatttttagtagagatagggtttcaccatgttggccaggctggtctcaaacttctgaccttgggtgatctgcctaccttggcctcccaaagtgctgggattacaagtgtgagccaccaggcctggctccaaagtatactcttaacccaaggcaggcacacactgctgctgtcaatgatggtatgtggtaatagggagtggtggggactgtggagggaatatggccacaggatggatgatttcacttggctctagcagaagactggttctatgacagtgtgggcccagtgcttccagaactcttcatattttcttttctttctttttctttttcttttttttttttttttttttttgagacagagtcttgctctgttgccaggctggagtgcagtggcgtgatctcggctcatcacaacctctgcctcctgggttcaagtgattctcctgtctcagcctcccaagtagctgagactacaggcgtgtgccaccacatccagctaatttttgtatttttagtaaagacggggtttcaccacgttggacaggatggtctcgatctcttgacctcgtaatctgcccgcctcagcctcccaaagtgctgggattacaggcgtgagctgccgcgcccggccacgctctcatattttcaaaggaagccggaaacctggacttttaaagtgaaatacccaccccccacaacatttaagtactgactaa

SEQ ID NO: 26929 - DNA, 2300 bp, Homo sapien
tttgggcccacggcacggtgctgcgcgagccctcagtgcccatcggctcccttcgcctcctgcgtagacgctcccaggcggggaggcatatcggttcctccgggcagctttggctagtgttgctgtgggaaaggagagccagggcctgggatgggggatgagcaccttcttgcccattccgggccccagcgtgcaggaggtaaacttgccagcacagacaagacagcttgttcaagctgcacctcaggccgggtcagagaataaaaccgagggctagaaggcccagaatgtcggacagcccagcggcacccgtcagggagtcccaggcgcccgaaagaggcgccgcacctctggcgagtctaggacccatcttcctggacctgtgctctggagtgcctgcgggcctgggtctaatttctgcttctggcaggtgtccccctcccccgccgctaataccaggagcgctgcttctgcggtaacttattttacccccagaagcctgttttgggaccgaagtgtcagggtcctgtgtgtctttttatgcactgttctccttagtgcaaagccctgcagatatgcttggccgaaaagtctcagtggtttcaacttccagattttgttcccgcgtccggtcggaaaatcacctgggatttggctgctgtctaaggccgggggaaagtttcccttggaggacgcctattattattattttcttttaggcccacctgggtctaaataaatgctaaagttcaaacgaacccgagaaggaacagcgaggcagtggatgccgccattccgtggatgggagagtcatgtctactgcaggtgcggacaccgtactgataggcattgattattgcaaaatcgtattcagtatcaaatagaaatagtcttgtcctctaatccccacagaatgtttaaatccagcccagggagccagttggggcgtcccaacaaatacgccctcgagaattagcgatgttccccttacaatgaaagtcaattgctgcataataactgggccaaagaatttcgttagtttaaattttaaaaattagtattgcactttgctttcaagtttgggtggcaagtaccgaaggggagagggaagcagcgtttgtgtggaaggaagtttcgttttctgtctaaacatgtgggacctgggtgtctacctctccagtcgagagctctctgcaggctctctcccaacttcctgcacctcctcaccctcaccttacccgtggcgctcgggttttattcctgcccggcgcttctttcccagggcgagtagaggcttctgagtgaccggcccgccagaggcagctgcagagccggcgttccgcagggcagggcagggccgggccgctgggctggtccagtgcgcgcgggttccccctggcctcagccagccgcgggagatgccacttcgggcgacagcggcgagacgccgctgtccgcaactcctgggcgggtaggaccgtctgctgcctctgcggcccttggggcagactccccaggagtcccttcctctctcctcccgcccgggggccgggaccgcgctgtgcccacggagggaactgggcgtctctggcgcactggggctccagctgcatgatcccagctcagaccttaagcctcagtggggtgtaggtgggatgggatgtgtttttaggagatgaggagaccccggttgttgagtcgctccccaaatgcgcagtttcttaactccaggtgacatccgtcttttggaggaacgagtgaaggccgtttaggcgaaagaggggtgggtttcagtatttggatcccttcccccagctctgccaatctcaggtgtgtttacggtggaggtgacagaaggaaggcgcgtcgggggacccaggcctcgcaggtcttcggctgtcaacgaggcaccgcccactgactccgcgcttcgtccctcacagcgtggggctcggcgctgcgccaggcccgggtgcggggcggagctaggctgggactggctgggggccgccccgcccggcgcctgggcctccgcgccggcccccggggaggagttatgataatttccttctcattaaggcgctcgggtcccccggctatcgccaggacacactgttcgggcgcggctttccccgtccgcggagcggtcttgacactcgcggcggcagcatctacgctcgcagagccgccgatgcgtgtccagtgacccggacagcaaggcccgcgcgcggcgggggcggcggcagacgcctggtcaccgtgaccccgattttggatttaccgcttgggggctgggggga

SEQ ID NO: 26930 - DNA, 2300 bp, Homo sapien
attctgccggcccgggacctaccactaaatacttaaaatagaagactagcggcagggcacagtggctcacgcctgtaatcccagcaccactttgggaggctgaggcgggaggatcacctgagatcgggagttcgagaccagcctgcctaacatggagaaaccctgtctctactaaaaatacaaaattagccaggcatggtggcgcatgcctgtaatcccagctactcgggaggctgaggcacgagaatcgcttgaacccgggaggcagaggttgcggtgagcagagatcgcgccattgcactccagactgggcgacaagagtgaaactccgtctcaaaaaaaaaaaaaaagaaaagaaaagaaaaaaaaagaaaaaagaaaaaaataaacaaagaaagaaaacaaagaaaattagcaatggcaccgtttcttccccagctccagccaagagagaatggggcatccggcggcccggagaggggccccaaggcgctcggagcgcgcggtacgctaaggcgggcgcaccacgaggggacaggtagggcttgacagggagggtaagggggtgcgacggccgcgatgccagagccaggcagggctgagaggggcccaggaagggcggcaaggcagcctcgccgggaagggccctttacatccaggtagcgcgagccgcgccggcccgggacagctcacatgaccgagccccgcgctttgaacggcccttgcctccagccccagagatgcggccggcggcgtaacatggaggggacttcggaggatccctccttcccagtaacccctacaggctcaccgaacccagcgcgcccgacctgggggcgcacacagcttgggagtcatagggctgtgggtgggagaccctcgggcaggcactgcgatttcagccaggagcggaaagctgggcgggctgcatagaagaagcggctccctccctcccagtctcaaagtgcccccgaaaggagacgcgtaccctcgcctgcccttactcaccgaggttgacgaagctcatgaccatgtcggcgtcggtgaggaaatggctatcttgcaggctggccagaggggggccctgggtactgaagacggccttgtaggggtaggagaagccctggccgccgggcccgccgccctcctccaccgccatggcgttgtacaggtccagcatgaacatgggtgccgagttgtgcttgccctggaggtgcgggcgcgggcggtggggcaagcccaaaatggagaggatctcgcgctgcatctcccgccgctcctggctgcggaggcgccggtggatgaagctcgagtgcacctcgttgtccaggctgaagtcggccagggcggagcgcagcaggaacaggggtgcccagagcgccacgaagctgtgcggcgccgcagctcgcagtgagcgcacgtgcatcgcgccggctctacgcgctacccgggctccgggctccgggcccgcaccgccccaggtggcagagggggcaggcggccgtccgcgccgctcggtcacttgctgcagacgggccccgctgcgcccgcgccagacatggcccctccccggccggccgcgctctgcccggacccccgccccctgctcggtgctggccccgggcccctcgccccgcactcgcccgggcgcaccgcagggcttggaaagcagccccggcgaacgaaaaggcgagtgaggaggcgggcgcgggtgggaggagcagccagcaagcctaggagtccagagagccaacgccggggaggcagcgaggaggcaggcgggcgggcgagcgctccttcttcccgctcctctggcgctctcgccctcgggcggcggcaacccaccctcttccaacctccggcgcggatagcaggggccccggggcgctctcccagccttgtgcgccctggatcgcacaagaggccgcctcgggagcgccagagtggtacgcgctggggcctgggcggaggaggaggaggaggaggacgggcttcgaggggcccctcccgcgccggcggcctcccacctgccctcggccccgccctccccccagctgtgcccagtgggttcattcattccctctagagcgctcgacaaatgtttactgagtgcccacggggtgcctagagcctggcgggacgtcgcggggatgcggctggaggaatcggagccggccctgccctctcggcactcgcggtccggaccaggaaggcggcccgagcaggacgggtgggctgcggaccgcggtgggaaaagttgggggagcgcggaggtggcgcggaaatagaaggcttcctgg

SEQ ID NO: 26931 - DNA, 2300 bp, Homo sapien
tgttccatcccacagcctggggcctgtgtgtaaatggccaggacctgcaggctggcatttttctgctccttgcctggcctctggcctcccctttctccacccatgtggcccctcaggctgccatctagtccaaaagtccccaagggagacccagagggccacttggccaaactacttctgctccagaaaactgtagaagaccataattctcttccccagctctcctgctccaggaaggacagccccaaagtgaggcttagccagagcccctcccagacaagcgcccccgcttccccaacctcagcccttcccagttcatcccaaaggccctctggggacccactctctcacccagccccaggaggggaaggagacaggatgaacttttaccccgctgccctcactgccactctgggtgcagtaattcccttgagatcccacaccggcagagggaccggtgggttctgagtggtctggggactccctgtgacagcgtgcatggctcggtattgattgagggatgaatggatgaggagagacaggagaggaggccgatggggaggtctcaggcacagacccttggaggggaagaggatgtgaagaccagcggctggctccccaggcactgccacgaggagggctgatgggaagccctagtggtggggctggggtgtctggtctcaggctgaggggtggctggaaagatacagggccccgaagaggaggaggtgggaagaacccccccagctcacacgcagttcacttattcactcaacaaatcgtgactgcgcagctacagtggctaccaggcgctgggttcaaggcactgcgggtaccagaggtgcggagaagatcgctgatccgggccccagtgctctgggtgtctagcgggggtaagaaggcaataaagaaggcacggagtaactcaaacagcaattccagacagcaagagaaactacaggaaagaaaacaaacgtgcgaggggcgaggcgaggaaacaacctcagcttggcaggtcttggaggtctctgggaggagaaagcagcgtctgatgggggcgggaggtggtgagtggggagaggtccaggcggagggaatggcgagcgcagagacaggctggcaacggcttcagggaggcgcggaggggtcagcgtggctggcttaaaaggatacagggactgaggggcaagaccggctcaagggtcaccgcttccaggaagccttctatttccgcgccacctccgcgctcccccaacttttcccaccgcggtccgcagcccacccgtcctgctcgggccgccttcctggtccggaccgcgagtgccgagagggcagggccggctccgattcctccagccgcatccccgcgacgtcccgccaggctctaggcaccccgtgggcactcagtaaacatttgtcgagcgctctagagggaatgaatgaacccactgggcacagctggggggagggcggggccgagggcaggtgggaggccgccggcgcgggaggggcccctcgaagcccgtcctcctcctcctcctcctccgcccaggccccagcgcgtaccactctggcgctcccgaggcggcctcttgtgcgatccagggcgcacaaggctgggagagcgccccggggcccctgctatccgcgccggaggttggaagagggtgggttgccgccgcccgagggcgagagcgccagaggagcgggaagaaggagcgctcgcccgcccgcctgcctcctcgctgcctccccggcgttggctctctggactcctaggcttgctggctgctcctcccacccgcgcccgcctcctcactcgccttttcgttcgccggggctgctttccaagccctgcggtgcgcccgggcgagtgcggggcgaggggcccggggccagcaccgagcagggggcgggggtccgggcagagcgcggccggccggggaggggccatgtctggcgcgggcgcagcggggcccgtctgcagcaagtgaccgagcggcgcggacggccgcctgccccctctgccacctggggcggtgcgggcccggagcccggagcccgggtagcgcgtagagccggcgcgatgcacgtgcgctcactgcgagctgcggcgccgcacagcttcgtggcgctctgggcacccctgttcctgctgcgctccgccctggccgacttcagcctggacaacgaggtgcactcgagcttcatccaccggcgcctccgcagccaggagcggcgggagatgcagcgcgagatcctctccattttgggcttgccccaccgcccgcgcccgcacc

SEQ ID NO: 26932 - DNA, 2300 bp, Homo sapien
tttccttctccctcctgcatgtcctcctctgcctggcttctgaattgtttccagagagagtgatagacaagatctgcctctccttcagtccctgaatcttatttaaggctcttgctttgcttccctggcctggaggccggctccttgatggagtctgccatgtgggttcgctcatggccatgtcttcctgcccagcatggtgcttggccctgggactggccacataatatctgggccaggtgcaaaattagtacggggcagggggtactttgttcataggtgattcagaaccacatatggtgacctcagagtaggaaaccaagtgtggggcccttaagagctggggggccctgtacgactgtccaggttgcaggccccacagctcgcctcctgatatcctgtgctccatgcttgtctgttgaaggaaggagtgaatggatgaagagcaggtggtgggggtggtttgagggccttgcctggtgggtgggtagaggcccctccctggcatggggctcaagacctgttccatcccacagcctggggcctgtgtgtaaatggccaggacctgcaggctggcatttttctgctccttgcctggcctctggcctcccctttctccacccatgtggcccctcaggctgccatctagtccaaaagtccccaagggagacccagagggccacttggccaaactacttctgctccagaaaactgtagaagaccataattctcttccccagctctcctgctccaggaaggacagccccaaagtgaggcttagccagagcccctcccagacaagcgcccccgcttccccaacctcagcccttcccagttcatcccaaaggccctctggggacccactctctcacccagccccaggaggggaaggagacaggatgaacttttaccccgctgccctcactgccactctgggtgcagtaattcccttgagatcccacaccggcagagggaccggtgggttctgagtggtctggggactccctgtgacagcgtgcatggctcggtattgattgagggatgaatggatgaggagagacaggagaggaggccgatggggaggtctcaggcacagacccttggaggggaagaggatgtgaagaccagcggctggctccccaggcactgccacgaggagggctgatgggaagccctagtggtggggctggggtgtctggtctcaggctgaggggtggctggaaagatacagggccccgaagaggaggaggtgggaagaacccccccagctcacacgcagttcacttattcactcaacaaatcgtgactgcgcagctacagtggctaccaggcgctgggttcaaggcactgcgggtaccagaggtgcggagaagatcgctgatccgggccccagtgctctgggtgtctagcgggggtaagaaggcaataaagaaggcacggagtaactcaaacagcaattccagacagcaagagaaactacaggaaagaaaacaaacgtgcgaggggcgaggcgaggaaacaacctcagcttggcaggtcttggaggtctctgggaggagaaagcagcgtctgatgggggcgggaggtggtgagtggggagaggtccaggcggagggaatggcgagcgcagagacaggctggcaacggcttcagggaggcgcggaggggtcagcgtggctggcttaaaaggatacagggactgaggggcaagaccggctcaagggtcaccgcttccaggaagccttctatttccgcgccacctccgcgctcccccaacttttcccaccgcggtccgcagcccacccgtcctgctcgggccgccttcctggtccggaccgcgagtgccgagagggcagggccggctccgattcctccagccgcatccccgcgacgtcccgccaggctctaggcaccccgtgggcactcagtaaacatttgtcgagcgctctagagggaatgaatgaacccactgggcacagctggggggagggcggggccgagggcaggtgggaggccgccggcgcgggaggggcccctcgaagcccgtcctcctcctcctcctcctccgcccaggccccagcgcgtaccactctggcgctcccgaggcggcctcttgtgcgatccagggcgcacaaggctgggagagcgccccggggcccctgctatccgcgccggaggttggaagagggtgggttgccgccgcccgagggcgagagcgccagaggagcgggaagaaggagcgctcgcccgcccgcctgcctcctcgctgcctccccggcgttggctctctggactcctag

SEQ ID NO: 26933 - DNA, 2300 bp, Homo sapien
tcaggagttcgagaccagcctggccaacatggtgaaaccccatctctactaaaaaatacaaaaacctagccgggtgcgatggcacttgcctgtaatcccagctactcaggaggctgaggcaggagaattacttgaacccaggaggcggagattgcagtgagccgagattgtgccactgcactccagcctgggaaacaagagcgaaactccatctcaaaaaaaaaaaaaaaagttcacctgattgcctttagttctcccctccttttaggctccgagctccctaagaggaaggggtttacctgccttgttcacagctgtgtcctcggtaataaaccttgcccggtgcaaggtaggcagtgaggaagtatttgtgataacagcaatgtaaagccatcaacacagtgcttggtacatgcagaacagccatcaacacaggcaaccatccctgtgaacagagggagtgcattatttatgatgggaaactagttttagttggaaaattatcaaattaccaggaacggaaagaacaaaacagttctcccaagtagctcttctggggccaagccccagcaccccacccatgcaggaccaggcccccaaaggccttggaaccaccttgttccagggtctcgctccactgtcctctcctccttcccaaagtcaggactcctttccttgggcttcagaattcctatcttctgctctagaaggcttggagcaagtgggggaaaggcaccactcaccaagtctgtcaggggatgacatggtatagagggagaggagctacataaaatacaagatgccagttaagtttgaatttcacataaacaatgaaataacattcctttctctgccatcgtggtgtgtgcttgactccacttctcgccatgtctttcccacaagacttttgggattaagcaattcctggccaagaaacaaaagcaaaatcgtccccagtggattcggatgaaaactgataataaaatcaggtacaactccaaaaggagacattgaagaagaaccgagctgggcctataaggaattgcacatgagagggcacacatatttatgctgtctgaaggtcacagtcatgttaccacatcaagctgaaaatgtcaccgctctctggagagttgtacatgttttattgagaatatattttttctctctgaatctgtgatgaatgcgttggttggctgggttcagtaataaatatgtgagacctttcacttaaaaaaaaaaagaactatttttttttttttgagaagggatcgccctgtgttgcccagcctggagtacagtggctattcacaggcacaatcctagcgcacagcagccttcaactcctggagcctctaaatccatcctcctgcctcagcctccctagtagctgggactacgggtgagtaccactgtgcaaggctacaaaataactttttagtaaaagtatatcccaaactttatacgagacgtagttactctaaaaaaaaaaaaggatttgctgtttatctgaaattctaatttaactggttgtcctggattttctttgccaaattggtctgccctacggagtgcgagggctgggattttaacccaggcctgcctgctctgagctgacctttcctggcacctgcaaaattaggatgacacgttaggaacttcctggggttcttaagggaattagaagagggacctgagtgcaaagggctttggaggcattcaactgctatgaaacgttagtaaggacagggattgcgttcacctcaatcacagctgaacccattgccgagaactgttatcccacacagctggatcttcatcattatgtgttttaatgaaaaatcgctgatattgctgtccctaaatagccaacccccaaaataattaaatcacctcaagggactctaggtccaatatccgcagcacgccacacaaacatctctcagctcagccacgcagggccgatgcctgcgcgacccacactcagggaggcgcccgcctcagggcctcacaggtgggaccgcgcctgagagccctgcgcttgcgcactccacgccgtgctctacgcatacgcctgtccagccccgcctctgggtgtgtggcgtgggcacgccggccgctcagaaagcgcgggaaaggcacgcagccacgccccaagggcgcagcctaggacaggggcttctggagcttctggcagccgtctgccctcatggcctttgcacctatggggcccgaggcctcgttcttcgacgttttggaccgacacagggagtccctgctggctgccctgaggagaggtg

SEQ ID NO: 26934 - DNA, 2300 bp, Homo sapien
aatacaccaatcagcactctgtatctagctcaaggtttgtaaacacaccaatcagcaccctgtgtctagctcagggtttgtaaatgcaccaatggacactctgtatctggctactctggtggggccttggagaacctttgtgtctagctgagggattgtaaaggcaccaatcagcgacctgtcaaaacagaccactgggctctaccaatcagcaggatgtgggtggggccagataagagaataaaagcaggctgccggagctagtagtggcaatctgctcggggcaccttccacggtgtgggaggtttgttctttcgctttttgggaccacgtcgtctttatgagctgtaacactcaccgcaaaggtctgcagctttactcctgaagccagcgagaccacgagcccgccgggaggaaggaacaactccagatgcgtcgccttaagagctgtaacactcactgcccgaaggtctgcagcttcgcttctgagccagcgaggccataaaccaccagaaggaagaaactccaaacacatcttaacatcagaaggaacagactccggatgcgctgcttttaagaactgtaacactcaccgcgaggctccgcagcttcattcttgaagtcagtgagaccaagaacccaccaattccggacacaacatcacctctgtcagcttcattttccatatctataaaatggagataatcacaatacctatcttttagggctggtctggaaactacaggagatggagcatctaaagcgcttagcatagggtgatgctcaaaagagctattattaccatcatcgtctagactagaggttctcagtcttggctgcatcttagaatcacctggggagcttttaaaaaatattaatttcctcttttctagcccaggcgtactaaatcagaatctctaagggtgcagtgtaaacatcacagtttttaaaaagctgcccaggattccaaatgatctacagccttggtacttaactctggttcacggcccagcaacctctgctgggaatttggtagaaatgtggatttttaggcccatcgtagacctactgaatctgcattttataaaaagataccccagatcctaaacctccttaagaaggtcaaggcacgcagaccacactgagtagtgaaggagagaatccagggtagctacataacctcacgaaatcccttccttgtgatctgtcttttccttcacttccttcttcagatgctcctaaaagtaggggttgggaggaaacaaccaactgaaatatttggagtgggcgtgtgtgagtaataagaatcccttaacatttctacagacagttctattagtaagagtagttcacgtatgatttcacttgaccctaattaggaacagccctggcatcattttccccaccatgcagcaggaaactgaggcccaaagagccccgaggtgggctcagggtaccccagtgggcaaacagggagaggccagggcgggaaacccgcggccgacctcgccttgttcggaggcagcgttagagcagcttctcggaggttggccttggacgtgaattggaagcaatcagaatcttttagatgtttatacatgataaatgcaataattaattcacaagagaaaacagctagctaccttgcactagccctagttgcggattgattgactgatttgagatggagtttcgctcttgttgtccagactggagtgcaatggcatggtctcggctcactgcaacctccacctcctgggttcaagcgattctcctgccttagcctcccaagcagctgggattacaggcacccgccaccatgcccggctaatttttgtatttttagtactgacggggggacgggggggcgggggggcggggggacggggggcggggggggcggggggggcggggggacgggggcggggggcgggggggggcggcgcgggggggcggggggggcggggggcggggcggttcacgatgttggccagacttgtcttgaactcctgaccccaggtgatcagcccgcctcggcctcccaaagtgctgggattacaggcgtgagccaccgcgcctggccagttgcggatttataaaagcagtcgcttagtaacttgcagcggctacatcaactttggaccaattcgcaaactgctggtgtaaagcgtttttgcgcatgtgctgtcgccttgcgggaaaaggagcctttttcttcgacgatttccgggcgacgcaggaagtggctccagggcgcacgcgcgttgtttccgcggtagtcagggcagtttctaccgcag

SEQ ID NO: 26935 - DNA, 2300 bp, Homo sapien
gcagcttcgcttctgagccagcgaggccataaaccaccagaaggaagaaactccaaacacatcttaacatcagaaggaacagactccggatgcgctgcttttaagaactgtaacactcaccgcgaggctccgcagcttcattcttgaagtcagtgagaccaagaacccaccaattccggacacaacatcacctctgtcagcttcattttccatatctataaaatggagataatcacaatacctatcttttagggctggtctggaaactacaggagatggagcatctaaagcgcttagcatagggtgatgctcaaaagagctattattaccatcatcgtctagactagaggttctcagtcttggctgcatcttagaatcacctggggagcttttaaaaaatattaatttcctcttttctagcccaggcgtactaaatcagaatctctaagggtgcagtgtaaacatcacagtttttaaaaagctgcccaggattccaaatgatctacagccttggtacttaactctggttcacggcccagcaacctctgctgggaatttggtagaaatgtggatttttaggcccatcgtagacctactgaatctgcattttataaaaagataccccagatcctaaacctccttaagaaggtcaaggcacgcagaccacactgagtagtgaaggagagaatccagggtagctacataacctcacgaaatcccttccttgtgatctgtcttttccttcacttccttcttcagatgctcctaaaagtaggggttgggaggaaacaaccaactgaaatatttggagtgggcgtgtgtgagtaataagaatcccttaacatttctacagacagttctattagtaagagtagttcacgtatgatttcacttgaccctaattaggaacagccctggcatcattttccccaccatgcagcaggaaactgaggcccaaagagccccgaggtgggctcagggtaccccagtgggcaaacagggagaggccagggcgggaaacccgcggccgacctcgccttgttcggaggcagcgttagagcagcttctcggaggttggccttggacgtgaattggaagcaatcagaatcttttagatgtttatacatgataaatgcaataattaattcacaagagaaaacagctagctaccttgcactagccctagttgcggattgattgactgatttgagatggagtttcgctcttgttgtccagactggagtgcaatggcatggtctcggctcactgcaacctccacctcctgggttcaagcgattctcctgccttagcctcccaagcagctgggattacaggcacccgccaccatgcccggctaatttttgtatttttagtactgacggggggacgggggggcgggggggcggggggacggggggcggggggggcggggggggcggggggacgggggcggggggcgggggggggcggcgcgggggggcggggggggcggggggcggggcggttcacgatgttggccagacttgtcttgaactcctgaccccaggtgatcagcccgcctcggcctcccaaagtgctgggattacaggcgtgagccaccgcgcctggccagttgcggatttataaaagcagtcgcttagtaacttgcagcggctacatcaactttggaccaattcgcaaactgctggtgtaaagcgtttttgcgcatgtgctgtcgccttgcgggaaaaggagcctttttcttcgacgatttccgggcgacgcaggaagtggctccagggcgcacgcgcgttgtttccgcggtagtcagggcagtttctaccgcaggcttaaggaggcttcgggctcctgggatttctgtccgcgctcctggccctcgtccttcgcgccagagcaggttcgcaaactcctcagacccttctgctcccggccgccgctttccgccggggcgagacccccaggtaggccccgtgccgcgcgcgtcccgtcgttaaccgccgccatggctcccgcagaggccgagttgcctcccgggagcgcgcttctgcgggatgctggggcgcgagcgggactgttgactaagcttcgttactgggccctggaagcgaggtcagagctggaaatggccttaggggtcacctagggcctaatccatcgtttctcttgtgggggaactgagcctctgggaagggtcacattgcgttaatgcagtgtgtgtcgcctctgtccctcccccttacacgtctggcgtctcgtcagatacatgtcagctcctgggagaagctttccctggccgcttt

SEQ ID NO: 26936 - DNA, 2300 bp, Homo sapien
tggctgagtgctactgaattgtaggggccaagggaaaacttctcctttgccctctgaaggggttcactgaaaagtagctggtaaaagacagattaataggagaaatggcatacaaatgtattgatgtgcacagcgtcttacaacgatcttaaaggcaatatggttgatgctttcataccatcttgaggtcacagaaagaagggggctcagggcatggcccaaaacaggctttcatggtaaattgggttctcgtggcaagacaggttatgggaagaagagaagaagaggtctgtgtagcaaaggtggtcttgttaatgtggaggaaaccccacaggtagcaccctcggagagaactgagacctttaacggcatcagactgcagttaatcttccctaatcaggacaagggaagggccttggagaaagcctggctgcatcaatgccgattttctctgcagatgcagatctccccaccaaagatagcttttcagctattatttccagcccttctgtatagccatcttgaaatatgtcagagaagtctattttggggcaaaatattttggtttccttgagaataaaattacacatctggatgggttggttccattgtaaattcctagcttccaacttcaactctgtctgcatcatgcctagatgcttgctagctttttcaccttagctcaatcctccacttgccacagggctgctgggcctgcactcttgtcagcttctccttcctttagtctttgtctcagccaatcagatcagctcttgctcagagaaaaaagaagctaatgggaacttcctcctctttctcctgccagatctagaaatctgcccgtgcttgcctcctcccctgccttttcccccatgaggtggaagccgtcctgctaaggccagttttgtggtgggacccatgccctccagccttctcaggaaccgtatgcagagtatcacctctttcccatacacccgtctctcctgccgcgtagtacttctcccttagcactgacactagctcaagtctagttgatcctagaaaacacacctcccttgatccccacatcctcctccagtactgcccgcgtccctattccttccgcagtggggcatcttggatgaaatgtcctttattccctcacctcccactcatttctaactcagtgagacctttgccccccattgttccaccagaactgtttttggcgtgactaccagtggcatcctcattggtaattccaggggaccctggacacccatcctcttactggaacagagcttcattcactgttcttacaagaaacatttcccctggctgctgtcttgccagcctcttacccgctacctctgtggctcttctatccttgctggctcttggctgaatgtggaggttccacagacatctccctaagccgctgcctcctccacccaagcacaactgatctcccatccactgtcgctcagccacgccctgtggactggagactcgtacctcattcctgtgctcctgacatggacacccagtcggacagctccttggtgtgtctcccaggcgtctgaagctacggtatcccacaccaaacccaagactacattctgtagctctttattcacatgttacccttgcctcaggattctcccttgctactgccaccagtaccatctactttatacgtatgtatggatgtcatatacatactaaatatttcccttcttttgcctactagaatgtaaactccatgagagcagagatttttgtttgtatttgttgctgcctcccagcacttggaggagggccttaagtgtaaaaggtgctctgtgaatatttgcagagtgaacatttgatctgaacctgcccctctcggccaccaccagcctgttgctcctgatgtgcttcacagcccattcaatgggacctccatctcctttgttatagccagaaatcttgaggtcacccctgattggaactttccctctcctgtctcactaatcctcagtctcctcccctctaccctgaaattatttgggaatctgttcatttttctccctccctcctgccaccacatctaattcaaatcttggaaagcacttagatcagaactctatgacattggtcttggcagtaatttcttggatatgacaccaaaaagcacaggcaacaaaagcaaaaatggccaagtggaactgtgttaaactaacagctcttgcacagcagagggaaccatggaaaagagtgaaaaggcagcctgtggaatgggagaaaacatctggaggctatttctgacaagggattgattt

SEQ ID NO: 26937 - DNA, 2300 bp, Homo sapien
tgccgcctgggcccggcccccgcggcagcagccgagcggccgcacccctttgtggggctgtcgtgccgggaggggcgcgggcgaggcgggcccgggcggcgctgggacttgtaggccgggagcccgggcgcctccgggctgaagcccgtggccacgccaccgacgcggctccagcctgcccaggcaacgcgacggctggggacagccttggaaaaactgaaggggaaaccgaggcctggtgaagggatccagctggcgcaaaagcacgcggccgcgcagtggccgcctcccccggcctctagggggcaagtgaaggtcacacttaaatgaaagttttcaaagtcgcttcgaagggcctccggctgggccagagctttcccccaccccaccttgttccatcgtggatacactcaacaaacatatcccagagccctctccttgccaggccctccagcttgggcaaaacatcccaggtccctgttctcgcagcgcccaaatagcaggggaggggctccaggcaggcgaacacacagggccggggaggtgggaaactccgcgaaggaaggagaggaaaccacgcgggatgaagggcaacgggggccgcaagcgggggcaggagcgccaggaacgaggaacgaagggggaagggaggaaaggacgcccaggcttccggaagactcgggggtcccatccccactgtgcagagggctagagcgggagctgggggagggagaggtcagaggtcaaggctgccgcgtggagcgtgggccgtggagtgggggagggggcgggcagactcctccccgccggcagccagggcagagggctggaggaaacgcggagaactcctcggtgctggaggaaacgaggggaactcctcgccggccttgcggtcccccacagcccacggagtgccactcccagtccccacagaccccacctgcgtcgccctgtgctgagaggaggccgcagggctggggccgggagtgaccccaattagagctgctgtttcccagctgcataggtcccaaccgcgggggctggagatgaggcgggcttgaggcccctagtcccggcttcagaggtggagggtgtgacccgcaggtccgggatcccggggtctgtgcagtcacacggcccttcccttcgctcaggaaagcccggggctgagtttcatgctcaaccgctgccaacttgaaattcctagcttttgaataaggggccccgcgtttgcattttgcactgggccccgaaaattctgtggctggccctgcctggtgtgaagctcacagagccccactatgcgccgcctttctatggctgggggccggatgagggacccgggtctgctcttactcgccccaagggtccctgacaccagcccagaacggggtggagctggaaagagcccacacctgcttcctctgcccacctcatctcccgcggggcctctgagaccgcccgggacccgcttctatcgcggcaccgtggtgtagctccctccggggtcgtatgctgtatgtttactagccgaattctcagtcctggacgctccgtggggccagggaatatgatctgtgctccgctgcagcctcgcgcccagagtaaatatcggtcggatgaactaatcttacatataaaacagaaatcatttcccttttttaatatggcacgtggctcttccctaagtcgccctgggttaaataccgactcaattaacaagatgctaaaaaccgtttacgtttttttacgttttttacgtttaattcaccagacggtgcgctccacgagggaaggggcctggcctccctagttcagggttgtgcttagtgcctgcaaccggccgggcccgcgggggcagccaggagagaaaggcgcgcccagcgcccccaggcccggatccgccctcagcccgcgtgcgctcccctcccccctccccccaatcgccgcgcgcccgggtgcggctgggcggggttagaactacgcttcccggcggtccccgcgcgcccggggcggggcggggccggctgggggcggggctgagctggcgggggcggcaggctacaaagcccgggggcggtgccggggcgcagagtccccgcagcgccggtcgggagcgcagcgcggcgcacgtcggcgcgcacggcgggacgggcgccggagtggtcgggcctggcggctggacgggcgcccctcgctgccccgcgcgctccccgccgccccccatgagcgcagccccgcgcggcccgggtccgtaggcggcggggcgccccccatgctgctgcagcccgcgccgtgcg

SEQ ID NO: 26938 - DNA, 2300 bp, Homo sapien
tcagtcccatcctcagaggcctgctatgaggacaggagaggacttctgaggaggccagagcacccagcccacatgcctgtgcactgttttaagcagttaatgttcctgttttccggatgaggatgccactgccaagacagacccagctggtaaggggcaaagtcaggattcgaacccacctctgcaggccccagaggccaagcactgatgggtatggagtcccagaggtagctgtgtggatcagagcgagcccagacgcacgtgggaaggccttatcccactgtaagcagaaaagagctgcaggcactggaggcacacaccctcacctctgggcagctgctcccgcccagtccatgcccccaggcgcctgctgtgggcctggggaatggagccaaggttctggaaaacaaggaacaccctcttcatgtggcctgaaccccataggaagaatctcggtgaaggcatgaaggctacagtgtccccaaacaccctctaagacgactctagacatctacaaaacagattccaggacgagacggacagggccgcctgctcccaccaccctacacgctcccttcccaggaggacagaggcaccccggcaggaacctgagctgcccggccactcgcacaggctagaagggccccggccaccctccagcacccctcagccagcggctcctcccactgctacacttgcacacatccaccaatacacacggaagccggcagggagcccccgagtcaccccaagcgttcccaaaaagtgggcacagcaacttctgctggggcctctgacccattcacctgggagccaggccccaggggacccattcacctgggagccaggctcagccgggttccacaggatccttgtccacactgccccagtcaggcaggttactcctcaagctgtgtctctctcaatggaatctacgtggtgcgcacatgcgtgagcacacacacgtgatcaactggcattagggatttggattcagaaagttcatgaagtgccaatgccctgaaaggggtggtggtctctgagctgccttcccctccaactccaaccccatcaatatgccacggcgctagggcagacagcttccatccatcatgggggtggggaggcaggccgcaaggcaggactctttgtatcccttaagtgtgtgtgtccctccccaagcagctgccaggacttactagatgttttaaaaaagggcagggaggtgggaggcgttttaggatggagaagagtgggctgcgctgcttgtaaatgagtcagactagaagcccataggccaggccactcaggcaggtggcctccaccccaaacacatcgtatctacagcaacgttcacaaacatcagaccttggtagcaatgacctactgccaccacctgccccagcactagaacaggtgagaggagtgcctggggaagaactcagcctgccagtccctaagagtcatcagcaaacacttcaagagggcgttacctgcaccaggcccaccctaggccctccattcagagaactcagatgtgctgtgaccactcccattttacgggtgaggaaactgaggccacacacctagcgaagggagctggggtgtgtaccaaggcaggcaggctccaaggctcaccatcccctaggtggtatggcctctgccagggatggagaagtgcaatctgccttctcttcactcccttggcttaaacgcaatcaaatgtctgaaaactgtcatttccccagccttccagacccaggaagcccaaggccctctccacttcatctccacggactacccaccccaagccagccatgtccactcacccgtaagtccgctggatcaaggtggggtgcagctgctgcaccccaatggcaaagcctaaaacgagagaacaatcagggacttggccttgctgcacgagccacgtctcaagggctgcacacagggtggcagaatcccacaagccacacacctctagtcaaaagggatcatccgcttcctctcccctcccaggcctcccccttgtgaaccccaaggcacaccgctgaagtgtggcagtgagtgacgcaggtgtcagcagccactggtgtcggcactcccaacctccaggccccatggccacttcctccctcctgcgaggacagctggcaactggggtgcagtaccctccctgccccccgcccccttctttgggccacacgctgtgagaaggggtctagatcctcgagggggggatggctgccctgtgccggctctgcaggcacatgatagccgactgccactgctggggcgag

SEQ ID NO: 26939 - DNA, 2300 bp, Homo sapien
tcctcgttcctcgagctccctctgctccctcgagggtactcaggacccggcaactctgcacacctcagtgccccggagccctcggagttcctcctctttcccaccacgaagcctctttttttccatttatttccatccccatttccctacccccatgtctggggtccctgtcaatctccatcacccctgccgccctatctccccctccttccacgtctcctttcctgcacattcccagcccccacctagctcctgctcaggtctctgtggctcacagagggccctcctcaccctccactctgccctgtccagcccaccccaacccatctcctggaacccttgtaaggtctctccccgcccagtccctgctgcgtccatttcccacccaagtctctaagcaccccattccccatcctctcccattgcccctccttatcctccccccgaccccaggtctcccagcgccccctgcaaggcccttcttccctccttacccattccccacccctgccccgcctaggtctcccagcgccccctgcaggccctcctccccttcttatccaagccccccaggttccccagcgccccctgcaggccctcctccctccttatccattccccaccaggtctcagtgccccctgcaggcccttctcccctccttatccattccctccacccccgcccaagtctcccagcgccctctccaggccctcctccctccttatcctttcccctccaggtctcccagcgccccttgcaggcccccctccactccttatccattccccgccagcgtctcccagtgccccttgcggccatcctcccctccttatccatttcccccccaggtctcccagcgccccctgagggccctcttcccctccttatccattccccccaaggtctcccagcgccccctacagggctctcctcccctcctcattccacccctccccccagtatctcagtgcctcctgcgggccctcctcccacccttatccattcccctcccctaggtctcccagcgccccctgcaggaccccctcccctccttatccattcccccacaaggtatcccagcgccccctgcagggctctcctcccctcctcattccacccctccccccagtctctcagtgcctcctgcgggccctcctcctctccttatccattcccctcccccaggtctcccagcaccccttgcaggccctcctcccctccttatccattcccctcccccaagtctcccagcaccccttgcaggccctcctcccctccttatccattcccccacccctcgccccccgcagggctcccagggccccctgcagaccctcctccccttgtcctctcctattcatcccccaggtctcccaagaacccctgcagaccctcctcccctccttatccattaccctcacctcaggtctccccgcccccctgcagggctctcccctcctcattccacccctccccctggtatctcagtgcctcctgttggccctcctaccctccttatccattcccctcccctaggtgtcacaggccccctgcaggcccccctcccctccttatccattacccaccacccccctcaggtctcccagcccccctgcagggctatcctccccgcctcattccacccctccccccctcattccacccctccccccagtatctcagtgcctcctgtgggccctcctcccctccttatccattccccctcagatctcccaggccccctgcaggccctcgtgccctccttacttcccccccgggtctcccagcgccccctgcggggccctcctcccttcctcatccacttcaaccccaaggtatttccgtgcccctgcaggaccctcctcccctccttaggcgctcccccactacccagtcttccagtgccctgcaggctctcctcctctccttatccacccccaccccaggtctcccagtgccctgtatgggaccctcctcccctcctcatccacccccccaggtccaccagtgccccctctggggtcctcctcatccgtgctccccctccccctccctactccccttcccccctgcccccacagtacatcaccccctcccccaaccctgcctggctccgcccccttcacgccccctcttttccgctccgcgcctgcgcactgccaccctccactctcgcgccagcccggcggcggccggctgtgggctgcagcacgcggtgcacgaggcagagcccacaagccaaagacggagtgggccgagcattccggccacgccttccgcggtgaggggccagtcccgg

SEQ ID NO: 26940 - DNA, 2300 bp, Homo sapien
gttgcaggtatcaacccaacttcttctggagaccatcaatatgattaatttccattaaaagcaattgattgaagtgaaaacacacgtaacgaactgaaccactttagagtgaacagttaagtgggcttcagtccgttcacagtgtggccgcccctccacgtcccccgccctcccacctgccttaaatgagctcctgggaagtacccatgaactccgatgcacccctgctccatcggctgcctcctcaccctttccagcccccacattcctgccctttctctgctcaactcctccgtcttctccctcggacgctcatcctcctccacacccgcctacgttctcccttctttgccctcgtcgtcccctctcttcctcgttcctcgagctccctctgctccctcgagggtactcaggacccggcaactctgcacacctcagtgccccggagccctcggagttcctcctctttcccaccacgaagcctctttttttccatttatttccatccccatttccctacccccatgtctggggtccctgtcaatctccatcacccctgccgccctatctccccctccttccacgtctcctttcctgcacattcccagcccccacctagctcctgctcaggtctctgtggctcacagagggccctcctcaccctccactctgccctgtccagcccaccccaacccatctcctggaacccttgtaaggtctctccccgcccagtccctgctgcgtccatttcccacccaagtctctaagcaccccattccccatcctctcccattgcccctccttatcctccccccgaccccaggtctcccagcgccccctgcaaggcccttcttccctccttacccattccccacccctgccccgcctaggtctcccagcgccccctgcaggccctcctccccttcttatccaagccccccaggttccccagcgccccctgcaggccctcctccctccttatccattccccaccaggtctcagtgccccctgcaggcccttctcccctccttatccattccctccacccccgcccaagtctcccagcgccctctccaggccctcctccctccttatcctttcccctccaggtctcccagcgccccttgcaggcccccctccactccttatccattccccgccagcgtctcccagtgccccttgcggccatcctcccctccttatccatttcccccccaggtctcccagcgccccctgagggccctcttcccctccttatccattccccccaaggtctcccagcgccccctacagggctctcctcccctcctcattccacccctccccccagtatctcagtgcctcctgcgggccctcctcccacccttatccattcccctcccctaggtctcccagcgccccctgcaggaccccctcccctccttatccattcccccacaaggtatcccagcgccccctgcagggctctcctcccctcctcattccacccctccccccagtctctcagtgcctcctgcgggccctcctcctctccttatccattcccctcccccaggtctcccagcaccccttgcaggccctcctcccctccttatccattcccctcccccaagtctcccagcaccccttgcaggccctcctcccctccttatccattcccccacccctcgccccccgcagggctcccagggccccctgcagaccctcctccccttgtcctctcctattcatcccccaggtctcccaagaacccctgcagaccctcctcccctccttatccattaccctcacctcaggtctccccgcccccctgcagggctctcccctcctcattccacccctccccctggtatctcagtgcctcctgttggccctcctaccctccttatccattcccctcccctaggtgtcacaggccccctgcaggcccccctcccctccttatccattacccaccacccccctcaggtctcccagcccccctgcagggctatcctccccgcctcattccacccctccccccctcattccacccctccccccagtatctcagtgcctcctgtgggccctcctcccctccttatccattccccctcagatctcccaggccccctgcaggccctcgtgccctccttacttcccccccgggtctcccagcgccccctgcggggccctcctcccttcctcatccacttcaaccccaaggtatttccgtgcccctgcaggaccctcctcccctccttaggcgctcccccactacccagtcttccagtgccctgcaggctctcctcctctcctt

SEQ ID NO: 26941 - DNA, 2300 bp, Homo sapien
aacctcccagctttaaatactgtggaaaagaatagccctgcccctcagctgcacccagggaggctcgccactgacgtcagggggcaggtctctggatcacggccagggtcagttatgctttgggccaactcactgcaacacgccccagggagataatcattgaacagatagttgttaatgaatgctgggagacttcgagccctcaaccaaccatagtgagttttgacacaacttccaactgactaaaccttgacccattttactgctgttgcaaaacacaacacccttttcttaacaggcaggtgggtcaaggacaaggttggccggggcacctgctagcagcacattttgtgtaccaagagctgctggttggcaaaacaccacagctataagatgtcaccccatagtcaaaggtcacagtcaaagttcatgggaaggatgcaccctaacttgggcaaatatgtggcttattggcaaagattggaaatgcctaacctaactgggggctaatcactgtattgattgtctgctctgtgccgcccccgccccctgccccgatgtaaactccatgagggcagggatttctccctattttgttcatttttctctctgtagtgcttggcatagagtaggcacaggatgcacacatgctgagcactgttctaagagcttggcatcattactaccctctgaggtggaggctatgaacaacccatgtacagatagggaaactgaggcagagattgtgtagccactcacagccggctggtgggttgcagagtgaggatctgaacatgagcaagttgggccctggagcaccacgtctctccctgtgaggtaccgccacctttccagaaccttccctgtgtcctccagggagttctgggctgagtgcagttactcctgcagtccactggccactgttctcttccctggcaagtcttagagtttagggagtggagggggcttggcagttttgctagattatatgcttaagcaatgaaacctttataacagttgtaaagaatttgctttgcaagccatcagaccttcagtcaaatttaatgagctatggaagctgcttgctggagtttggagaacacagggtgaaatgtcaaaagaacggggctaggtctcaaccccccacagccagcccacacttccatggaagcctctctacctaagatgaggtcaggtggggacttggcccatctccccgctggggtgtgggatgatccctgagataatcccaggactgggcttagaaagagctgctgtggcaaatacaagtcactgtgaatggcagcctccgaccaaactcacttagagaaccctcctgggggcttgggtcacactgtgttgggcgtgggtcacacatcatcaagttccaccaaaattatcaacccattgctatgtttcctgtattcagattttattcagccagttgtgtctttcaggataaatatgatatgaggtgctttttgtttcatttgaagttattccccgtttaggtcactggcatttgttattagtggtgctgtcatccatacataagatcgtgttgtgtctaaacccaacagtgacgtgatgctcagtagccgaggccacttcgttagcatctgacatcagtgaattagccatcccgatgcatgaccacaattccgtgacacacacatcactcccggcgagactcatcccaccaaattggtagaaagtcccattttgctgataaaacggtaacaggtttgagtacctgaaagagcacatagattgaaaacaaaaagggaaagcagaactcatttggagtcctaaatgcgacccatccattccaggtgcttatgttctgagtcttctgggagagaaacagctagttcaagtaaaacgtcagagcagtgagtcaccaacgaccttcatccgatcctttcattacctgcatttacagcgtggaaggacggtaatgattcccccgcaactgtcccttgtcaaaatgttaaaaagcaaacattggtttacagacttgcctcaaaggacagagttctctggaagaagaatcatgataaagtagaggggttttgaggacacacaggcaaaagtatgggtacagttgccttaggtcttggcagatgatgccctcgggcccccatttttcctgtccttagagactccctgccccagtggggactcattgacaacaatttcaaggggctggccggaagcatgggtcttcctcatctgactgtcagcttatttgtaagtaagcctcaaaactaactactgtctgttggtttcaacagggaccc

SEQ ID NO: 26942 - DNA, 2300 bp, Homo sapien
agacctaaggcaactgtacccatacttttgcctgtgtgtcctcaaaacccctctactttatcatgattcttcttccagagaactctgtcctttgaggcaagtctgtaaaccaatgtttgctttttaacattttgacaagggacagttgcgggggaatcattaccgtccttccacgctgtaaatgcaggtaatgaaaggatcggatgaaggtcgttggtgactcactgctctgacgttttacttgaactagctgtttctctcccagaagactcagaacataagcacctggaatggatgggtcgcatttaggactccaaatgagttctgctttccctttttgttttcaatctatgtgctctttcaggtactcaaacctgttaccgttttatcagcaaaatgggactttctaccaatttggtgggatgagtctcgccgggagtgatgtgtgtgtcacggaattgtggtcatgcatcgggatggctaattcactgatgtcagatgctaacgaagtggcctcggctactgagcatcacgtcactgttgggtttagacacaacacgatcttatgtatggatgacagcaccactaataacaaatgccagtgacctaaacggggaataacttcaaatgaaacaaaaagcacctcatatcatatttatcctgaaagacacaactggctgaataaaatctgaatacaggaaacatagcaatgggttgataattttggtggaacttgatgatgtgtgacccacgcccaacacagtgtgacccaagcccccaggagggttctctaagtgagtttggtcggaggctgccattcacagtgacttgtatttgccacagcagctctttctaagcccagtcctgggattatctcagggatcatcccacaccccagcggggagatgggccaagtccccacctgacctcatcttaggtagagaggcttccatggaagtgtgggctggctgtggggggttgagacctagccccgttcttttgacatttcaccctgtgttctccaaactccagcaagcagcttccatagctcattaaatttgactgaaggtctgatggcttgcaaagcaaattctttacaactgttataaaggtttcattgcttaagcatataatctagcaaaactgccaagccccctccactccctaaactctaagacttgccagggaagagaacagtggccagtggactgcaggagtaactgcactcagcccagaactccctggaggacacagggaaggttctggaaaggtggcggtacctcacagggagagacgtggtgctccagggcccaacttgctcatgttcagatcctcactctgcaacccaccagccggctgtgagtggctacacaatctctgcctcagtttccctatctgtacatgggttgttcatagcctccacctcagagggtagtaatgatgccaagctcttagaacagtgctcagcatgtgtgcatcctgtgcctactctatgccaagcactacagagagaaaaatgaacaaaatagggagaaatccctgccctcatggagtttacatcggggcagggggcgggggcggcacagagcagacaatcaatacagtgattagcccccagttaggttaggcatttccaatctttgccaataagccacatatttgcccaagttagggtgcatccttcccatgaactttgactgtgacctttgactatggggtgacatcttatagctgtggtgttttgccaaccagcagctcttggtacacaaaatgtgctgctagcaggtgccccggccaaccttgtccttgacccacctgcctgttaagaaaagggtgttgtgttttgcaacagcagtaaaatgggtcaaggtttagtcagttggaagttgtgtcaaaactcactatggttggttgagggctcgaagtctcccagcattcattaacaactatctgttcaatgattatctccctggggcgtgttgcagtgagttggcccaaagcataactgaccctggccgtgatccagagacctgccccctgacgtcagtggcgagcctccctgggtgcagctgaggggcagggctattcttttccacagtatttaaagctgggaggttctgccaccaagcacggccttcccactgggaacacaaacttgctggcgggaagagcccggaaagaaacctgtggatctcccttcgagatcatccaaagagaagaaaggtaagtagagctttgcatttacattttgaaaaattacaaagatgaactcatttttttcctgagagcaataactattt

SEQ ID NO: 26943 - DNA, 2300 bp, Homo sapien
gtccagatcatgatgacaatagcagtatcctaaagaatagtagaccagctgggcgtggtggctcacgcctgtaatcccagcactttgggaggcgaggtaggtggactgtttaagctcaggagtttgacactagcctggccaacatggcgaaaccccatctctactaaaattacaaaaattaaccgggcatggtggcgcatgcctgtgatcccagctactcgggatgctgaggctggagaatcgcttgaacccgggaggtggaagttgtagtgagctgagatgtcgccattgcactccagactgggtgacagagtgagattccatctcagaaaaaaaaaaaaaaaatagaaagggacagcatagccatccccctttgacagctgactgtgccccaggcacctcgaaacatgctttccaagcatttcctgatggcctgcagggacaagtgccatgtcattcccattttatagataactgaggccctgagaggtgaaatgacactctcagggtaacacagctggcgaacgctggtgttagcgtctgaacacccatgtcacagtcatatcgagaacaaagcggtttgctttgatgagatacatgtgtgcctttgttcccccttgttgcatcctttcctcaactaacatttcattcattttattcctggaagagttgcaatgaaagccaatagtgtatcgagtaattgctgttctctagggtctccactaagcgctgtggactgtaggtgaagtgtggttttgcggtttgggggatgtgtttgttttgtttttaatcctcaccacaatctttgaagtagttattactgtctccatttcacagaagaggaacctgaagccggaggggaggtcacacagctagtagttggcagggctaggagctcaaacccaggaaatcagccatcagaattttaaaaaaccaacacagagtgtgccccgggagggctaatgtcagggtgtggcccaggagccgggctgaccgcggaggtcctgtggagcttcctcttcggggactcacgggtgctgacgcaggttccggactcagccctcgctggcttttcttgtcttcctccccagttgattttccttttgtgaccaaattgttgcctacacctgctccattttacaatttcccattttcagacacagtagcctgggactcagcagtcgaggccagcccagggccagtgcttgtcctgcatccacacctctgacccccatctcctctggggtgtgtggagccgaggcagtggctccctaaggtcagccttccagaatcaaaactgcggccaggcgcagtggctcacgcctgcaatcccagcactttgggaggctgagttgcggggatcacccaaggtcaggagtttgacaccagcctggccaaaaagggaaaccctgtctctactaaaaatacaaaaatcagccgggtgtagtggtgcgtgcctgtaatctcagctacttgagagactgaggcaagagaattgcttgaacccaggaggtggaggttgcagtgagccgagatcacaccactgcagccgcagaccaggcaacaagaacgaaattccatctcaaaaccaaaaaacaaaaaactctgcgagacaaggtgaagccaggtgtgaagtcaggtgcatggaggtgctgctggctgccggtgggggagtttggtgggcgcaggagtgggaattcccaggtcttctaattggtcttcacctgcacacggcaagccggtcagcgttgtaaccatcagggtgaggcacaaactgattcttccctcccctacaagtgctgtgaccaaggaaccctgggcaaacctggagaatcctctgaacaggaaagaaagcccagatgacaaaggactgagtcactgtcctggaaggggaactcaggtctttccaagaagggctctcccatgcactgccctcaggttccttgaagcagaagcttcctggtgacaggtggggcccccgcccacagtggctctcccaggctgctggctgccaggtgctgcccgtaacctgcgtctgccccagcctcatctctgggcagagcagctggctttgatcttttaatcattgtgtgagctaatggttttgatttttaagagctgcctcaggaggagcaggggccatttggagaattcctccttgaacctcttggggtcctgcttagtcctcattaaactcaggccaggaaacagcagcacattgccaactggccaaggagaagctacccgggccctgcccagggtctattgggtaaacgtctgtccctagagacagacactca

SEQ ID NO: 26944 - DNA, 2300 bp, Homo sapien
atcacctggtggccagttcgggcgtggcaccccagacacccaagggactcagccttgcagggctcagccggagccccttccggagggcaccttcatcatctccctcagcaccccacctacccccccatttaaagagcactattgttatttcatagggtgatacctgcagttttcgcttttacataaaaggagaataaaagcatcctgcagtttgctgttattgacttgccccagacttactggttctccacctggaagcaggaaaagtcacccaggagcataaaaaatctcaccctcgggccccagccgcagaggttggagttgactagtctgggccggcctgggcattgagactttttttttgcttcaaacacttaacatgcaggcagggcggaagacctgggctccaggtgctcgctctgcaaagacagatagcttcaggataaacctccggaccccctttccatttgtatttgccgctaagctgctccttatgcataaatggggtctgcaaggagcacagacgtctctagccctcccagccctctgcagatgagacacagaccccaagtccagggacttccagggctgagctctcaacccccttggctgccaaaagctggggggccttgtacacagcattcacctctgtgggcctcagttcctccttctgtgatctggaagagaacagtggctctgagtttttctgaggtcactggcccttttgagaattatgtaagcaacgggtcctctcccagaagcattcctgtgaggtgaccacggtgcccgtgactacggatggctctggggctctagcccgacagctgggctgtatcagccccttaggtcctcacctcgaccccatgcgctaggtcctttgattaagtccttttacacatggggaaactgaggcacagaggggttaaataatttgtccgaggtcacacagccggtaaatggcggagccaggtttggacccaagcatgctgacccaggcttgcattccgaaccactcggctgctgaccccaggcatctgactctggaattaataagcaagttttatgatgaggcggggaactccacgccatctgtgcactaagggtgattcaccagtgacttctgggtgttatagatcaggaaacacaattggggaatggacaggacaagctctgtcatggactctgtgtggccttggacaagtgatcttgcctttctagcctcagtttcccccctgagaagaagacagaactggcccctaccctgtagatgggttggaggagcacttgagattggaaaacgcataataggtgttcattaaagaggctcacatggatacacacaagaacaatctcagggccttcacgcacctaaatgttctgcccctagtgtgggcaagggaaacaaactggaagaagacaagaaaagccactgagagctggggacggtgcctctgtagcacctgtgagtccccgaggaggaagtactacaggaaccagcggggccgggcgtgggggcttgcggctggaatcccagcactgtgggaggccaaggcaggcagatcgcttgagcccaggagtttgagaccagcctgggcaacacgatgaaaccccatctctacagaaaatacaaaaattagccgggcatggtggtctaggcctgtggtcccagctactagggaggctgagaggtgggaggatcgctggagtccggaaggtcgaggctgccgtgagccgtgatcacgccactgcactccagcctggatgacagaaaccctgtctcaaaaacaaacaaaaacacagaaaccagataaccagccccagcccctcacatcatcagagtgatgccacgccctggcatccccctccacgtggtgcatgctcttttttttatttttattttcttcagttctctgatgctgattcagaaaataaaaatgtagaggtccaggtgggctgtgcctggaacggggaaggtgagggaagtcctctgtctcaaaggcctcttcggaggacgctctggtcttgccaagtttacagctcctccctgtcaacatcaagtcaggtccccaactctgtcttgctcatccacctggcttccactttttttttctttcaaaagacgaacagagaagtttcattttctttttctcctgaaaccgaatctggccggcctggctaggcatctatttccgggctgtaagcagctgacacctgcccagtggaagctggcatccctccccttgtgggttcagagctgcaagaagcaccaggctcggccacttcagaagccccagcctcga

SEQ ID NO: 26945 - DNA, 2300 bp, Homo sapien
ccggccagcctggttatttttaccacttgaagctcactgtataggctcaggggccacaaactggcagccgcctgcggacacttgcttatgagccgcccagacactgccttcattccacagcggctgcttctcagctccgggccccagctaggggcagcctggcccccagcagggaaggactgtgtgccccttcacctggcgtgcttcttcagggtggggatggggaaactaaagctcagggaagcaaaaggtccccgaaaaggtgggctgggggacaaggtgtaggctagaagctagaagccagaacccgggaggtagtggttcaattctccactcaaccaaatgtccacctaggtgggctgtgtgtgcaggaggtagagacttacttatctgaacttttgggtgcccaggcggctgcgttagcgacaaggttcaaaaccccactccccaccgttggtccactgatcccttatttagggccaggcagtcccaaacacaaacagccccaaactttgactcctttgtaaccatggtctcagccagactgaaccaagctgtccagacagaggctatttataggtgcgtcggggacacagacactggcacaatgacacacacacattcaagatccacgctgggccagacgggccagagctgagccctggattcagacacctggacacacacggtccccagatccggcccaaccagaccagacccccagaaagatggacacgctcaagaaaggcaccccggcccggacacgggaaagacacacagagagaggcaggaagactcggtgacacgcactcttgggcaagaccgcgactcagacccccagacaccccgagagacgccgaagacccagacagagccacgcagccacgcacactccacagacgcacggacatccactcagagcccgagacacagcgccgcgaacactccagacacacgcccggagccccagacacctcgcagaccagacagtgtctcacacgcccctccacccccgcccaaagttgataaagagccggcctaaatgctccatcgcgactgccctcagggaaataaaatggaaacttcacggatccgcccgccccaaccctcccgcgccgtgcgccgccgctgagccccgggtccgagtccgggcgggcggggcgcggacagcgggggccgtgccaggctcgcagcgccgcgggacaaagccgggccggccgccagctgccgcgagccgggagggcgcgcccggggcgcggcgggcgctgcccgggcgcagggcgttcggtccgagggggcgcgcagggcccggacccccgctcgcagctgtgccccgacatagggtccgagcccgatggagtctccggggaggggggcgtggggtcactcactgatctccatgctctggaacaaagagcgtttgcagttgcacgtgcaggagacattgggctgcccggcggcggcggcggcggtgctgttgacccccatcaagcggtgcatggacggcgcggcggcgcggcgcggggcgcggggggctcgggggcggccggggggggctccggccggcgcccggagctggggccccgcatgcaggaggcgcgcggcgggggaggcgcgccccggctcgccgggctcgggtcgccgccaagttcccggggcgccgcggggctcagtgcgcgggaccgcgctccgctgcgcccccccggcctcccctcggcagccccgggggcgtcggcagtgcccgcgggtggcgtccggaaaatgggctggcagcggggcgcgcgctgccgccggggctgagcctctgccgctagctttccccagccgagcgcctccgccgccgccgccgccgccgcctcctcctcctcattcaagtccaaggagatcgggtttcgctccgagaccgcggtcggaggcaggcagacggtctgacgtcagcgctagacggggctgccggttcccaccgcgcgggggccggggagggggcgcgcgctgcgccaatccccgccgaggttcccccgcaccccctccccgagccggggggcggggtgacgggaaacggggcgggctcttaaagggccagagctaggcggcccacgtagacccggcacccgcgcaacggaggaggggcgctgtgccctctccccaacggcggtcagcttggaacgcctgcccggcgcacgcccggggccggggagccgaactcggtgccagccgcacccgggcgggttgctggtgcgccctcccctcgcccccgtccctggggtccttgacccaggctcttggggctagcctatctt

SEQ ID NO: 26946 - DNA, 2300 bp, Homo sapien
gcctccattgtgtaaatgccatctcacttccaagacaatcaacgtgtgacttctcccagccagactagccaggtctcccgagacttcccggagggcaggggctgtgtctggagtggctgaattccccggctcagggttgcagctcagccagtttgttgattgaatgaatgaagaaatggctgaaagcaggggtggtaatgatgacctccttcaccctaggaagtgaatgggacccaggtcatctccaggcccagccagtatttgcagtggcaccccaagggatgctgggggaccccttagcttttctcttaagttgcagcggccaaactgcagcaatatcttccctgataaaagacacgctggtggtattgccccttcctcaaggcaggggctgagggcgcccagttcacagcagggtgccatctggggtagacgctgggtattgccccactcctgggccggggcctgggtcctgacctagtgctggctgtggctccaagagtgagcttctcctcccaaacagaagacggtcagtgcctctgaacctccctctgggctgggcacgcttggactcctccaaagagcttggaccagcctgagccacatccctgggcttgacttctccagaacaagcctcctggtctttctgggagagctctggcagcatcactgtgcctgtgcagggagagcgggaacccacttcctgcaccggctttctctgagttcttcaggatgaattcgctctggtctaggtaagttctaccccgaggccaccttcacttcccaaattccagcttttccttctctatccaaactgttacaaacacagtaacaataatttttaaaagctttttttttctctgaacacactaagtccctgctaattactgaaactccaggcattacaggaatatgtggacacttaaagaatcaggactacgtgggagagggggaggcagctccccagggtcctgggttggcacacaggctccaccactgtgtgactttcaacaagcgacttccttgaccagctgcccgctctgtaaaatggggagagtaatattcggccacactgagtcggtgtcaggttgagttaatatttggagagtttctggcacaggtaggtgctccttaagtgcctgttaaataagtgaagctttgagaaagtgtctaaaaggcgacacactaaatttttaagaggctggaggtgggccagggaggggaggtctcttatgtaatattttaatatctttttaaacctgaagaatgtgttcttgtagcactcctgtaattaaaacttaatgaactaaaagtacacccctcctgctcataccccttttgaactccgcagccgcgccccccagccggaggccccttgggcagcagacaatgggtgtggattcgccccaggtcccgccggctggggcggcgacaatacaccagtccccgacagctatttacatgacaagggcttccgggcgtgtctacgcgagttcccgtctttcctggtcgtcctccttgggttcgggtgaaagcgcttgggggttcagtgggccatgatccccgagctgctggagaactgaaggcggacagtctcctgcgaaaccaggcaatgggtgatccatcttgggggcttcctccccctttctccaatttctcttccctgagcccccagggaccttgtgctcctcagaagataggctagccccaagagcctgggtcaaggaccccagggacgggggcgaggggagggcgcaccagcaacccgcccgggtgcggctggcaccgagttcggctccccggccccgggcgtgcgccgggcaggcgttccaagctgaccgccgttggggagagggcacagcgcccctcctccgttgcgcgggtgccgggtctacgtgggccgcctagctctggccctttaagagcccgccccgtttcccgtcaccccgccccccggctcggggagggggtgcgggggaacctcggcggggattggcgcagcgcgcgccccctccccggcccccgcgcggtgggaaccggcagccccgtctagcgctgacgtcagaccgtctgcctgcctccgaccgcggtctcggagcgaaacccgatctccttggacttgaatgaggaggaggaggcggcggcggcggcggcggcggaggcgctcggctggggaaagctagcggcagaggctcagccccggcggcagcgcgcgccccgctgccagcccattttccggacgccacccgcgggcactgccgacgcccccggggctgccgaggggaggccgggggggcgca

SEQ ID NO: 26947 - DNA, 2300 bp, Homo sapien
agtcctgggcacacacgaagcctcctatgagtgctggcagtccagcctatgctccttccaaagcaattctcctttcctactgccccgtcaggggccctgtctgtgctggaatcatcattgtcctcaactgcaaaatggaaaataaaatgatagtggttcctccctcccggggttgccaagatgattaaataacataacaactaagatgtatccggccccttctcctctacttgcaaggcatcgatcccttcattcctcgcaatcacaccacgtgaaggtgccatgaagccaccccattttgcagaagaggaaactgaggttggagaggtgaaagcactcagccgaggtcacacagctatgtcccactcatctttgggtgaccctcaggttcggaccctgaggtctgaacactgcattaagctctccagacagaatcaacttcggaactagcgccagagaccactaagtcaatcccaggtgacaccatcagcactcaataaatggtagccactgccggtgtcgcagatggatcaatgggaggtcaagcgttgtgggtaggtttggtttctttaagccactgaattaactggttatttttgcctgctggcagtgcagcctccattgtgtaaatgccatctcacttccaagacaatcaacgtgtgacttctcccagccagactagccaggtctcccgagacttcccggagggcaggggctgtgtctggagtggctgaattccccggctcagggttgcagctcagccagtttgttgattgaatgaatgaagaaatggctgaaagcaggggtggtaatgatgacctccttcaccctaggaagtgaatgggacccaggtcatctccaggcccagccagtatttgcagtggcaccccaagggatgctgggggaccccttagcttttctcttaagttgcagcggccaaactgcagcaatatcttccctgataaaagacacgctggtggtattgccccttcctcaaggcaggggctgagggcgcccagttcacagcagggtgccatctggggtagacgctgggtattgccccactcctgggccggggcctgggtcctgacctagtgctggctgtggctccaagagtgagcttctcctcccaaacagaagacggtcagtgcctctgaacctccctctgggctgggcacgcttggactcctccaaagagcttggaccagcctgagccacatccctgggcttgacttctccagaacaagcctcctggtctttctgggagagctctggcagcatcactgtgcctgtgcagggagagcgggaacccacttcctgcaccggctttctctgagttcttcaggatgaattcgctctggtctaggtaagttctaccccgaggccaccttcacttcccaaattccagcttttccttctctatccaaactgttacaaacacagtaacaataatttttaaaagctttttttttctctgaacacactaagtccctgctaattactgaaactccaggcattacaggaatatgtggacacttaaagaatcaggactacgtgggagagggggaggcagctccccagggtcctgggttggcacacaggctccaccactgtgtgactttcaacaagcgacttccttgaccagctgcccgctctgtaaaatggggagagtaatattcggccacactgagtcggtgtcaggttgagttaatatttggagagtttctggcacaggtaggtgctccttaagtgcctgttaaataagtgaagctttgagaaagtgtctaaaaggcgacacactaaatttttaagaggctggaggtgggccagggaggggaggtctcttatgtaatattttaatatctttttaaacctgaagaatgtgttcttgtagcactcctgtaattaaaacttaatgaactaaaagtacacccctcctgctcataccccttttgaactccgcagccgcgccccccagccggaggccccttgggcagcagacaatgggtgtggattcgccccaggtcccgccggctggggcggcgacaatacaccagtccccgacagctatttacatgacaagggcttccgggcgtgtctacgcgagttcccgtctttcctggtcgtcctccttgggttcgggtgaaagcgcttgggggttcagtgggccatgatccccgagctgctggagaactgaaggcggacagtctcctgcgaaaccaggcaatgggtgatccatcttgggggcttcctccccctttctccaatttctcttccctgagcccccagggaccttgtgc

SEQ ID NO: 26948 - DNA, 2300 bp, Homo sapien
gtctcccagttcctgatgcccccactggcctggcatcccctctctactgtcccctacatgcccagcccacatctccccagagaggaggcccaaccctttgggctcaagtcgcctccaaaccctctccttttatattcttcccaggtctcgtccctctctgaaattatcacctggactcatctttttacacatgtgatgtcagcctcacctgtgagcctcagtatggctggggctgcacctgtgggtggttggtaactgcaggtggaatgagatgccacctcctcagggagggcttccttgatctcaccccaactctggcctttggcctgttatcaccatgtctgaaatgacctcctgacctcattgagctatgagtttgcatgtgtgtgtgtgtctttagtccctttgtcccccacaatgtcacacgaggtcagggagttggttttcttcccagccctgtgccccatacccagcacagagcttcacactgaataggagcagaatgtttgttcaatgagtgaacaaaacctttttttttttgcctctgacttgtggcattcttcccagggactcaggcctgcccaatcgcggtgccccctccccactcccactcccagcagtgagccctccctcctcagcccattaacaccttggctctgcccatttctcctgggtagaatcagggagttgtgaccttctctgcctgtgcctgacagtgggctctgcccttcatgcccaaaatgccagcatcacagtccctggcacatctagggttatcagatttcgcaaagaaaaatacaagctatccagttaaattgagatatacttacactaatcattattcatagtttatctgaaattcaaactgaactgggtgtcctgtatttaattctcgcagtcctgggcacacacgaagcctcctatgagtgctggcagtccagcctatgctccttccaaagcaattctcctttcctactgccccgtcaggggccctgtctgtgctggaatcatcattgtcctcaactgcaaaatggaaaataaaatgatagtggttcctccctcccggggttgccaagatgattaaataacataacaactaagatgtatccggccccttctcctctacttgcaaggcatcgatcccttcattcctcgcaatcacaccacgtgaaggtgccatgaagccaccccattttgcagaagaggaaactgaggttggagaggtgaaagcactcagccgaggtcacacagctatgtcccactcatctttgggtgaccctcaggttcggaccctgaggtctgaacactgcattaagctctccagacagaatcaacttcggaactagcgccagagaccactaagtcaatcccaggtgacaccatcagcactcaataaatggtagccactgccggtgtcgcagatggatcaatgggaggtcaagcgttgtgggtaggtttggtttctttaagccactgaattaactggttatttttgcctgctggcagtgcagcctccattgtgtaaatgccatctcacttccaagacaatcaacgtgtgacttctcccagccagactagccaggtctcccgagacttcccggagggcaggggctgtgtctggagtggctgaattccccggctcagggttgcagctcagccagtttgttgattgaatgaatgaagaaatggctgaaagcaggggtggtaatgatgacctccttcaccctaggaagtgaatgggacccaggtcatctccaggcccagccagtatttgcagtggcaccccaagggatgctgggggaccccttagcttttctcttaagttgcagcggccaaactgcagcaatatcttccctgataaaagacacgctggtggtattgccccttcctcaaggcaggggctgagggcgcccagttcacagcagggtgccatctggggtagacgctgggtattgccccactcctgggccggggcctgggtcctgacctagtgctggctgtggctccaagagtgagcttctcctcccaaacagaagacggtcagtgcctctgaacctccctctgggctgggcacgcttggactcctccaaagagcttggaccagcctgagccacatccctgggcttgacttctccagaacaagcctcctggtctttctgggagagctctggcagcatcactgtgcctgtgcagggagagcgggaacccacttcctgcaccggctttctctgagttcttcaggatgaattcgctctggtctaggtaagttctaccccgaggccaccttcacttcccaaatt

SEQ ID NO: 26949 - DNA, 2300 bp, Homo sapien
tatactcaccaaaggctaaagaccaactgattgtcttatgcttgaattttttagagcaaacttgggttatttttataatcaaataaaaatcaagataaatagctgttttctttcttgtttctttttccggctgttttcttcccttcctttcttctctcctttagagaaccgaagttaagaccctgcgcagacatcacagcacctcgtctaccagaccttccgattcaggggctgcgtctttgagaacttcctcaggggtcagctttggagatcagcagggaggagggtgctcaccccaggaagcggggacgctctggaaaccaggctcctggctgtggtcctggacaagattcccaggctccgggctggctgtctgcacctgctacctgttcccaggggagtgtgggaggcccaggctgagcagcacaacctcttccctggaggagccgtcgctgtggggcccccgcttttgttgccaagagcccaacctggaagtccctgggtgcaaggtcaggtgtcttagaggccaagggaagaaacccagacctccttttatttttttctaaagagtaaacaatacagctaatcaaatggatgaactcttagacttttatagaatcttctcaagacagtctgctctccaggccctcacagtcctggatgcagcacgggcccttggagagaatcccaggcatcacaatgacaccgtttctgtcacacggcgtcctcagctcctctgtgctgcttttccctgtgaggtccttcccagcactcagcacaacgaccggcacaggaaccacctgctttctctcagggttcacctcctcagtgtcaatgtcccactgctggactgggaactccacgaagccagagccatgactgttttatttgctgctgtgtccctcgtgcctggcacacggcaggccttcaatatactgtttatttactagctcagtaaagagcgtaaaattcccaaatcctctgaatttacagaatcacagaatgcagtcactccacttttctttctttctctctttctctctctttctttcttttctctctctttctttcctccctccctccctcccttctttccttccttccttcctttcttcctttctttttgacagagtcttgctctgtcacccaggctagagtgcaatggcactatctcggctctctgcaacccctgcctcccgggttcaagtgattgtcgtgcctcagcctcccaagtagctgggactatcggtgcccaccaccacgcgcggctaatatttttgtatttttattttagtagagatggggtttcaccatgttgcccaggctggtctcgaactcctgacctcaggcaatccacccacctcggcctcccaaagtgctgggattacaggtttgagccaccttgcccagctgcagtcattacacttttcttgagggcctactatgtgccaggaactttgccaggtgtgagatccattagaaaacaagagccctacccagttcttgcctcatggagctgagtgatactagaacaaacaaggttttggaaacagagagacaagggtttaaaaattccaggtctgccacttacctgggtgcacttgggcagctgagcaccagggcctcggtttctccatttgtaaaacagaagtgatgatagcatcaacttcctcaggtgggtggattggagataacgtctgtaatgtgtttaacaaaatgcttggtgcctacttcatgctcagtaaattagcttctgcattactatcctagggctgctgttacagagaaccacagtgaacgcaacagaaatttgttctctcacaattctggaagccagaagtccaacatcaaggtgttggcagggctggctccttctggggactgtaagagaaaatccattccacgcaactcaggaatcctccacgctccttggcttatggcagcgaaactccagtctgactcactgccaagtggctcctctcctgtgtgttttcatagctctgcagccctttcctctcataaaggtgccagtcactgaatttaggacccaccctgatccattatgatatcagctgacctaattacatttgcatttctacataagcccacattctgaggttctggggaggcatgaattttgggagggacactatctttcccagaacagcttctattattttgtgtgtgtgtgctcagtgcttcgtagacttgactttatcccctcctcctagccaccttatgaggaagggacaatggctaccttgcctcacatgaggaggcgaggcacagagacttggaac

SEQ ID NO: 26950 - DNA, 2300 bp, Homo sapien
ggggacgcatagtgcctgcttctccatttctgcacccatttcatttccatggaaccctccagctgcaccggccccctttgcattcttcaaacaccccatgctgctcctgcctcgggaactatactccacaccacccgctctgtgggaaattcttctgatcttccacaccagatctgcacccacatgtctcctcctcagagagacctgccctgaccgcctgtttaacacagccccacagcccctggcctgtccctgcccccactggcctcatgccctggtgtgactctcttcctagcacgtcatgcctctctccctggcaccaggtcacacgtgcatttgtttcctggcttcattatctgtcttcccactcgatgtgccagctccagggaagcagagaccttgcaggtctgactccctcctggcaccagacacatcaaaagctctcaacacacgtccataggatgaaggaaccctcgatgtctggcactgttaatgaatttagtcttaattaatcatcttaacagaaatgtctcaaaacctcccaaggaggaaagcagaatttgttcttactacataatggatctttcttcctagccatccacttatttcctcccagaatatcttcccctctgttgtaagaatggagaccttggagaacagtccaggaagaaaatcccagcttcctgcctagagatctgtccaccctcttgctagcccactagcttgcagttggctcagccgtggacctgggatgttatatattcattaattaatcaattcagctccgatgccagcctctgcttgcccactcactaatccagctgagggacagttgggaccaccctaatactgggcgtgggccaggcatttccaacagccaagaaaagcaccatgtgctatgaagggaaaacacactagctgagctcccctctaaacaccacacataagtacaaatctgttgataagggaagaggccatggagatggactagggagagtctcagatacctaactggtggatacacacactggcatcctcccagaccagtgccctggtaattatctaggaggtgacctgtagctcaactgagtcatgcttcctcctctctcagtcccccgaggcaggctctggacacctgctcatctcatggctgctcagccagaaaaatgtcctcctacatcgtgtagatgatccccttgctgttgtctcagagccattttccagctctgggtccacaacaatgggggtatggtagaaacctagggggtcaatgaatcagtcaaaaaacactggctgagcaccccagcgatagagtgattactgcctataggcagggaaaaagagtgtggggtggtggggtctggaggtaacattatccgtgaatttcatttagggattgttacaaagagtggacgccaaccaaaacgcatattttctccaaagacatgtgcagtaatattttagcagcacttttgtggtggccaaaaactcaatgcaacgcccatcagcaaatactgttcaggagcagaaatggacgctagggccactcacagcaacggggatgctctctcaatcatgacactgggcaaaggcagccaggcacaaaggagaacatctggatggttccactcacacaaagttcaaatcacagcaaagctaatctttgcagagggaagtcaatgagagccagggaggacggtgaccctgggggccactgggggaggctggcaatgctttgttttctaatctccaggtgacggttacaggcgagtcctctctttgacatactcaattaagctctgtacacttgagcgtctgtccactcgtaggtgtgcatacttccactgcggatttaaactttcaaagaagtctagggtgttaggtctggaggtttccccaaggttttccacagatgagcaaatgggcctagaggtggacaaagggcccagacgtgagcaaaggatggcagcaagcccggacccaagcgacgcggcgaaagcacagcgaccccaccctcgccaggtgcagagccatttccgcctccgagtcctgcgttgcctggcaaccggtctcccaggagacgcgagacgctgagcccagggccagagcttgcggggcgcacagagcccccaggcctcatggcgcagaaacctctcagcaccgcggcggctgaacgcatgaaccttgtgggtcaggatgagatctggtaacgcctgggatcgggcaacgcggtgggctcctgttctcacctgaagtgtccacatctggggtctcagtttccccaccaagtccgggaagtg

SEQ ID NO: 26951 - DNA, 2300 bp, Homo sapien
attgacttaagtacacaccgcttagatttcatgcgtttcaaatttagactaagagaaagatgctctagaatttaaccaggttttttaaatcagtaatttaagattttctaaccatttgaacaaattttacttacatgtatgcacatgtcatttttcgtgtttctatttttatgttctcaaaggtaggataagggaaggaaggaggaaacagcccatttggggttcaagagctagctctgctaagggcttgtaagctatttctattctgccctttggtctttttcttgtttgtcttgtctttatttttaaatgaaattcttgaagctatgtattgaattttctagtatagaggatgtgacttccacctccaaattccatttaactgattcttttaaaagaaagataggcgtatatacaccacgccaaaataataataaggtacctatgtgagaattgcaaattataccccagggtagcatttaggcagcgtcggcaaaaagtgagttaataaatcagaagctacatattaaaaaaaaaatcagtcaatccgtcgtgtgtttaattcttgcctaaagtaaatggagatattgttttgctttggtaaccagcaatttttaatttttttttattgcccgcaaattgagattgttttgttaaaatctgttgatctagcagcaagtagaattattcaactggaatcttgtattctattcagagcttaattttccgttaaggaaaaaaatgagcttcagtttgtgttgtgatgtgtataatttgcatgctgaatcacaacatgcttggagagattgtagagactctttggtaaataatctaacctttacaatttccgtttatatgttaacatttttctataatatgagtgcctttccaatgcacagatattttttatggctgtaatttctctgtaaaaataatttttaagcatacattttattctttttttgcaacaaccgagatttttccaagattgttctgtttcccctcgccctcctagctcccgcccccgtcacttcggcgcttgtattttctaattattcatgggtgccatgttgagtgtttgtaatttgaccaccacaggtaagcttcctgtttacttgaacactcagcctcatctccggtgaatgaagggaaaagcacagatgggtttctcccaggcacagctcactccaaaggtgtcttcatagagccaacccagcctttctcaagggagcatttccccacttaatgtgtttatcagcatctttcttccgccaagaattcaagagcattttcaaaattgatagattttggtgcagttttgcaagtttccgtggaaggctgtctcccgcttctgggatccacccccatgtcgggaccagatcggctgcagggagtcatgtttatgaaatgttggtggttttttttttttttcattcatactagaagtgtttttataacgaaaatctgcactttacaactctgcaggccatgcatgcaatggtgatttacagccttgtttacgtgtaattcctccaggtgatttatcccaatttatgcaaagatcctattttaaacagacacggagaagtggtaaccgtttcctaacagcagcaagaatgccccttccgtttgcctggtgaaaagaactgacattaacagcagcttggaggcttcgaggaggtggggacgtggcctgagctcgggacgggggcccagtgcgggttgtcggagcgtggctgcccggcgatgtctctgtatttatcaataaatctcccggttgctctgggaagcacttatgtcctgttccattatttaagaaccgtctcccgcggccgcgtgaaactgcggctttgttcatcgcggagcgggaaaggactgcgggaccttggggggccgcccgcccatcggtctccctggaggctcgggcggcaggcagggaggggcctcgccttgcgtctggagggggcggtcctggcggggcctgggcgtcacagtggggcggggggcgcatgggcccgccttggggcgtcagggcgggggcggcgatgacgcgtggccaccgcactcgagccgcggatgacgcgcggccgcgcctgggggatgcggcgggcggcggcgggggcgggcggagcgcgggcggcggggccaactgggggcgcctctcgcctgcaccccaatgcgggacgcaggagcggtgcgcgggccggggctcaggggtgcggcgggcccagggtgggctcggcggactcgcgggccctccccgcgcagcccctggcctgtgcccgcggccggagccagcg

SEQ ID NO: 26952 - DNA, 2300 bp, Homo sapien
tgttttgtttttttgagacggagtcactctgtcgcccaggctggagtgcagtggcgttcactgcaacctctgcctcccaggttcaagcaattctcctgcctcagcctcccgggcagctaagattagagacgcgcgccaccaagcccggctaatttttgtatttttagtagagacagggtttcaccatgttggccaggctggactcaagtgatctgcccgtctctgcctcccaaagtgcggggattacaggcctgagccaccgcacccagccgaaactgcgccttctgagttaatgtgtgtaaagagtttaagactgggccgggcgtggtggctcacgccagtaatcccaacactttgggaggccgaggtgggcggatcacgaggtcaggagatcgagaccatcctggctaacagagtgaaaccccttctctactaaaaatacaaaaaattagccgggagtggtggcgggcgcctatagtcccagctacttgggaggctgaggcaggaaaatggcgtgaacccaggaggtggagcttgcagtgagccgagatcgtgccactgtactccagcctgggctacagagcaagactacgtctcaaaaaaaaaaaaaaaaaaaaaagagtttaacgctgtctggtccatggtaagttttcagtaaacaccaactcttactattaggaaacctgaagatgtggaatgaaagatgagaggaagtactgtatatgactggcgtacagtacgcccccaattaatgttagctatttggatgatttatatagggcttcttcaccagcaagcactccggtgctcggtaattttctgtttacaagtaggctctccccacaccctgtgagctccctgcgtgtagagctgttttcaacacatccttgcaggttcggagcccaacacgtggcccccagagcaaatagctgctcagtaagtttcttgacaggagagaaaacgcttccttccttcaccagaaatgcgaacttggatttctaagatgacacctcccccagctaccagcccttaacatgattccaaaaaagagggcaagaagggacaagggtcccacccaagaaatgcgggggccaatgggctccatgggataagagatggagccgggcttgtggccaggacacttgagaagtccgtgcaactccgtgaccggccacaccgagagggggacctcccaaaccccccagcagtcctaaaaagtccctaggaaaagggcaaggccctgagagggaagtcacccacctcccaggtggcggaccccccgcccgcccagggtcgactaggacttgggactaccccctccgcccatcccacggcagctgcaggcgcaggaagaaaagaagtgacagggagtccaaagtttccccaacaacaaaaatccttcccccgagggaagggaagggctcccaccctcagcccgccccgcccagggaggagggaccgccaccagtggatctaggcagttgggggtcccgctgttctggtcccgacaaggagtgcctggcttgaggttcccccgccccgcgcttcgtgcactctgaattctttgagagggtcccagggagggacaggggtgccccaactcttacttacagtcgtctaagtcatcctgcaagtccacaaagtacagggggatctctgaaaaccaagaaacacacaagaagttaccagggggctgcggcgagaggggacggggtcgggcaggggcccctcggcctcgcggggtggtcacggggcgagagagagaggggcacccctggcatcccccgagcccagccccactcacccgccatcttgggatgggcatggaggcgggaccggcaggggcggggccctgcagacaggggcggggccctgcagacaggggcggggccctgcagacaggggcggggccctgcagacaggggcggggccctgcagacaggggcggggccctgcagacaggggcggggccctgcagacaggggcggggccctgcagacaggggcggggccgtcggcttcgggccccgcccccgatccgcgccggccggccggccccgccctctcagcgaaggtggctgccgaggtgggcggggaggtcaggtgacgcggccggcgtcccaagatggcggcggcggcggctcccggaaggccgcggcggcgtcccggctgctaaggcgggccccacgcggctggcagcggacaggccggacctacggccggaggacgggcggcagccgcctctgcgcggaccggggctgggccgtgcggcggcagcggcgccaggggatgctcttgctg

SEQ ID NO: 26953 - DNA, 2300 bp, Homo sapien
gaatgtgtaagggttcagatctcaacctactactttcaggaaggacaaaaaccatttaaatgtcttttacttgatatgcctgaaagaatagcaccaggatctattttcatctgccttatttcaaggtgtaattgctgttgatatttatagaccgaagcttctgtgtctgttctaataattagtagaactccaattcatatttgcattttgaagttctcacccccaacaagtccgaagataattttcctaaaatacacagatcctcactggactctttcaagtccttccagagatgatgcgaaccagcgactcagaattcaatgactacaaagcgcagggcctacacctgtaacacactatgtatttggaaggattttcaatgcacctttagatgtgtatcaaataaaagtctcttaccctattgttgggttgatgtttggatcaaaactgtcttccacaaaccgccacacaatactcgatttacctacacctgtatcctgaaagagaacgagatgagggactgagaaaaagtttaccttttggcagacaccaaaaactactttgtggcataagttcaggattttagaaaaatcaccctagacgtgtaaattttataaacggaggaacacaaaagcggttgtcataaaaattcagtagagtaattaggaaattccaactgtactaaaagggagaggtttttgccgttaagacagattaggaccttttgagagacccaaagtttctgcttcgtgtaaaaagtaacaagtccacttgctttttaacatatgttagtaaactttgaactcctgagttacctctgagtaatccctgatgaatcctagccccaccctatttgggggaataaagattagttattggagttcctgccgatctttaaggcagaaactctggaatgacagcatcaatttcagaaagaaggctttgaaatggccaacaccttgtctttcctgacaagacaggaagctgaagcttcaaactagtctttggggcttcctgatttgaacaccccttttctccacaggaagagttacttggcaaagtaactctttggacaagtggcaggggtatcccacaagttcaaaaacacccaagagacaaagtaggctaatgctgcttgtaaaacctaaagacctgttattggttttactttggaagacttggccaactcccaactaataccttggtaagttgggagaaaactatttaagaacctctcttaacccagatgcaatagagaggcaagggggggctgtttgctctttgtggggcgggaagagtccacgggctccagggaggggaaggggaagggtcccttcggcctccaggaccttttcgagagtgcaagaggtgggcgggacggctcccgagctggagggagggtccacggggctggcagacagcgtcttggacgtgggaggggggaagggatgaggggacaggggggatccggggtccccgccagcccagcctcccgtggccctcccggccggacccgccgccactcaccccgagcagacacactttgagctccctcagcgccatggcccgggagccaggggcgcgggcccgccgccgccctaagttgagaagggagaggccaggcccagcaagagcatcccctggcgccgctgccgccgcacggcccagccccggtccgcgcagaggcggctgccgcccgtcctccggccgtaggtccggcctgtccgctgccagccgcgtggggcccgccttagcagccgggacgccgccgcggccttccgggagccgccgccgccgccatcttgggacgccggccgcgtcacctgacctccccgcccacctcggcagccaccttcgctgagagggcggggccggccggccggcgcggatcgggggcggggcccgaagccgacggccccgcccctgtctgcagggccccgcccctgtctgcagggccccgcccctgtctgcagggccccgcccctgtctgcagggccccgcccctgtctgcagggccccgcccctgtctgcagggccccgcccctgtctgcagggccccgcccctgtctgcagggccccgcccctgccggtcccgcctccatgcccatcccaagatggcgggtgagtggggctgggctcgggggatgccaggggtgcccctctctctctcgccccgtgaccaccccgcgaggccgaggggcccctgcccgaccccgtcccctctcgccgcagccccctggtaacttcttgtgtgtttcttggttttcagagatccccctgtactttgtggacttgcagga

SEQ ID NO: 26954 - DNA, 2300 bp, Homo sapien
agttcaaaagtcagtagagaagttaatatactaaaattgaacactaagaaaaattcaagcaatgcaaaagaggaaaagaacggaggagcaggaattttaaaagaaatggaacagatacaggccgggcatggtggctcacgcctgtaatcccagcactttgggaggccgaggcaggtggatcacctgaagtcgggatttcaagaccagactgaccaacatggagaaaccccatctctactaaaaatacaaaattagccgggcgtggtagcgcatgcctgtaatcccaactgctagggaggctgaggcaggagaatggcttgaacccgggaggcggaggctgcggtgagccgagatcacgccattgcactccagcctagacaacaagagcgaaactccgtctcaatggtagacctaaatccaaatatattagtaaatacattaaatataaaggagctgaactgctgaaccttccacttaaaaggcaaaggttgtcaaaaatcaggacccaactatgtgctggttataagaggactactataaatataaaaacaaataaagaatgcaaaaggatgtagtattcaaataataaacaaaagagacccatgtggttatataatatcagtaaaacagacatgaaaacaaggtggaagaaggacattgtgagaagaatattgaggaactttgtgttgatagaactgtttgacatcttagtggatgatattcacacagatatatacatttgtcagtttatcaaattaaaatttaatttgataaattttaaatttatcgtaaaactcaaattaatacgaaattttaaaagccaaaaggttaaactcattggataagcagttccagaatccatagttctgtatgtggtttatgtatgtgcaccaaatgctcccctgtgataatccctgcctgtgttcaggggtaaaccaccattaacaacaggatgtaaatacagtgtcatcagatcataagtaggggtcaggcttcagagtcagggtgcaagacgaaaattaagtataggcaaaattcttgtcattaaacattgacatcatatccagttggtgagatgctcacataggacgtgtgcccaagaactgagattgactgggcaaagagcttcacagtctccatctcacactcattgagagaaatagctcactgaatcacccttgctgttcaaatggttattcctctcccttctctttcctccctgttgtgtgtcaccggttgtggaggccagggtgaccagggtgatgagtgggaagaagctgtgtattcagggttaaattgatgtaaatgaaatgagatctgtacccagcatttgagaattgccacatgcaaggagatatcaaaaaagcaagttgcaaactcatccaagtagtgaatgtagatgtgtactcatttctgaaggacaatcagtgttcagattacagggttttctttatgacacccaaatgcagctacttctctggagaactatttatagcattatttttatctcccctgatagttagggaagccaaagtttaaaggactattgaacaaatgaatttgggaattataacattgagttcaattaaaaagcctttttagctgaaacaattgtttatagcgccatatttaattcctataaaactgtattctgaactatcttctgagagacatttcagtgttacattaaaagtttttgcctttggtaattactggttcatttgctttaaagcagcatgtcattttcttggcttaagagaaagattactttttgtgcagggataatgggcttataaatctagtataaaacatatttaaccagttttcccaattttgtttatttttccccctcctctgcagtttcgtgccttagcaccaatgtactatcgagggtcggctgcagctataatcgtttatgatatcacaaaagaagtaagactatatagttttctttagattgttttgaaaactcttttggttgcttagatctccagttgctctcttttttgtgtgttacaggagacattttcaacattaaagaattgggtgaaagagcttcgacagcatggcccacctaatattgtagttgccattgcaggaaataaatgtgatcttatcgatgtaaggtaagttattagaacgagagattacaatacctattatgtgttccttttcttaataagcaatatccagtttaagaatcttgcttttattttatctctgacattgaaaaattccttttggttgtgtggttggagtcctaaatttttaaactaaaattaagatttcaggcatttgga

SEQ ID NO: 26955 - DNA, 2300 bp, Homo sapien
tggcgtcactgcactccagactgggggacagagcgagactccgtctcaaaaaaaaaaaaaaaaaaagatacagcatggtaaaactgtagaacatgagaagagggagaaaagaccaacaacctatgaaggaacgatgttaagattgtcactggactcctgaggagcaatgagggggaacaggcaaacagtggatggcaatcaagtgtgctgagagaggacagctgtcattcaagcaagcaagccaaaatatctgtcaagaacaagggcaaggccaggcgcagtggctcatgcctgtaatcctagcactttggcggctgaagcaggaggatcacttgagcccaggagtttgaaaccagcctgggcaacatagtgagattttacagaaaataaaaaaattagctgggcgtggtggtgcatgcttttagtcccagctacaccggagtctgaggtgggaggattgtttcagcctgggagatacaggttgcagtgagccacgatcatgccactgcactccagcatgggcaacagagcaagacctcatctccaaataaataaataaataaaataaaaacaacaaaaggcaaaaatgaatccatttgcagatgagcagaaactgagaggatttgcaccaacgaagctacaaaaaaataaaatttaaaggatttacctcaggcaaaaggagagtgatcctgttggtgaaagctgagatgcaagaagaaaaggtggataaaaatggtaattgtgtggctgaatctaaactaatgttgactgaataaaacaatttagtaatgtctcttggggttacagtggcaaaggttaaacttaacatacactacattaaggtgtataatttagaggatgggtgattaaagtactccaaagtctttatattttaaggaaacagggtaaagacatttttacaaatatttaaagatattggactttcacaaggtaagtatgcatgcccaaaagtttgaagtaaccactaaaacttagaaatagagtatacaggtgaagaaaatcagaatgagaataaaaataaaccctaaagaagaaaggaaaggggaaaaaaaccaggcaggacaaatagaaataacaaaatacaatggtagaaataattccagatatatcagtaaatataataaatgtaaatggactaaatgctccagttaaaatacaaagactattcttttaaaaaacctttttatcatgaaaaatttcaagtatacagcaaagtgggagaaacagtacaagaaaaccatatacctgcgatgtagagtcagccattgctagcaatttgccacatttgtctcacctatatgggtatgtataggagactattaagaacacctatttaacttccatagtaaacataatataatgaaatacaatttaaacggtaatcatgatgtagagtatccacttttgaggtcaagcagatctggattctccagcaatttttaattatttaacttacgtgtgtggttatttattcaaaagatgtctcttcactaggctatagtaaaaggattggaatcaggttcgcttttctgatcattgtatttctaaatatttgttgcataaacaaatagaatttactagtaaagaattcagcacagtgccagttgcatagtaaacatttaacgtagagtagcttgtatttattgtagttgctgttgttattggaagcattcagtagagtgatacaaaataaataagcaataattggtagtttattatatttataattattatttacaagacgtcacagtgcctagcccatatcactcacccataaacattatacttatactaagtactttcactattattcaaagtctctaacagtgcctggcactacataagcaagagaaaagtggaagtttattctaattgttattattgaataaagcacttaacacgaagctggcccccagcgggcccttaatagtttccgcggtggctgtcgtagctggactacagaccccgcctcctgagcggcccgaagccccgccccttactgccccgcagtcccgcccccgtggcttgtgccgcgcctgcgcactgtcccggaaggggctctacgcgcgcagctttagtccccgcccctggagccggcggcgcagggcgcagcttcccgccgccagagcgggccagcctgctgcgtgcgtgcgtgtgtacgactctgcgtgcgtgcgtgcgtgcgtgcgtgccgtcagctcgccgggcaccgcggcctcgccctcgccctccgcccctgcgcctgcaccgcgtagaccgacccccccccagcgcgccca

SEQ ID NO: 26956 - DNA, 2300 bp, Homo sapien
ctcactgtggctggctgatgtaggagcccacaagccaaggagagctggtgatgaaaaacacccccatttgctgttccaggctggtagaaatctagaagtgagtctttggggcctgagctgagattgtaggcgtgtaaatgcgaagagatttcaaagatgagattctgagatttaaaaaatgaagcatatgccatggtgcttgttagacttttttttttttttccaaagcagaaaacttttctcagatcaaaaacctcccataactacccaccttatacccagaacttcctgaaagttgacatgccggtagggcacagtttttattcccaattgaaaagtttccattcaccaatgcatgtaggcatctgtgtatatatctcctcagtcctccgcttttgcagaagggctgttggacctgctacctcaggctgtcgccggtgctctgttaaagtgattgcttacacccactgccttgtgtgcttgcatgcctgtttatgtcttctcctctgcccatgaaatggtccttccatgtctacactgtggtgacttggtaggtaggatgttctaggcctggagctgtgctggtgacatctgtaaggtctgcagtaagggggcagtatatctcagacagtgcccttttgtggaggtagagcaagcagttgcaaaggcctttgattagaggagcatagggaacgcccattccttccgtaagggatgtgtgtgcatgcatatgtgcctctattttcacctgagggccaggtacgtcccgaaaactcaagacctggtttgtgtaaatctcctttctctttttaaactgcagattctcccaagaggggtactacacagagccaccagtgtgttattacttggccgcattgacttatttaactatatttttacctcctggagggcctgtgagaccatttggtgtagcataacagtgctcaaactttttggtctcaggacccctttacattcttaaaaatgaagacgcagctgggcacagtgacaggcacctatagtcctagctactcaggaggcaaggcaggaggatcacttgagcccaggagttgtaggccagcctggacaacatagcaagacctcatctcttaaaaaaaaaaaaagtaagacccaaaaagcttttggtttgtggggtatatcaatatttattatattaaaaattaaactgaaaattcatataattatttaagaataacataattacatgttaacagagtaacatttttaatgaaaagtaacttttcaaaaaaattaggagactgatacttgacattttttcattttttgccaatttttctttttttttttgaggtggagtctctgtcgctcaggctgtaatgcagtggcacaatcttgccactgcactccagcatgagggacagagtgagactccatcctcccaggttcaagtgattctcatgcctcagcctcccgaatagctgggattacaggtgcccaccaccgtgcctggctaatttttgtattttcagtagagacaggttttgcctcttggccaggctggtcacagactcctggcctcaggtgatccacccaccttggcctcccaaagttctgggattacagccatgagctgctgtgcctggcctgcaaatttcatttttctttttttttttgttttgagacagagtctcactcttgtcgcccaggctggagtgcagtggcgccgtcttggctcactgcaatctccacctcgcaggtttaagcgattctcctgcctcagcctcctgagtagctgggattacaggcatgcaccaccacacccagataatttttgtatttttagtaaagaaagggtttcaccatgttggcgaggctggtctggaactcttgacctcaggtgatccacccgcctcggcctcccaaagtgctgggattacaggcgtgagccactgcgccctgctgcacatttctttagtgtctgtttcaatagaagacaggctggatgctcatatctgcttctgcatttagtctgttaggatgtgttcttttggtgaatgcatatgaagaaaaactgctgtcaccacagatatgtagttggaaaaggggagagtatgtttaattgctttttcagataaatctgaacattcttcgatactacaccaaaacttgacaagtgttactttcttcaaggttattagtatgatgtggaatctgaagccatgtctgtgactttttgaacattgtttcactaaaacacatcagtctctgttgtactttgaatggattttgtgatatcatgcatggattgtttggaaacc

SEQ ID NO: 26957 - DNA, 2300 bp, Homo sapien
agtaacttcaattcagtattattatgtgataaattcatattcattatttcctagttgttccaaaagtgacctttagtagaggacacccaaacctttttgtttttcaaactttgaactttttttttttttttttttttttttgagacaaagtcttgctttgtcaccaaggctgaagtgcagtggtgcagtcatggcttgacctccacctcagctgttcgagtaactaaaactacaggcatgccaccatgccggctatttttttatttttttatagagttggggtctcactatgttgcccaggctggtcttgaacttctgggctcaagtgatcctcctgcctctgcctctcgaagtgctgggattacaggtgtgagccactgcaccctgcccaaactttgaacttctttttttttttaagagtccaggccagttgacttacagaatgtcctgtattctggatttatttgattatttcctcatgattaaattcaagttaaatgtgttttggcaagaatattccatagttggtatttcataccaggttgttccgctgttggtgatgctgtttgatcacttggttaagatggtgactgccagctctctccactgtcatagcacaaagcacatttgcccctgtggttaataggtaatctgtgatactctgagtcatctgatactttgagaccatgtgaatatcctgctcgccagcagtctttcacctggtgcttttagcattcagtgatgatccttgcttgatattttttttgacttatgtggtaggcacacgtgtacaggtgtgtgtgtgcagaggagcagacttcagtattctttgcgattttttcacttaacattctggacattttctccatctaactgagtgctcttcagcatcatttgagtggcagcatgctgttccgtttagtggatctgccataatttttgtggcagtcccctagggtcagatgtatagattgcttcccacttttggttcttggtacctgtgttacagtagctgcctcttgcatggttttgggaagggttgagggcatggagggtgggggtgccttctttttctatatcataaccttgctgctatcctggtctgtaatcctagaataccctggaattcccatcttctgctgccaaaaggagaagtaatcaggagcgtatcctcttaggacatgggatttagctaggaaggtgctctcactacagcctggagggatggagatgggtcttggggtagacacagcccacacactgccacagtgacagaggagggatttggtaatgaatgtgttccgttggtagttggcagagtggttctgaaactagtcccagatagtatgcgcttatactttctagatatgcctttaaaataagtttcattttctcattttaatttaatttattatttttgagacagagtctctcagtgtcccccagcctggagtacagtggcatgatcatggctcactgcagcctccacctcctgggcccaagtgatcctccctcctcagcctcctgagtagctgggaccacaggcatgtgcctccatgcttagctaattttttaatttttttgtagagatgacgtctccttacgttgtgcagactggtctcaaactgctgggctcaaccagtccctccacctcagcctcccaaagtgctgggattacaggcataagccaccatgcccagctgaaaacaagttttattttcataaggagagccaaggttacctggtcatccagacattgtttagaggattcctttttgttcagtggtgggcctgtcccacagagtagcaacatggggagcattggttgactttgaggagtcaggcagcaagacttcagggtttatgaagtgtaatattttgagaaagtgagtgtatttaatcttgtcatgttacaaatattgaaatctcagcagacttcagttctttatttgatatacatcagggctttctcattaagagtatttttctgaaattgtcagttataggaagaaagttattcttccagcaggtttataatatcttgattattaaatttaaattgttttagtggaaggaggcaaaaccggaagaccttatggattcaaaacttagatgtgtgtttgaattgccagcagagaatgataaaccagtaagtatatttatagttaacaataattgaatgttgtaagctgatacttatttgcataccatttcctgcaaaaccaagatttaagttggcaaattattttcctttatctgatgtctgaagaaaaaaaataagctgaagtcagcaaataagt

SEQ ID NO: 26958 - DNA, 2300 bp, Homo sapien
ctgacctccccttggggacctagcctggagtcaggacaaatggatcgggctgcagagggttagaagcgagggcaccagcagttgtgggtggggagcaagggaagagagaaactcttcagcgaatccttctagtactagttgagagtttgactgtgaattaattttatgccataaaagaccaacccagttctgtttgactatgtagcatcttgaaaagaaaaattataataaagccccaaaattaagaattcttttgtcattttgtcacatttgctctatggggggaattattattttatcatttttattattttgccattggaaggttaactttaaaatgagccctatcactgagaaatacgtgtttcatgatttaactctgtgtgtgtgtgtgtgtgtgtgtgtgtgtgtgtgtgtattttttttttggttgtcttcagctgacagtatgaaaaatgaaactgctgaaaaagctgagcacctggtcacccttggccttccattgctttggccttcagtaaaaagcagcctcccttctaggtcagggaaccatgccattgagactagtaacgggcgttctgggcacagtcccactgtgcacaggtttgagaggacaagttcatcagaaggaaggcagtccttagaagtcacatacgttgagccacgttgctcctaagcctggctctgtcaagctgggtcaggggccttgaaactggagaagtggaagtctatggttggtctgagtaagtaacttcctgtcttcatgaaaaaagttgactttgaatcccaggtactcacagaaatggtgaacagacttagttgttacccaggcacccatggattgtgttgagtgtgcagacagggaggccaccccaataggaattcgtctccaggatttttcccatgtgtcccccagtacttataaaagggagtgaaaagaccgagctgtaaggcatgtgccttctgccacctgactttccgtgaggggactaaaatttactaattgtagttgctgcagccagttaagtcctgtagcttccaggccctcatgtctttgataggagagtgcttaggtggtccccaacagtgcctaggggtacagtacagtcccattacactagagcagggctctatttatttttaaaggatatggccgtgtgttttgataaaactttattcacaaaaacagccgggtcatgggatttggcttgtgagtctgtaacagttcttaaaaagaatatctgagaaactactctgttttagacctttgaaggtgatttagagttttgtgtacatctaggagaaggtgttcagcttctcagaggatgtggacattttggttgcagctaaaaatcagtctctgaagtctctctcccttctagaggttaggacttggtgaacatgtttgtgggccttttgactgagtggcagaaggaaactgctcaggaagagaaacaggtgactgatgggaaggttgattattttctcagtcatcctggcagccaaaaatgtgccaggaaaagaaagaatgtggagcacgcgtggctcctggaggacttggagatgcatgcacatttagggtgttttccctagaattacataatgaaaaaaagaataaggcaaagaggaggtgaatatggggcctgtcacaacggcctgccctgccccaagagggttaagagtcagataatcgggacgaaactggcatggaaagagcgagcctagggaggatgccgctgggcagtgtgcatgggggagctgctgccaggctgccctccagtctgctcctgtggttactggctccacagcacctcagagagggcggccctggcttcagaaatgccagccatagtgctcacaaatgcagaagagatggaagcggtgacagaatcctgaaagtttttattgattgaagttttaaattggtaacttaagcttccttggcacgatacaaaatacctcttaaagacagcaggcttttttatttgtaggtgtgaggaactggctttaacttttttctcctcctagtttgcatgttttccttctctcgtcttctgaactgctggcaccagcagtaatacatactgataaaatcaaaattgatttttaccagtggccagtttatggctagagagacgacttatacctccataacacagaagggggaaaaatgaagaacctccagtgatccgtgaaaacctaaacgctttcaaacaaatcccaggaacagaattgctatcgaaagatatcattgcccagtttgcaggctatgttgagtcagatagaactgaatgtagtga

SEQ ID NO: 26959 - DNA, 2300 bp, Homo sapien
tttcctgccctttcgaaagaaccagcaggggtgaggtggtctattttcatgctgatgatcaactaactctgtggccaaggacagctgtgtcacctctcgctcccagactggcaggggaagcggcccctggatgaatgtccctttcgacaggtgaatctgcaactcttcaaactgcggaggcaccctcccctgaccctccttcagacccctgccagttcttctcaaaacagcttgtttagaaatttgggggctgggaagaaaagactgtgattgaagagctcctcgaggtgacttagactttgctccttgcctatacatggagcagagcgtgctctgtgggaccgcgcagcccctcttcaccccggggttctcggctgccattccctgaacatgagctcagtgccaggcagcaagtggagtgatcctcctgcacgtgctctcgtaatcttcacaatcatcccagacggaggaggggattttgtgagcccatttgacaggaaagaaagtcaaggctgagagagccgatggccatgcttacccaaagccagacgggttgatatgatgttgatctgggcttcccagccaggtggtctaactccagggccagaattctcagccattcataatgtgagggtgcttggggatgagcccccagctgggcacacttcaactgtggttactgtcatttttgtcagtggtgactgggcccctgtgatggcacactccagtcagctggcctttgtacagttttgtctaccctactccccacccccacgaagagccaccagggaaccccttagtcctggagaaggcattgactactctaccaggggttcctgaagccccttggtcccctttgtcaggcctgctgggcacaactcgagcctggggtcactgcgcgctccctagcttctccccgagtcctgctgcaggaagaagccccgaccccgcacaggtcaggattccgtgggcaaaaacaaccccagtaaccttggtctgaatagccgggcttgtcccgcaccatgggggtctcagtgggcctgggatcctcctgcatcttcttggaggccccggtcccactgggcccggcacaaagggcagctctgggtacctacaggccaggccccgactggcgcagagagtgcagcggctctcatattgcgaggtgacgcgactccctcccgcaggccccaggaagctcctggaggcgcgcaggtgccggccaggtgagactggagaaaggcgcgcagggcgcagcatagcagccgcgtgggccgacccagggccgtagtccccaagggcccttaggggacattagacggcgagctccctcccttccgagctcagccagtttgccgggtgggggagggtggcacctacctcccaaaagcaccaggacgcaagcgtaggggagcatggctgcgggcatcccgtcggggctggcaggaccgcccgccgggcgctgccacggtgcgcaaggggaggcgcgggcgcagggctctcggacggctgcgggcgccggcggccaggctggagtcctgcgaagaagttgcgagggtcctgcgcccccctcggcgctcacacgcgctcagccttcccggctgttgatagttgtaagcggagctgcgcactcataggtccaacttgccagaagaggtggagacagcccccggcgaggcgcgcacacccgcgcagcgcgcacagccccctggtgcagctcctgccattcagacccccagccctcccccagatgtccgtcccctggccgtcgccttccccaaagtcttcgcagtgggcaaggaggcctcccccaagctctggtcccggccaaggcagagcgatgcgctccttgcgtcaaagcgcacccctagccaggccgttccctggaagggcaagcggggcggggagttcctctaagccccgccagtcctgggacccctgaagtttctattcaggtcttccagctactcctggaaaagtcgcgtcaacttggatcccagcaaacccagaagcgcagtgaaagtggccaacccggtcgcctagaagccagccccggcctctgtctgtaaatgaggccgtcacccgctccccaccacacccaaacgcatctaggcaaagtgtggacccgaccaggcgggttttcctccttctcgcaactcctcctcctgcccccctccctcccaaatctcatctgagtgagtcagctgagggtggcagctcagaagcgaggcagccgtgaggcggaggacaggctgggggatcccaaagggtgcgctccagcccccaacccaggcactggg

SEQ ID NO: 26960 - DNA, 2300 bp, Homo sapien
aacctccgcctcccaggttcaagtgattctcctgcctcagcctctggagtagctaggattactgacgcccgccaccacgcccagctaatttttgtatttttagtagagccggggtttcaccatgttggccaggctgctcttaaactcctgacctcaggtgacccacccgtctggctctcccaaagagctgggattacaggtgtgtgccacggcacccggccttagcatgtagtttttaaactacccataattgtaaattttgtacattgaaagacccataattgccacaaataatcacaattatgcaagtataaataatcaccctgcacaactctcctcttgcccacaaagttatccctttcatgagaatttaatatgtgacaatggccattgtctgccagggaaagctcataccgatttcagtttcagcaaggccacctcgagtctcatagaaaccagaaaaaaaaaatgtcattttcaggaagcaaattgatcgttttcctcacatttccatttgcgttaagatcatggtgtggccttgctctggactttttcctattccctgttgcctctggagaggaggaaagctaaggatggctggtgggcccacatcgggggtccctgggtggattgaagggctcttgtggctcctggaagcctcgcccaagtttctggtaagaaatcaaaaggtgaggtggtgtcccctgttcccctgtgggatgatcagcccacaaaagtgggacaaatgagtctataaaatgcttcagaggggcaggtggactgctcactcgtgagtcccgggaaacaggcctggcccagttctccaaacctttccccagggagaccgcatctctgtcttctctcttcttctctcttctctcttgttctctcttctctctcttctctcttctctctccccctccctcctccttcctggttctcttttttctgttgatttcactccctcctttcttttccctttctctttcctcccctttctctctctttctctgcctgtttcccctttcctcactttcatttctctttctgtctctttctttctctccctctctcaggtctctcttctctgtctctcttcatcctcagttttcccctctctcccctcttactttctttccctttttcctttttctttccatcttcttcctctccctctctgggttcgtggcaacacaaggaaacccgcacatccccagcccgcagcctcgccccctcggtcccactgcagttacccggtgatccatgcaggtgggaacaatccagttaacttttcccatccgagtgattctctttctcttcttcattcataaatgccataactctcccggtcctcctttccaaggctcgtgcacttgatttcaaggcttgcctgccacccagggtgccaccagagtcccagtgcctgggttgggggctggagcgcaccctttgggatcccccagcctgtcctccgcctcacggctgcctcgcttctgagctgccaccctcagctgactcactcagatgagatttgggagggaggggggcaggaggaggagttgcgagaaggaggaaaacccgcctggtcgggtccacactttgcctagatgcgtttgggtgtggtggggagcgggtgacggcctcatttacagacagaggccggggctggcttctaggcgaccgggttggccactttcactgcgcttctgggtttgctgggatccaagttgacgcgacttttccaggagtagctggaagacctgaatagaaacttcaggggtcccaggactggcggggcttagaggaactccccgccccgcttgcccttccagggaacggcctggctaggggtgcgctttgacgcaaggagcgcatcgctctgccttggccgggaccagagcttgggggaggcctccttgcccactgcgaagactttggggaaggcgacggccaggggacggacatctgggggagggctgggggtctgaatggcaggagctgcaccagggggctgtgcgcgctgcgcgggtgtgcgcgcctcgccgggggctgtctccacctcttctggcaagttggacctatgagtgcgcagctccgcttacaactatcaacagccgggaaggctgagcgcgtgtgagcgccgaggggggcgcaggaccctcgcaacttcttcgcaggactccagcctggccgccggcgcccgcagccgtccgagagccctgcgcccgcgcctccccttgcgcaccgtggcagcgcccggcgggcggtcctgccagccccgacgggatgcccgcagccat

SEQ ID NO: 26961 - DNA, 2300 bp, Homo sapien
tttaaaaaatatttatccggagcctgttccaagccagatgagatggcagtgggtacaaagatgaataaaacactgtccctgcgtaggaagaagatcacgttctagcctgggggagagcgccaggaaaagtaaacaggtccccccctgctttgtgaggtgatgagtgctggggagataggaagagagtggggaccatgtttctaatctgattctcctaccgacgaccagctcagttgttatttacaaatacctgtcccctaaaggggggagcggggttgggggggcttggccgtgctgctggggtcagagctcgcaggggggttctgccgcagtgtggggacaaactctcccttattgggcaaatatttcccggggcgctacgctaagcacacgggctccccgaatttccctccccagggcctctctgtctttggatggcctgtcagcaagtccctgcagcctccagcccggcccgcgcggcgacccagtcccctgtcgcccgaatcttccaccgctgcgaagcgtccccgggcgagcgccctgctctccgcgctgcgcggaagccagagccggtcctcacagtgaactcgcccagccctgctcgcggctctctcgattttatgtgggtttcgttggatgcattttgttatttgcctcaatggatgtttcacattaatttttagttgcacaacgaacgcgcgggaacattctccgtgagagaaaaagcacgggtggggggcggttaccggtgcttcccccggtcgcctgggggtcccgcacgcgccccgcgggtgccgctgtctggctggggtccctgggtgagccgcgggcaccggcttcgcgtctccccgggcgcgactccgctttgcaagcgctcagcacacgggaaaccctcggaaaacacacacgtgtgtaaagtttgttccacgcagaaacaaaggacgcgtgggggccgcttctggggcctcggtcctttgttggaaccccgcaccgcagcccggcccgcagcctcgccccgcaaggggaagccggccctgcacaggcccggggcccggaaggcgccgccgcacagctctgcgcccccgacccgctccggccgcgcgctgggccaggcccttggcctcaagcctcccgggcggctccgggccggacccgggtctccgtcgcgggacgccagcctgtttgtgggtgccgtgctcgggcccgggcggcccctgcccgacgcggccccacggagcccctgcacgaaccccgccgacctggcccggggcggcaagtcgaggtgcttagggcgccctgggcccggccaaccgtggaaaacccggcccggggcacgggggggcgcgggggtcgcagggccagggcccaggcagggaacagagatttttttcgcggggaggggggtgggaggtgtcaaagttttcggggaacttttccacttgagattccacgaccctgcagtgccccctacagaaagcggcagctggggagggcgggcgcccccgacgacccccgactgccagcggcggcgcggccaggctgcctggagttcttgttccttttttttttttttttttccttttatttcctcgtggttgtttgtcggatacatctttttccagagtgggaaaaaaaaaaaaaaaagcgagcgccgccgcctgcagtagagcgtgctcggcctgcagaggcagtcgtctccaacttttcctctcccgctccaactccccgcgcccaaaacttcagttcttggggagcccaaatttgcctgccgcgcaacttccactctaattcagcgaccaagggccctggcagcggtttgcagcctgggggccacgctccccaggctcaggcctgctcgttggcctgctcctagtgcctggacccagttgggggaggcgaaacagggcgcccgaggagcaccccgggagagggcggagcactcccgtgccccggggcaggagtgcagggagctcccgcgcccggaacgttgcgagcaaggcttgcgagcgtcgcaggggggcactcgcgagggacggacaggaagagggccaggggggaacgccagaacccgggaccacagcacggaaacggtccggggctgagctgcagtcagatccggggatggagggagccggagaagaggagtgagaaggccggggaggcaggccctgctgtcttcctgcaggccggcagcctgctggcagtggaggaccaggccgtccaggaaaggaaggggtcaggaggtcgggcagggcctcagcaggttcagacaagtccccagaagggagctgcaggcgccc

SEQ ID NO: 26962 - DNA, 2300 bp, Homo sapien
cccgggcgagcgccctgctctccgcgctgcgcggaagccagagccggtcctcacagtgaactcgcccagccctgctcgcggctctctcgattttatgtgggtttcgttggatgcattttgttatttgcctcaatggatgtttcacattaatttttagttgcacaacgaacgcgcgggaacattctccgtgagagaaaaagcacgggtggggggcggttaccggtgcttcccccggtcgcctgggggtcccgcacgcgccccgcgggtgccgctgtctggctggggtccctgggtgagccgcgggcaccggcttcgcgtctccccgggcgcgactccgctttgcaagcgctcagcacacgggaaaccctcggaaaacacacacgtgtgtaaagtttgttccacgcagaaacaaaggacgcgtgggggccgcttctggggcctcggtcctttgttggaaccccgcaccgcagcccggcccgcagcctcgccccgcaaggggaagccggccctgcacaggcccggggcccggaaggcgccgccgcacagctctgcgcccccgacccgctccggccgcgcgctgggccaggcccttggcctcaagcctcccgggcggctccgggccggacccgggtctccgtcgcgggacgccagcctgtttgtgggtgccgtgctcgggcccgggcggcccctgcccgacgcggccccacggagcccctgcacgaaccccgccgacctggcccggggcggcaagtcgaggtgcttagggcgccctgggcccggccaaccgtggaaaacccggcccggggcacgggggggcgcgggggtcgcagggccagggcccaggcagggaacagagatttttttcgcggggaggggggtgggaggtgtcaaagttttcggggaacttttccacttgagattccacgaccctgcagtgccccctacagaaagcggcagctggggagggcgggcgcccccgacgacccccgactgccagcggcggcgcggccaggctgcctggagttcttgttccttttttttttttttttttccttttatttcctcgtggttgtttgtcggatacatctttttccagagtgggaaaaaaaaaaaaaaaagcgagcgccgccgcctgcagtagagcgtgctcggcctgcagaggcagtcgtctccaacttttcctctcccgctccaactccccgcgcccaaaacttcagttcttggggagcccaaatttgcctgccgcgcaacttccactctaattcagcgaccaagggccctggcagcggtttgcagcctgggggccacgctccccaggctcaggcctgctcgttggcctgctcctagtgcctggacccagttgggggaggcgaaacagggcgcccgaggagcaccccgggagagggcggagcactcccgtgccccggggcaggagtgcagggagctcccgcgcccggaacgttgcgagcaaggcttgcgagcgtcgcaggggggcactcgcgagggacggacaggaagagggccaggggggaacgccagaacccgggaccacagcacggaaacggtccggggctgagctgcagtcagatccggggatggagggagccggagaagaggagtgagaaggccggggaggcaggccctgctgtcttcctgcaggccggcagcctgctggcagtggaggaccaggccgtccaggaaaggaaggggtcaggaggtcgggcagggcctcagcaggttcagacaagtccccagaagggagctgcaggcgccctcgagtccaggccccaagcctggctccggttgtccaaagagggcctaggccaggcctctggtgcggaaactgagtcacagccagacctcagggcacggcctagacgcttacgagccaaagttaggggtagagagcagagacctccggggggtctcagggagtagggggcttcagggcctcccagtctagagccggattggcgagttagacgcttgtagatccaaggttggattggggtggggtctctgggacgttggatcgctacgcaaggattggggggattcaagtgcttagagatcgaagtctgccctgggtagggggagtcagacaattggaaagcctaggtagttatttggggaggggtctctacgccttggcgaagcgcacagctgcatctttttggcttgaggcctgaggccttgtcgagaagcttccgtgaaagggtgggccagccgggccacgagaaagaaagtgaataaatcaggaatataagtgggcggggggcccctgagaggggggtcgcaaa

SEQ ID NO: 26963 - DNA, 2300 bp, Homo sapien
acaaatgtatgtcaaatgaatgaatgaatgaaaatgctagaaaatacgaagcagatgcaccgaggaaatgtttctttgaagtatcggatataatggaatctgagagcctcgtggcaatcagctgagtctaagcaggcattaggttttataggggtgaagtctgacatgaaattaacatataaatgtagatttcaaacacctagagccatcttacaagataggatttcagaaatgtgtcctagaatgtgaactgtaccaaaaaacatcctagtaagttctaggagctttattctgatttgtcccagaagtttttaatcttttcttcaactttggagcaaagtctgaacatccaattgaatgtggaataggtttcaagccatcaaaaacataagttgatttttgggttgcattaaagatctggtaatttgttttaaactttcattttttaaggaaaattaaatagagttgaatttttcattgacagtgaaatatatagtaagccatggattaataccttcataaaaatttatctaaacaaagtgctgcctgtcttatttatgttaaagtctgtaaagtcagcagtgaaaaagggaaagtactttcctggaatgtatttgtatctgtcacaagctgaatcttgaggaaattggcaggcatttgaagtggaataattccttagcgttctgtttagtttggatttcttcaattcgggggtggcttaaaaccagaatcaccaatatttgcttttaacaagcatctaacgttttctcttgctttgtgtacactaagtgctcaacaaatgttggttgaattgaatcattttgttcatcctttctggggactgtcagggttattcagtctattcttaaatatgaaagaattctaaaagaaaaacatctccaaaatgacctctccaccaacagtttatctcatttccaactccttgtacacaaacctgctagatctggctttctgaaatgcttcttggatccctcttcagtttgcaaaattctatagagtgagccaggctccccagtcgatctcctcacccactcctattttccaggaaccttctgttctaaccacacaggtttcagagcctgctggacatattctgcgtctgtgtttcctcccaggacttctcccacgtggaaggccttctttctcaatctcttcgcctgtggaagtcctattacatctgtcagggcatggccttagtctctcaccctctaggaagatcctccagctgtctcagtcctctggagtgccgtgtgcctgtctgcaacgtatttgcaaacagaaaaaagagtgagagatcttcatacacactgttagtaccctttaccaatgtgtgaaaacattcagctgctgtaaaatcttttgaagaaaataagatccaattagcgttgacttttatgtcgggaaagctgagggtttcaaaggaatgcctttcagtcattcaacagctttttttttttttttttttttttttttttttttttttgagtgcctgctctgtgccaggaactggaggaaaaaaaaacaacaaaaagtcaaaaagacctgccttcaggatgctgaagctctagtctgtggtgtttccaaggggccagggaccatggctcagagctgagcagacagacctggagcctgtggacagggaaggtgaaagcctggcttgtggctcccggggctacaagttagggagctagggggccagctgggaggtcagtggtggaaaacctctcacaccacgccagggagttgacagtgcttttttttctttttttcttttctttttttttttttttttttttcatttttaggctggttatgaagaagaaactcaaaataacaggagtggcttatggaactacatggaggtaacagaggagggtaccaaccaaaggcccttgagcaatcaggatgttgggtaacagatttttgcttttaaatgactcctgggtggagcttccccaatgcatcgtcattccctgacccttgcatctgaccctgtgggtgggaccctccgcctccaccatccactcaaggctcacccctggctcctccaccacccggctcctgccccacacccccgatggcctttcctcccctgtaaggcgactgaggtgactcaggtcaccctgctccttcctcgtctcatctcgtccctcctttcctgcttagactgtgccagatgacccttcttgcaaaggggtgggcgggaaggccccccatgcagccaggcagtgcctggatttgtaactggccatcccagcagcagtgccctggatggaaag

SEQ ID NO: 26964 - DNA, 2300 bp, Homo sapien
gaattgaatcattttgttcatcctttctggggactgtcagggttattcagtctattcttaaatatgaaagaattctaaaagaaaaacatctccaaaatgacctctccaccaacagtttatctcatttccaactccttgtacacaaacctgctagatctggctttctgaaatgcttcttggatccctcttcagtttgcaaaattctatagagtgagccaggctccccagtcgatctcctcacccactcctattttccaggaaccttctgttctaaccacacaggtttcagagcctgctggacatattctgcgtctgtgtttcctcccaggacttctcccacgtggaaggccttctttctcaatctcttcgcctgtggaagtcctattacatctgtcagggcatggccttagtctctcaccctctaggaagatcctccagctgtctcagtcctctggagtgccgtgtgcctgtctgcaacgtatttgcaaacagaaaaaagagtgagagatcttcatacacactgttagtaccctttaccaatgtgtgaaaacattcagctgctgtaaaatcttttgaagaaaataagatccaattagcgttgacttttatgtcgggaaagctgagggtttcaaaggaatgcctttcagtcattcaacagctttttttttttttttttttttttttttttttttttttgagtgcctgctctgtgccaggaactggaggaaaaaaaaacaacaaaaagtcaaaaagacctgccttcaggatgctgaagctctagtctgtggtgtttccaaggggccagggaccatggctcagagctgagcagacagacctggagcctgtggacagggaaggtgaaagcctggcttgtggctcccggggctacaagttagggagctagggggccagctgggaggtcagtggtggaaaacctctcacaccacgccagggagttgacagtgcttttttttctttttttcttttctttttttttttttttttttttcatttttaggctggttatgaagaagaaactcaaaataacaggagtggcttatggaactacatggaggtaacagaggagggtaccaaccaaaggcccttgagcaatcaggatgttgggtaacagatttttgcttttaaatgactcctgggtggagcttccccaatgcatcgtcattccctgacccttgcatctgaccctgtgggtgggaccctccgcctccaccatccactcaaggctcacccctggctcctccaccacccggctcctgccccacacccccgatggcctttcctcccctgtaaggcgactgaggtgactcaggtcaccctgctccttcctcgtctcatctcgtccctcctttcctgcttagactgtgccagatgacccttcttgcaaaggggtgggcgggaaggccccccatgcagccaggcagtgcctggatttgtaactggccatcccagcagcagtgccctggatggaaagccacgtccctgtcaccctctcacatccagggcagtgcctggcagagcggggtctgataaacgccagggaacctccgattaagtgaggaggaagtgaccgtccacgctgtacccaccatgccaggcagtgggacaaaaggacctgactcaggtccaagagtcactgggcccctccggcctaactgatgggtggccagggtgcggggtccctggggatcaaaagcagctgctaagggacctcgggggacctgcttggggccagcctgaggcctgaccgggcggaactgcgtcgggtgggcttgggcctacgtcggcccaggccccactggaggccaggcccgtccgggaggcgctgcctggcgggccacgtcgccccgcgtgttgggcagggccgctaggcccaggggcggcgccgctggaggccgggcgcgcgggccctactcggcagggcctgctcggggccggcttcgggcctgcccggccgggcctgcccgcacccttccgcccggcctggccggcgccccctcgcgccccgggcgggccctgcacgtctcgcgagcagcccggagcggcgggggaggcggggcccgcgggctgccgggcagggccggggcggtgccgaggccgggccggagcggggcgaagggggccgagcggcgggccgggccgggccgggcagggccggggcgtgggccggcaggaagatggcgaacgtggggctgcagttccaggcgagcgcgggggacctcggacccacagagccggcccctgctgctgctcgggcagctgcaccacctgcaccgcgtgcc

SEQ ID NO: 26965 - DNA, 2300 bp, Homo sapien
attggagctaatttgcattccccaatcccacactggccaggggcaggagaaggggcagggagcaccaggctcaggcaggcggctctccaggagaaacaccagccggccagagtttccaggggcctctgggagttccccgctcagctcagcccgagcctaacccagttctccccacgctttccataggaatctatggggttggcaaagccgccctgcatcccccagccctggccgtcctcagccacaccccagatggagccacgcagaccatcgcctgggtgggcaaaggcatcgtctatgacactggaggcctcagcatcaaagggaaggtgaggtgcgggctggctctcagggtgccctgggggaggggaggggaaggtgaggtgcagggcccggctctcccgggtgccctgggggtggggtggggtggggtggggaggggaaggtgaggtgtgggcccggctctccagggtgccctggggttggggtggggtggggtggggaggggaaggtgaggtgccggcaggctctccagggtgccctgggggggggggaggggcccagtttgggtccagccagccctctgagaggtgtcatggggtggggggcggcgaggtttctgggggttctgggttggggtgggttcggggagagtgcgcagggcgggttcccatgtgctgaggcgacagcttcacgtggctccctgggtttcatgcccacccttcagaagggtctggaaacaaaagcctggccagggcccaagagcagccccggaaatgacggaagaaatggcaagcagggccagggaggcagggcttgctgcttgggggctttgtcccgagaagagaagggcaaggggacgcctgtgtctctgagtctgcccatggtccccactgagaaaacgctcagagtggccacacaagaccctccaaaggcacgtgacccccaagagcgaggggaatctgggcacggcacagaagcgagtcacccgggaacatcccggtgcggtggccctagaagcctgtcccgtggtacggctttctgtcctgccatcccaggaggacaggtgcttgtggagcccccgtcgtggccgagtctgcccgccccagcaagccctgccctcctccgcaccatctccatccattcatcctacacaccgtgtgagcagcctctgtgctcaggcctgggctgggaaggacagggagggagcagactgggaagtacatacctcaggaggtctggaaggagcagggagtgcatccgcagcagacactgcaaactagcagcctgcaaggctcacggaggcctggcatttttaaaatttgaattagctaccaatatttgaaaccaggaaggattctcatcaaagcctggatttccggccttttgtgcactcagaaggtctgccagtgctggcgttctgttcccgcctggcagcattcccctgcagccagtgggcctgcccctggtgtcacccattctccagtttggtttgcggtaggccccaccacttgctgctgccttcctgacactgagccctagtgtcagctgctgttcagggtggcgctggtgcagctcgccgcgctctctagcacgcctagtttatttcatacctggagaggatgagcagttcccatccctcctctaaaccacaaaactgtttagaactaagcagaaaatgacactaatcataaaaagggttttttgtttttttttaatagaaaaaacatgcctccctatgggtctcttggggtaatagatggtggaatgaatgtttgtttctggctttgggtcttagcatctacacgtttgacaatggtttcatttaaattgatcttctttactaatgtatgttcagtaggcagagttgccagctgtcttcactcatagttggtccaagaatactatctgttaactttgattttgaagagctccaatctcgtgaggcaacagatacacagatacttaggaaaagtctttaatacggtatcatttggcagagattcttaaaaatcccatttcacagtaaattccagcaatcacaacacccactgtgtgttcagttcttcagggtggattcttgtggctttcagatgtctgcagaacaaaagcattttggacacagtaactccaagtgttcacatggaatgagggaagtgaaggaacgcaggttccgcgtcttcgttttgaccatcccgcactctcgtgttttattttgggtcctctgtttcgacaccgggaggtaggaaatcatgggccctggaggccccgactgtgcccagagccagcccacaggatct

SEQ ID NO: 26966 - DNA, 2300 bp, Homo sapien
cctccagctctgctgagtcttggattttttcagccgctcctggtgattggagaacacctccagactggccgtgagggccgcaagggcagggccgtgcctgtgctgtctctgtctcacgtcttccagccgtgcagacctcagcactgtttgccccaggactgcagctcgctcgtcttctaagccagcacttctcaagtggggtccccatgttgttagtaatatgggttctcagctctgccccagacctgctggatcagaaattaggggcagggcccagccttcagcgggtagcagccctccctgggaggctgaaagcatccatttgggaatcctcctcctccccgctcctccctcctccccccccgcctcctctcctcctcctcctccccccctcctccccctctcctcctcctccccacgccccagcaggctacagatccagaactctgctttctaggaggacttcagggctcccctcctttgttggtggagctcatctctgtggcgtccatggcctggagccccatggcctcatcctgtgacctcagggtcatgctgtcatttattcgttgttcctaaacacccacttctccctggaatgaccacaggaggcctcagcacagggacaggccgtggtcactgtacacacagatggaatgtcagtgctggggtatctggggaggagctctgagaggaggaggctgagggtcctgaagcccctgccccgtgtccctgacacaggctgggctgcgagagtgggagcgggggacttggggcccttgtggagctgacaggtggctccgatatcatcaccctgaggctggtggggttctttcccctgtgctgcgtgggggtgcggggccatctgtgaggctcaaggactgagcggggacccagggaggtctcagggactcgcagctgccatgcccagcaccactgctgcagctcctgccactggccactccttgccctgctggctgcccctgccccaccatcccaagtgtttgcctttggtgagggctctgcacccgtggtggaagagtcggctgttccaggagatgagaaagacgctggatcctatagagctgtgtgtccgcgctctcgaggcatgctccatgctaggaggatgtattctggttaaagattcgtctgcgggagcagaggaagggcagggacaggggtctgggagctctactccatttgacattgctgcccgggtgtggcccgcttcggggtcagggggcacccttagaacctgtgcagggcaggaactgccaccatctgttggccacacatttctcagtgaacaaatgacttttggcatcagaaagccataacttcacacctaaacttccacgaggctgagctcttcctgcccctctgtgtgtgtacgtgtgtgtgtgtgtgtattgaggggacgcggctgctggccaccttctgtcggcacaggttggcgaggcttcatgactgcccagcccatgcagtccaagagtcccacagcccagcccatgcccaggctcatccactgcggcgggtggcctctgccaggggaggctaggaaaccccagtggtgagccttggccttgggatctgccaggactgtacccgggatggcagggagggcgagctttggtccctgcaacttggagccatctctctctctcctgctgtctgtgggtctgagaacccccagctcgtcctcccccctccccaaacctatgacctacaactggagcctctgcccacttctccctccagggtttcaaagacaacctccacgctgtgttctgcttggctgagaactcggtggggcccaatgcgacaaggccagatgacatccacctgctgtactcagggaagtacgtctggccctcccactccttcctgcccactgttggaactcgcgacccttcccggcctgcaatgccagctcactccaggcatatcgggagggcactcagcgttggggtcccctgggcagcaggctccttgcttcccggagggctggggagctttggtagcaggcgcacctcacgttgaggggcccatggcacctggatgaggtgctaggctcccgtgcagtgcctggcccaggagctcgtggtctaccctgcattaccaggacaggtctttccaaaatttaggcctgaaatctttgggtgtgtgaagctctgacccccagattccctgctcggggacacctcctgcatctcccccttgagattgaccctggaaagtcaaagctgagctggcagctgaggagcaagtggctccagaattcaaaagagaagagccctctc

SEQ ID NO: 26967 - DNA, 2300 bp, Homo sapien
accatgttggtcaggctggtcttgaactcctggcctcaagtgacccacccgcctcggcctcccaaagtgctgggatcataggtgagagccaccatgcccagcccaatcactattttaatgctacaaactaacacagagtgcaagatacaagctagacacagccaagatgcagaaaggaaaacctcaacacatccaaagcagttgctggtctctcactggggtatgaactctgcacttagtggttttaatacgggtgtggtgttgaaggtgtgaggttaagttccatcatggtgagaatggctgtgggtacctgactgactcttcagacaccaggcagaagtaccagtaccaggagggcctggtgggccacccagtggtagagcctctttttttaagattccccatactgactcaagaaggagaaaaggaccacaacccatgacatgtgtcctaagtgaaacaaccttcttgatactcccagggattttaggatgatggctttgctctgagttgtttcgcctttggacttgtcactatggccaaaaaggcaccccataatcatcatggagggccagactgaagacacgcacacctcaaaagcagcagccaggttagctcccactgtagggatctcctcctgtaggccatcatttgattttctagggccaagaaagagcggcactatttactccaaatcttcagccttgcagagtacaacaacacgatctagtggtgtctgaccgccccctagccctgatccaatcattttctcatgtggaattcaagctagattaaacaatgttggtgggtacagagggattctgactgattcaatctcctgattcacagcaaattaatccaaaatatcctttccttaatacaatacttttgttgttgttgttcactactctaccttcagcacctaaaacacagcttggcacatgcaaggcacccaatgagtattgctgagttacctttgttaaaaacctatctaggagccgggcgcggtggctcacgcctgtaatcccagcactttgggaggccgaggcgggcggatcacttgaggtcaggagtttgaaaccagcctggccaatatggcgaaacccctctctactaaaactacaaaaattagccgagcgtagtggtgcacgcctgtaatcccagctactcaggaggcttaggtaggagaatctcttgaagccaggaggcagaggttgcagtgacccaagatcacatcagtgcactccagcttgggtgacagagcaagattctgtctcaaaaaaaaaaaaaaaaaaaaaaaaacctacctaggaaatggctgtaaggggcctccagtgaggattccgtgtcaccctgaactgccccgcaggagagaagtggttgtgtgaactgagagcgcaggaaagacttccctttacccatgctctcagctccagtccacttccagcaccaccttctcagctcaatcgagctcagggcagtcctcagatgggcttgcagacttgcaaactactacctcaaccgtgggggcccttgttgaagaagatgaggtaattagccaattcagactgtttgagcacgtattgtttggaaacttttctaattacagtcactataacagatctgctaaaggtagtttcatgattaatggctgcccgaagttaccatcctcaaactattaagccattggaaaatgctagaggcttaatactcgtgtatagacagaccctcattcccctgaatatttgctatttggggttctgggtttttagctgctcccaggctgtgtttatttccccaataactggggaaactggggaggggcacgaccccacgggagcctgcgcccacctgcccaagtactggacctggggctagcttgccgcttgctccttgccacccgccaggccccccgcccatcgcttcgcccaaatcctttcaaacaaggttccctcctgccacctgccggcccactagggtctgcgccacaggctcggcgccaccacgcagctcgcggggaggtggcccccacctccttactgcacatgcccggcagaagtccgggcgcgcaacttcgcagaacctcactgcccgtccctcctcgcctcagtctcctctgtcctctcccaggcaagaggaccggcggaggcacctctctcgagtcttaggctgcggaatctaagactcagcgagaggagcccgggaggagacagaactttccccttttttcccatcccttcttcttgctcagagaggcaagcaaggcgcggagctttagaaagttcttaagtggtcaggaa

SEQ ID NO: 26968 - DNA, 2300 bp, Homo sapien
ccatcgcttcgcccaaatcctttcaaacaaggttccctcctgccacctgccggcccactagggtctgcgccacaggctcggcgccaccacgcagctcgcggggaggtggcccccacctccttactgcacatgcccggcagaagtccgggcgcgcaacttcgcagaacctcactgcccgtccctcctcgcctcagtctcctctgtcctctcccaggcaagaggaccggcggaggcacctctctcgagtcttaggctgcggaatctaagactcagcgagaggagcccgggaggagacagaactttccccttttttcccatcccttcttcttgctcagagaggcaagcaaggcgcggagctttagaaagttcttaagtggtcaggaaggtaggtgcttccctttttctcctcacaaggaggtgaggctgggacctccgggccagcttctcacctcatagggtgtacctttcccggctccagcagccaatgtgcttcggagccactctctgcagagccagagggcaggccggcttctcggtgtgtgcctaagaggatggatcggaggtcccgggctcagcagtggcgccgagctcgccataattacaacgacctgtgcccgcccataggccgccgggcagccaccgcgctcctctggctctcctgctccatcgcgctcctccgcgcccttgccacctccaacgcccgtgcccagcagcgcgcggctgcccaacagcgccggagcttccttaacgcccaccaccgctccggcgcccaggtattccctgagtcccccgaatcggaatctgaccacgagcacgaggaggcagaccttgagctgtccctccccgagtgcctagagtacgaggaagagttcgactacgagaccgagagcgagaccgagtccgaaatcgagtccgagaccgacttcgagaccgagcctgagaccgcccccaccactgagcccgagaccgagcctgaagacgatcgcggcccggtggtgcccaagcactccaccttcggccagtccctcacccagcgtctgcacgctctcaagttgcgaagccccgacgcctccccaagtcgcgcgccgcccagcactcaggagccccagagccccagggaaggggaggagctcaagcccgaggacaaagatccaagggaccccgaagagtcgaaggagcccaaggaggagaagcagcggcgtcgctgcaagccaaagaagcccacccgccgtgacgcgtccccggagtccccttccaaaaagggacccatccccatccggcgtcactaatggaggacgccgtccagattctccttgttttcatggattcaggttagttgcccaccgctaaactggggagcctgagggcggtgtgggagcagcgcaggtggaaaggaggtgagaaggaaaggcaggtcaggggcgagtgggaagagaggaggctcagctggtcagcctgggatcgggggtcagggtgaggcggcgagggctcccccaaacttcccaggatgccaggggcgccctggtggccaaaggcttgttggacggcggggcgcacgccgtgcgtcccgctggagacaacctgaggtctccgagctggtgccccggctacgcgactgaatcccgaacgcaccccagatttggagctgcacacccaaacggcattggtaagtcacttgttttgcgcgcttttcttcctcctagaaagactagtctcaaataagttggccttctcaggtgtccaaaatgtggttcggaggtgcgcgcgccaactttcacgatgtgagagcagccgcgctgtagagacaccgttgaaatgtgcggaaagtaatctgaatgggaatgggcgagaactctagagactgaccacccgggagggaagtcacgcgcgcgcggcgcctaagcagctcagagccggagcccaggtcccagagctgacaattaagccgcgggacctccgcgccagtgcctccagctgccgtgcgccagccttggccgccacagcccgcctcccgtcgctcgcgggacagagaccgcctcaaagagcgtgcgcacctgcccgcgcgcgccggagctgacctctcccggcggcgggcggttaggggaaagtacctgggggaaaggtagaggaggtaaggggacccttggggatgcccctacgggctaccagggttgaacgcacaggcatggtcacgtcggggtattgccaagcttttggcgcagctggtcgggtggccaggctgcatgcggcttagcaggagacgtcctgggctgtttgcgcaggacctctggaggccctcg

SEQ ID NO: 26969 - DNA, 2300 bp, Homo sapien
gcccctcttccttggtctatccttacgccctcctctctctttctttttgctccaggccagtcccgcctgcttggatctgacgagcgtgccgattcggtccgaaaatcgccagtagcgctctctctctgccaccagaggacgccggttccagtgccgagctggctccggctccaggagcctgctcctggcgccaggggcccgggactttgggtaagggggctggtgagcgcaggcctcgcagggacgttttggctccttccactcctctccctgactgatttggagtctttctcctcgcttctccgctggccagagaaagcgctcctgcgttgcgggacacgtgacgcaagacgtgggcctcggaacgctggagtacaggagctgaaaccctccctccccaacccaaccgactcctcgggggaggggggactgaagaaggatttcatcaccccaggatacccctgaaactctgagtcatagcccccagcctccaggcagccccggatctcaagcccctagtccggagcgcaaggcttttggtgcctgggaaggggcgcaggcacgcgtagggatgcgacaggtggtcgtgagcccaccaaagaagcagagagaggcgagggagaggggatgccgagtatgcaagcacgcaatttgttttttaaatgccttgggtgtactttttgctgcttttgtttgtcacttgctgaggttggctccggtaaagcactttaacagcccccacccccatcacactctaggggtctccgcagtggcccacagcggcgcaagcagggtgctctcttgtttatgtggatggtgacgcaggggaataagaaggtctcgggtgcgtaccaccaagagcaaagccccctagggagtagctgcggcggcaccaagagaggggtggggggcgtgctgcgcagaggaggacctcacaaagcggcctcagagtttcgcaggtcctgctgttctagggaagggttaaaggggattttggttggggtttaatgccggtttagggtggtttcgagactggacaacgctgtgcgcactgaacccacagataaataccatgccgcgcggcaaccggagctgaggtgcgctgctcgctgcttcgggcaccggccgcagcgctggtcagtcagctcctttagccccactacagcctgcctccagcacccttctagcccctctcctctcgctctgggtatcttagggtagtcgctttacttttctactgctagagcccactgaggcggcactgagcccgccaaccggccacaaacccggcggttgcccgcgcagctgcgctcccgctaccatgctgcggtgagctcagagctagccaaaggtaaatgcccacaccacctggtggccttgatgtgtgcacatgctatgctctggtctggggtctgcagagggattggaacccgggagaaaagctgctgtaagggggtcacataaaactcggcaggtgcgcatcaggtcggtctcaccagtgagacagattggcgagccacgtctaggcacagagcaactgggcaggaggcagggggtcatctgacctgcagaaccctgggggaggggaggctggatgagttacacagggcgggctgcagcaagcagggcgcacggcacgggctgctgtataagagctgcaggcgggcgaaccaccgcaagttgcgatcccgtttagtctaatgcatccctcttagagccagggtaccacaggcaccgtgcatccttgcacccctgcatccaccatccatgtggccacgcagcacggaaggaggcgaacacagttggaccctgggaaacgtttgggatcccccaaagatatatcgctttagctctatgggtctacacacttccagatgtcaacactgaactttgattcaaactttggccaactacacccacgcaagacggcttaaccacttgagcatccactgaatggcccaactgggtcccaacaccaactcactcccctccgaccccagcgccgggtcagccattgggcaggggtcatgccaatcaaggctgcctggcgaatgagcagggggcgtcagaccggaaaccggatatgggtgggaggtccaatagggggcgccgcgttggaacgcccgaagaggtgctgctggggtggttggaagccggtggggggcgggtgtatggcggctaggcctggaagaccacgaggaccgctagcgccgtggggtcactcttcctcatgccacaggttgccgagcctcgggggagaggtggggtcccaggggccaacccttgggtgtgttgatggc

SEQ ID NO: 26970 - DNA, 2300 bp, Homo sapien
cccccttacagcagcttttctcccgggttccaatccctctgcagaccccagaccagagcatagcatgtgcacacatcaaggccaccaggtggtgtgggcatttacctttggctagctctgagctcaccgcagcatggtagcgggagcgcagctgcgcgggcaaccgccgggtttgtggccggttggcgggctcagtgccgcctcagtgggctctagcagtagaaaagtaaagcgactaccctaagatacccagagcgagaggagaggggctagaagggtgctggaggcaggctgtagtggggctaaaggagctgactgaccagcgctgcggccggtgcccgaagcagcgagcagcgcacctcagctccggttgccgcgcggcatggtatttatctgtgggttcagtgcgcacagcgttgtccagtctcgaaaccaccctaaaccggcattaaaccccaaccaaaatcccctttaacccttccctagaacagcaggacctgcgaaactctgaggccgctttgtgaggtcctcctctgcgcagcacgccccccacccctctcttggtgccgccgcagctactccctagggggctttgctcttggtggtacgcacccgagaccttcttattcccctgcgtcaccatccacataaacaagagagcaccctgcttgcgccgctgtgggccactgcggagacccctagagtgtgatgggggtgggggctgttaaagtgctttaccggagccaacctcagcaagtgacaaacaaaagcagcaaaaagtacacccaaggcatttaaaaaacaaattgcgtgcttgcatactcggcatcccctctccctcgcctctctctgcttctttggtgggctcacgaccacctgtcgcatccctacgcgtgcctgcgccccttcccaggcaccaaaagccttgcgctccggactaggggcttgagatccggggctgcctggaggctgggggctatgactcagagtttcaggggtatcctggggtgatgaaatccttcttcagtcccccctcccccgaggagtcggttgggttggggagggagggtttcagctcctgtactccagcgttccgaggcccacgtcttgcgtcacgtgtcccgcaacgcaggagcgctttctctggccagcggagaagcgaggagaaagactccaaatcagtcagggagaggagtggaaggagccaaaacgtccctgcgaggcctgcgctcaccagcccccttacccaaagtcccgggcccctggcgccaggagcaggctcctggagccggagccagctcggcactggaaccggcgtcctctggtggcagagagagagcgctactggcgattttcggaccgaatcggcacgctcgtcagatccaagcaggcgggactggcctggagcaaaaagaaagagagaggagggcgtaaggatagaccaaggaagaggggctggggggcagcctgggggcatgaaaagtggccaggaaggagccaagactccaccagcaacaattgagttgcttcagcctcagtctagggttccttccaggccttgaaccccccaacctcacaagggttggaaagtgaggccggtgaactttccagctggtactttgattttaaaataataataataattttttcaccctagttcggttgggtgctccatcttacggagccccaaacttattttgagaggccgccaccgtgttatgggcgtgcgcaactgcctctacggcaataatatgtcaggacaacgcgatatcccccctgaaatcggggaacagcccgagcaaccacctttggaggccccaggggcagctgcccccggtgctgggcctagcccagccgaagagatggagaccgaaccgcctcacaacgagcccatccccgtcgagaatgatggcgaggcctgtggacccccagaggtctccagacccaactttcaggtcctcaacccggcattcagggaagctggagcccatggaagctacagcccacctcctgaggaagcaatgcccttcgaggctgaacagcccagcttgggaggcttctggcctacactggagcagcctggattccccagtggggtccatgcaggccttgaggccttcggcccagcactcatggagcccggagccttcagtggtgccagaccaggcctgggaggatacagccctccaccagaagaagctatgccctttgagtttgaccagcctgcccagagaggctgcagtcaacttctcttacaggtcccagaccttgctccaggaggcccaggtgctgcaggggtc

SEQ ID NO: 26971 - DNA, 2300 bp, Homo sapien
aggacaatagtcccaattgtgccttgcctaggacgcatgttagtatatgacatggggcagtttcactccttttaaagttcaggtgtgatgtttatctaaaaggggaaggtggtaatggagctcagagatttccaaataaggaggctcttcattatattcattgtataactttgtagctcctggcataagtatctaggttgtatttgttactatttaccttgtacctcttaaagacaatgtatctgtgctttgccacagtagaagcaggaaggaagatgcttttgaacaaatggagcataacaaaaatgtctggcctattcttccctcttacaagtctttaacaatttttaaaaatgacaatcaatcaaattcagccaggaatttttaatttaccatctaaagatatagaacctgtgctgtgtcatcaagcggttctaatttaggtggtggatggtagtgagcctcactatcactagtacaggcagcctaggaatcatcgattctgaggccttactgctgagttctcctatgagcacattcaggtgtatctgcacaatatttttatgcatctttggttaggtgaaaagcatcaacctaggatagttcctttgagcattttcaaaataaggtgtatttttgtgtggaagagaggccatccatgatcaggagtgtgacaaaaacctggccccaacttttcagccaagttcaagaaagtcaggggtctgcagcagcccagggcaggacggtgtctaggctgcgcttcctgttcttaattccaagtgttgtttggtgactttgaatcgccctctgttgtcttttcagattcataaaaaagaggccttgtacaatgggggcagcagtgtacctgaaggggccaagaaaaataatatgtggcatcttcatctgtcacaccttttcttactcgaagtggagcaaactggggaaaaggggggaatttcagtcatccggttgaatggctaacagtgtctttttattttcaaagctaacttaaaatgatacaagtttgctcaaggcctctggtggtatcagccgccccatacccctggggactgttaaatgtgtttccatttataggtagacttttcttttttctccttctccatcaaacatcttaagtttcatgggctctgttaagaagtcaaagaaaaagttggaagacagtttgtggactttgcatatctgggctttccgggacgtaggcctgtgtcccatccaagacactgctcacgtcttagcctgattacctggccgcctcggctcacctgggcacatggtgagccgcggaactggcaggcaccaaacatttattgaatgaataaaccgtatcccagcagacaccatggtggcagcagatgacctaaccaaggtcccaggaaaggcgggctggggtcaactgcttgaaaatttagtaaccctgctcctaatcccgtgcactgctatatcctagtgtgcggcgggacacttgagagttttgaaagaaccctcaaacaagttcacgttccgtaaactacttttccctctgttccagagcccccagggcgcccaggcaaggccgccacctctcccacctgggaggacgcctcgagcaccgactccacagccacggccaccgctcctcggctcccgtgacaccggcgcgcctgctgcttcgagcaggggaggctttgcactcccatcgcacttttctcgtccgaagatacgaaactccgtccgggcgtcgcaaataattcgaattcggctctctgacacctacctcggcgggcgcgcgccgctgggagggcggggtgggtggctggaggtaaggaggcgcacagcaggggtaagcgccgccgtcgcacactttgcacgccgcccagggctacaccactcaccgaaaattgggaggcaggtctgggaggcggggttgagcgcccaccgccttgggcgcgcccgcgccccccgccatcgcggcccccgcgcccccggcccacgcccgcgcggtcccggcaccggcctgcacccccagggtgcgcggcggcccatttgggtgcgtccccggtgggccgatttttcgcgcttccccttcggtttataggggccgctgctatgggtcggtcctctgaagaggctggggcgtcatcggggccggttagaagctctgctccccggcggggacactcagtcgcgtcggcaccgcggagcgggctgcgtcaggtggctggccggcgcggcgctcccctgctctctggctccgggctgcggcgcggcggctggagcgagcccctgtcccggcgcggggc

SEQ ID NO: 26972 - DNA, 2300 bp, Homo sapien
ggctgcgtcaggtggctggccggcgcggcgctcccctgctctctggctccgggctgcggcgcggcggctggagcgagcccctgtcccggcgcggggcggcggcgggcggccggcaggcgctgccttgcgtgtgagtgcacctcactcacatgtaagtcggggagcgccggggcctcccgcggaagtgcgagtcgcccggcgcaggcaagagccgccgggtccgggacaaggcaggggcgcccgggcgccgctgccttgccccggggcgcctccgggcaccccccaattctctctcttttctcttctccattggcgtgcccaagagccaaaccaaggagcgcctgagggtaaacagactcctgccatccgcgcctttgcacttttctttttgagttgacatttcttggtgctttttggtttctcgctgttgttgggtgctttttggtttgttcttgtccctttttcgtttgctcatcctttttggcgctaactcttaggcagccagcccagcagcccgaagcccgggcagccgcgctccgcggccccggggcagcgcggcgggaaccgcagccaagccccccgacacggggcgcacgggggccgggcagcccgaggccgggggcaagcagggagcccgggccaggcgcgagccgagctccccgaggtggccgggccaccatgctgaagatggccatgaagctcaaagcccgggcggcggagagcgagaagaagacggccgcggcggctgccgaggtggctgccgaagctgcggcggcggctgcggcgttggccgagccgagagagccgctcgcgccgcggaagagcggggaccccgagaagctcgcgaagaaccccaagaacccggcgcgggaggcgctccccgaaaagttcctaacagacaaggagcgcaagaagctcgagaagaagctgctggagcagaggcgaaaggaggagaagaagaaggagaaggagaggaagaagatggagaagatgctgaagaagaagaagaagaaggtgccagaagcccaggaggaggcccgatgccccgaggccgccgccgccgcggccgccgccgacgacgacgagggcgccgaggagggcgccgtcgggggcgccgaggagggcgccgccgccgggggcacgagtagggcctgggctgactgggacacggactcgagcgacgaggacgacgcctactacgcggcgccgcgcgttgggggcatcgtgtggcggcccgggccgctcaaggctggcgcgctgagcgcccacctgcccctcgtggtgttcctggtcttctcggtgcgcagcccctcgtgggtgctcaacttcctgctgcagaagcgcacggagcagggccgcggctgcggcttcgtgttcggggcgacctgctgcttccgagtgttcctgggctgcgccttcttctcctacttgggcggccgcgccaagcgcagaggccgcgggcgctccggggccagaggcgccttcggctcgggccatggcgcccggcgccgggggcgcgaggagcggctcatctagtcagaccccccaccccgccaccgccaccagacaccaccatcgctgtgtagtgtgggtttttattcgtgttcgtgtgtgtgtgtggacacattttccttttcggttgctctgtcctttggttcgtgctcgcctcgctttttccacactcctgctctctggctctctgtgtctctcgctctttcgaaaattttcctaagtccgggcgcgcgctccctccccttccgcccaccccagcccctcggcggcgcccgcgggagggggaggaggcctcgggggcgccgggcgacgcggtccggggggtggagcgttggcgtcgtgcgaggggtcgtcactggcgcggagacgccccctctcccccctcggctcagccgggctgctgcccgagcccggggggtggggggcgtctccccggcccgtcccgtccccggccgggcgcgggcggagggaccccctccccgggctcccggggggccgcctccctccgccggctcccgccctcccagccgccgccgccgccgcggccgctcctcggccctcctcctcctcctcctccttccacccccctcgccgccgccgcctcctcctccccccgcctccccccgcccgccgcggcgcttttggctcggggcggcggcgggggcccggccgaggcaataagagcggcggcggcggcagcggcggcagcagctcccgcagctcctgctctggtccgcctcggcccggcggcggccatcagccccctcggcctcggctcgaggggcggg

SEQ ID NO: 26973 - DNA, 2300 bp, Homo sapien
ccgcggccccggggcagcgcggcgggaaccgcagccaagccccccgacacggggcgcacgggggccgggcagcccgaggccgggggcaagcagggagcccgggccaggcgcgagccgagctccccgaggtggccgggccaccatgctgaagatggccatgaagctcaaagcccgggcggcggagagcgagaagaagacggccgcggcggctgccgaggtggctgccgaagctgcggcggcggctgcggcgttggccgagccgagagagccgctcgcgccgcggaagagcggggaccccgagaagctcgcgaagaaccccaagaacccggcgcgggaggcgctccccgaaaagttcctaacagacaaggagcgcaagaagctcgagaagaagctgctggagcagaggcgaaaggaggagaagaagaaggagaaggagaggaagaagatggagaagatgctgaagaagaagaagaagaaggtgccagaagcccaggaggaggcccgatgccccgaggccgccgccgccgcggccgccgccgacgacgacgagggcgccgaggagggcgccgtcgggggcgccgaggagggcgccgccgccgggggcacgagtagggcctgggctgactgggacacggactcgagcgacgaggacgacgcctactacgcggcgccgcgcgttgggggcatcgtgtggcggcccgggccgctcaaggctggcgcgctgagcgcccacctgcccctcgtggtgttcctggtcttctcggtgcgcagcccctcgtgggtgctcaacttcctgctgcagaagcgcacggagcagggccgcggctgcggcttcgtgttcggggcgacctgctgcttccgagtgttcctgggctgcgccttcttctcctacttgggcggccgcgccaagcgcagaggccgcgggcgctccggggccagaggcgccttcggctcgggccatggcgcccggcgccgggggcgcgaggagcggctcatctagtcagaccccccaccccgccaccgccaccagacaccaccatcgctgtgtagtgtgggtttttattcgtgttcgtgtgtgtgtgtggacacattttccttttcggttgctctgtcctttggttcgtgctcgcctcgctttttccacactcctgctctctggctctctgtgtctctcgctctttcgaaaattttcctaagtccgggcgcgcgctccctccccttccgcccaccccagcccctcggcggcgcccgcgggagggggaggaggcctcgggggcgccgggcgacgcggtccggggggtggagcgttggcgtcgtgcgaggggtcgtcactggcgcggagacgccccctctcccccctcggctcagccgggctgctgcccgagcccggggggtggggggcgtctccccggcccgtcccgtccccggccgggcgcgggcggagggaccccctccccgggctcccggggggccgcctccctccgccggctcccgccctcccagccgccgccgccgccgcggccgctcctcggccctcctcctcctcctcctccttccacccccctcgccgccgccgcctcctcctccccccgcctccccccgcccgccgcggcgcttttggctcggggcggcggcgggggcccggccgaggcaataagagcggcggcggcggcagcggcggcagcagctcccgcagctcctgctctggtccgcctcggcccggcggcggccatcagccccctcggcctcggctcgaggggcggggagctgcgcgcgcccctcggtccgaccgacaccctccccttcccgcccgtccgcgcgccccgcggcccgcggcccgcagtccgccccgcgcgctccttgccgaggagccgagcccgcgcccggcccgcccgcccggcgctgccccggccctcccggcccgcgtgaggccgcccgcgcccgccgccgccgcagcccggccgcgccccgccgccgccgccgccgccatgggctgcctcgggaacagtaagaccgaggaccagcgcaacgaggagaaggcgcagcgtgaggccaacaaaaagatcgagaagcagctgcagaaggacaagcaggtctaccgggccacgcaccgcctgctgctgctgggtaagggcgggcggggggcgccggccccggcccgggggccctcgaagggcgccccgcaggccgcgcgcgccgagcccgccccccgccccgggcgcgcgctcccgagccccccgcccgttcgcgggctctgtctgtggggggcgaggccggaagggggacccaggggcgcggat

SEQ ID NO: 26974 - DNA, 2300 bp, Homo sapien
tcaaggtgggaggggggattgagagtgctctaaggagacttttcctccaggtgggaagagataaaaagacattaattagttgtttatcaagtgacatttagttgtttggttttgggttttctttttttgattgcgatttttcctctgattaaaaaaataataataaaataaaaaaaggttaactataaggagatggcctttcctccttttttttcttaaggtgctgttttgggggaaaaaaatgtaatgaaatgaccaaaagaattacacagcattaattaaaaatggaagttttccacttccttgataatttggctatctgaataaatttgtgaatttgctaggttaagacctagttcgtggtcacatttcaacaaaacagcttgagtataaagaaaataataaaaggctgttcttatttattttcctttggtggcttttggtttgctctttttgcataggtcatgactttgttctcctgggtccagatttataaaagcagaaaattactaattaagtcaaaataagtgtctttggtgtttatgcatttgcaatttcagtaattaaatggtacatgtgttgctgtcttgtctaaaacttttaaaggcagaattatgctgttgggatattagtatgcgtataacttgatttcaaagtataaatctggaaaagtctagaatcttttctgtgaatgctatctcagtactactttaagtcaagtgtgatgctaatgatatcttaaaatttccaacaccttttgtgcagtgatcacaaagtctccacttaatttgagactgttactcagaacacgccttgcgtcacgggggctaatctaagtgtcctagtctatatgactacattacatcatgatgtattgattgcctctggcctaggaatctgcagcttaagccagtgacacaatattttgcatttttaaatggtgattctcaccaaataatgcctccccacaaaagaggaaacctaataatgccccaaatcctctttttactccatcttaatgacataaaaattaagtgaattagagaactacaatgatcttaaaataatttttcagccacatttcataaatgtggaaactgaggcacggatctgtttttgcctatgaaagataggtcctgtaactgttacacagtttaacacttctgaaattagaatattagagatcctgctaaatattacgtattgtttccttggcctctcttaatagtgccatttatatttttaatttaccagagttaggctcattaagatagtgtttgctttgaaatcaatgtttctgtggaaactaattttaacttttacagatattgattacgggcttgtgaaaaggcaagtaaaggaggaatgctgtgctatctgggcattaaaacaaaacaatacaattaaaagttaaaaagaaagaaaaaggtaataacagatttgtgtggaaggagggcaaaaaaacttcacacgtggattatctgttggagaatgtgcattgcaaaaaagatgcaaaatagcaatcctccctctagcttgatggaaatgtgttttttccatgaaacatatatgtatttttacaaatgaaagatgatttaaaatggaggcatgtgtttctactctttgagttgggaagggcttggaatctttcaaattcagtacttcccagggatagttttccttttgattaaagttttgttcttatgttactttttactgttgtttttgcagtttacctaatgctaatagggtctcaggaactgtatttgatgttaaagtgtggtttttccagaagatgacagataattgatggtctccccttttcctcagcaacatagttgtacccagagggaatttatctttagaaagatatagtttgtgaggaaagaggaggatggataagtggataaaatgtaatgcagttttaggggtggatttttaagtagcccaaggggtaggaaacctgcacagaaagaagctgcgttgtgaaaatgttgaggaggaaagtgctgcatcgctacgtgatgtggaagagactgcagtgtctgggcattgttgggaatcccgggtattttaaccatgaaacatctgacaacaaattatgtgtctagatatgtttatgtgtgaatgttcatgtatcagggattcagtttcacagttttaacttcaattttcttgtttaccccacaaatgacaaaattgcgtcattccttctctttgcccctttccaacaccaccccacaattttttaaacaatcaaaagaaaaattaaaaccagcaaaccttaaattcttgtttgt

SEQ ID NO: 26975 - DNA, 2300 bp, Homo sapien
attttttaaacaatcaaaagaaaaattaaaaccagcaaaccttaaattcttgtttgttatttggatggtgaaatactgcaggtagacactgaattggacattgatttccttttctctgcgtcgaaatgtcaaggaaagttgcaagtctgtgattttgtgtttggttttttgcatgttgcttctatggaaaaacaaaacaacaacagcagacctccctgcccaaagtgttaaaatgcctccttcataacctgagacttactttcattttctaggtgctggagaatctggtaaaagcaccattgtgaagcagatgaggatcctgcatgttaatgggtttaatggagagtaagtgtcaaatctgtgcaggggggcaccaagtaagaggaacagactttatactaacctttaggaagtataggtgggctttgggggctgggcagccagttttcacttaatttttcctgatttacatattagaaaatcctgggaagggctctttagggtccctcaccccccacccccttggatctttggtgcaacaaatactactgatgaaagcaccagtgtttgtgacaaacatctccctatcccaagaaaatcgtgcctggttgcaggggacgcttgacagcacttggccccgtgacagcccctctccgggccaggtccctgccacagtcttcggacatcactgcagtgtcttcaacgtggctttggccgccccctcgtccggcccacgctgatcactgcaaattcaccccaccccacctcacgcagatttcaatgtaatgaaccaacacaggatgttttaaactattagggaaacattgtttccataatattctcaccagaaacagatgtggaagtggcagcccgtgtttacagtttctcattttttttgtccccctttaaattaccattatgggtaaatcattgtttccctttaaaacaaaaaacaaatcagtacccctgcctacagaaaagaagagggaacatttatttaaaggatggaaagactgggagttaggcactcccagcctcactgaggggcatttttgcctttgagaagtcctcccaggtatcctggtatagcacaatgtggcaatccgtagtgggaatgaagattaaacaggagagactttgtattagacctgtgagacgagttaggaagccctgcctggcatggggaatgcaaacagggaacattcaataaatcggggaacttgcttttctccccaagaccccagatggggcctacccatcgttctcgtgtaacaaaacgtgtaaaaaaaaaaaaagaaaaagaaaaaacaaaacaaaaaaactaagttgaccagtctgttttcactggtatgagagcattaaccgcactagatttcaagcacctgaaggcactagtttgtaattactagctggttggcacagtcctgttccctttcttaaacttggattcgattgaaaatttaaccttgagttgcttcagcttccatttcaaaaggggagttggagtcaaggtggtagcgtttaattataccaaccaccccccaaaaaaacaaacaaaacaaacaaaaaaacctttactagtcactaagcatccaggaaacaaaggtgaactttttcacctttcagagcaaggcaggcagctccttatagagaattctagaatttgttagatcaaataattgtttagagaaggatgacatcacccatacgaatagtcctgttagttgaggatgctttttctactttaaccctgaattcagaaggattggttgggatgcacagggggcttcttcactcatctgattatgactctcaatgggttatcaacatgcacatacgtgctattgagtaagtcagcatcacttgtcaccaaccaattccgaaattaattcttgacacacccctcgataaagccctgccagcggagactgccatcctgacaataaataaataaccctgagacagacttccaaccatgaatctgtcatttgaagaaaaatcttgcataaattttccccctgcaacttgcaggagtacttacttattcatgagagtagttaagcaaaaataatttgaccatgtatcctctagataaatattttgatgaaaactggacatggctagcatttttcaaagatgcagcagccactgtttaccttagcttgagtcggatggaagctaagtcacctttgaaataaattactgacagcttcattacagattgccctaaaatttaaaaatttttatagaaaggattctcctccctaagcgagccagcctgtaacaccaggcaagggttt

SEQ ID NO: 26976 - DNA, 2300 bp, Homo sapien
agctgttttatacttgatatactcccacacctattcacatacgtagatgaatactgaacacgttctcaaaatatccgtattttaagacgggaagttttccaattatcatactactgcttagaccaaaatatcaaactgaatgaaagaaacttgtttctggaaatactttctcttgctgtatgcagatttggatatttagtacccgaatgtatttaattttactattgtggaacctcaaaaccaaaggttaatagctttcattacctgtgaagtggagcctgcttttaatgaatgggaatagatttgccctagggggttttgggtaaattctgaattcaaaagtgaacattggggaccatcaaacacatgtccttttaatttataacatctaaataatcgatgttagactgtaataccaaggccggggattcttaatttcagaaatgagctttgattctgcacatacaaagcagacagtcgcacagagcggtcaggactcactccctttcactctaaggtggttgctttaagagtctgggggccagaatcagatttcagatttgtacacaaggcctgaagctcgctcacctccctgtcatctgtgtttctgagattctccggacctgcagcacttttacttaaatggccctgaggggattcctggcaacatctgtcccccctccccaccccagacaccccccaccactaatgagcgtggcccctctgaacttccccagctcttcacccaatgtagaagagcagtggtgcagtgacctgtgaaaggggcttcacgtaggaagggggcgagatgggatccttcagcaggtgaaggcccagaagtacacagacatttattcagaaagaataaatttgtaagtataattctttgagaaaggaaagaccaaatgatttgtggaaggcctgtcgacaggcccgcacttgaccccaccgtccgtccccgccccccacccctgctgctccactgactgccctgccctgctcgtctgctcgtctgctcttgctaattaacctcccttcgcctttcctctgccttaactgtcgtgttctagtctggagagattatatgttttaatttctactccagtctatgaattggtgaatcagccaagtgaatgcttcaaaaactgggactctcaaaagattaaaaaatatatatatacaaaccgtgaaaaagataaactctgtcccctccatctcccattggtttctgcctcggtgactccccccctcttggcctcagtttccctgtcagagaggcaggaccgtagcaccttttttccgcatgacaacgccctcacctcccagggcctaacaggtacagcaggtgtgctgtgtgtgctggttccatttttgggctatagacctgatgagatacatactccacacaagaggccttttcttgccctctaaaaacataaactcgagaaccttccctggctgtgcttctaatgaaggctagtttctgaaaaacatacagcatttggatcagtgtaatgtggtacaaaaattaacattctgttatggtccccagaagccaaagggtgtgtcctttacctgtgggaccagtgaccctgaatatagatcattccataaagaccacgcaggccatcccatgtggctgagttaaactcaaggaaaagctacaaaaccttcaacctctacttaccagagggatctgacctcccctcccccttagattataaggccttctagggggtggaatcttatttgattcctattgcacatggaccaacatgcactaacatcatgaactagaagtttcattgctgctagctgcagtgcctggagcatcgcacatacgacttttttttttttttttttttttttttttgacagagtctcactctcgccctggctggagtgcagtggtgccatctcagcttactgcaacctccgcctcccgggttcaagcaattctcctgcctcagcctccctagtagctgggattacaggtgcatgccaccatgcccagctagtttttttgtgtgtttttagtagagacggggtttcaccatgttggccagactggtctccaactcctgacctcaggcagtctgcccgcctcagcctcccaaagtgctgggattacaggtgtgagccaccgcacccgggctcctgtaatgaactattataaacaccaccacctgtgctcactggttctctcagtatgctagcaactgagttaattccaagtcaaaccatgggactgttttgttccaccccaacctcatagtgacctatcactccagcctcacccc

SEQ ID NO: 26977 - DNA, 2300 bp, Homo sapien
atcacagaatactagcactgatcaccttctgtctttatcttatttgttccccccaccccctccccccattcagctccttcagtagaatgtaggctctacccggacaaggatcaggtccaacttgttcaccgagctccagggagcagcgcagtgctgggcacttagggaacactcaataaacatttgttgaataaatgaagacatattccctgataagttctccaaaagtagtcactattatcaatcttctggagctcttttctctaatactctttccttactgacatgggcattacctttcttttttttctttatagacagggtctcactttgtcacacaggctgaaatgcaatggcacgaccatagcaaactgtaacctcaaactcctgggctgaagcaatcctcctgcctcagcctcccgagcagctaggactacaggcgtgcatcaccatacctggctgggggcgggggaagggggggggcggtgtctcgctatgttgcccaggttggtctcaaactcttgcctcaagcaatcctcccaccttggcctcccaaagtgctgggattacaggtgtgagccgcggcgctcagccacgggcgttacctttcaaagcatccagattttatggcgttaatctccctgtttaaaattttctgtgatttggacacaaagatgggaacaacagacatggggtattccaaaaggcagaaggtgtggaggggggtaaaggctgaaaaagttgccgaaaggattagaagcatcacgcaatataccaatgtaacaaacctgcacacgcaccgaatctaaaattaaaacaaaacaaaaacacaacaaccaaacaaaaacctttccgtgatcatcaggaggctgtcatattctcaccccctacttcacgctgggaatcgagctgcgggctttacaacagcgtcagctgctccctttggcaacgaccagagaggtcctttctccagagatttttgtcagctctgggcacttttgctttgtgggcctatcttccactttataaaaaattaaaaatgctactttccactgcattcagtactttttcttctcttttcttttttcttttcttttctttctttcttctttctttctttttctttttctttttttttttttttttgacacagtttcactctgttgcctaggctggagtgcggtggtgtgatcttggctcactgcaacctccacctcctgggttcaagcggttctcgtgactcagcctcttgagtagctgagactacaggcgcccgccaccatgcccagctaatttttgtgttattagtagagaaggggttttaccatgttgaccaggctggtctcgaactcctgacctcaggtgatccgcccgcctcggcctcccaaagtgttgggattacaggcgtgagccaccgtgccctgccctttttatgtatgtatttatttatttgagatagggtctcgctctgtcgctcaggctggagtgcaatggtgcgatcttggctcactgcaacctccgcctcccgggttcaagcgattctcctgcctcagtcacccgagtacctgggattacaggcgcatgccaccacgcccggctaatttttgtattttgagcagagacggggtttcaccatgttggccagactggcctcgaactcctgacctcaagtgatccgtcagcctcggtctcccaaagtgctgggattacaggcgtgagcccccacgcccggtcgcgtttagtactttttaccaaaactaaaagaaattaaaacactttcgtgggtcctggacacttccggaaggatttgtttccagctgccagatgaggaaactggggctcgcagagccggcgccgcaggggaggggctgtgcacgaatccagtgggaaacctctctccggagctaagcccctggtccacccgggcatcgctccgggatcgactgggggcgttccttccgccggtcccctttgttcccagtgccgagcccgcggccctgcccttcctccaggccccgccccttcttccaggccccgcctcccgcccgggccgaggcgcgcggccgcgcgtgcgcccgcccgcccgtccccgcctcgcgcatgcgccgcgctcgctcgcgggagggcatggcgggggccgtgccgggcgccatcatggacgaggactactacgggagcgcggccgagtggggcgacgaggctgacggcggccaggtgaggcggggcactgggcgcaccctagagagaatcgttcgtctccgccgccggcgggccggccccactcccggagaggccgcgcg

SEQ ID NO: 26978 - DNA, 2300 bp, Homo sapien
tgacatgcttgcacgcaagaggcacacaggtgctgagatcaagagaatgaacagcaagttcccaccatttcccctctcaggctgactccagggcacagcccttggagtgttgtggtggattcgtttggttcctccaagaagcagctgccaagacagggctaggcctgcaggagatgatggggaagcgactatgagggaagatggggtagggctggaggaggctggggtagctgtgatgcagtctgacccttgagggcaagagaaaaggaatgagggttagtaggaagaatgttaggctgcagtgcagtttccagaacgttccagccatatcagtggggaatctttaagccacaggtgcccattctgggagcccacgtctcctggacaggcctgcttttgaggccctgctgcattccatctgtggctgggagcagcctcggggagctggccttggcacaaacaggatggcaggttcagagcacagtccttgaggacatccgtcacataggagagctgagagaaatgtttttctggctactccatgtggtgatgggccagaacacctgtgccatttaaatggcctctttctcttttgctaagggcatacaagctggggcagcatgagctccctgtgtgtgcaaggcagctctatgcggttctcggtgtctcctaggaagcaactttcagtaccctcctgtgttgagtccgattttctaaaagctgagcgggcatctagggacctttctgtcactcagccgactgtgtggctgtggccagctctgggtctgcctcccccagaactagatgcccatggggagtccatcagcaccaatctcctgtgatcgtttatacaacagaatctccactcaagtaaaagtggggcctcctcctatcttgctgtttgtgtgtgtgttggcagaccccagcgtggctggaacagatgattgcacataccacgtggcgggaccttttttataaactggctgaagcccatccagactgtttgatgctgaacttcaccgttaaggtaggaagagttctagagttaaggagaaaagtgtttatgaatgtttatttttggttgttggtctgtttcctttgacagttcatatttgctttttttccataaaggtctttattgttttattttcataagccttacactgagaaagaaaagtgtaaaatttgtatctgtttttgggtcagtgttgactgtgttttaggatttagcagggatacaagaattctcttgtggttggagaggagctttaggcgtgcctgcttgatcttcctcttgcatatgaagaaacgatggagaggtggtcagcccagggcacacacctaggtgatagcagggtgagggcggagtgaaggcctgagacccacgaccagcgcacacttactccacctcaccatgaacactgacaagccagcttcccgtggaggtgcggtcactgcatgcctcccctctgacttcttgttttgtgtcctagcttatttctgacgcagggtaccagggggagatcaccagtgtgtccacagcatgccagcagctagaagtgttctcgagagtgctccggacctctctagctacaattttagatggaggagaagaaaaccttgaaaaaaatctccctgagtttgccgtaagttctttctttatgaacctcagattagaaggaggctgctttgggtcttggttttcaagcatgagatgctccttccctggagagaatctccatttctgagggcaccttccaggatgctcactcccgggcccgagcacggtggaggcttggctctcgtccgcccgtctgtgctacagtagtaaaccctgccccctctctccctgcaatcttgcagaagatggtgtgccacggggagcacacgtacctgtttgcccaggccatgatgtccgtgctggcccaggaggagcaggggggctccgctgtgcgcaggatcgcccaggaagtgcagcgctttgcccaggagaagtgagaggccctgtttctgctcagcccttccttcctagtgctccccacaaaacccttcccatggcccgtgttccacagccaaagctgctagctccttctgttcaacgtagaggtaaacttgcttttggctgggcgtggtggctcacgcctgtaatcccagcactttgggaggccgaggcggatggatcacctaaggtcaggagtttgagaccagcttgaccaacatggagaaaccccatctctggtaaacaaaaatacaaaattagccgggtgtggcggcacatgcctgtaatcccagctacttgg

SEQ ID NO: 26979 - DNA, 2300 bp, Homo sapien
tccggagagtctcctctttggaactccccagataaattaagctttgtgccagcatttgggagcaggactgtgaatgtttattccccttcctgaccatctcacccctcctcctgacccctgtttgtgagtttgatttgccagaggctctgggctgaaagcgggtgatgtacaggacttgtgatggagcaggtgtggttgctgtcatcagacccagctacataatttgcagggcccagggcacagtgaacctggagagcccctcgttcagctctgcattacacttctggacttagggcctcatgtgactgcaggggtcgtgtgcctgccttgctgaccatgcctgtcataccttctacatgcgctggacctgctcggagagtctcggggcatcttcagagcaccccagctctccccatgctacaggaaagaaaagcttacaccttgggtgccttttcacccagattcagggaccagggcccaggacatcacagctcaggcatcagaggccaagcacaaggggccctcccctctccaggcttgtttctcatgctgtagaatgtgctgttggacttcacagtacctggatcataactatgggtacctggagggaggggcacgatatctcttaccacacaattttgtgagttcttagctttttctttagaagaagccaaaaaccggccgctttggtagatgccacctgatgacctggcaagggcagctgtgtctgggtttcttcctcacaaggacccagctcctatagtcagggaggccagagggttgacatgggaggaagaaaggccccctcttggcaattctctttccactccttttatgcccagaggttgggaggcctcgctcccacccccaccgccagctcaagcttggggacttctcccaggatggccaccccaccccgccttctgatgactgatggacactaatggtttccatgagcgacttgccaaacaaataagagacacatcagtaggtagagccccggggccacactttgcctcagtgaccactttttggggaacaaggactgaaacttctgggctgacgaagcagctctccagccttgctctccactcggacagtcatgcggggattccatggccacctcagcgcttccgggaatggtcatggaagcttctggaagtcaggaggcagccactgtgacttccccttgcccacgtggcacgcttggaatgtggtgagtgccactgagtatggagagagtcaggcaagctcatctgtgggccctgtgccaagggcccccagcaggggcctgtcaggtcgcagcccagaatgccgggccctgttcttaccagagaagaaggccatggtgtgggcccaagggccatgacaaacagaggggccgcagggagcgagaagccctcccccagttacaaaaccacgtcctggggggccacttctgcttttggttcctcatttgactaagaagagtttcgttagcagaaaaccttttcaaggcgtctttggaagtcacattggataactcctgatgcctgcgccaagtggaatcttcctttggggcattttctagaaggatccctccttccttctctgcaaaagggaaccgtccccccgaaagggcctgggcctttgggaaaaggggtttagaaagccaggcgcggggacccttctttgggggcggtggccgcatcccaggatcccttcctaggggaggcctgggcccagatgtgaggctgggggcctctccccagggctcagggccccaggaatgcagggccaagggggcccatgagcctgcggccccccaccccgaagccaggaaccccggcaaatgagtccagccggacagtcccgcgctcagggcggcggccggcggcggggtcaggctggggtctgcccggcgacctcgcgcctggcccgcgagttcaggtgccccggagccagggagggagcggggcgcggagccgggcggggagggcaggggtcaccgggcggggcaggagcagcgatgggacagccccgccccgggggagtgtcccggcctggccgccgcagccttaagggccgggcggggcaggggcccaaagtgcggggtcggccgggtgctgggccgaggccgaggccggggcgggatccagagcgggagccggcgcgggatctgggactcggagcgggatccggagcgggacccaggagccggcgcggggccatggcgaggcgcgggccagggtggcggccgcttctgctgctcgtgctgctggcgggcgcggcgcagggcggcctctacttccgccggggac

SEQ ID NO: 26980 - DNA, 2300 bp, Homo sapien
ccacttagaaccaccctgccatgatcaaagtcaagaaatggaacactgatacaatactattttccagtgtacacaatccttatttgaattttgacaatgatcctcataccatcctctatagcagccctcttccctggtcctggatccagcccaggatcatggggtgcactgtcagtactcaagggcagcctgggatctacacactagacagaggtgagaagcagtcccagtccaggcactcttaggacacagtgctttcttcttccccacctctgggtttctcttctggtttatagctcaggccctttggctgtgtgtttgagctcctttgggagtaagcagaagcgatttcccccagacactccatcgttaggaactttcctgattgtgttcctgacctcacatcctgggccccaccaggcctgtagaaggaacacaaggtttaggagtcaagcctgggcttggggcacaggaagcacaggcccctcatggaccaggctgggctccaatgcttcaaccaaggtcacgggtctggcgagaggcaggggagggaaggacctccagggcttctcgctctgagttcagtagtcttgcctgtcctgagtccctgtcctgagagatggtgtccttgagctgctccagagctaggagtgctctcttcctaagtaagccagagttccaagagtgcaggatctggccacatctacctccttcattcccttgtctgcagcgcccaaggtgagcccagcctatgacaggtccccgtccatagctgttcaaagaatgggggcaacctcagggtgcccggcagacgttaaagagaggcctcaagaggtggttgctcaccggatggtggttgtccacatcctcggggcttcaggagtgaggccttgccctgtacctgcccacctgcacctcgacagctcaacaggcacaaggcagcgtccactggctctccccttccgagccagggctctcacgccttctcagggagtcccttccccatcttccttggaagcttccaccttctgtcctccaggcggtggggaactgccaccctcctgggcaaggatatggagctggtgtttggcctggatgcccttgcctggttggaggtaataaagcctagggctggctttcgacgatgatagaaacttggtggcaggggaggtactgaggaccaggagacagaacagctgctttcaagctgctgagtacccagcctgctgccactcctgtacaccgcatgagggaatgcttttttttttttttctgacagagtcttgttttgtcgcccaggctggagtgcagtggcatgatctcggctcactacaacctccgcctctcaggttcaagcgattctcctgccgcagtctcccgagtagctgagactacatgtgtgtgccaccacacctgactaatatttgtatttttagtaagagatggggtttcgccatgttggccaggctagtcttgaactcctgacttctggtgatctgcccaccttggcctctcaaagtgctgggattacaggagtgagccaccacacccggctctaagggaatacaattgggagtccgttttgctcttggagaattcagggtctggtaaagggaccctatggcaaacattaagaccccagacaccatgagctgagatgggacgacagagcaggggctgggaagggtgctggggcacagcccagccctggcatggatagggcaggggtccaagagacctgcaggacactgcagagtaacttgcatacagggcgagagagggcatgtgggggagggcgggcagacagtgcctgatgcaggccatcccgggacctgggacctgcgaggcccagttgtggagcctcctgctgtggcggggcacggggcttctggggaccaaagtctggaaaaggggccgggaagatggacagggaaagcccttggaggtggtctggttacctgggtgagctaggagccacagtcatcataccacggtcactagggccagcatggtcacctagaagcctgcaaacagtgccagcctccaggccctgtgccccgaggtggcctttaatcttgcactcactctctaggaaatgatggggcagtattctgtgttgagggaggaaaaacactcccttccaaaagcatgacaggcagaaagcagagaagggccaggactggctgagggcggggagctgggcctctggggtggacacacccttggtcacattgtgagggtagcttggttggccagtcccaccactgcagtgaccacagttgtgttgggctcacaccagt

SEQ ID NO: 26981 - DNA, 2300 bp, Homo sapien
tggagtgaaaattatcactaaagtaacatgactccaacaaaagtatggtttcattataaaagagtactgtattgatttgcccaagttttgtaacttagtaaaggtattaacttccttggatttgtactttgtgatttagtatgctgtatcgtgggctggttatgttaactgaaaaaaataaagtcattacctgagttttgcagtgctctaacttaaacagaagaacagctgttcacatcttttagcattttacatttgcctaacttaaaaattgccatgtgtcaaaatcatggttttgtaattgctaaggcatgatatgtcaggttatttgaatataattactttttgaagtaattgtgaccacaaaacatcttttttacatgaaggagctgtgtatcatttgaaattactcaaatgatgtcttgctctgaggcataaatcccaggtacttagtgtttttaataatatggtgccactgcaggatttgggggcggtggggaagaacaagcataatggtagggggaggcttggcctgaaactaaccactgagtgaattgcactgcaggttttacttaacgggaattccttatttgggatgtcaagagggcagctgcaaactgaaaaacaatccagtaaatgtactttgttttatgtattgtagcaggcaattaactactaaataatagctttgacatttgcaattgttgcatagagactatttttgctagaagatgattagctcttgcctttattttacagtgcttagtgtgataaacttctagtcatgtttcctatccaagagaccagttaatatatgtacataaaccacagaaatagtataacacactatttttaaattatcgttttcctacttaaattttgtttagcttaagacttcttaggacatttgtaaaagcaggttaaatttaataaggtttctgatttttttttgtaaccggagatagtttttacaagtgaaataacatttcagctaaataaaacatcgctaaataattgatatttgatgaaaatctgctttgtataatttctgtaaattatccttgttctgaaaaaggtgtaatgccctaatatttttaaatccttatcctttgattttttaaaaactgacctattgataaaactataaattttcattttccagtgcagttagttacctttttaaacataaatgcacaacaagcaaatgaatttaagagaactaaactggaataagtgttcataaatgaaacccttggactatttaataaagttgaaatgtgaattaaggaaaacttttgttaataaaaactttcttttaagtgatgtttttcctgattataatttctttttagtaattaaaggtgaagggcaaaggcttttttttctttatgagagaaacactttaattcctagactgtgagccttcactgcgttgggttagtttctctaaatcacaggctctgagatgagcattttcccggccgcctggcagttccctgtgcctccagtgggttttcctcacatttttcttcccatccattccgggcaacagtgacaactgttgccttaccctccgtcttgtcgcacatcggaagcaggtcctagaactacagaaaacgctagggggtcctccactgggtttccagggtttagtgtcactccgagaaagggggtgccctaagagcctttctaaatctcagctctcaggacacgcttgtctgtccacagatttaaaaaagccggcgccgtttccctgaagcgggcgcaaagccaggccctcggggcggccgtgcccgcgccgcctcgcgtcctcgcttcccgaaagcacgcggctcagtggtccttagcgagcggggacaccccggccttcttgcccccgtcgtccccgccggggtaatacggaaggtcgggggacacacgccccgggagctcttggagccaataggtgggcgcggccggccggcccgccccgggattggcacccgcagtccagaccgcgcgcgcccattggctcccggcgccggggggcttccgcggcagggcagcaggggccgtgctcaggggcggggccgggtaggaggcggtgattggcaggtccgcacgccccgcctcttccgcttctgtggtctgatcttcctgcggctgaaccgcccggctgagccgacattgccggcgtcttggcgattcggcccgacgagctccgctttcgctacagcatggtggcctactggagacaggctggactcaggtaggcccaggcctccagagggaagggcttcgcgagccggcccgcgcgcatc

SEQ ID NO: 26982 - DNA, 2300 bp, Homo sapien
atctgttgttaatgacttctctgtttctgtgagaggcactgtcaagtaatgcagtgcttaggtatctaaaaaccattaatttgcttcctctgtgtctcctaacagagtctccaggagataatcattatgtaagtcttaccctccaaatccaagcaagaggtggtattatttctaccatgaggagacacgcagagaagacaattgggtcctggatctccatctttccatgccccatcccaccactctagatctagtaagtaaaattagactgatatagtatgtgtgttgggggcacgggagataggtgtcatttaattttcatgactaaaacacagaaattttgaacttgagagcagaataatgttctctaaaataaacagaacaggaatgctgaatggtgaacagcctcatggaactccaggaatagcagggacaggctgttctgtgctgatggttcttgaaccagtgtttttaacacccagcgacgttaactgcatcttagtcaaggctgaggtactctcagtagcccttaaagcattacctccccaagaaatcactcttaagtactgtaggtttaaaaaaagaaaatctcaggtaccacaaattgcacttagcaactacccaaccatattatttccttcctgtctaatgtaatttttgttttcctgtataaaggacttatgttattttgaaaaattatcctccctcctaaattaacctggctttttgtctttaacaatcaaacaagctaagaacaagaatgaggtggtccttctaacaagcttctaagtaactagatgtaaagattttcctccataaccttcattgaaaatggcaaattgttctgttaggaggtagacggctgtggagagtgcaggagagcagggtgggaagccatattctgaaagctaagccaggcagtctgttccctggacaaggctcatctctgaatgaaaccacatgccacctcctcctgccccagcaattcttagtcattctttcatccattgatgcaacaaataattgtcatttaggaagggggaaatcactgaacaagtctggcaagagcctcgccctcaggggcttacagtctagcggaagttacaacaaataaactagatgactccattaattcattcatcccacaaatagctattgatttttttcatttttcaataagtagtcattgagccttgactatatgggagacactgaggatgatttttgagcaagaccggcaagattcttgccttcaagaactcagttcgattgtgaattttcacaaataaattaacaagatgatgtcagaggggtaagtgctataaaaaatgcaacaggatattgtgacggagcagagcaacaaggtgagaaacggtgacgagggaagtctctctgggagagacatctcagctcagatccatcctatgcacctagggcaaggtgtgcccggccaggaagcttttctacccgacccctggcaccgtgcttccggaccgcatccctcgtaggggtattattcatgggcaggtctgatgttagcttctccgcgtcacgccttatttatcccctccgagggctgcaagctcctggcgggcaggtgggactggcccagctgatcggctgggtggctggtggatttgggaaaacagcccgggctgacccaggaggtggctggaactctctatagggcaccaggaaattttgcacaagtgaccaccacaacgaacatctatgtcagcaggctgaccgcatgcgtccacacgcctcgaaatgccaggcgaggatgtgctgggccagaaggacaaggagggccaagcgggcgcgcaggcacctcctggacctgacccaactctgcccagaggtcaaggctcgctacaagcccgccgcgcctgcgcagcacagcgcccgcgccggcccctccagctgccgtcggcggcactgcgccggcgcgatgcgcccggcgctaagaggcggggtttccttgcgccgcgcgcaaggctggggcaaaacccgggccgggatagggcgtggggccgcgcgtctggacgtccctcgcgtcgggcccgacagcgcctgcgcactgcgccgccggctggggtgctgggggcggggcaggggcaggtgtagcctctgtgcctcgttgtcccctggcgctacccggacatctctcagggtgccggcaccatgaagatctggacttcggagcacgtctttgagtaagtttggggcgcgggtcggctccgtggagggcaggcacgccggccctggagtagaggcgaggcagaggcggcccgcaggag

SEQ ID NO: 26983 - DNA, 2300 bp, Homo sapien
gctccctcccctaggatttgccaagctactcctcctggcttagagggaaccagttttgtcctaactcagtctggaggggctttggaagccccacctttgagcagagacctaagtcttgtcttgaggctgaggaagtgctccttttcctagtggtgtcaccagatcaaatacaggatgcccagccacattggaatttcagataagcagcgctcagtgtttccgtataagcatggcacgtgtgagatttgggacatacttataccaaaagtaattctcatgcaatatttgggacatactcccactaaagaactatgcattgtttatcaaatttaactgggagtcttggatttttgtttgataaatctggcaagcctttccttgcgtcagttttttttcttgctgtcttcatcctgcagcagagactcagaacctcagagtgggaaggccctgattccttgcccattttgcagatctggaaacagtcccagagaagaaaagggatttgtgcaagtgcacggaatcactgtgaacttcgaggaccttgaacaagctgcatgactttttcatgaagtcagcacactttctgagtgtctctgcatgtggcactgtgctggtgccaggggatgatggtggcaaacctgccatggacctgtgcagatggcatgttaaataagagacaggattcagacagatctgggtccaaatcccgctttgccacatgtcagcttgcatgacaagttacttcgctgtctgagcctcagctttcccttttggatgagagtaccttcctctcgcttgggatgagagtacattccttaggggattgtcaggcttccgttgggtgatgaagtgcttggtgcagggtaggcaagatttactgcatgaggagagaggagaggtgcccatggtaaagtttggttgttgtctgcaggttttccagcattgtgggccatccagatgatgcggaatggaggttccagaacccacctgccctgcccctcctgcgagggaccagccagctcccactcctggccctccaggggccccaggtggccaggcctcacctcacctgaccctgggccctgtccttctgccgccagagcagggcctggccccccccactgtgttcctgaaggccctgcccatcccactgtaccacacggtgcctcccgggggcctccagccccgcgccccgctagtgacgggcagcctagatgggggcaacgtgcccttcatactcagccctgtgctgcagcctgaagggcctggccccacccaggtggggaagccggcggcccctacgctgacggtgaacatcgtgggcactctgcctgtcctgtcgccgggcctgggccccacgctgggcagcccaggcaaggtgcggaatgcgggcaagtacctgtgtccgcactgtggtcgcgactgcctgaagcccagtgttctagagaagcacatccggtcccacacgggtgagaggcccttcccgtgtgccacctgcggcatcgcctttaagacccagagcaatctctacaagcacaggcggacgcagacgcacctcaacaactcccggctgtcctcagagtccgagggcgccgggggcggcctcctggaggaaggggacaaggccggagagccccccagaccagagggcaggggcgagagcaggtgccaggggatgcacgaaggcgcctcggagagacccctttctccgggtgcccacgtgcccctacttgccaagaacctggatgtgaggaccgaagctgctccctgtccagggtccgcatttgccgacagagaggctccttgggactctgcccccatggcgtcacctgggctcccagcggccagcacacaaccctggcgtaagttgccagagcagaagtcgccgaccgccgggaagccgtgcgccctgcagcggcagcaggcgacggcagcggagaagccctgggatgccaaggcccccgagggccggctgcggaagtgtgagagcaccgactcggggtacctgtcgcgctccgacagcgcggagcagccgcatgcgccctgcagccccctgcacagcctttcggagcacagcgccgagtccgagggggagggcggcccgggcccggggccaggggtcgcaggggccgagcccggggcgcgagaagccggcctggagctggagaagaagcggctggaggagcgcatcgcccagctcatctcccacaaccaggcggtggtggacgatgcccagctggacaacgtgcggccccggaagaccgggctgtccaaacagggcagcatcgacctgcccacgc

SEQ ID NO: 26984 - DNA, 2300 bp, Homo sapien
tttgttgatttttagtcccagtgaagacaagtggtggtcggcttcaagctactgaaggccatagacccagagagtggtctaagcagccatgatacctcctgtgtctgaacatggtacccggaaacctcctcctactccttttctccttttagctgattagtatattttctattcctccagccatcccccaatccaagaactttttattttgttgaagatggaaattttaattccaaagagatagtaattattatggtctgaatatttgtcctctccagatttatctgttgaaatcctatccatgaaggtgatgatgtcaggaggtggggcccttgaggggtgattaagtcatgagggttgcagccctcatgaatggggttggtgtccttagaaaagagacccccagagagctgccttgacccttccacaactgaggatgcagtgagaagtcaccatccatgatcagaaatcgagcccttattaaacaccgaatctaccagcaccttgatcttggttttccagaccccaaaaatgtgaaaaataaaactctgcggtttatcagccacccagcttatggcgttttgttatagtagccccaacaaacaaagataatactaaaatgatccaaattctagcccagcaggaacagaagatattgtgagtcttgggtttttcttattttcaaagcatcaagtgcaaaaacaaacaaataaacacttggattcaagggctaggcaggatgggatgggagtggggggatggagaacttcagcatcagcttcagtgctggaagcttgagtgctactctagttactgcagctctgtaccaatttacccagagtttagtgctgtaaaacaaccatttattatgctcatggattgtgtgggtgggaagttcggacagggtacagcgggacagctattcctcagttggaagtcttgagggctgggagctcaaatcatcggaaggcacattcactcaggtcagtggctgacactggtggtcggctgggaggcctcggtttctctccacgtaggtttctccaggtgatctctccaggtgggcttgttagggcttcctcctggtacagcagctgtgttcagaggacaggtgtcctgagctatcaagccagggggatgttgtagcactcttttggactgtcctcagaaactgctctggtcacttcagctgctttctagttttcagaagctggtcgttaaggctagtagagggcaggacccaattcaaccccattttttagagatgaggtctcgctatgttgcccaggctggtcttgaactcccaggctcaagcaatccatccaccttggcctctcaaagagctggaattacagatgtgaagcactgcccctcccccaaccccatctgttatgaaaggagggtcctttgaccacaagtgccctgagaagtcaggaggacttcccagtctcagacatttttatctgagctggagatggggacagcctcccacacacaggacttggaaggctatgaaggaagtagggggctctcttgggaggtcatttcccttggtagggacggttgtgtgaatgaacttggcctttagggagaggagcccgactctcacctgaagccacccaacctgtgcagatggctgaggaagccctggacaccacaggaccgctaacccaggatctttgttgactttgctcccaggccactgccccacacgcaggctctgaactcctgggagaggtagggagccagcccgaggcgtgagtcaagagtgtaaagtacaccgagttccttggcaagcaggctcttcaaggggaaggtgtcactcggggaacaatgagaaatgtgtctttccctcagcccctgatagaaaagataacaccccttgagcacagccttttctcatctgttcttgctcttggatggggggctgctactccggagcggcgaactggcgggcgggggtgcgcctgtgagtgtgagcgcgcgtgtgcgtgtgtgcgcgcgctctcgtggccttccggcagctggcagctgtcccggcccccaccccaccctaccccaccccacccagccgcgccacgccacgccgcccccgcccctcgctgtcctgggtgcgcctcgggccgctgcgctcctggccagctccccccagcgcctgggaggcgacccccagtgcgcccgggttcaaaggcccggcgaggcagttccagcccctctggggggcggggaggcgacgggggtggtgcagaagccagaaaagcccgagccacagccggccagctccgcgcagggatgggcag

SEQ ID NO: 26985 - DNA, 2300 bp, Homo sapien
ctcacacggacaatgccagcagcccctgatacctccctgtccaggctcctccctcttctgtgttcttttgattctgagccatgtaatggccctggacgttcagaccatccttctcaggactagtggataacatgggcttctctctcccagtccagcaaagtcccaaatgtgtgcctctgtgaaccaacttttctggcccagcccctgaggtcaggtggatgatctatgctggttggttggactaggtcatgagccctcccctggaattagggaggggccctgggtccacagagtggggaaggaggcttccagcaggaaatggaaatgctattcccagcagagtgggacaaagcctgcaaaacacatggtccctgagtgaccaggaccaatgcctgtcctctcaaattccagcccagtgtggggcagggcagatgggtggacaaatcatctcaatgggatgcagtgtatggccaacagagtgtgcacccagtgcagggggcctgcggaagggagagccaaaggcctggggaagacaggcagggagactgaaggattaaagtcttcagaaaagaggcaaacacttaagccaggtcttgaaggttgggtaggagttcaccagggcaaaccaatgagctgggcacagagctaggaagcaccgcaacactggccaggtgttgaatccagacgctgcacctttctcactttctaggcaagtaacttcacttctctgagcctcagtttcctcctctagaaaggagggcatgatgatagtgcctctctccaggagctgatggaggagcaaacaggatgaagtaggaggggattggagcagtggactcagtttcatctttcatggagcttgcattttctcatccataaagtgggcacagtaacagcgccctcctcagtgagttttctaaaggttcagggaatgtatgctcagcgcagtgccaccacgtgctggctgccgactgttaccaccgttaagcagttctgaagatgaggctgagaagtctgggcgggagacgcgggaagcaggcaggctgccagggaggaggcaggtggctgggaggcctggctacatcccaatcccagcactgccctggccgctgtgtggcccactgattgcacctgctgggggagccgctgggggatggaacgggggttcctagtccctcagcagagtgcactttgaaagccttcagtggtggaggaggggagtggtgttcctttggggctctgaggacctgagtgtcaggaggaaggttacccggaactctgctggggacgtggctgtgtgggtgctgatggggaccctgagtccatctcaggccaggatcctgcctcaagggcagggctgtggctacaaaaaccccaaagtcagtagaggctgctgaggcctctggagagtcaccccaaccccttcaggcccaggtgctggtgggtggacgggcgttttgtgagagggcgctgggagggtcagaggacggggccggcacagttctagttctggagctggttggtggttacaaaggtgtcccccaggcagcactcattaagctaaatacgaatgttttgtttcatagcaaaaaaggtaaatatatggggtttattcgaaaggcagcagtgcctcccaccgcccttacattaaaggcagccaaggagtctccaacttagggagcgccaggcccggctcagtctcggcccatcccacttcagccccagcccattttacacaccagaccactgaggctcagagaggccaagcgactcgcccgccgccccacagcggctccagcgctgctgcctgtttacagcgcggggaaccggcggctacacctcccgcccggctgtccctttaacgtttctagggcatccctggaaggcccgggcacggcgctgaggtctccgctcccgctcccgctcgcccgggcgaggctgcggctccgggcgggtcaaggtcgcagcggagcccctcggagcccccgcccggcggagaggccggcctcgcgtggcggcgccgcccccggccctggtcccggtcccgccccgccggcgcctccccgcggccccggctccgctccgcggccctccggcgggatgcgtggccgtggcggggggcgcgcccgctgtcctgcgcccctgcgctcgctgctgggcgccttcggggcccgggacgctgccgccgccgcccgagatcctgcgcaaggtaagcgcgcgctgcggggaggggacgcgggacgtggggcccggggtgcccgccgggcacgaggcgctgggggacgactcctcctgaatcc

SEQ ID NO: 26986 - DNA, 2300 bp, Homo sapien
aaaaaaaagagagagagagagaaaagaaaaaatatgtttaagtgcaaagagttgatttaaagacaaatcttaagggatggaaggataggttttaaatagggaaggctaaaaatcatagggatggttggcaaatgacagacagctggagacctctggtgtgatctttctcctcccccccacctatagccagtctctgggctctatcccttcctgcccatccccaccatttctgcacctgccgtggctgggtcagctgcaggcttccttccaatggaactgaactgtctcaggtgttcactcacccagactcggaaggggcccaaggcatggttgggggcaaggattcagaaaccttcccatggggccagtactcagtgtgtcaggacagcccctggggacttggagtgggaggtgttgaagacccacttggagagaccctgggccaagagcattggctgtggcccagctcttccacgtgctggcttgtaacctgggcaagagtgctcacctcttgaagttgccttcatctcaaaagtggagaccacagtagctctcacctaccagggcagttgtaggaaggaatgaggtccccatgcaaaatgctcagtccaaggctggcaggccacttcaccatccagccagcacatttttatgtggataaaacgtatctattcctagcagtttcccaccagtttcctctttgtttcctgatcttaattgccaactgtaattaaatgattatttgggcatcttattagtgtgttggtgaccattctcggcttcaccctccccctttcccggaagactcaaggagttggggcgtctctgtgtttgtgcactgctaggtccctaatgcctggtgtggtgcctggcacacactcgactctgcacacagtctgaatgaatgaatgagtcctttctttagaggtgactgatgctgctgaaataactgctgctaagagcccaaagctctgtgtggagtgaacatccactttattccccctccccaccaccaccccgctcagttctgtccttggcgcttaaccgggatttcgtccacactgccagcgctcacactgcactcccaggccctgctgtaggtgctaatctgatgggggcagccttagggagggctctgtccccagcaggaggacccttggtgagcgactctccccgcttgcccccaccccttccagcacctgcaaagggggcttagagcggggctgccccatggggttgagaaattgaaatgggggtgtcctcccccaggtgtctctgtggtccttgaatcctggtgtctgttgaaatgcctcctcctctgggcaccttccaggaccaggccaggtgacaccaccattccacccccgtctctacccctttcctggactttcttccttccctgccctggctggggaagcagcggctgcctgcctgtgttcaccccacaccaccgctggggttgtgagaatcgctccttagcaccctggaggacacctctgtgagtggcagccctggggggtgtcgcctcccttgcctggcccctcaggttcctaagggcgtctgaggaaaagcctcattggaaagcgcccgtgccctcctccctctcccccgcccccccgccccccggcagggaggagggttcggagcgagggttcggagggtccggggtgccctagcaggcccaggccaggtggttgcggggaggaagcctcaggtcgctcccctccggtgccggggtgggcgcgtcgggacccactggcctcccagtcccaggagaggaaggaccagggaaaccagctgtctgcagctgctggggaaattaggggctctcagggttccctttcctccgggaggggaggaaacgggactaggaagctttcctgtttctagagcacggcttggtggggtgggcggctcctaacccggggtccagcccctcctcccccaccccggcgcgcggtccaggtatgtgcgacccctcccagtggccacgcgccttctcacgcccctctcccgtgacgtcatgctcctctcgcgcggcatgatgggagaatcctaatgttttccaacagatgctccaagaacagctttcagattaaagcaattgcaagagcaaagattcttccttttcccttttttcctgggggggtggggggtggggtggggggagggagcgcccccagacattccaggacatcaccccctgccccaagcacgcaataaacactgacaagaaaaagtttttatttcctggttcaacttttttttttttccctggaatatagactgaagaatgggaa

SEQ ID NO: 26987 - DNA, 2300 bp, Homo sapien
attccccgcttctcctgttccccccttctcctgtccccgcttctcctgttccccccttctcctgtccccgcttctcctgttcctctcccttctcctgttccccacttctcctcttcccaccttctcctgttcctgccttctcctgtccccccttctcctgttccccctcctcctgttccccccttctctggttccctccttctcctgttccccctccttctgtttccccccttctcctcttcccaccttctcctgtcccccacttctcctgtttctgccttctcctgccttctcctgttgccccttctcctgtcccccgcttctcctgtctctgccttctcctgccttctcctatccccccttctactgtccccccacttctcctgttcctcccccttctcctgttcctccccttctgttcccccctctcctgttcccccttctcctgttcctccccattctcctccctgttcctcccccttctcctccctgttcctccttttccccctctcttttcctccccttcctattcttttccctcttcccttccccctcctcccctccacttacccctctccctccctattcttttccctcttcccttccccctcctcccctccacttacccctctccctccctgtccttctccctcttcccagctaattgtattgaggctgtaccttgtgataggaactttgggtagctctcttagctcatatcacaccatccctggggaagggtaccccattgtacaggtgggtacacagaagaggggagagatgcccccactacaatgtgctgggagcagaatttggacctggatctgagtccagctcctccatcccctgcaggaaggatctgggctcttggggtgtcagggggcaactacctcttcatagcaaagcttcattcgttaagttcctggttctgggctattgtccctgtctccgaggatcagagaggtgaagtcccctgcctgggttcagatggttatggagtaggggtcctggttcagacccatggctgtctttcttgccagcagcacttctttctttggggtgatttttcccccaggggacactgcagtgcctggagacattctggttgttataactggggtggagggtgcttctggcctctggcatgtagctgtcagggatgcggctaaacctcctgcaatgcacagcacagcccccaccacagagaattgtgtggtcccaaatgtcaccagtgctgaggctgagaaaccctgcaccaggcccctccccagctgaccctatgttcctgcaactaagccagcagtagacatacctgcagcagcaggtgttggtgctacaggtgaccctaggtcctcgacctccccatctgtctgccacctgggcctgggcctgggcccggaataaaaggtgcaccaagggtccctggcttcagcattttttgttttcaggttgcatatcagactccttcttgcctcctgaggtcccttgggacttggctccaggcagcctccctgatctaagacttcagcagccgcctcaggactctgcatggccaaggtcccctctgccccaggtcaccaaggtcattgtggtagggaaggagaagagagggccctaagaaaaactccagtcccactagttcctggaacttgcctaaggccaggagaagttgctgccatcgtgggttctgtatatgggattcaggactttggttcaggtggtttctgccaggctctggccagatgccagcctaggcagtgtcctggcagtgctgagtgacacgtctcgggcacagagaggagtgggcgcctggccctgagcagaggggaggcttgttgggggccagcacttgatccactgagccggaccctcagaccctgggttgccctcctcacccccacccccacctcatctctgcttcctgcaacatctatatttaaaaatgttgacagataataatggtgttcagccccaaaatgcagacaggagcttcctgacaattgcagtgctgcgccgggttggaggttttctcagggagcggagcgagtccccaggagcaagtgagagtgccagggctgtgagggctctttgccaatcttgacctttcagggagatttgagagaaagactccagaagcccgcggggagagcaggggttctggggaagataaagcccttcatccaggatccctctgtgaccataaggtgagttgctttgccccacatctctggtgaggcagagggcagggactctgcttagggagcaggcttcttaaaggcaaagggtttgcaaattctagc

SEQ ID NO: 26988 - DNA, 2300 bp, Homo sapien
gggctgtcgggctgctaaactgcatgctggggcgaaattccctttctcttattcttagctttttctttttttttgaaacagaatctcactctgtccaccagactggagtgcagtggtgcgatctcagctcactataacttccacctcccgggttcaagcaattctctgcctcagcctcccgagtagctgggattacaggcgcctgccaccacacccggctaatttttgtatttttagtagagacagggttttaccatcttggccaggctggtcttgaactcctgaccttgtgatccacccacctcggcctcccaaagtgttgggattataggcatgagccaccgctcccggtctcttagcttattcttaaggggaatttcctaccttttatttttcttcttgagagagtttcaaatttgccagaacctgaagggttgttgtgctttcagccaaaaggatgtctcagtagcctttagcccaccttcccccagggcaatggtagcatggaacatgcaacccctagcttacttgaaagattggacttgaaaaaaatcagcagttccttctggaatctgcaaggattggggaatttgaaagattcaggggaattagttcggcttcccaaactagttggttttagtgaccccttcttcttcccgttgcatcactggtgtgactgatgttaacattattgttgccccgttttacaaatgatgaccctggaaaggcttggagggccctggggctgcctaaggtcataggccaggaagaaatggagcctgtccgagggcttgcgtctcctcattctgaagcccaggctttctccatgttttcaaaatgccagctggttgcattttgtttttccaaatgatattgtagatgccagaaagtggggcctgtgtttccatttcttggttttcctgcccttccagctctctcataggaggcatatgatgagcacagggaacaggcatctgtgctgggcagacctaaaacgaggaaggggcaccgtgaccagttaccttgcggtgtggcacagtgctatcttgaagaccataacatctctcgagcaggctagcatatctggtccgaaaagtcgccatttctttgggtgggcttgtacaaagtggtccacatctcacagggtggtctgctgggctctgcaggcccgtgttgtgtccataatacatgatcaataaacacaaaagctgcccatcaatgaatccaggtgttcacccggatgggcgtgggaaactcagacaggcagaggccacgggctcttctgtctctcaattcctgtcccctttgcatactgggggggcacttgctgggggtagtccagtaattttatctcatggtgctccaccagagaccatggtgctgatggcacctactaagcgcaacgctgtgcttgactctaccctctgagtgtgcccactcagggctggtctccctcatgcagcccgaggcctcctgccaaagtccacttcaaggggaagccgaaggtgcacacaatcccctacgtctcctttgatccaagtacatcagctcttccaaattgtgtttgccgtgcattttttttccagaatcctcttaagaaggatttaagaatcttgccaaagtggccacttctcctaaaaacatctaacccagtcctcgcagattccagaaggaactgctgattttttaatttatcttcagtcatttgctttcggaagggaacatttattgtgttgaaaattaaagacttgataaaaaatgtttgctttttgtggtgtccttgaaaatcgagtgattttcacccaggatttctgtagtgggtgtcaggcaccgtggatttctgtactgggtgtcagggaccgtggtacaccacggtgcttagaaaaatggatgatggaggtggtgctgtggctggctagcatttattaacattgttattgccaggcaccatgtcaaccctttcctatgcattagctcatttaattcttacagccactatttgtggcaggtactagtattatccccattgcacatgacaggaaacggaagctcagagaggttatgtaacttgcccaagtttgaacagttaataagagcttgcattcaaacccagtccattctggctcatggggcccaagccttgctctgctgccccaggctgtgtaggatgcatctgcggtggccattcttctctccagaggtccttcctaggactgactttgtggagattctgtgctggtaggtggcggggcaagacacgcctgtctctccccctggaaggagtcagtccagcaagaaac

SEQ ID NO: 26989 - DNA, 2300 bp, Homo sapien
tatgtgcagataagatagtactgctgggtcttcgagtggaacaaggtgtttggaaataggatgtcatgccagtgggttgtctgtgattagctggctctcagaacaattcttctcccccacctaggaccccttcctcattgttgcttacttattaggactccacgttttacttcccaagatcccattcctatacacagcctctccctcttagccagaggagctgtgcaaaggaagtaccttttcatgggtaaaagactcatggtgcgctcactcttgctgggcttcagggatttttcatttctattgctctaaaagtgcctgtgtgccttccccctccatcccatctccttcctgcttccgagcccttctgtgggcagcatgggggccaggaatctggcttgttcctgcttttcctatggtggtctgccccaccattattcacacacagaggctgttgggttctcttaccattccctgtttacagagactcagatacattcagaagcgagctaatgctgggtgcccagctctaaggggagaccccagacaactccaatttcctgatgatttctcttcctttacctaattccttctccaagacccttgcagacactgctgtaccaagtggattctgtgtaactctctcagaagtttcctcttccatgaagcctgccttgattacccacccccatcctcactccctcagtgtttaagcccagtgtgtgaacagttaagagacgctatggtcttcccacactggtttcttctcttcatttgggtctcagcgaaatgtatctctgccagattctgaatgtatctgcccctgcccaaccactcacccaccatatccgccatttcctccacggcattgaccactctctcagatgattttgttcatttgtctgcctttacctctagaccaggggcatccaatctttcagcttccctgggccacactggaagaattgtcttgagccgcatacataaaatacactaacgataggtgattagctaaaaataattgcaaaaaaaccctcataatttgtgttttcagaaagtttatgaatttgtgttgggcctccttcaaagctgtcctgagctgcatgcagcctgcaggccacgggttagacaagcttgctctagactatgagcttcccaagggcagggaagacttcccatactcagcactctgttctgggggcttggaacagtgcctggcacatagcaaatatgtcatagtcatctcctgagtgcttgaatgagtggcctttggggtgttttgactagactgcaaaagcaacacttaagtgagctaggctttgcatacattgtttgggactggggaggattccagccaggaattgtcagggggggaggttcaagtctcactgaacatcgagatatgatgtggaagcaaccacccacagagccagaagacaaagcccccaggggagcagaaccacaaagggttgtgttctagtggggagggaggagtggctgagccccgcaatgccctaggctttctgctgggacaaggattataaataggagataaataatttttaaatggaggcaacatcctcactggggcaaaatattatggccctaaattctaggcattcaaatactgggccctgttgtctccctgctgtggttagaggatctggaagtgggaaggtttctggctctggcccaaggacaatattattgtagtcataaaaataatcagagcttggcattaattttggatgatgatgcctccttctcctgacaagccctttatgttttttggtggtgactgttggctgcatcctccaacttcctcaatgagagaccacttgaaaaagaaataataatttgtcttcatatcgcacactccgtctgggctgatggtgggaggggaatgcgtgtgggtgggctcagctctgttagctgcgctggctggaagagattcccagtttttattcagcgctcgagctgggctgcatgcttgctgacaagaggcgggaggccccttagacgtctttagacactccccctgtgctgggctgggcacaggcggctctactcagcagttcagcaggcagaaagccggaaggagagatcagtgctcccaaggctggtgtctcccgtgctgacaacggaggcagtgctgggaagcatgaatctcccagcatctctggatccagaagcctgaaaacaggtggtgctacccacccctccctaagccaatgggcaggaaaaagaatttcctgaacagatctcctcgctgcttaaacacactgctccggtgaacagtc

SEQ ID NO: 26990 - DNA, 2300 bp, Homo sapien
ttggcatgtgatacttaactatgatgatctttaattttagcttaatcagagacccactgttgatgaattaagagacagaaaaattctgatacgattcagtgattacgtggaagtagcaaaagcgcaggactatgacaggagggcagacaaaccctggacgagactgtcagcagcagataaggtacctaactgcctgtgctggtggggggtgttggatgatataataaaggcaaaatatgtcatgccagggagtttattcatagacaatgggagccctcaactatttaagggtatactgcagtaaatattggtttctcaaagataattcagggtcagattgagaagtggttctcagctaggtgacagttttgccccgagggacatttggcaatgtctagagacatttttgattgtcacaactcgggatgctactggcatctcctggtagaggccagggacactgctcagcatctcacaatgcacataacagcccccacaacaaaggattatctagtaccaaatgtcaagactgtggaaattgagaaaccttggtataagggataaatcaaaggtgggcaaggctgccataagagatcaactgacaagtttaaacaaaaagagctacagtggggacaaagaggcattcaagaaagcctctacagtatagaaaaggttctagattctccccctggacttgtgcagtttgaggtatctctgagaacctcctaagaagtctgaactgaacagctagagaggcaggaagaacacaaggaggtagtaggtcatagagtctctgcatgacatttggtgagcacagagagggtcagttcttgtctgtgatcaaacacttgactggcaagatttaagcccaagagtgtccatagagttttgtcaccttcttgcttctattaattttcagaagacttaaagcctttaggaagagaaaaattatacattcaggcaaggaatttgctaattgttcttcattcttcatatgctgagtatgagtatgtacacagatattgcatcaacttggagaaatgtgaacgtgttggactaacttgcctggttctttgtgactgatgtgcccagaggatcacagtgatgcgaggagaagtatctttggtggtctgcagatgtgtttgagtatgagaataatatacccctaaagttcttaaagactttccttgtcccagaggctgtgtttgatgttttcagtctcatcaggtccctcgagtgtttatctgagaaagaagtacatgatgcaagtgggcctggggaagccaaaatattaatgtatgctgaagttagaaaggcttatttctagattatctctgattataaaattccaagttcaccaaaagctgaagtttactcattatcttggtgttcctgtttcattagtgccctaagcatgtgcttggtccgtttaggtatggagtgaacggagtttggggaagggttgtcttcccactacagttcagcaaattaatgaatggaacacttacataatactagtcctagccagagcaatcgagcaacagaaagaaagggcatccaaactggaaaagagaaagtcaagttatccctctttacagacaatatgatcttatacctagagaaacctaaagactccaccaaaaacttagatctgataaattcactaaagccataggatacacaaaatcacacaaaaattagtagcatttctataaactaataatggactagctaagaaagaaatcaagaaggcaatcttatttaaaataggtaccaaaaatacctgaaaatgaattgaaccaaggaggtgaaagacctctacaaggaaaactacaaaacaatgatgaaagaaattgaagaggccacacacaaatggaaagatatctcatgctcatggatagaaaggactaatactgctaaaatgaccataaaatgaccaatgcaatccctatcaaaataccaatgtcatttttcacaaaaatagtaaaagccatcctaaaattcatgtgaaacccaaaaagaacctgaatagccaaagtaatccttagcaaaaagaacaaagctggaggcatcacactaacttcaaaatgtattataaggttatactaccagcataatattggtataaaagacacatagaccaatggaaaagaatagaaaacccagaaaaaattcacttatttacagccaactgatttttgacaaaggtgccaagaacataaactggggaaaggacactcttcaataaatggtgctgggaaaattggatatccatatggcaaaagaatgaaactgtaccc

SEQ ID NO: 26991 - DNA, 2300 bp, Homo sapien
acagcacagaaaaaagtacagccaaagaggcacataaagctaacaagatggttttagtttctaatctacttttgcacgaagtcagttggggaaaaacaaaccaaggaaagcaaactgaataatcaggttacacacacacacacacgcatgcctcaaagctgaatgcatacaggccacaatagagtcaaaagcacagcactatccacaacatcaaacaagttaacatttgcaagtgaaagagaaggctaactctaaaaagaaacaaaagttatacacttattttttccagcctcataaggaaacaatttaaaagatctttaggaactactactatgtaacagaacgacttcggaaaccgagaacagaataataatgtttcaagagaagcgtggatttacctgacaagtaagcaggctctgggctccagtctactgaactgggggactggttagcgagcaacacagagaactagtaagatgatgattgtgtatctgcaggcagataaaagcgttacggataaaaacaacaacaaagaaaacaatttggcagatgggggaggcaaagattttcccccaaaggaaaaactgctgaatgaatgcaagcagcagtagataattcaaagtcccctctgccctggtaactaacatagctaaggtgtccaaaaagacattaaaggtgaatgaaggggagggaaggcgtcctcctcctcccatcattactaaaaaatgtaggccgggcgaggtggctcacacctgtaatcccagcactttgggaagccgaggcaggtggatcacctgaggtcaggagttcgagaccagccgggccaacatggagaaaacccgtctctactaaaaatacaaaattagctgggcgtggtggcgcgccaagtagtcccagttactccggaggctgaagcaggagaatcgctggaacccggaagatggaggttgcagtgacgcgagatcgcaccactaaactccagcctgggtgacagagcgagactccgtctcgggaaaaaaaacaacaaaaaaaaaccacgctgccgtattcgcagatgctcggccagcctggagcccggtccagaaaaggccgcacgtggagccacgtgtcgcgcattgagccgccgcgggacgcatcaggcccagctgcgcggaggggctggcggcctcaaccgcaaggagaggccgcaggtggggacggcgggagggagagaagggactgaaggcgccgagcaggaggaaggttttgcgcgcactcccttcttccctaagtggaaccggcagtggcaacaacgaggccgaaggcgaagtccctgctcccaccgccggcacggtgacccttttcccagggtcacccccgaaccaacaaagcacacacacacccgagatgcgccccaggccgcagcgccaaccccccttcagatgtcccggagacaggcgagcagcggtccccagggctcccgtcgccaccgcttctcccgcacccctcagcctcctcgggccggcgacgcgcgcagccccaggcctgctccccgctcgccaagcgcaccgccccgcgcctcagccaccttgaccgagtcgcccacgcgcgggggcggctccgagcgcccatttcccatccccgaggccgaggctggccaggcaggtgctgatggggagcctcgcgcctgcgcgagccaccctcgccgcgaactctgcacagcccacgccctggcccagcctcggcgcctcccctccgcccactgccgcagaaccgcaccccctccccctcggcagcttccacaacggctccgcctcaaccgtcggaagcttctcgcctgccggcttgaaaggccaagccgaagccccaccctccctccgcgccccgccgtgggggaagcccacccaggcactctgctcaacctgcctgcggcaggaggcgtccgcgtagtgtcggtggagccgccccctatgccgccgagcgtcgcaactctgcgcctcagggaccgccgcagcgcctccggcgaacggcggaaggcgggaagcgcccgtccaatccgcgccaggtgcggtcgatagtgcgtccaatcggcgtcgccgccagccaggtcccgccccccccatcccccccacccccgccaacgctcgccggggtcgcccgaggcctgagccaagggggacgctgtgggcgcggctcaggccaggccctcaggttagtgggtccccgctgtccccgcgcttcggcccgtcctctcgcgctatgctctcctgatgaacgccccgcgagcggagtcacccccgccagcgaggagactcgctgcc

SEQ ID NO: 26992 - DNA, 2300 bp, Homo sapien
ctcagcaccccgtctccggacctgcggtctctcccgccctccggcacccgcacccaggagcccaggcggccctgcgccccctgccggcaggagccaggcctcacccaggagtcgtcggcccggcgccctggtcccccggtccagctcgcccctgcagggctggctggagccgcgggtcccagtggctctggggacgcatagcgcggggatgggcttctcctggtcccgcccgcgcttccgtcccttccatcccttcctgctcgcctgtcccgggaccagggccccagtcaaggcagcgagtctcctcgctggcgggggtgactccgctcgcggggcgttcatcaggagagcatagcgcgagaggacgggccgaagcgcggggacagcggggacccactaacctgagggcctggcctgagccgcgcccacagcgtcccccttggctcaggcctcgggcgaccccggcgagcgttggcgggggtgggggggatggggggggcgggacctggctggcggcgacgccgattggacgcactatcgaccgcacctggcgcggattggacgggcgcttcccgccttccgccgttcgccggaggcgctgcggcggtccctgaggcgcagagttgcgacgctcggcggcatagggggcggctccaccgacactacgcggacgcctcctgccgcaggcaggttgagcagagtgcctgggtgggcttcccccacggcggggcgcggagggagggtggggcttcggcttggcctttcaagccggcaggcgagaagcttccgacggttgaggcggagccgttgtggaagctgccgagggggagggggtgcggttctgcggcagtgggcggaggggaggcgccgaggctgggccagggcgtgggctgtgcagagttcgcggcgagggtggctcgcgcaggcgcgaggctccccatcagcacctgcctggccagcctcggcctcggggatgggaaatgggcgctcggagccgcccccgcgcgtgggcgactcggtcaaggtggctgaggcgcggggcggtgcgcttggcgagcggggagcaggcctggggctgcgcgcgtcgccggcccgaggaggctgaggggtgcgggagaagcggtggcgacgggagccctggggaccgctgctcgcctgtctccgggacatctgaaggggggttggcgctgcggcctggggcgcatctcgggtgtgtgtgtgctttgttggttcgggggtgaccctgggaaaagggtcaccgtgccggcggtgggagcagggacttcgccttcggcctcgttgttgccactgccggttccacttagggaagaagggagtgcgcgcaaaaccttcctcctgctcggcgccttcagtcccttctctccctcccgccgtccccacctgcggcctctccttgcggttgaggccgccagcccctccgcgcagctgggcctgatgcgtcccgcggcggctcaatgcgcgacacgtggctccacgtgcggccttttctggaccgggctccaggctggccgagcatctgcgaatacggcagcgtggtttttttttgttgttttttttcccgagacggagtctcgctctgtcacccaggctggagtttagtggtgcgatctcgcgtcactgcaacctccatcttccgggttccagcgattctcctgcttcagcctccggagtaactgggactacttggcgcgccaccacgcccagctaattttgtatttttagtagagacgggttttctccatgttggcccggctggtctcgaactcctgacctcaggtgatccacctgcctcggcttcccaaagtgctgggattacaggtgtgagccacctcgcccggcctacattttttagtaatgatgggaggaggaggacgccttccctccccttcattcacctttaatgtctttttggacaccttagctatgttagttaccagggcagaggggactttgaattatctactgctgcttgcattcattcagcagtttttcctttgggggaaaatctttgcctcccccatctgccaaattgttttctttgttgttgtttttatccgtaacgcttttatctgcctgcagatacacaatcatcatcttactagttctctgtgttgctcgctaaccagtcccccagttcagtagactggagcccagagcctgcttacttgtcaggtaaatccacgcttctcttgaaacattattattctgttctcggtttccgaagtcgttctgttacatagtagtagttcctaaagatcttttaaattgtttccttatga

SEQ ID NO: 26993 - DNA, 2300 bp, Homo sapien
aggtttttcatgaaatgccacggtctaaaacctttaaaaaaaattaacagtaaaattaatgatatcctttttttcttccatgttgtagtttacggatgtttactaaataatccgcaggcttcctgaacacatgaagcaataaaaaagactaacatttttcttcaactaaaaagcggcaaggtaaaaaatcatcactattaatttttgaagtgtattaggaaaatttctgtgcgttcgcaactccaccatgaaggatcttagatctattggcggaaaactaggtatgaaaataattatgcaaaattgccaggtcacaattttgaagcactcttcgatcttcttacattttgtgttatacattattagtacttaaacgtataattcaaaagcattgaaagctttgaacatataaaatcccctcaaatccctgcgtacacctgtgtaccttagattgcatatgtaatctgtcagctctgaattaaaaaactaagatatcaaaattaagttcaatgggggtagttacaaagttgtcaagaagttggtaattctagctaagcagaatatttaaaacacctctgagagcttatttactgtgatttgatctgctctggtccacaactgagctttgattctattaccttgtgtttatttttttcaggtgctttccaccgcacatttaaatcttaatcccatatttttaaacaattagtgccttttagataagaaattaaaatgttattaaaatataattttaaattttgatttgaagatacctataaaagtttaactacacatacaattcaacttttaaaaattgatccgacacaaatattaatccaaaggtggtttgctgcagtattatttgtaatagaagtgtaggctcatcagtggaggattgaattcctcggatgaagttaatccacatgattaaataattacgaagctgttagaaagaccgagctgcatctcagtgcacgtggaacagtttccatctcagaacgcgagcacggggaaaacacgcagaagactgagcgccgaacaccgacgccctctgcgagccaaggggcaaggagaccctttcgcggctgtgcctgtctcagaagggcctgcgattttttacacaagcacccgctggctgcataagttaaacggatctcttaaatggaagcgtctgaaagagcctaggaatacacagttgggtacccagctcagcaccccgtctccggacctgcggtctctcccgccctccggcacccgcacccaggagcccaggcggccctgcgccccctgccggcaggagccaggcctcacccaggagtcgtcggcccggcgccctggtcccccggtccagctcgcccctgcagggctggctggagccgcgggtcccagtggctctggggacgcatagcgcggggatgggcttctcctggtcccgcccgcgcttccgtcccttccatcccttcctgctcgcctgtcccgggaccagggccccagtcaaggcagcgagtctcctcgctggcgggggtgactccgctcgcggggcgttcatcaggagagcatagcgcgagaggacgggccgaagcgcggggacagcggggacccactaacctgagggcctggcctgagccgcgcccacagcgtcccccttggctcaggcctcgggcgaccccggcgagcgttggcgggggtgggggggatggggggggcgggacctggctggcggcgacgccgattggacgcactatcgaccgcacctggcgcggattggacgggcgcttcccgccttccgccgttcgccggaggcgctgcggcggtccctgaggcgcagagttgcgacgctcggcggcatagggggcggctccaccgacactacgcggacgcctcctgccgcaggcaggttgagcagagtgcctgggtgggcttcccccacggcggggcgcggagggagggtggggcttcggcttggcctttcaagccggcaggcgagaagcttccgacggttgaggcggagccgttgtggaagctgccgagggggagggggtgcggttctgcggcagtgggcggaggggaggcgccgaggctgggccagggcgtgggctgtgcagagttcgcggcgagggtggctcgcgcaggcgcgaggctccccatcagcacctgcctggccagcctcggcctcggggatgggaaatgggcgctcggagccgcccccgcgcgtgggcgactcggtcaaggtggctgaggcgcggggcggtgcgcttggcgagcggggagcaggcctggggctgcgcgcgtcgccggcc

SEQ ID NO: 26994 - DNA, 2300 bp, Homo sapien
ggagtgcagtggtgcaatcatagctcactgcagcctccagctcctgggctcaagcagaattctcctacctcagcctccggcgtagagcagctaggtgcacaggcacatgccaccacgcctggctaattttgtttttttgtagagatagggcctagctatgttgcccaggctagtttcaaattcctggcctcaagcaatcccatcaactcagcctcccaaagtgcagggagtatatgtgtgaaccacggcacatagtttccaaattttgattataattgagaaggtttttcatgaaatgccacggtctaaaacctttaaaaaaaattaacagtaaaattaatgatatcctttttttcttccatgttgtagtttacggatgtttactaaataatccgcaggcttcctgaacacatgaagcaataaaaaagactaacatttttcttcaactaaaaagcggcaaggtaaaaaatcatcactattaatttttgaagtgtattaggaaaatttctgtgcgttcgcaactccaccatgaaggatcttagatctattggcggaaaactaggtatgaaaataattatgcaaaattgccaggtcacaattttgaagcactcttcgatcttcttacattttgtgttatacattattagtacttaaacgtataattcaaaagcattgaaagctttgaacatataaaatcccctcaaatccctgcgtacacctgtgtaccttagattgcatatgtaatctgtcagctctgaattaaaaaactaagatatcaaaattaagttcaatgggggtagttacaaagttgtcaagaagttggtaattctagctaagcagaatatttaaaacacctctgagagcttatttactgtgatttgatctgctctggtccacaactgagctttgattctattaccttgtgtttatttttttcaggtgctttccaccgcacatttaaatcttaatcccatatttttaaacaattagtgccttttagataagaaattaaaatgttattaaaatataattttaaattttgatttgaagatacctataaaagtttaactacacatacaattcaacttttaaaaattgatccgacacaaatattaatccaaaggtggtttgctgcagtattatttgtaatagaagtgtaggctcatcagtggaggattgaattcctcggatgaagttaatccacatgattaaataattacgaagctgttagaaagaccgagctgcatctcagtgcacgtggaacagtttccatctcagaacgcgagcacggggaaaacacgcagaagactgagcgccgaacaccgacgccctctgcgagccaaggggcaaggagaccctttcgcggctgtgcctgtctcagaagggcctgcgattttttacacaagcacccgctggctgcataagttaaacggatctcttaaatggaagcgtctgaaagagcctaggaatacacagttgggtacccagctcagcaccccgtctccggacctgcggtctctcccgccctccggcacccgcacccaggagcccaggcggccctgcgccccctgccggcaggagccaggcctcacccaggagtcgtcggcccggcgccctggtcccccggtccagctcgcccctgcagggctggctggagccgcgggtcccagtggctctggggacgcatagcgcggggatgggcttctcctggtcccgcccgcgcttccgtcccttccatcccttcctgctcgcctgtcccgggaccagggccccagtcaaggcagcgagtctcctcgctggcgggggtgactccgctcgcggggcgttcatcaggagagcatagcgcgagaggacgggccgaagcgcggggacagcggggacccactaacctgagggcctggcctgagccgcgcccacagcgtcccccttggctcaggcctcgggcgaccccggcgagcgttggcgggggtgggggggatggggggggcgggacctggctggcggcgacgccgattggacgcactatcgaccgcacctggcgcggattggacgggcgcttcccgccttccgccgttcgccggaggcgctgcggcggtccctgaggcgcagagttgcgacgctcggcggcatagggggcggctccaccgacactacgcggacgcctcctgccgcaggcaggttgagcagagtgcctgggtgggcttcccccacggcggggcgcggagggagggtggggcttcggcttggcctttcaagccggcaggcgagaagcttccgacggttgaggcggagccgttgtg

SEQ ID NO: 26995 - DNA, 2300 bp, Homo sapien
aatgcccaggaatggttgtgtgatgactgataaagcagaaatttcttgcctattaatagtttcccactgttagaaggctacagccgttggcaatcagatgtgggctcaggttttccttatcctggggcaggaatgcctggagggaccacgatgtgggtcacactgtacattctgtttactgtgggcacaaacacagaactttttttttttagcttattaaatcgagaatattcctgaggaggcatccgctatgggctaaaggtcccaacatcacaataataaataacagctatgtttacagagacacattcaggacacatgcaaaagcttttcctagcaggaggacttgggcctttgcaaaacaagctgcttgggcctccccagagggcccaccctcccatgcacctaccccaccaccctgccccaactcattacacaactcggccttctggccacctgaggctactttttagaccaagtgactcagacgtttcaagtagaagacaggatgggccactgccaggggaccttgcagcagaaaattaggtcagaggacttggagggtggtgaagaacaaccagatagatgtgagagcccagcagggaaatgacaggaggcgcagcttaggtgtggaggctccaggtggccggtccccgcgcggctcagatgaagtggatccagctctcttcgcactccccgcgaggcatgtgcagcgcgtggttgcgacatgtgaggctgtagtctcggtggtcgttgttgtcccagtactcggcacccgccacttggtagcgcaccgcgaagtgcacgcgggagccgagctccagcaggaagggcggtactggaaagccgaaggtgaaaacgtcctccgtgccctcggggcctgcgggcccgcgccaccgcgccaccgcctcgtgggtactgcgccagcccgagaaagtgtagcgcacagccacctgcttctcgaaggccacgttgcacacgcgcaccgtaccgctgatgccaaggtccgagcaagtgacacgctccaggcacacgagctgccgctgcaggcgctcgccaaagtcggcggcctcgacgggcggcgggaaatcgggcaccaggcaatgcagggtgaactccaggtcctggctgctgcagcacaggtccgagttgattgcgagccgcgacagcacgtgcagcggcacggacgggtcgtctcccgcgttgaacaccttgacctgtgccagctccaagcccagggcgtcggcgaagcgcacgcggagcttctggctgcagcccggccgacacgcagcgcccggcgcgcccgcggccttctggcggcgctcgggggagctgggcagtgagcgcgcccgccgcaggatgatgggccgcaggcgggggtcgcagcccgacggcgctggcgttggcggcggcgcgcggcccgggctcccagggggcctacaggcccgcggctccagggccacgccgccgtccaggtccgacaggcagctgaggctccgggggccgagcttccgggatcccagggcgctaggcaggaccgcggagctcgggcctctggacatggccccgccggccgtcggaagatgaggcagggatgagagacgacctcccgaccccgcgacagctccctccgtgctcagaagccgcagagagtccaccgtatctgcaacctgcgggggacctctcgggcccggtgcgccctacccttggttcgccaccttgctcctcgagtccttgtccaggtcctccgcttcttgcggttaaagaaattgtaagagtggggagtttttctctagtggaagctttcagaggcctcccgggagcgcagggtagcgcctcttttttcttcttgcttccttggaggttcttacaagaaggctgcgttccgggagcggcccctcccactttcccggtccgcggcgttacttacaaggctgcaacttgaccgggtgcaacttcctagcgagcctccgccccgcccctcgtgacgccgcctgcaggcgggcccccgccggcctcagctcagccagggagctcagcggagctgcgcgcctccgcctccagctcccctgccgcagcgcgccgcagccgggcgtccccgcgcgggcgccggagaggaaggaaggctggcagcctcgtcacgtgtccgctgcagtcgcgaaacaggtctgatcaatttctgtttacgtctgcctggattgcgcgcctatcgatcatagactttgtctgcacaaacggaggacaaggaaaatgcatgctgcgtgtccttagatttctgggttgtggatggggggagcggt

SEQ ID NO: 26996 - DNA, 2300 bp, Homo sapien
gtgaacatgtacacaagaaacaagcaagcaaacaaacaaaaatcccagaataaatctaagtcagatttttcttctaagtttacattacctttcctgtagtgctcaaaatattcttgctcaatctgctggaagatgatgacagctggggaggtgacttctttattcctcttatatttggaaaggtctcctcaccaccggaactagaagcaacagaatactgtcagtaactattgattgcaaatggtcctaccaccagtatcgggttggtttttcacttgttttttaatacttgtataatattgaaatattaaggctgtgatcatatagtggtttgcactctaggttatgaaatactggggaagggagacattgtcttatgcttacagctttgtcttttctgcttattacagtagatattagagacaggatcacaggatcacactactataaatactgtgaatggattccatctctctctctctctccctgttcacacacaggtataatcttccttggaaataatatgttgaagaaatctggaaggctaaataaggtcaggtcttattacagcgttcaatcattgcattgcccaatcattcattcatgcaacaaataattacaggagtacccagaaaaatggcaatgattatgcacgtccctgttcagaaggagcttaaactctaggaggaacgttcccattcaatttttcggccttctctatcacatcaatccattataagactttccatatattcatacatattacatattatatatcatctctttatgaagcattgttgacctataccacatattgctgttattcccctctcattttgagtggcctattaaaagtgcactgaatggaaattggatacttctctttcccgtatcacctgtctctgtaaaataaaagagatgattatagaagatttttattttcttcctgaaactttcctgtatttttcccacattaatcatgtaagcctttttagttagcttacatccaatgataaataaaatcattctctcacatttcatgaattataccacaatcaacagccttgactcattttagatgcaacgaatgttcttgaatcaaccccctttcattagtctggttttctttctgctttgtccctctggacaataaaaaggaaccttcttaatggaatggctggccccaaactgctctctggaaagtgcacttgcatcttttctacttcatttcacctggtatgctttacaccaaaggctgtggggttttgtgctcaaagctaccgggtgagagacacgaatgcctgcagggttctaaataggcagaaaacaagctccaggccttgctggtgtttctggcttgcttggaaacaaagctaaaagtcggagattctggctacaaatatgctccccaagcgccagaggctgattaagggcagctgcagaagtcatcagcgggtaataactcttgttcccctgtcttcctctctggcgcggagtccaggaagacaacagcagcacctcccctccccaccctcaagggaatctgctggccattcggtgcggcaaagcattctgggtgatgtggacatgacgctgctcctctacgcagtgaggctccctcggtctgaccaagggtccaggttgcagtgaacctgtccaaagtgtgggctggcctcgatgtttaaaattagcctgagaccagctcctggcaaggccggtttttgcaccaccgctccccccatccacaacccagaaatctaaggacacgcagcatgcattttccttgtcctccgtttgtgcagacaaagtctatgatcgataggcgcgcaatccaggcagacgtaaacagaaattgatcagacctgtttcgcgactgcagcggacacgtgacgaggctgccagccttccttcctctccggcgcccgcgcggggacgcccggctgcggcgcgctgcggcaggggagctggaggcggaggcgcgcagctccgctgagctccctggctgagctgaggccggcgggggcccgcctgcaggcggcgtcacgaggggcggggcggaggctcgctaggaagttgcacccggtcaagttgcagccttgtaagtaacgccgcggaccgggaaagtgggaggggccgctcccggaacgcagccttcttgtaagaacctccaaggaagcaagaagaaaaaagaggcgctaccctgcgctcccgggaggcctctgaaagcttccactagagaaaaactccccactcttacaatttctttaaccgcaagaagcggaggacctggacaaggactc

SEQ ID NO: 26997 - DNA, 2300 bp, Homo sapien
gaaagttttttttttttaattgggagatttttattttatattttatttttgatgagttcttttttatttttattttttaattttatttttccataagttattggggtacaggtggcatattggttacatgagtaagtttttcagtggagatttgtgagatcctggtgcacccatcacccaagcagtatacactgcaccatatttgttgtcttttatccctcaccctcttcccactcttccccccaattccccaaagtccattgtatgattcttatgcctttgtgtcctcatagcttagctcccacaaatcagtgagaatatacaatgtttgattttccattcctgagttacttcatttagaataatagtctccaatctcatccaggtcactgcaaatgctgttaattcattcctttttatggctgagtagtattccatcatatatatctgtatatacacatatatatacatatatatgtgtatatatatgtgtatgtatatatatacatatatgtgtgtatatatgtgtatgtatatatatacatatatgtgtgtatatatgtatgtatatatgtgtatatatgtacatacacatatatacacatatatgtgtatatatacatatatgcgtgtatatatgtacatacacatatatacacacatatatgtgtatatatgtacatacacatatatacacgcatatatgtgtatatatacatatagatacgcatatacacattttctttatccactagttgattgatgggcatttgggttggttccacgattttgcaattgtgaattttgctgctataaacgtgcatgtgcaagtatctttttcgaataatgacttcttttcctctgggaagatacccagtagtgggattgctggatcaaatggtagttctacttttgttctttaaggaatctccacactgttttccatagcagctgtactatgttatattccccccagcagtgtagaagtgttccctgattgtcacatccacaccaacgtctactgttttttgattttttgattatggtcattcttgcaggagtaaggtggtatcgcactgcggttttgatttgcgttttgctgatcattggtgatgttgagcattttttcatatgcttgttgaccatttgtatatcttcttttgagaattgtctattcatgtccttatcccactttttgatgggattgtttttttcttactgatttgttggagttcattgtggattctggatattaatcctttgtcagatgtatagattgtgaagattttctcccactctgtgggttgtctgtttactctgctgactgttccttttgcagtgcaaaagctctttagtttaattaggtcccagctatttatctttgattttattgcatttgctttttggttcttggtcatgaaatccttgcctaagccaatatctagaacaagcaaagaaagtttaccttttattttatctgtttactactttaaacaaggtaatgtgataaaaaggtcatgttaaggtaatcagggttaatgtatcacagattgtgttttaaaacttgcttactgcaaccttaagtattggtataatataatctcaaattgtctctttcagaattctcatgcaaagactcccgggttgccacagagatccctgtccatagggaggctctttcccatctctcctccctcccactttaattccaaactcaaaaaggcagattaatctaagcttaaaaaaggttttagtagaaataatttgaaaaccccagagccctgggatattgttggaataacgatttttagtgctttggaaagtaaaagttgatttttcttttctttcattcttccccatcccttcccccttaataaagttatcattcttgtcattttctagttttttttgtttggttcaagaggataagattatagaaaatagtcactaacatatcctgctatagaaagagatgattggaccttctatttggaaaccagaacaaacaaggaaacaaagaaacaaataattctgctttccgataggtgctggttttacttccgctggctgagctgttgttcctgaggtcagaccccagccagtcttttgtgtacgtgcaggaccatggtggctttagtttctaccccacccttcctaggaactctacttgtggcaaacgtatgttcaagcttacaagtcagcccaccccactctgataaatgcaagaaaagctgaaaagggaggagcaagatgggatgaaagcatctgggccaaagtgacctgaaaacctttagagaaga

SEQ ID NO: 26998 - DNA, 2300 bp, Homo sapien
actctgagtttcttcccctcgtttgtaaacattgcaaaatcacagtgcttctaaggaacttctggaactttccctaagaggtgaagcagtgcacaaaaagcttcaatccctttaaaaactgtgacccacgcaacatgagagagggatccttgctgaccctttgaaaaacatttgcccagaagatgaaggaaaagcataaggagaaactgcccctctccgcacctttctgggacctgcactttttgttgttgttgttgtttgcctgagtccaggaggttcctgctgcggtgccctcaacaggtagctggggtggcaacctggcaaggttgcaaaggatgcaatccaatggctgacagctctcaggaatgctggagggcttggcgtggcccaccccttacagtggtgtcaggttcacataggtgagggggatgtagaagaccactttgaggaatagggttacccaactgtgaactgccagggctctgctgcaaagggaacacaccaggggtaaagtcctaggtttctgttgcaagggcaggttggtttttcacactaagctaacatcatctacaggccactgaagatgggttcctttccaggatgaatcatctccccaaggcagacaaaactatgttcagtccaacaaggagggggacgcttggtcttctggtgaatgtcaattccacagacctaggagagtctttaggctgtcctccctgtgcttccattcctttcgtgaattaaacactctcgtagtttaattgctcttagaatttctcaaattacttgtggtagaaatagtgtttctatgacatattttgtttttttatgcaacttttttatcttttaatgtaagtttttaattttaaaaattgctgtccgttttccttctacaagatatgaactggttcatgacccagcaaattgggtcagcgtcgacaaaaactccggagtggtcatcaccgtggagccaattgaccgagaatcccctcatgtaaataacagtttttatgtaatcatcattcacgctgttgatgatggtgagtgtttacccaaaattggaaaaataaaatgctcattcttgcttcctgcgggaaaataaccctggtgagcgtctttcagcacagcagagaaaaggataaaataaaccttgttatcactctgcatccatgctggtgattatttttggtaataattcttaaaatggtaaacaagggaccaataccatcgaaagagggcagtattcattcagaagagacaattaaaccagcaaggaggctgcaatcaaacccagcatctttttcatctgttcatgagctaactctttagctctttgtcaaagccaatgatgtgtgataaatatttagcacagcttccctgtgcttgggatggcatacgagctcagataaatgggactgtaagggacacatttgtcataaaccagaatgggtggttttataagcctgtttcagcatttttctctacactctcctaaggctgaaactttaaacacaccaaagcagagttgaagaaataaaaatgttcaaataactttaaaattgtatttaagaaagtctgtgaactaaaacccaagctccaagtgatatatcactatacgttccattctgtaattaactagtggaatgttggcggggggcaatggagatatgaaacacgtgttcctaatcagcattaagggaggagaaaaaatggggccagtgtttcagggttccgtcattctgttatggatgattttatgattggtactttttttttcctttattttttgctttttgtatttcaaaagcttttggggtacaagtggtttttggttacgtagatgaattatgcagtggtgaagtctaagattttagtgcactggtcacctgagtagagtaccttgtatccaatgtgagatttcttagcccttggctccctcctcccctgcttctgggtctccagagttcatgatatcactcatgcctttgtgtatccatagcttagctcccacttataagtgagaacatacagtatttgattttctattcctgagttattcacttagaagaatggcctccagctctattcaagtgtctgcaaaaaaacatgatttcattcttttttatggctgagtagtattccatagtatacatatgccacattttctttatccactcattggtcgatgggcatttaggttggctccatatatttgcagttatgaagtgatgattgccacttttttgaattagaaaaagtcgttttagataattgtagattcacttgcagttttaagaaat

SEQ ID NO: 26999 - DNA, 2300 bp, Homo sapien
agactgctacagggaccctaatgctcttcctgtctgacatcaatgacaacgtcccgactctccggccacgttcccgctacatggaggtctgtgagtctgctgtgcatgagcccctccacatcgaggcagaggatccggacctggagccgttctctgacccatttacatttgaattggacaatacctggggaaatgcggaggacacatggaagttggggagaaattggggtgagtttttgtattggttacgggcaaagagtggaaaatgccagatatccaattcaaacagatttaggcaaaaaaggactttattagcttaaaaaaccggagaggtctgcgttctggcagagctggctctaggtgctcaaaggatatccctggatatccttcccacacatggtctgcctttctctaggttccttcttttttaggaaactctcctcatcagggggtaggaggctgctgggagtccctgagacatattcttgcatctggcaagaagggtgtttccagggaagctccaggattgacgtcactgtttggcctgggtcagctgccctgtcaatcactgtgggtgggacttgggagggcggatgtgctgattggctggttcccagcccacacctggaccttgttgggatctgggctcaccctctcctgattcatactgagaattcaggaagtgtgggcttccctaaggaaacactggggcactgttaccagaagatgaacatgctgagcaggttaaaagcaactggcatccactgtcaacactctcttctgtgcctctagccgtggcgtctgtagactgtggcacggtttcagctgaaactgtgtgctcaagtttgtagttctcagacctggagtgtgtggtaaagcacttcgccttgcccaaagagaggtctggtctttgtccttggggtctgggtgatctctattggggtatcatgtctgacaccagtgtctctttacctggggtgtcttgggctgagccggataggggcaatgtgatttacactggggacttctggtcacatagtatcagtctattaccagagaggctggagactgaggccgcccacctgggaggcccaccaggttgcctgaccaagccccaggaggacactggagcctgaggctcaggtgaacgtccctgactgcagcatcccatgtgtgctgtccctcatcgatgctgacctggcttctcgggagtggatgatgagaagctctgctactggtgcttttctggactctgccctaggtgcctctttccttgtgtgatttacgtctgtatcttttccctgtaaaaaacggcaccatcactgtaacaactttcagtgtgttctgtgagtctttctagagaattgttgaacctgagggtggtcttaggaatccgtgaacttgcagttgatgtcagaagtgagggtacccttgaggacccctccctctaactctgcagttggcttactttcatacagagcttggcccgtgcagggcgttcagtaagcgtgtgttgagcagatgagcagatgagtgagtcaatgcatgccatgttctttttccctttgcaggtcaatcagttgaacttttaaccttgagaagcctgccacgtggtaattacttggtgccactcttcattggagacaaacagggactttcccagaagcaaactgtccatgtaaggatctgcccctgtgccagtgggctcacatgtgtggagcttgcagatgcagaagtggggcttcatgtgggggccctgttccctgtctgtgcagcatttgtggctctggcaggtcagtggtctgtaggggtgtcctgggactgtggctcctctccccaggcaataggccaggggtaaggggcttgctggggtaggggacagcggtggcaggattggtggaatggctttgagaatgacttctgggtgtactcaggctcctagatgtagatcagaggttgccatgctggccaggcaagatccctggccagcaaaagcagcttctactcacaatggaatccactggtaaatatagtcaaggagtggccctttgtttgtaataaccatggagacagcaatgtacagatattcaggctcctggacttggcaaggctaataagaaagcagcttttccaagaaacaatacaatattactggccagatagtattattgattaattcaacaaacagttatgtagcatctactggtaccctggaactgtgctgaactttatagctacacagatgactaagacgcaatttggccttgccagttcatgactgagttatacatgaacagaac

SEQ ID NO: 27000 - DNA, 2300 bp, Homo sapien
gagaacttccatgtggaagacaaagacctagctcacaaggggtgcatggtctagggagctaggtgtggacaaagagccacgtaggatgtcagtgctgagatgtggcagccacggggagctatggaagggggcagaaagaagaccccagagctcagggaaggcctgcagggcaagtagggagttgtcagcccagcaaagagccaagagtgtgaggagaaggtctgccagcgcctgaaggggagaagccatggttcaccagcttcaagagttgatacagttgaaagcatcatctctccatggccaacatcctgggctgtggctttaatttgggcatagtgtgtgcctgcaaaacctcggctgtattcaacctagtctgccattgatggagtgagaactgcccccaaattatttacattcaaatttggaagcaactgaaacccaacagtaggagattcattacagtaattccatggaaatggaataatacgctgtcgttaaaagtgttcaaatcttttatggttatgataaatctaataataaaatcgagacaatattagaatatatattttaacattttcctagttttgtgaaaaaagccccaaatatctgtatgagcctagataaatgacaagaaaggaaaacagtaagatttttataatggttattgctcaatggttggatttttaaaaatactcttctataatttctaaattttatgccctgaggatgtattacctccatagtcagaaaaattatgaaaggtatttaaaacccaaactggctttgggcatgcagaatgcttggttatttctgaagtataaaaataactccccctctgtcccatcagcacgcgtgttgcagggagtctgacgttgctcgctaagtctctttggtcgtttcatactaatgccctttgctcccctgattatctctctgaggttggggccgggggatgggggtgtgctaggcctcctggatgtctgtctgctgccaaaacatcctctcctgtctctgtctcattggtgcattttgatgaacctgtattgcctggtcactgcgcgctaaccaccaaattatgaaacatttgtgctgcaagggagctgagagatccttaaactcaatgaaccattaggcataagacacacacacacacatacacacgtgaatacacacaaacacacaaacagcttggctgctctgggtgaagcatgtgtgtgtttgggggaaatttccttccccacccgtggtcgtccatttgcccatgagcagcttccgaggcaggtccgtggaccccaacgctgtgtaacaccgtgtgaaaaacacaaaggcttgcagccctctcactgcagacgtgggaacacgactctgtttaaaacccttcaaagcccgccttcttgccgtgtgatgctgcctgggccagcagggcaggtcaccacgctgtctcttcaaagcagctcgctcatgcccacagcgctgggcacaagggcagccacgagctgtttgatttctgcgtccccagcagatggcttggtgcacaggggcagggctcgtctgtccctctcactgctgcgtcccaggctatgtctccaccatgtaacttcagacaagttcctcagcgtctctgtgtcctggttccctcatttgtaacatcaggatattgataaggatcatagtaatagggatgtccttatggggcctcatgaaaatgaagagttctctgtgatgtgcctggaaccacagagggcagcaagtgggagccacagaaagtcatctctttatcatagttgtcattggtaactatgacggttatcaagggcaggggtctcccaccttctgcatccaggccttgtcattccttataaaattttctcctttcaaggactttcaatgccctgaaaacggaatgctcctccctgctccccatcagctgctgcagagccctgaaccccttgaacttgccttgcttagttctttcaggggctgccttggatgccacctcacttccctcttcttggctctgtggctgtcagaggggctgggcactgggttacttcatcagttcctgggtgttgatcggcaggaaacagtggtttcctgttcatatcctgcctgagcctgggccgggtggaggtgtcctgcatggagtcttgtgaaatcgcgtggactgcaacacccagcagcgcggtgagtccaccctgaaatccacagtgacccacgcggcatgtgctgggaattgaacgcttggggaaagagctgggctccagcggatcagccccgaccaagtcgttcccacagctcag

SEQ ID NO: 27001 - DNA, 2300 bp, Homo sapien
gaatggggctaggctgcagcatgcctgatgagaagctgctgtgggtggttgggcagttaggcactatttcccatggcctggagagcagctgagagggtcctgtgggtcactctgtactagaatggactgcagctaggggcgccctgagccctttccctggagctgagtgacagcttgagctcaggggaccagcatgtagagtagaagacttgggctgaggtcccgccctcgtggccccatctctgtggggtgtccactacgtgtgagtccaggcccttaaagataccatggggtcgggggagtaataatgaatgcagttgaatttgctgtctcttggatagtggcggttatttgcagatgaactttggcttaaagaaaataaagaatgtggcatgtctttcttcctaatgttgtgaataggaattcattccagctatgcttgttggcacacctcaagcacggtccagggctcaggaacatatcggtcttatgcagctcttggatgcttaccacaaaaggagggctggttgtgggtgagagccatggcagagtctggggcatggcaggtgcattgctgcaggatgagcctttgcgaagggctaggcttgctgctttggggcagctcccaggatggccaccagcagaaaaagctccaggcctggttccatgttctttctccggtccccacctttccttcctccacagcacattttaaagtctgatttcaggggcttgggaacgtccctctgccagatccacctgcatgcttgcgtcttgggatctgaccacagtcttcaaccttctgagggagtagttaccacctttttaggtcagggagtgggtgatggtgagaagggagcaaacaagcctcttgggagagagtgcagggaagtgcactgatgttttggagtaccttccattaccatcattgtgcttaacgtgttcgttacgaagcagcctggtgatgcttgcttctcctcctatgggtgactcctcctctgtccaacaggggagcctcacggtgggtgcctttgctcaaagaggacccatcctcagggagtttgcagccagccgaagggcagccaggagtgaagagtgaatggaaggtgaggcgggagaggaaaatccacctaagctgaacgtggcttcaataattaatagcagcgggcaaagccgacattacattaggaaaatttaattagaacatgcaacttatatatgtaattggatgcctggggcagtaataatgcattttcacagtacctcaaccatccccccaggcttgttttgactcataaaaagggatcagtcatgaagagctgtgatgctggagtgttatttctgttgtcctggtggtcacttacgtaacctagtgtgtagcctggggcaggctgtagcacctagtaggtaggtcctcagttgatatttgttgactgatttaatgggattttatgatgagattgaataaatgagggcacacctggtttttaggacttccctggatggctccatgcttcctcctggaccaagtgtgttcagatgagaatggcccttccttgctgtgggcaccctctttgctagggtgccaaggtcggagctgatattggttatctcatcgggccttgcagcagcgccgcagatattctgcctcccattttgcccgcggggacgccgaggcccggcgccgcatcctgccgcccgttttgcccgcggggaagccgaggcccgatgccgtaccctgccgcccgttttgcccgcggggaagccgaggcccggcgccgcatcctgccgcccgttttgcccgcggggaagccgaggcccggcgccgtatcctgccgcccgttttacccgcgaggaagccgaggcccggcgccgtatcgtgccgcccgttttgcccgcggggaagccgaggcccggcgccgtatcctgtggccgttttacccgcgggaaagtcgaggcccggcgccgtatcctgccgcccgttttacccgcgaggaagccgaggcccggcgccgtatcctgccgcccgttttacccgcggagacgccgaggcccgatgccgtatcctgccgcccgttttacccgcgggaaagccgaggcccggtgctgtattctgccgcccattttacccgcggggaagctgaggcccagtgctgtttaatatcttactcatgttcacttgatgagaaagtgacagatctgagacaaacccaggtatgaggctgcagagccctgctctgaaccgctgagtctgtctcttttcttgggacagggacagcttcctgtggtgacagccttgc

SEQ ID NO: 27002 - DNA, 2300 bp, Homo sapien
cagcctggtttccagtagcttctcaacccagtggagtagactctatggccccattttgcagatgaagaatggaggtgcagagaaatcacagctctagctttgtcaggaggaccatagaggtccaggggctggaggtctgaatatttaatagagggatttgaataaccatggaagttagcctggagagagatttaggaggcagataagcctagtgttcactgtgggggcagatgccttccccatctgtgcagacgattggcccaagtggccatgatgacatggctcctacctacttcctaatggacctcagagaattaaacagcgaggacaacagcgagtgttgtctctcagacccttggctttttcaggactgcctgacctttctttgtccttatttggcttcaagtcaagtcagctcaaccctgattgagcaccggcaatgagtcatgtctgtgaaggcgacacagcccctgtccttgaggagcttcgagtccagtgactgtcacttcagtggaagttgggctggacacagtcacatgtgtatgccagacatgaggctttgttctcattacaataattgccctgcattattctagcaattaagcttctccacgtgtgtggatgcatgttcccaattttttctggcctctaccgaacacaatgttaatatttgagagcagtcctaaaaaattaaataattatacaaactgaattaggatagcataatattaccaatcagagtaatgtggctttgtaatccagtgtgatgtcatatgaatctacaaattaggaagcatgtcagaggaggaaaccacatcctttattgctttgccttaaatagcttaaaactaatcttttccatgagccaacagctatctctcatgtttaataatgctcctccctgcccagatgaagctaactaaatgatgttgccccctgcacctgcaaatgcctggtgccagggcagggacacagggaatggcagaaggggagaccagatgttggctgaggcattgatttatgggcatgaccttccatgtgccccgaggatggctgagaccagggtttgatgaatgcagtgctctgtgtgagaagttctaaggtgacaagcaaagattctatcctctggaggggcaagccctattattaggttggtgcaaaagtaatcgcagtttatgcagttgtaatggcaaaaacagaaattacttttgcaccaacctaataccagacagaggaggtgcaagtgcatgccaccagggcaggtgcaggtgatgggggcagagaaaactcagatgtctccaatctgtgcagagtagggaaacagaaaaagctaagtgaggaaagtgagattgctatcacacagatgcatgtcttaggttttctgattccattcctcatgaatttcattaagtaatcaaagtgctaagcatgaaatgtgggtatgctgtcaccaggtggcagcagcatccactctccaaaatgcattttgttcaaacctagtatgtgctgggtattctgagcacatagcagagactaaggcaaagagtccctggcactgtggagcttagaggctaatgaggtggcaggtgcttacactttagaaaccgttgtgaggaatagctagtggtagttaaatgatacagtgatagttaacagagaggaaagcttttctctcactccaagctatatttttattatcactattaatataaatagaaaataaatattaaaatagttattaaataagcaaaagataatgttgcatttagttatacgattaagtagaggttttcaaatattttttagctttgtgcaaccgaaattatatgaggaagcaaaaaccacaaatacagaaaataagaacttttctgtttgaacagaaacgaggacactggggaggcccttccaatgcaggccagacttttaggggctcgacagaacacagctggagaaacatccacaccacacgcggtttcacctgccacacggcagcccgggtgcccggatcactgtgtgtggagactcaggctcaccggcaaacctcttccggttccggtcagggtgctgcctccctatccactgggagtccttttgcgtttcagatgctcccaggctctcccgcagtttaaagacttaactcagcggctttcagggcctgtggttgagggactccgaaagaactgttgctggtggaccggttcagggtcttgacttcgccacacaaaagaacttgagagcacgtccaaagtaaaggtaagcaagggagttgatcgcacagcgaaagcgcactctgccagcgg

SEQ ID NO: 27003 - DNA, 2300 bp, Homo sapien
gtaaggggaaaaaggcaagaaataaggctggagagtggggagggccacagcacacgaggccttccctgcccaccttgcccacatgccccagacgtactgaggagctggatttggtcattgttcttatgagtgctgtgttcccagatttccccttcataatctggcgacatccaccagagccagctcctgtgtccctgatgtgattacccctgactccttcccctcctgacacctgccccaggtactcacacctctaccgatgatgcctcagcctggccctttggctttttgaccttggacccctccccactccctctccacctctctgcttcccacttcccttgtttccagctgctcctttccctgtgagccatattggttccagccccagcctctgcaatagcttccccaaatgaagtgaatccgaggaccacgtaggatgtaagccccgtcaccgtggtgttggttagtgaatgtctctttactgtctatttccccattcagtgcctgtctccccaaccgactgaaagctgcaaaaggacagagtccttcccagggcccagcacaaagcttaacacgcagaacatgcaccataaatgatatccaaccatgaccttcccctcccccaaactgccccacagagcccagtcccacaaagcctgagacaaaggagctgcttttcacacagacagacacagacagactgatggacaagctggaggacccggggacggtgagaaacaggctccaaaagcattctggctgccagtatttaacacacagagctattttcagatgctagtcacagacattttgaactgcattagaataaacagaattctgaattatcttctcagcagtacatgaaagaactgtctatcacccaaaagggaaagagagaatgatgaatttctaaggtaaaaattctggaagagggaggaaaaaaatccaatccacaggcggttctggaatcttctcacacaacaggtggtcccccgccctccagtcccctaactcctgtgattaggagaaagtggaaagctgtcagctagactgggctcaggctgggtatctgggctcttggaaatgtatatttatttgctcatgctaatggtcagcaggccaggataaatggggctggggcattaatgcagagccctgtaaatcatgcatgaaggggaagaccatgcccagcaccgaggggccagccagccgaggaggctgcatgaaatattcagcagccagacagactcaggcctgctccaaatccccacgtccagacctctgaggatgtgatttttgcagaaagctttaaaagaacctcaaatgccttatccttgtgttccccaagtctcctatcaaagctggttcttgctgaatggtgtctctgtgttccgcctctggggcgttggtcatgaggaccccacactgatggttcccctcccctgtgccactgcagcactgctcacccatccggccccgcagcaggctgtggtttccctccctgtcaaccacagggcccttgtacatactttcctgtttcaggaaggtctctgcctggctcatcttgctctccttctcttctttaggtctcaacttggatgctacctctccagagaggcctttgttgcaccacccaccccacccctaagttggccttctgtgcagttctctagctctgtcctctgtcctctttcatgccctatcacagctgtgctcattttgggggcatgctgtcactggctctttgctgtcctcctttaccagaattaatctccatgctagaagaggctctgtgggcccatccttgctgcactgcaaagcagcatctggcatatggcaggactcagcataaagtcaaggagtgaaaaacaggtgcctctcagcaggcatgaggtgagcctggaggttcatccctggactctacatctcctctgcagaaaatgttctgatccttggatatgatcttcaggttccctatccgtgaagtctgtacaaccaataagccaggcaatgatttgatgaataggaatagtaaggtttttttcctgatccattctaactgcagtagccaagttaacatatggcagtgtgctttctcaggacaaacaaacaatgatagattcatacccaagctgagaggggcgaactgtaatgccatccagcttccctcccagtacaacagggccctctggctttgtgtgggtgcttgtggatagacacctcacttccttccaaggtagctggttccacttccagccaacagctcaggctgcctcccagcccagctatcctgcagg

SEQ ID NO: 27004 - DNA, 2300 bp, Homo sapien
ctgaaatccaagtagccagtggagacagcagtgtatgtggttggctaattcctacagtgctcataagttaactaattatttccatggtcattaaatcactcttttccatctgtaaagccctcattcaggcaagtcggggatggggaccaccctctttgctttgcagattttccagccctaatgagcagatcaggccattactgaggcggagatgccatgtgacaactctgcagagcatgaatgatgtcagcatgtgggactcagccggcagggacagcatggcagggaggagcatgctctctcggcccggggacccctgcacattagccaccttcaccactgagtggctgcctgacgttggacgtgtggacttttctggtctcagtgtcctcctctgtgaagagtttagagttcttcactcctagggccgtagcctgcattggatgaatgagctctgtgaggttcgatgcccagcacaagtaggctcaatgcatgctggttgttactctgtttgcggccagaagcacaggagatcccagtgggccccaggaccctgtgagcctttgacagccttgaagaatgtagagggacatcctgtggcagtggaatgggaacacaaggattatacagtaaggatagcaaggggaggtggtgaggccagcctccgtgagaagctgggtaggagtccaatggaagacaagtggaagatggctggatgggtagtatgaagcaaggtcaccagagaaggaggccttcaaatgcaggatgaagactttggcatgggagccgggcaaggtggggtatgcttgtagtcccagcactttgagagacagaggtgggaggatcacttgaggccaagggcctgagaccagcctgggcaagataatgagatcctgtctctctcttaaaaaaaaaaaaaaagaaagaaagaaaaatagtctcaactactcaggaagctgaggtgagaggattcattgagcccagaaggtcaaggctgcagtgatccgtgattgcaccactgcactccagcctgggatacagagcaagaccctgtctcgttaattaatgaacaaataaataaataaatattgtcatggggacaggcaagagagactagttaggaggccattacagtaaaccacaaaccaggggctcaaggctggtccaggaaagcaagatgtgagaggagggaaaggcccaagagctaaggcagtgagcagaagaatgaacctcaattgaaaacctctgtgaagtacggaacatcaacgaaagaagcctttgcatatttgttttgtccccaaagcagacatatacaagagtaccttgactatcaccaaaaagatcgccagtatagaaaatacgtttggctgacgcaactgatggagaaaacccttcaagatgctcatgaactttgctccaaatcttacaacacaactgaagggaaccacaactcaaatggagttatgtaagatttcactgtccatttgtgctttaaatgcattccatcatagaagtcagaaaagctcaaatattttaaaatgtgaagtaatttttttcttcaattttacttcattaatcccttccaaaaagtctactttcaaaggctcaagaaattaggtctcacttttaaagaatggagaaatggcaggattgccttcagaaggctctatggccaaacaccaatactgtcagatatgaaaacactgatgaatcaaagtctgttccaagcatctgccaattttgatgtaaagccctctttctgtactgatgagcctgcttgactgacaatacagtaacttttttttctcaagtgaacgtcttgcaccagcatcttaaaatcgttagaagaaatgggatgaaaatgttcattaaaggtgatgaagaaatttggatgagacctaaaacagccctgataagaggggactgaatcaaaggcatcaaaggtagggcagctgctccctgcaaggttgcagctggaaggcgcctgttcaggtaagagcttaattagagctgtcagtcacactaattgcctgtgattaaatggcgtgagtcagcagagctgggcattggcccagtgatgagcctgcttcatccattgtgaactggggacccgggactgcgaggcttaccagtgacgagcaagcgacacacggtaagcactcccagatccttccatcaacacccatccgaagcacttgctttctccaaacaacagcactttgttttagcatcatcaaatcatgtgctggaaaaaacttccaaatagcccttacttgatgtccatgtttccaaggttgggc

SEQ ID NO: 27005 - DNA, 2300 bp, Homo sapien
tcaaactctaccctttctggaaatcacgctgcagtagactcaagattcattcagtagtagagggagatgtgcttaacacagtgtttggagttcaggacccacctgctcctggaccccagtctccctgccacacactcataccttttctttttcaaattggcgcgctcctcagcgcttcaacagtttcgcagagcacgttggagcaaatgcgggggtctgtgatgcctctccaaagaaataactcgcataatgctcaggcctcctgcagacaaaggtgtatccccagcgacagatattttaagaaaatagaccagggacacaagacaagagagctgtcttggtgtctaaagcagtcttggacagcttctgatgtcgctcgagcagtggtgaagcaccttgaataaggaggaaagcagagggggcgtcttcccaaaggacgggcacatggccgaggaatggaattctctgtccatgaggattttggatggatctgttcatgaaacctcactggctacgcaggaccttcgagtgagtctaaacctccagccatgtcaactggtaacctctccttcttcggctaggtggggagtgggacaaggccataactgataggagtccaggctggggcagattttgtgtctcctgactagttccatagttaagttgcaaaaccgaatctcgccttgtgctctcggatgtagtgcttactctggtcctctggggttatctaaaatctggtttccttaagcgtaaggcagagctctaaccgggagaccaccctgcccccaagggtgggggttctgggagggagagagggaagcggctgctctgtagctttctctactggcttgcccaagtggactctgatcttggagctcaacagtgtcactcaatcttccaccctctcctttgcaacctatttcttaaaccagaactaatgtattctggacacagagtccctgaaaccccagacaaagaaaattcgatgtatctgaacaaacaaaaccgcgtttctttaaatctccaagccaaaaggaaaagtgcagaaacatttactcactgtccgacctgtacatatattttacctgataacccttaaagaagtgccccccagttcagccatcacccatgcagggcaaagggagctggagctggcccagcctgtcggcgcagacactcctgacagctcctgtctgggcacttctttctttcttggagcttctaatttctttcttggcttctgaggcctaacagggtgttttgatgcacacacaggaattactaccgtccccaatcctagggtacatccctagcccaggccagggctttgagttttcctaggagcgggagggtctgcaaagccccacaggctgaaatctcagcgtggccctctgctcatctgctccaggtggaaactctcacccctgagctgcccgacctgggttcaagcccgggtcaggggagttagcaaggagacacctgaaaaataaaaggacagaatggaagtgcacactcccaccgcgggcccgggcgggaagtcggactaagaccgcggcgggaccgccccatccagaaagggtgccccgggtgtgggggcggaaaccccagcgctgtcttcagtctccacacccgcgcctttttcccctggaaaacgagcgtccttggcctcttcggccgcaaccgggcggctccagacgtccaggagggcagaggctgggctggtgcggcgcggggggcgcgggcgcgggctctgcgcctttaaggcccgcgtcggcagagcgagcgcaggggccgggcggcggggcggggcctcggcggggcggccgcggcttcacctgcagctccgagcgcgcggaacagaggcgcgggcggctgcgaggccggcggacgcaccggcccgagggaacgcgccgccggccggacttggcctggctcccggagccggggcggcgagcgcggcgggcgcagcggggctggaggctccgggcaggcgcgggggagcggcggcggcggcggcgatcggagcggcggcggtggtctcggcggcggcggcggcggcggcggcagggagcgggctcccggtgccgggcaccgggcgggcggcggggaagatgaccgcgggcgccggcgtgctccttctgctgctctcgctctccggcgcgctccgggtaagttgccgcctcccgcccccgccgttcggaagccccgggcagcgggaggtcgtccccggatcccgcggggcgctcacacacccggcggggctctcccgggctcccccgccgcgctccccgctgcatcca

SEQ ID NO: 27006 - DNA, 2300 bp, Homo sapien
cagaattaatgcttattgttaattacttttttatggaaacctaaggaaagaaaagcaaaggtctagaggcagccgtggcagggtcccctttaaaacagatgaacccttctcatgagaatatagtgttgcagatacggtgacagggttcagctgtgtccccacccaaatctcaccttgaattttagttcccataatccccacatgtggtgggagggagccggtgagaggtaactgaattatgggggtgatttccccatgctcttctcatgatagtaagttctcaccagatctgatggttttataaggggctttttcccttcgttccacactcattctccttgctgccgccatgtgaagaaggatgtgtttgctttcccttctgccatgattgtaagtttcctgaggcctccccagccatgctgaactgtgagtcaaacctctttcctttataaattacccagtctcaggtaggtattagcagcgtgggaactgactagcgcatatagccagacacgtggatctttttgatgatgtctggaggatactacaacaaatttatgcattcttcctggtcttcccgccttcctgctatgctccagtcttggcgccttggcacttgctgttccttctgcccagaacatgcttccccacccagctccatcctgtgcctcctttgggttttggctcagacaccgccttttaatggggctctcctgacttccagccttaggcttgagctgtgctcttccctccaagatactgggtctcctggcagccatgttccttcctgggaggctgcagctcacgcacctgcattgcatgagtggattttcttcactgctttctcccccaatgagagtggaagaggtgacttttctgctcagtcaaaggtgcatcttcagtgcctggcacacagtaggtcctcgctcaagactcaacagatgaaagcccaaacctgaaatctgaaatcagtgacccagttgagggaccactggactgcatgggtcatgggggcagcaagccagtttgtgctctctggagcctcagagaccctggggttcaaatcctggccgcgccacttgtcctgctgtgggtgagcaactggccttccccgaaccttggttttctcatctgaaaaatgggcctcatattgctcgccttctggggtggccatgatgattaactgagatgagaggcgtggagtttccagaacactgcactgcacatagtaagtgctcaattaatgctagctctgattttcatctcttgtaattctcattttaactcttatttggagataattgtaaacttagaggagttgcaagaataagacaaagaagtctctgattttcttcactgactcatcacctgttatttcccatgggttctatacacaatgtctgctctagtctctctgtctcccctttctctctctcacatctatctcagaatacacacaatattttccctgaatcatttgagaattagttatggatatcacacctgttgcccctagatacttcagcatgtatttcctaagaatgggatatactttaactacaatgcaattactaaattcaggaaatgtaccaatgatacgagattcatatctaatctagatattccagttttgccaactgccccccaaatttttttttgaggcggcgacctcccgctaatcaagatgccatcccagagcagtcattgcatttgctgtcacgccctttcatctctttagtctgaaagattcctgggcctttctttgtcttgcctaacactgctgttcctgcagagcccaggctagttgttttctagaatgcctgcagtttaggcgcggctgatgtttcttgatgacacttttattattttcatcagtgttatcattacagaattgagggcctcattcgaaaagtacaaggccggttttctgggtaaaacactcctctctttagctggccgctcactgtctcggcaccgattttacatggcccattgcttgctggagtgacatgaatggttactatggcgccgttacgcatggggagttccagggaaaatgagcttcttgcctaaaacaagtgcaggaaaatattgagaactatcttgggcctgtcacttggggagcactgtagaaggttctggagaaggcattgagactataattctactttaatgagctgggctacctagattctatggtacagcaagagaagctgtttgtatgcacctgtatgtacgtgccttacttaaaattcagaaagaaaatcttcaggtgccagaattacttgtgaggctggtga

SEQ ID NO: 27007 - DNA, 2300 bp, Homo sapien
ggtgggaggcaggggcagcttcagcaggggtgcgccttcagcgactctcacaggagaggggcagggtggcccatgaaggagccacatcaacctgaggtcaaaaatgttcatccaaagtggacaaaacaatgaaagagccaaccacaaacaagaccaagcctcagatgcagccgggcgtggagtgagcctcagagggcagggacggaacccaccagagactgaagggcagggtggaccagcagagaactctttcctttttcctattttctccaagtttttgctttaaacacttattcattttgtaattagaatatgttttcctaaaaagcccctttagggctcctgaattgtcagcaggttaaatcccaagccccttcccacctccgtctcagtgaacacatgccaagctcttgtcaatggccagacacgccgggcactgtgggggtgatggtgacccgccggggacttgcctcttgggggcatgctggatgggaagaccccactgccctctgatctgctgaattgctgggatgttttccttctagcaccttccaggaattggctgctgggacctctccaagcccctcccacccaccggcctgcctgcttcccatgcctgcctccaacaccagcccctgccacccctgctccctactgggaccccacccccccggccactgtcacctcaggggctgctccagaggtcatgcaccccccaaaacccccagcccaggacctcagcagagcatgctcctccctccttccgtactatggctcctgctatctgtggcctcagcactcgcctttcagccagagccacaccccctcctgaaacaaaagggacctgagtggccgaaacagggagtgacgacccctgcggtgccggcagtaaggtgtggagatacccctttccagaatcgcgtgtggggaggatgtgcagagggagcccccacctcccacccgaccctgggaccagttttcctgtagaacggggactttgccgtctgtgccttagccacaggccagatctcatcgtgtttctcaccctcttctccacgcgtcccagaggccaggcttgctgacgcacccgagggactggctgcggggcaccccacatggcggggtcctccatggaagtgtggtcggagtacccgaggccccttccctactgcaggcactgcccgccaagcttccctggatggctcctccagggctgacactgcgcagcctgggcgtctctgcggtcagtgagggtcgccttttttatgagcatcttgaggtccgttgggctaacacgagtccctcagtggtcatgggagaagcctcaggttctgtcagtgttgcctctcccttttgaataaatttgacgatgctgacttcttgacaccacgtccctgggaagttcccactctccttttcagggacctccaatccgcccctgcaggttggtggatctcccaccatggtgctgcccctagaggtcgctcttggagagctggcttcgtttccatgtcctgctgatcactcccaccccgccctgccatgccattcaccatctctgcagccaagggctgtgccctctttcacccggctgagcgggcagctgtgccgggtgtcggactggggacctccttctgctgggggactctgcagacaagagggggcacgctggatggatgtgcctgagggacaggcaagtgtcaggtggcagagccaggcctcggccctgccctttctcacccacaatgtgaattcatcagcaccctgagtgtgcactcagcaagggctttccaaaggccgaccctcctgacccccctgaccccactgtggctggaggtgtggggagcagcaaggggatacgtggaagacagacctaagccggccagcctcccaggcggggcagcccccagatcagtgcaggaacatttcagcagcgcaggcaggcggcatttccctccaagacaatagccctgtcccagtgaaagacacagagtggagaagcctctcgcgtggtctctgcgtctgggctccttcatctgccgaggccccgctcctcctcctgacgcggctctgcctctcccacgcactggcgctctggctttcttctttctccctctgccttaatgatgctgcccctttcctgttcctggttgaagctgaagcccgcttcccttcgccgcacacaacacaggagcaatcttctcagccgtgcactcacagcttggaaaataaagggaggaaggagtcccagccacagggtagaggaacggcctctccacagagaagctgctgctgctgag

SEQ ID NO: 27008 - DNA, 2300 bp, Homo sapien
tgtcaagattcctgcccatccaatatccactctgatgatttaatttgtggctggggaaaaaagctggtaatgaagtcagtttggaggtgattgatacttcacgaggtccttgaccgatccccaagcctcaccaatgcccccttccagagaagcatatcaccagccctcaacaacactgccccaaggggaaatgtgcatggtgcattatgcaaatgaagcgtttctcctgaggtaattatccctgtgcaattctgacatgaagtcttgataaagaattgttttttaagatagcagtgaaaaagcccagctaaatgcataaaagttatatgacattttacccttgggtgtaaattataatttgcagaaaggtcaatgaaccagaaatgattttttttctgatgatttagacactgagaagcaggagggctggaggcagagggagagcccctggtgtccatcctccaggccggggtgggctcctcttctggagaggactgtccagcagcctggccaaccatgcctggccttaattccatccatttctagtgagttacagcttctgctgaatgcacattagaagatggtgaaagaaagctctgggctttccttagagagcaaagcatgctctcagtgaagggcagcctctggactggacccttctggctgctgagaagagacatactcatcctggaggcattcaattcacctcccgcttcaggtcactgagtcccactgtgcgcttagctcctactctgtgctagagctactggagggtgcaagagtggcaagctacctcgggaggagctcagggcagggagccggggggacacatggtgtggccttggagagctgaaccctcggaacgtcggatctgaccaagcacaatgcccagaaaccaccaggcactcgcctgtagccaacaagtcaggtttaatgactcactggaccaagggaagccaccaagctaatggttactgtctcatgtcaaagggaaataaccacctctacctggcagggtgtttgagacaattcaatgtgatggtacaatgagagaacacgcctccccgacccctacaatccccagcttttagaggcagctgggaggtttagctgaatagggaggagcctgtgtgtatccacggatcagaaaatcacgctggagagaaaagcatgcaagcaaatacacagaacacagacacaagacgatggcttaggaatggcactctgcacccctgcatgctgcacccctgcactgtacacccctactctgtacccctgtactctgcacccctgcacccctacactctgcaccccatacccctccactctgtacccctccactctgcatccctgcacccctacacccctgcattctccaccccttcacccctccactctgcacccctacatcttgcatccctgcacccctacacacttacacttcgcacccctgcacccctacactctgcacccctgcacgtgtcccctgcatcactctcaagttgctgccctgcttcctggtgagtcaagaccaagctgtggaatccggagcaggatggggggccaggaggtgcggcccatagagcacagaactaaacctggctgctgcatccttgagagatggggagacttcagctcctctcaccaccaacgttcgcccaaaacatgagtcaacttacgtgaacatgccctccacccgaaggcaggagggccctgcagacacacgggcgatgctgccaaacagcaggcggcactccccaacccccaccgccgactgccctccactaccgcctccttctccgttactgagacatgggaggaacttgcaagaaggaagacgcccgctcacccatgagcatggtgcaaagtggtaactgcggtgcttaaactctgggagggagcacaccgcaatgtcttatcaccttttctgctgttcacaaaagcaaggtgcttccccaccagccgcgccttcatctcaacagtcagggctgcaaggtttatcttaatttaaaaaacaattacaagcgaaacagaaactgccaggaattatccactcttcagaaggaaagaacaaaaggaagtgacgagagacagggccccatcttgtcgtatgatattaacacggctgctcggaaacacctcgagagagacaccagctttccccacgctcttcctttggtttctcttctggggggacattggatcgcacagctttgcaggtgagcacagcctaaacatagctccatgcgttttgcatccataactctaaaggcttttgtgatttaaagcggcaattatac

SEQ ID NO: 27009 - DNA, 2300 bp, Homo sapien
ggcatggaggtggcacccgcgggcactgaggagaggacggggctccagcaacacccacggcactgccaaagcttgtccgtgggagtgccacactcataactgccaggttctgacttctgtccaccctaggtccactttccctccagacaatggtcagctagactggagaaccatctgcctgcccccttagggaggagctgagcttcagccacatggcccagccctcacctcccccacaccaccccttgccctctcccacacccccctgcccttcccctataaaccctcacagccccccaccctctcccacacctccaccttcccccacaccccttccccacaccccctccccttcccccacaccccctcccccacaccccctcccccctctcccacacccccccccccatctgcccttgggttgggaggagctgaactccagccacgggccctgcccaaccctccgcctcccctgcccacagactgctgctggatttgagtttgccccttcaacactcccacgctccatcttcacaaatgcccttttctactcggaaatgcccttcagttaaatgcagagagcccttattggacacctactttatgcaacgtcctacctccctacctcttcttctgggcctcgctttccgttccatctgatcccggggctgagacaacgcgtcctgcaccctaactctgtgtctgtgacccccagggactccgcgctgctgacaacgaccccacggcacccccctatgactccctgctggtcttcgactacgaggggagcggctccaccgcaggctccgtcagctccctgaactcatccagttccggggaccaagactacgattacctcaacgactgggggcccagattcaagaagctggcggacatgtatggaggtggtgaagaggattgactgacctcgcatcttcggaccgaagtgagagccgtgctcggacgccggaggagcaggactgagcagaggcggccggtcttcccgactccctgcggctgtgtccttagtgctgttaggaggccccccaatccccacgttgagctgtctagcatgagcacccacccccacagcgccctgcacccggccgctgcccagcaccgcgctggctggcactgaaggacagcaagaggcactctgtcttcacttgaatttcctagaacagaagcactgtttttaaaaaaaaaaaaaaaaaaagaagaaagaaagaaaaaaaaaaaaaaaagaaagtgccttttggtatgtatcagattccctcaaactcaggagtgtctaaagcagacagaccgtccccaccttcccatcccgagcggcctccaaccccagctagtcccagctctgaaggcatcattcagaaatgggggagactgtgtctgtctttcttactttttttttggtcttttattaagaaaaagaaagtgggtgacttgtttgaaaacagagtggggttcaaatcccagcagcctttgctgtacacagctgggggtctcttgagcctcttgggagtcaaggccagctgggaggcttagcccttcagccccagcagaaggccctggggctggtggggctcagaatacccctaccttgtggctgctccccacccctcccggatgctgtgaggagctcaggcaggggcctggaggggaacaggggtcatcctgaaggggctccacccccagtcaacccaggcctccctcagggacacctgtcaccctgagtgccaccaggtcccctctgcctttggtccagaagagtgagttgtccaaaccagccagcatctggctccagccctccaaccctggcgaccagaccccatggggtgccatcaacggccccgcgacaggcatcaattcaaaccccaggacactctcgacagctccaaccatccggagggctgtgcagatggcaggaaccaaggaccctccctggcagctgaagagggcagttacggttgggcgtggtgaccagaacacacccagcagcctgcgaagcctccccgtccccagcctgtgctcctgattcccgccagacgcttgtgagcctgtgtgggtggcaggaggccccgtcttgccgtgcctacctgtcgcacagatgcctctgcacgctgcagacggtgcctctcctctcctatggaccctcgtcgggggcaggcagcggccgggtccaaacttgctgctgtcctcgaggctggcactgctatctccagggctgggttgactcaagccagacagggggaaggaattggttctgcaggacagtgagagggtctgtgtcccggcac

SEQ ID NO: 27010 - DNA, 2300 bp, Homo sapien
acagcaccgcatctgactaatttttaaaatattttgtaggaatggggtctcgttatgttgcccaggctggtcttaaactcccagcctcagggaatcctcctgccttggcctcccttttcaaagcattgagattacaggtgtgagttgccgtacctggcctgaattttaaatatttgctgtgtttctttttctgtgagatgtttattctttgctcttttaattgattttttttttttttttgtatttaggaaggtttgtatctgtgtcttcctggttacttttgtacttaaactagtgacgacgccctggtctcctgtctcacaggactgttcacgctgcagtcgagcagtttgcacgggcctggcagctccactgttggccatcggcgtctgtgagccctagtggcttcttcctctgccttttggtgacaggacctccacaggggaggcacactctggtcctcagcctccctctcccgcctccgcctcactcagagcctgaggatgtctcttccctgcagtttcccgcccaatagaggaggctcttcctcccattcctgaggctgtttctgggccctgaccggaggcggcttggctggctcagaagtcttttctgttcttgccttgtgggggacgggtggggaggggggtgcaggctgggaggagccatggaggctgattccttccccttcatgggttctcttctcttcctccccggcagccctgccgtcggctctgagagcccgtagtgtatgaggttgcatctcagagtcccgccgcccactgggccctcgcagtgcattgggtttggtgtctcctctcgggtggggtgtgggtttggtgtctcctctcaggtggggtgtgggtttggtgtctcctctcgggtgggtgtgggtttggtgtctcctctcgggtgggtgtgggtttggtgtctcctctcgggtggggtgtgggtttggtgtctcctctcgggtggggtgtgggtttgttgtctcctctcgggtggatgtgggtttggtgtttcttctcaggtgggtgtgggttttggtgtctcctcttgggtggggtgtgggtttggtgtttcctcttgggtgggtgtgggttttggtgtctcctcttgggtgggtgtaggttgtgtgggttttggtgtctcttccgggtgggtatgggtttggtgtctcctctagggtgggtgtgggtttggtgtttcctcggatggggtgtgggttttggtgtctcctctctggtggggtgtgggtttggtgtttcctctcaggtaggtgtgggtttggtgtttcctctcagtgggtgtgggtttggtgtctcctctcgggtggggtgtgggtttggtgtctcctctcgggtggggtgtgagtttggtgtctcttctagggtgggtatgggtttgatgtctcctctccggtgggtgtgtgttgtgtgggtttggtgtctcctctcgggtggggtgtgggtttggtgtctcctcttgggtggggtgtgggtttgatgtctcctctcgggtggggtgtgagtttggtgtctcctctcgggtgggtgtgggtttgatgtctcctctccggtgggtgtgggttgtgtgggtttggtgtctcctatcgggtggggtgtgggtttaatgtctcctctcgggtggggtgtgagtttggtgtctcctctcgggtgggtgtgggtttgatgtctcctctccggtgggtgtgggttgtgtgggtttggtgtctcctctcgggtgggtgtgggtttggtgtctcctctcgggtggggtgtggtttgctgtcttttgtgaacgtctcctgggtcatggtgtgaatgtcccactctgcctgagggggagattcgcccagctctcatttgccctgttttctcctgacccttttcctcctttctgtgtctcgattctgtcctcttggcttcctgcctttcgtaggttccttactgcattttcaccgcctcccctccctcagactgtttgcagtttattcatttctgagataattttgtctcttccttccattactttcttaagtccagtcaactcttatttccttttggtgttgcatttgtaattttatggtttttataaaaatttgtctcctagtttttgaggttctgatttgaggtgatgattttcatatccttaagtgcacacttaagcagattttcctgtattgagagtgttgttaattttcttgttgttccagggtaggtttttctctgatgtgtgtggagcccccattttttgactcttctctgactttcccgtggctctgggtggctttaccgcct

SEQ ID NO: 27011 - DNA, 2300 bp, Homo sapien
ctgatgacccatcctccattgctcgaatctgctctgaaaactcccctctgtgggaggcttcttgttgacactcacttttggggagtaaagaaaggtgggtttgggtgattgcagggagctggggaccctcccctatgggaggctgcggctgtggagccctgaccgccctgtagccagcctctgcacctgggaggatggagctttcaggagccgttcttctgtttgttgttttgatttctgagagatggggatctgggttgcctgttaggattatttactctggtctctatgtgactttttccatggacttctgaggactggggtctctgcagtgcctggctttgtgaacgtccgtttttgatgcaggtgcaaatcatgccttcctcacccgctcaggactgcgatcgtcagggcacagggcaggcctcccagcagcactcccgtgtccagcgggctggcaggtggccggggtccttggcttcctgggcgtcctggccaccgcagggaggcttgttttcttttgctgggcgtgaggctggtctccccctcgtcagctggtggcgtgagatgcccttaccttgtgtttttggattcttgtagcctcagctcgttctgggtggcgctgcccagacggcttcacttgggacggcgacggctgttcagacggggactcctcagcgcacggtaccaggggcgaccaccacttcctcagctgccacggtaagagccactcctttccgtgccttcaaagacggtcaggcccgtggcgcaggtcagaaaatgcagccttgagacctcaggccggcttctgtcccagaccgctcactgcttgcttcacaaagcagtgaacagtctggggcccacgtgagcacgtggggctctgctgctgtgctgtgtgaggtgggctccgagggccttagaccgcagaagtctgcaaacagcaaaagcccaaacacctgcctttgaaaaagtcactggtgcactgtcgcgttgtatgtaaaacagcagcgccacccgtttgtacacactcgtagtgtcggcctgtatcgatacacatctttattaaaacagaagagtcactggtgaactgttgtgttcagtgtgtaaaacagcagcgccacccgtttgtacacacagtgtcggcctgtatcgatagacatctttaaacagtgggccccacttgacgcctttttggtgtttctttgctgcgtacttttcgttgctttagtgaccgcatcctatttggttccttctgtgtccgtttggattggcataggttgtccttatggtcagcaacattgtagcaggcatcttcgcagagtctcttttcacttttttaattatttgcatagctgcattcctagatgtggccttgcggggctgagggagatgctgacttcggtggccatgtgactgatgtggctggcctgccccatggcccagggttccaagaggtggtgcgttttcttgaaagaagtttagagaagaaatatatgtatcttttgtacatatgcatattttagtaaccaaaggctgtgacaaaaatctgccttttaagatttttcacttatatctttttactttaatccaggaaactatggaaaacgtgaagaaatgtaaaaatttcctatctacgttaataaaactggcttcatctggcaagcagtctacagagacagcagctaatgtgaaagagctcgtgcagaatttactggtgagaaaccttgactttacattccctttcccctaaagcctgttgcataggacagacacctgttgctgctgtgacctgtgcccgggaggcctgtgccagcagggagagctcctctggaaggctgcaggcgaaggggaggggtgcacacgtgtcgaaggcgtgtgtggcctagctaaggagactccttcctggggctgggtgttctggggccggcgcctggaggtctcccgggctttgccgttttctggtgcctgcgtcccttgtctgtggctctcttctcctctggctgccccaaccatgctgcactctggtcagggtctccagcaactcccttctggccctctccccactcctgtgtgacctcttataaaattcccaggtgtccgcagtcccggctggaacaggcattctgcaccctgagccaccagaagccccctccccatggagcagaccagctgaggcacattcgcgctccagtggcagagccgtcccccccacccccacccctcccgaaacctctgtcgcagagaacagcactctgtcccctggccggaaggtgggagggaggattcctggcagcctcccc

SEQ ID NO: 27012 - DNA, 2300 bp, Homo sapien
ctggacggttccccagaagatcctgcgaacacgttggaatgaaagactcctggcggggccttggagaagaggagtcaccactgtgcgtagatggcaggagactcattacagatctcagtggagtagcagcggacttgaagagtggaggcctgagcgtgggaaccttcagttaccccagcctttgggaccctgggggccttggaacctggtctgtttcctgcgagtcctgcgttctgcttctgccccgactccaatctgaggggtctgtgggtatgggctgtgcagtgagcctggtgcgccccaccttgcaagttgtgcgtggggccagttagcctgcctgtgctttgacctgctttaaaaatgttctaattagttgtcaacactcaaaaattaaaaatcccgagatttaatcatcactttatatttctgttctttctggaaaactcagactgtccccctactgagctcaaggtgctccgtaggtgtacccacaggggccctccccgccatactcagcttgcttcattcatttcctttcctgccttctgggagccaaagttcaggtacaaaactccagctgtacgtttgcagtgatttcccccaaacactgttcccctataggggaggcacctctcctaggctccgtcctcaatgctcattggctgctgctgctgtcgagaaacaagcctggggtgaagtcccgtattccagttatcagtaagtccattcctttgcaaggctacagttcgaacaggcacaagggtccagttcgggtctgctttcgagactagcagtctcctttgttaaagcaattaaaaaaatcattttctttgtcagcaacgtcattcatcgtcccgaggtctctgcttattgcggcgctgtcttcagctgcgaagactgaccctgtggcctcttggccccagtgaggtccgaggcaaggaagcgtctctctgaaacctattctgggctcttaggaagaaatgagagaaaggaaaaccactagaaatgtccaataacaccatcttttggttggaaaataaaacacgcagaaagaggggactggaacttttactgaagtatttctagagagaaggtgcttgggaacactttaggtaacttactcccctcccccagcagaaggtaaaaaaagctacttccagacgtgccggcttcaggctcgggaacttcgtttggcgcctggcaagcaccgtgctcttacctacgggcttatacgacactcctgtctccaaggcagctgggtgcggggacagtcagcccggggcggctgggtttattgattaaaaatggagggaagggccaggggtggtcacgattggagggcgagaagagccgtgcgcgcaggacccctccccaccgcccgggaccggctgagccagaggcggacccagcttccccgcggcggcttggaggggccgggcgccggtccccgtccccagggcgcgctgcgacagtcccctccccgttcccgcccgcctcccaggcccatccactccagggcctgcgcgccgcccggcggcgccccggcatccccgcgcgctgttccccgggcctcggacgggccctgcgccgccgctgccaccgcgcacggcgcccgcccggcgctcccgtcagcgccgccgcagccattttggagcgagccgagacaaagagcgaggccccgtcgccgccccgcgcccgcctcggcccggcccagcgcaccgttcccgcatcccgcgccccgcccggcggccccctccccgtccgccaccgccccggcgcccgcgcccctgagctccagcccccgcgcttcccgccgctgctgccgcaccccggccgaccgcccgcgccccggcctctagcgctcgcagccattggccgcgccttttaagcgcgcgccgcagccaatcgccgggcgcccgcggtctccgcgcctgcgcagggccgccacccccgctcccccgccccccggccgcgcgcccccgccccccgccggccgcgcgccgccccccgcccgcccagcgcccgccccagtcggaacctcctcctcgcccaggcgcgctcggcccgagcggcggcggcggcggcggccgaggaaaaaagatggcggcgggctcggatctgctggacgaggtcttcttcaacagcgaggtggacgagaaagtggtgagcgacctggtgggctcgctggagtcgcagctggcggccagcgcggcccaccaccaccacctcgcgccgcgcacgcccgaggtgcgggccgcggccgccggcgcgctcgggaaccatgttgtgagcggcagccc

SEQ ID NO: 27013 - DNA, 2300 bp, Homo sapien
attctagaatgtacaggtcaatcttggcagatgaaactgaattttccctcttctcttctgcttcctgtgtccccttccttaaactcatcactgttctcttactggccattgccgggctctggtgggagcaggttggcttcacctttgtgaagagacaagagacagtgtgatgcggccccaagcctgtggaggatgccaccaggccagactgcaacttctctgcgtgactcccccgtgctgggcctctgtttccccttctgtcaaatggggagtcacagcgtctaccctgcagggcaggtaagatcttcttattatagtcagaaacacattctaggtccttaccaagtccacacttacacaaacaggtgaattaaatatttcacaaaataatacttactttcaccatgcgagatactattattttctttttttcctttagaaatagggtcttgctgccacccctgcgtgcagtagtccaatcacagctcattgcagcctccaactcctgggctcaagtgatcctcccgcctctgcctccacctccccaggagctggaactacaagtatgtgcccccacactcgcccaattttttttaaagttttttttttttttgtagagatggggtctccatatgtcgcccaggctgatctcaaactcctggcctccagtgatcttcccgcttcggcctcccagagtgctgagattacaggcatgagccacccaccacgccatctgatatcttctagcttattctatttcatttttattattatttttcttgagacggggtctagctctgtcgcccaggctggaatgcagtggtgagatctctgctgactgcaatcttcacgtctcaggctcaagcgattctcctgcctcagactcccgagtagctggggattacacgtgtctgtcaccacgcccggctagtttttttgtatttttagagtagagacagggtttcaccattttgcccaggctggtcttgaactcctcacctcaagtgatccgcccgcctccgcctcccaaagtgttgggattacaggcgtgagccaccgcgcccagcctattgcatttttatagtcaccacccactactttttttttccaggacccaatattggtccgtgatctgatgatgttcacggtcaagacggaagcaaaaaaagcacacaccgcgcgccctcggtcactaatcacgcggagtatacgcgaggagggcccgcagctaagcgacggcgggcggccgagcttcctccacggccggggaggtgggcaaggcctccgggccgcagccccgggtacgagcggaggctccgaggcccccggtagccagtcagaatttattttaagggaaatggaaagctgcggcaggctttgggaggaggggcaggattaaaagagaaagtgtgctcagcatgttatatttagaggctgccacgccggaagcgccgccttcccgggagctgccgccgcgcccgccccccgccggcacctgggcactggggcgggagtcccggggctgcccgggaacacccggcgcccagggcctccgccactccccggtcccccatgagggtgagggctataggcgcatctggcccaagataggggagtcgtccggaccccacttctgtaggaggggaaactgaggccaagggggcaaagcccccgtgttcgcggcgcccagggtccggggcggcgccggcacgcgcgcgggcggggcctggcgctcctccccggtcccgcccactgagcgtgcaaaccgcagccgcccgcccacgcgcacgcgcgctcctcccgggccgcttcccacccctccccccgcccgctcagtctcgtgctcccagctccgcgaggggcccgccgggagccggccgagggtggggcggatcgccggggagacccgcccccggccagcggcgccttgctgcgcaggaacgacgcgagggcccgccccccagctggcggcccggccatatttaaaggacggcgggcgcggcgagccaatgggcggcgagcgtgaaggggcggtgcgtggcggtgcgtggcggcgcgaggccccggatgtggctgcggcggcccctcctcccccgcgctcctctcagagccccagtcgcgcgccccttcttggttcgctcggtgcccgcgcaggcccctcgggcggtggcgaggaggcgcccaggcggaggcggcggcgggcggaggagcgcaggagcgggcggccaggccaccgcgcggcggcggagcgggccgcggcccggcgctccttccccaccgcggcccgacgcaccccggcc

SEQ ID NO: 27014 - DNA, 2300 bp, Homo sapien
cccgcttcggcctcccagagtgctgagattacaggcatgagccacccaccacgccatctgatatcttctagcttattctatttcatttttattattatttttcttgagacggggtctagctctgtcgcccaggctggaatgcagtggtgagatctctgctgactgcaatcttcacgtctcaggctcaagcgattctcctgcctcagactcccgagtagctggggattacacgtgtctgtcaccacgcccggctagtttttttgtatttttagagtagagacagggtttcaccattttgcccaggctggtcttgaactcctcacctcaagtgatccgcccgcctccgcctcccaaagtgttgggattacaggcgtgagccaccgcgcccagcctattgcatttttatagtcaccacccactactttttttttccaggacccaatattggtccgtgatctgatgatgttcacggtcaagacggaagcaaaaaaagcacacaccgcgcgccctcggtcactaatcacgcggagtatacgcgaggagggcccgcagctaagcgacggcgggcggccgagcttcctccacggccggggaggtgggcaaggcctccgggccgcagccccgggtacgagcggaggctccgaggcccccggtagccagtcagaatttattttaagggaaatggaaagctgcggcaggctttgggaggaggggcaggattaaaagagaaagtgtgctcagcatgttatatttagaggctgccacgccggaagcgccgccttcccgggagctgccgccgcgcccgccccccgccggcacctgggcactggggcgggagtcccggggctgcccgggaacacccggcgcccagggcctccgccactccccggtcccccatgagggtgagggctataggcgcatctggcccaagataggggagtcgtccggaccccacttctgtaggaggggaaactgaggccaagggggcaaagcccccgtgttcgcggcgcccagggtccggggcggcgccggcacgcgcgcgggcggggcctggcgctcctccccggtcccgcccactgagcgtgcaaaccgcagccgcccgcccacgcgcacgcgcgctcctcccgggccgcttcccacccctccccccgcccgctcagtctcgtgctcccagctccgcgaggggcccgccgggagccggccgagggtggggcggatcgccggggagacccgcccccggccagcggcgccttgctgcgcaggaacgacgcgagggcccgccccccagctggcggcccggccatatttaaaggacggcgggcgcggcgagccaatgggcggcgagcgtgaaggggcggtgcgtggcggtgcgtggcggcgcgaggccccggatgtggctgcggcggcccctcctcccccgcgctcctctcagagccccagtcgcgcgccccttcttggttcgctcggtgcccgcgcaggcccctcgggcggtggcgaggaggcgcccaggcggaggcggcggcgggcggaggagcgcaggagcgggcggccaggccaccgcgcggcggcggagcgggccgcggcccggcgctccttccccaccgcggcccgacgcaccccggccgccgccatgagcggctcctcaggcaccccgtatctgggcagcaagatcagcctcatctccaaggcgcagatccgctacgagggcattctctacaccatcgacaccgacaactccaccgtggcgctcgccaaaggtagcggccgccgcccgcccgagcccgctgacccccgtccgccaacagccccggcctgcggtgccctccccgccccggggcgccccggagcctggcgcccagaccccgcccagaacccacccagggcacacccggcccgagatcccctgcccgcgccttcaccccggacgcccccgaggcgcccccttcccgcgcgccaccctcccccagcgtagccggccgcacaatggtctccctgggctcccagggcggcgggattgtgcgcgggcgcccggcggtgtttggtgaggggcgggcccggcccccgcggtgccgccccctcggccgcccagcccacctctgcaggtgccagctccgaggagcagggcggctcccgtcagcgggcctcctccccgccagcctggggggatccctgcgggggagcctcgaggtcgggtggcggggccagtgtcccggcgtctcccgaaggctgggggtggggtcacaacacgcgaatcctgcaagcctttctggaacttattagacagctggggccttgatcct

SEQ ID NO: 27015 - DNA, 2300 bp, Homo sapien
aacatgacaagagaagagtccagaatgactcctaagtcttttggcctgggcggctgatgggtggagttgctgtttctttgaacacggaagtctgtgggagcagcaggtttccggctgaagaggagctcagggtgggtgtgctgctggagctgttgtctgcgtcggtaggagtgctgggtgggagtgctgggtgcacagttggatgtgggagatagtctcccaccagcagcttgtttgggtggcatgagtgtccatgctgtatccctgtctttcaaactcccaaagcagaagcatcacattccagggaacttgttccatctatcctagcctcctccttgtctaggagggtccacttcatggtccggtctcaggtctcctgggcccctgggcctccccagggctcctctctgtgcccagcgagcaacagcggctgccttggtagccaactagtatcactgcttgcctgtggtgccagagatggtagagatggatcccgatccccggcccactgtggagacagtcctggttggaaacgtggcagggagcacctgcagtgccggagctgggctccagagctgacggggccgccccttccctgtagtggccctggtgagtctgtccctccttccctgggccgctctgaggacgaggcctggccagaagcctgggagtcagtgcctgctacaatcagcatttcctctgtggtttagctccaggcggacgacgtgggccgaagagaggaagctcaacacagagacctttggggtgtcagggaggtttcttcgtggccgcagttctcggggcggattccgaggaggcaggggcaatgggaccacccgtcgcaaccccacttcccacagggccgggactggcagggtgtgagggtgcagccaaaggtgagtggatgaaccttctggacgctttggtgggagggtgtagggtcaggcacacctggagagcttaggaaggtggggagcaggctcggtttcccaggaagaagagaggcccagaggtgtcaaagccaaaccgagggcctcgaccctatgagtcacccgggaggctcttggccaacttcaacctgcatctgtgggggtaggatccaggccccagcatcctccaagtgagattgcaggtatgggaggtgaggtggtgcgggagtcgcgtgggctgggggctcaccacccaggtgaagccagcaagtgagaccttgctccaaagccagtgtcttggcccaacccggccctaagtgaatcagaggcttcatttttaaccaggtcccagtggatttgtgggcaccttagggtttgggcggagcgtcccacatggggtgcctggtgccaaccccacccagcgcctcgggacagccaggtgggccctggaaagactagccctcctgccactagctgcgtccctgtccccagtgtattgtacaagtaggattctcagagtgggttgtgagaagaatgggggtagccagtctgactctgggggcaggagggaggctgagtggctcctgctcgccagcaggggcaacagtgctagcttatcccagcagatgcttgacttcctgtcatctcttgcaggctcctactgaagtggcgcataactgacgctgtgtgtgtcaggacgcgaggaaaacgctgcacttacagggagaggtggtcactttgtttacggagtttggaagagacccatactgctacttgtgttttggacttaactgaacttggacatggtctgagttagaaccacttgttttggggaagtattcatgggtaacctctttgaggtctctttatctgtgtttcctttttagttgcgcatagcctaattctaaggttttggtattttgcaaaaaggtttctatagtgaaagctgaatccttactttgtgacttttttttttttttttaatgacaagctttgacttttaaaagtggaaccaaatctgttggcagaggtggcagccaagtacatctctgtaacccagctggcccctggtgctgttggcctggcaccccactgccaagggtggggtctcaggagtcaggcagggccagcacagggtggcgtggggggcaggggtgggtgggtggagggcacggaaggggttttcccatggatcatgttgtataagtgaaccagaccaccctgatggcatccacagtgatgtcaaggttggggctggccaggggtgggtggactagaagcatttgggagtagtggccaggggccctggacgctagccacggagctgctgcacagagcctggtgtccacaagcttccaggttggggttgga

SEQ ID NO: 27016 - DNA, 2300 bp, Homo sapien
aacggtctgcggcccagtgccgaacggtggcccccggcgaccccctcgcacccagcgcccggccctcgccggagcaccgcctcccacccccggccaccggtggttcggcctgaccccgccccggcgcgcgccatcacgtccgcccgacgccgcctgacgctgcccgtcgccgcctgacgccgcccgtcgccggcagcgcaggacacggcgccgagggtggggcgcgggcgtagtggcgccgggagtcgcgggtgcgcgcgggccgtgagtgtgcgcttttgagagtcgcggcggaaggagcccggccgccgcccgccggcatgagctacgaccgcgccatcaccgtcttctcgcccgacggccacctcttccaagtggagtacgcgcaggaggccgtcaagaagggctcgaccgcggtgaggcggcggggcctgcgcggggccggggacgcgggcggaagtggggctggggagcccagagagggccggggccgggcgcggcgctgtgggcgcccgcgggcgtgcgcggggcagcggcgcgggcggtcagggctgtagctgagcgcgggccccgctgccggtctccacgagtgcctgcagaggcggcgtttggcgtgagccgcgagcgctcgttctccccactcagcgcctcgcttggggcccggcctcgcgtggggccccgggcacgggggccgtgacgacgccatcttgagcacccctggccccggccgggcgcgtgggtcgcgccgccgccccggcgagcagaggccgggcgagggccgctctgggccgcggagcgcggggggtaggccgtgcgctcgctggggggctgttcacgcagccgggtggctggggagcgaactactcaaaccccccttatggggacccccacccgctccggggcaacacttattctctaggcccaggtgggcttcgagaacaaagcggctcgctggcctggccggtggcgggcgcctcccaggtctccgcactctgccgggaggagccttcccggggccgggctgcagccgcccgggtcaggactggtttggacgcggccgtttcgttttgacgagggctcgtgtacattgaccttagtgacattgtttgaaacttaaattcgtaccatcaagacgtgtcagtttaattggtcagtctgtgagatcgttattcttttatcatctggtattcagaggtttgagcaggcagagaaagcagcacacacggttctgtaaattttgatttgttttcattttctgaatctttgttttgaaatgaaggcccagtattcatcaggtgatctaactcagcttaaagaggactaggagtcggctgacccctgtacccaccccaatactgccacccccgccagctggccgccgctggctttaacgaacccatatagcttctctgggcctcgagtcagtcgaaggtcaagtgagtcagtacctgagaaagctcccagaaaacccaaacacttcagatcaatacttctcagccagggatggttttgggcccacacggagccactggcagtgtgtggagacttttccagtggtaagaccttgcagaggtgctcttggcatttggagggtagaggccagggacgctgctcaatatcccacccgtgctcagggcggcaggcacagggagatccccctgcccaggtgctcacagtgctgagctggagaagccctgctctaaaccaggaggcgctgtttatcccaatgatggttccctttgtttctggcttgactcgggttgactgtcagtgattgttcatgcttttaataacagccatatccttctccagcatcagccataaacagtttgggataacacttgacaccttgtccactgacggcaaatcaggccccttctcatggctgtcacatgagtatgtcacagtgcaggaaacagtgcattgtggctcaatataatttcacaactacagaaacactgccttcagaacaccagacttgagtgaaagtctcaggcttccaggctttgcatgggactgattcattgggttgaaaggaaacacatgccgattatataatggttacttactagctatgttgtaactaaaactacatctcagtatttgaaaggcccaggttgggcacctaggtgagcacgcctgggctagctctaccagcagtagatgaatacccctgggtttgcaggatgtggtgccagccacagtgacagacaagtagaggagaaaggggtgtgggtgaacgcaccttccagtgggagctgctacccggagtacgtaccccccaggacccaggttcagat

SEQ ID NO: 27017 - DNA, 2300 bp, Homo sapien
agtctggtgttctgaaggcagtgtttctgtagttgtgaaattatattgagccacaatgcactgtttcctgcactgtgacatactcatgtgacagccatgagaaggggcctgatttgccgtcagtggacaaggtgtcaagtgttatcccaaactgtttatggctgatgctggagaaggatatggctgttattaaaagcatgaacaatcactgacagtcaacccgagtcaagccagaaacaaagggaaccatcattgggataaacagcgcctcctggtttagagcagggcttctccagctcagcactgtgagcacctgggcagggggatctccctgtgcctgccgccctgagcacgggtgggatattgagcagcgtccctggcctctaccctccaaatgccaagagcacctctgcaaggtcttaccactggaaaagtctccacacactgccagtggctccgtgtgggcccaaaaccatccctggctgagaagtattgatctgaagtgtttgggttttctgggagctttctcaggtactgactcacttgaccttcgactgactcgaggcccagagaagctatatgggttcgttaaagccagcggcggccagctggcgggggtggcagtattggggtgggtacaggggtcagccgactcctagtcctctttaagctgagttagatcacctgatgaatactgggccttcatttcaaaacaaagattcagaaaatgaaaacaaatcaaaatttacagaaccgtgtgtgctgctttctctgcctgctcaaacctctgaataccagatgataaaagaataacgatctcacagactgaccaattaaactgacacgtcttgatggtacgaatttaagtttcaaacaatgtcactaaggtcaatgtacacgagccctcgtcaaaacgaaacggccgcgtccaaaccagtcctgacccgggcggctgcagcccggccccgggaaggctcctcccggcagagtgcggagacctgggaggcgcccgccaccggccaggccagcgagccgctttgttctcgaagcccacctgggcctagagaataagtgttgccccggagcgggtgggggtccccataaggggggtttgagtagttcgctccccagccacccggctgcgtgaacagccccccagcgagcgcacggcctaccccccgcgctccgcggcccagagcggccctcgcccggcctctgctcgccggggcggcggcgcgacccacgcgcccggccggggccaggggtgctcaagatggcgtcgtcacggcccccgtgcccggggccccacgcgaggccgggccccaagcgaggcgctgagtggggagaacgagcgctcgcggctcacgccaaacgccgcctctgcaggcactcgtggagaccggcagcggggcccgcgctcagctacagccctgaccgcccgcgccgctgccccgcgcacgcccgcgggcgcccacagcgccgcgcccggccccggccctctctgggctccccagccccacttccgcccgcgtccccggccccgcgcaggccccgccgcctcaccgcggtcgagcccttcttgacggcctcctgcgcgtactccacttggaagaggtggccgtcgggcgagaagacggtgatggcgcggtcgtagctcatgccggcgggcggcggccgggctccttccgccgcgactctcaaaagcgcacactcacggcccgcgcgcacccgcgactcccggcgccactacgcccgcgccccaccctcggcgccgtgtcctgcgctgccggcgacgggcggcgtcaggcggcgacgggcagcgtcaggcggcgtcgggcggacgtgatggcgcgcgccggggcggggtcaggccgaaccaccggtggccgggggtgggaggcggtgctccggcgagggccgggcgctgggtgcgagggggtcgccgggggccaccgttcggcactgggccgcagaccgttctgcagggcggagcggcggcgccgcgggcccggaggcgcggcgacggcgacggggcggacgagcccacgacgcggcgccccccgcgctcccgcccccttccccccctccgcgactgcggataatgagcgcctcgggccgcccagcgcagccggagtatccacctcgatgaccacgggctgagccccgcgccgccaccatgtccgtggccttcgcgtctgcccggccaagaggcaaaggggaggttacgcagcaaaccatccagaaggtgggccgggccggagcggcggcgctgggcggcgggtctgcgggcgggcgcgcgc

SEQ ID NO: 27018 - DNA, 2300 bp, Homo sapien
gttgcagccaaaggtagcttcaggaacaatgactgttaagctccaaaaaaccagagtgccaggagatgctctgggttccaacatttgcctctgagcctagagcttgacctccgcctggccaaatgttcccagatcaaggggcaccaacagagcagaccctggagccaccgtatgggatcgacacctggctgtgccacttaccagcaaggcatttagcccccctaggcctcagtgtccacttaccagcaaggcacggcctccctaggccgcagcctctttagctattaaacgggatgccagtagcttctatgaagaattggatgaatcaagatttataaaacccctagaacagtgtctgggatacggtaagcgccacataagtgtttactaagtaaattaaaatgccacacttgtaaatctgtatttctgctattctcaatctctcctgttcagagttggccaaggttctcatttgttaagaccatcaaatttctaaaactagcaacagcaaaggtagtctcaaaataggcgatagatttaggacaacttccacaggagactggcacgtcatcaaggaataacagcctcagtcaaggtcaaggtgaacccccttagggagacaagcggctcctgggaacctaggaataccactgtttatccctgcaatcccaccagggtgaagacggagtcagagtttaggaaaaaaaaccaatgtcattccaacagatgttgtgacaactgaaacgggtatggctaatgctgattttcttccgaatctgtcttctacagaaaaaacagcagaaaatacaaagtctcaatttcaaaacttagggctttggataacggtgtcccaaacccacataaacgctgtctcttgaaaaccacaaggccgaacttacggagctagaagaaaggttgtggagcaaatccgtcaagtttgttaggcgaggcggctggcgagggtgtcacgctgaaacccggcgtagccgcgaggatacggagggggcggtgcgctccctacggggccgggctgcgtaacgatgccccgcaaatggggatcgggacgcgtccttccgtgcctccatcgttcgcgcctcgctccaggagcaagaggggcagccccggccacagtccccgcggtcgcaagtgcgcccggaggccgacccgggcccctcaccactaaccaaaatgagcgcagaaaacgagtaccgcccgccgtcgccaccgaagctggctgcggagcgcgacaagccctcgccgcggctccggccccgaggggtccccgtgcgcccggcatagcccaggacagttcccagcgcgcgccgcggactcgggggacagcgcgctcgggggccggcagcctccagcgtccgcccggcccccaccgcccagtgccccggcccgagggacccgcgcgccccaacaaagttggcgcaggctctccggggaccgccccccacacggccgggtgcccgccggcgcgcaggcgtgggacgcggggaagggcacggggccgccgtcggggctcgcggccgcccggctgcgccccggctttgttcgcgccccgcgcccgccagctgcccgcgccccgtccccgcgcgcgcccgcccgcagacccgccgcccagcgccgccgctccggcccggcccaccttctggatggtttgctgcgtaacctcccctttgcctcttggccgggcagacgcgaaggccacggacatggtggcggcgcggggctcagcccgtggtcatcgaggtggatactccggctgcgctgggcggcccgaggcgctcattatccgcagtcgcggagggggggaagggggcgggagcgcggggggcgccgcgtcgtgggctcgtccgccccgtcgccgtcgccgcgcctccgggcccgcggcgccgccgctccgccctgcagaacggtctgcggcccagtgccgaacggtggcccccggcgaccccctcgcacccagcgcccggccctcgccggagcaccgcctcccacccccggccaccggtggttcggcctgaccccgccccggcgcgcgccatcacgtccgcccgacgccgcctgacgctgcccgtcgccgcctgacgccgcccgtcgccggcagcgcaggacacggcgccgagggtggggcgcgggcgtagtggcgccgggagtcgcgggtgcgcgcgggccgtgagtgtgcgcttttgagagtcgcggcggaaggagcccggccgccgcccgccggcatgagctacgaccgcgccatcaccgtcttctcgcccgacggccacctcttccaagtggagtac

SEQ ID NO: 27019 - DNA, 2300 bp, Homo sapien
agaccctgtctctgcaaaaaaaatttaaaaattaggcacagtggcacttacctgtagccccagctactcaggaggctgaggcaggaggatctcttaagtacaggaagtcaaggctgtaatgagctgtgattatgtcactgtgctccagcttgggtgacagagtgagactctgtctcaaaaaaaaaaaagaaaaaaaagtgtctctttctctcattctattgctcaggctggagtgcggtggcatattcatagctcatagcagctttgaattcatgggctcaagtgattctcccacctcagcctccaaagtagctgggactataggggtgcgccaccatgcccagctaattcctttggtagagacaggagtcttgctattttgccgaggctggtctcgaactcatggcttcaagagatcttcccgccttggcctcctacagtgctgggattacagccaggaactgctgtgcccagctagctctttttaatccactttgtcaacctctgccttttaattagaatttgtaaacattaactttttttttttttttttttgagatggagtctcgctctgtcttccaggctggagtgcaatgatgcaatctcggctcactgcaacctccgcctccccgttcaagcaattctcctgcctcagcctcctgagtagctgggattacaggcacacgccaccatgcccagctaatttttgtatttttagtagagacggggtttcaccacgttggtcaggctggtctcaaactcctgacctcgtggtccgcccgcttcagcctcccaaagtgctgggattacaggcatgagccaccgcgcccagccaacattaacatttaatgaaattatttatatggttagatttaggtgcacttttattatttgtttcctatttgtcccctctgttttttgtttgtttgttctttttctttggaattgttgggctagttctgagcatttcatttatctgttggcttttcggatctgtgtctttgtgttgtgtcttagtcattgctctggaggttccagtctgcacacctgttagccttcactgtctgctcagagttcatactgtgcccctcacagaaacgtggggaccttgcagtcatctgggtccctcgaatcccctcctgacctttctgttgcctttcatgtggattacttctgtgcgcgttggaagccaactacgcagtatttttttgtctacagtcttacatatttaagaactcctaagaggaaaacaatagtattttatatttaccaattctgttgctctcccttccctcctcaagatccaggcttccctctggtatcattttccttcaacccgaggaactttcttgagcattccttatacagcagctgtattagtgacaaactatgttcgttttctgccatctagaatctttattgcaccttcgtttctgaaagatattttccctgcgtatagaatacctcggtgcctcttttctgacaacacttaaaaatatccctacataatggttaaaagcagggtggatcctggcctagatcctggaccagaagaaggacgctcttgggaaactgctgagccccaagccccacctggagctcagttagtagcggtgcagcggcggcggccgcacaggcacggctgcgggggcactggggaggaagtccgcagggatgcctttgcaccttgtccacaaatctaaaaccatctcaaaatcagctgtcctgtaaaatatatttacaggaagggtatcaaggggagggtgtcccatggagaggtggcccggcacgggaactcagccagtcggagaacagagacccgctaaagaatggggagctctgggagcaggcggggaggtggagctgagggcgggtcacagcaggtaggggttgagcagctccataaatatcttaaagtgcatggaggcccggtttcttataggcggagaatggagttaccaagaccacaagagaaaattagaatgaccccagagtgctgaattgggaatgaggacgtcctgtgcacagctggcctgctgcctcccacgtgtcagggctggctcgggagtcaggagaggctgaggaaccttccagcccaaggagctggacaaggtgtggcagctgcaggcagccgggatagggacgcagactttcctacagggagaggcactgctgagaccggggcccacgtgggaggggctgtcggtcatggccagtctcaatgacaccctggttctggaggggacaccattttctctaggaaacacacatggactgttctgggtgcagggaagtccagt

SEQ ID NO: 27020 - DNA, 2300 bp, Homo sapien
aagagaaaattagaatgaccccagagtgctgaattgggaatgaggacgtcctgtgcacagctggcctgctgcctcccacgtgtcagggctggctcgggagtcaggagaggctgaggaaccttccagcccaaggagctggacaaggtgtggcagctgcaggcagccgggatagggacgcagactttcctacagggagaggcactgctgagaccggggcccacgtgggaggggctgtcggtcatggccagtctcaatgacaccctggttctggaggggacaccattttctctaggaaacacacatggactgttctgggtgcagggaagtccagtcggcgactgactcttaagtgattcaggaggaagttctttgtactcttcttccagcttttctgtaactgtgattgcctcagaattaaagcagaatggccaaggaccccacagagatagtgacccccccaaaggaggtggcaccttttcagaggagtgaggctggggagagggaggcgtccgaggcactgcgagggaggaggcaggcggtgtcccctcgttgtgctcccgctctggccccgtgttgagttttcagccgtccactggggccccttctgtacacatcttttgtagtcaggatggggagcaccttgtaaggtccctcctgtgcgacctgctgaagactggggagctctgggagcaggcaggtatttgtgctcatggtgaagggagaggggctgtcctctcctggagggcagggtcaggacttcctcactgtgcccttggcacctgcaaggtagccggctgtcatgagcggcttgttgaatgagtgacagcttaaatgaggctttgagagtgacagtagctggcacttagagtctgcagctgtgccaaccctgtcgctccggggatatttccacccacactacacatcaggcaccaaatgtgtgggttttccacaccaacaattcgccagtcctctgcagacaccagccaggcatcctgtaattcagttcagtctgaccctgccgcggttatcagggaccccagcgttaggggctcagtcaccccccacttcagatgctaattgcaagtagtgggtccctggggtacccacacttctgtccatcttggctacacattgggagttcctacgaccccttcaggtttgatgatttgcggtagtggctcacagaactcaggaaggcacttggtttgcattgccagtttactataaaggatgccacagcgggcacaggcaggcagctgggtgaggaggggcacgggcgaggcccagagggtcctaagcataggagcctttgtccccagggagttgtgtggctggccttacagcacggggatgagttcaccaaactgaaagctttccagagcccctagttccaggatttccatggaggcctcatcatggagacatgatcagttatgaactcagcctccagcccctctgccctttttggagggtgggggtggggccgaaaggtccaggcttctcatcgtggcttggtctttatgatgaccagccccctcccaaggccatccaggagcccaccaagaggtgcctcattagaacagaagactctcctgtcacctgggaagtccaagggatttaggagctctgtgtcaggcacccctatcgcccctgtcactcaggaaattaccagcgttctgagagctctgtgtcaggagccaggagcaggggccaagtgtgttcttctcattctatcggtgccacagccagggccgcggttgtgcagccgtgtggatcagctcagcccgtcctcacccagccgtgtgaggaggccgaggccacacaggtggatggccttcccttagagttactttccagagcctgggtgcttagccgctatgccccatgtttaatattcttgtgttccaatgtaacaactttaaaattacacaggataacactcttgataacattttaataaatgggtgtttttcttttcaagaaattttgacttgcacttcagatttcctttttaatattttcgttgagcggaaccttgctattccataagaggatgtgtccagtgttgtggaagatttcatgttttaaatcctttgtacagaaatcctgctcccaagtcacagataggctgacgggtcagagggcaagacgtgacccagggccgagagggtgagtgaccaggaaaatcggattcatcagttcacttgtttgtttcagaaacgtgcacaaagacctgctgcatgaggccctcgtcttcagtttctgtttcatgcccagcattaaaccaagtatctcatttt

SEQ ID NO: 27021 - DNA, 2300 bp, Homo sapien
gaacttttccccttgaaaacttttccctggtccaggcagagtccctccacactgggtgagttggggtggggtgcagggaacgtgggggagcctgtatgaggagtagggtttgcaggtggagtgggatgagtacaaccaagcagtcagagagggaagccgaacccctcccccaagagcagactcctagaagccgtgaaatagtgggctgactggggccacgggtctgggggttcctttctgcagtcagccctgaggtggcagcagaggaatcccagctcctccttccccaaagtttctgaagcgccacggggggcgaggggaaggggcaggtccccacagtatggggaagctgctataagtaggggagtgacggtgcatgtcagcgcccggggtcccctctgcagcccctcccccagacacgcgcactctggcctctttgaggcaccagggatgccttcggctgcttccttctcctgtgagcggagttgctgcttccttctcctggggcgcggctccctccctgcctgctgtctgatgtgtgtctcgctcttggtgggtcctcagcctggcgctggtggctgcttccctggcctgtgggtgtctgtgtatctgagtgtgggcatgtctgtctgtctgccctcagtgtttcaggaggaatctgtccttgacccggtgtatctgagcgcatgtgtctggtggtgggggcgctccctcctgccacctctcctctcctcccccgtcccctcccacaggcgctaacacagccaccacctgcgccctgagcgcagtgacctcgtctgtccgctgcagtggcgactgcccctctgtccacaggggtccgtggctgggctccgagcggcttgctgctccctcctcagcctgaggccgccggagcccaggctagacgcgctcccctccggctgggtccgcccggcgcctcatcttcccttatgtaactccacatctgcctgcgccttgcgggtcaccctggaccctgcactgggccctgtccacacggaggctggcacccagggtccgtgcaaacgggaggtggagcggacccctggtctgggcaccggctttccaagaccccctcctccccatcccttctcctccagacgttccttgccccggagacccacattcccaaaacatgcaccgaggaaatgccccgcagggcaagtccccggagcgcgggtgcaggcgtttcccccacccccaccccgggtccccacaggcgccagggctctccatgatgaccgggcaggggtcaccagggccgagggcacgggaaaggccgagcaacccagaccccggctccgagtgcgcgggctgactgaccgcaggcgagcccccagacccggtcaagccccggccgggctcccagccagctgctgtgagcgcaggggctgggctccaggcagcctggcgggcacgcggcgctgtccgtggtgctgccggcgccgggcggggcgggggcggggagggggcggggcgagggcggcagccaatggcgggggcgctgcgcggggcgcgcggggcggtgggctgggcgcggggcgcactcggctgcgcgttgcgctccggctgcacggtcgcaccggcagcggctcaggctccggctcctctcccgctgcagcagccgcgctgccggccccactgggctcggatccggccccggccccctcggcaccgcctgctctggccccggccccggccccgcggaccatgcgctgggcgcccccaggggaacccgacccggccaagggcccgcaaagacgaggctcccgggccggggcccctcccggccgcccagctctcggccggcgccctgccccgcgtcccggagccgcgtgagcctgcggggccatggagcgcgcgccgcccgacgggccgctgaacgcttcgggggcgctggcgggcgaggcggcggcggcgggcggggcgcgcggcttctcggcagcctggaccgcggtgctggccgcgctcatggcgctgctcatcgtggccacggtgctgggcaacgcgctggtcatgctcgccttcgtggccgactcgagcctccgcacccagaacaacttcttcctgctcaacctcgccatctccgacttcctcgtcggtaaatccccagcccctggccgctggggacccaggggcgcccagcgtggccgggccagcggggactggaacacggacctgggtggctcccgcaggcacacgccccaccaggggacccggcctgggaagggggcgtccggagcccatggggtggggggcacaggcgaagttccttgccactc

SEQ ID NO: 27022 - DNA, 2300 bp, Homo sapien
gtgcaggttccgcagggtttcagaacagctgtggggcaggtgtgggctcagctgtccctcctgaggctctggggcagagagaacaccaggaaagctccctctgtctgggtcgtctggctcaggccagcactgcccaggctctccggggctggtcagttcacggggaagcctgggcagctgtggatgacaggggaggaggggtggggagggagaatggctgggcgggcctccagaccccttcatccttggttctgcttgggattccaatttatattccccattccaagatggggacactgaggctccagccagtgaaggagagagccagggccccctcttaacccccacccaatgccatctcctgcagcctcagtgggtatttggggaggagaagggcctggggaggagtcctctcaacaaggagttctggtttgggtggggacagtgagtcaagagctgcagcaggcatgggtggcagctctgatggccccacagccccttgctgcccagctccatggaacttttccccttgaaaacttttccctggtccaggcagagtccctccacactgggtgagttggggtggggtgcagggaacgtgggggagcctgtatgaggagtagggtttgcaggtggagtgggatgagtacaaccaagcagtcagagagggaagccgaacccctcccccaagagcagactcctagaagccgtgaaatagtgggctgactggggccacgggtctgggggttcctttctgcagtcagccctgaggtggcagcagaggaatcccagctcctccttccccaaagtttctgaagcgccacggggggcgaggggaaggggcaggtccccacagtatggggaagctgctataagtaggggagtgacggtgcatgtcagcgcccggggtcccctctgcagcccctcccccagacacgcgcactctggcctctttgaggcaccagggatgccttcggctgcttccttctcctgtgagcggagttgctgcttccttctcctggggcgcggctccctccctgcctgctgtctgatgtgtgtctcgctcttggtgggtcctcagcctggcgctggtggctgcttccctggcctgtgggtgtctgtgtatctgagtgtgggcatgtctgtctgtctgccctcagtgtttcaggaggaatctgtccttgacccggtgtatctgagcgcatgtgtctggtggtgggggcgctccctcctgccacctctcctctcctcccccgtcccctcccacaggcgctaacacagccaccacctgcgccctgagcgcagtgacctcgtctgtccgctgcagtggcgactgcccctctgtccacaggggtccgtggctgggctccgagcggcttgctgctccctcctcagcctgaggccgccggagcccaggctagacgcgctcccctccggctgggtccgcccggcgcctcatcttcccttatgtaactccacatctgcctgcgccttgcgggtcaccctggaccctgcactgggccctgtccacacggaggctggcacccagggtccgtgcaaacgggaggtggagcggacccctggtctgggcaccggctttccaagaccccctcctccccatcccttctcctccagacgttccttgccccggagacccacattcccaaaacatgcaccgaggaaatgccccgcagggcaagtccccggagcgcgggtgcaggcgtttcccccacccccaccccgggtccccacaggcgccagggctctccatgatgaccgggcaggggtcaccagggccgagggcacgggaaaggccgagcaacccagaccccggctccgagtgcgcgggctgactgaccgcaggcgagcccccagacccggtcaagccccggccgggctcccagccagctgctgtgagcgcaggggctgggctccaggcagcctggcgggcacgcggcgctgtccgtggtgctgccggcgccgggcggggcgggggcggggagggggcggggcgagggcggcagccaatggcgggggcgctgcgcggggcgcgcggggcggtgggctgggcgcggggcgcactcggctgcgcgttgcgctccggctgcacggtcgcaccggcagcggctcaggctccggctcctctcccgctgcagcagccgcgctgccggccccactgggctcggatccggccccggccccctcggcaccgcctgctctggccccggccccggccccgcggaccatgcgctgggcgcccccaggggaacccgacccggccaagggcccgcaaagacgag

SEQ ID NO: 27023 - DNA, 2300 bp, Homo sapien
ctcactctcacacacttctcctcaattccacacacacaaacacatacacacttccccattccacactcacacactcacactcaaacacacacatttctccccattccacacacacacaaacacatacacacttccctattccacactcacacactcacaaacacgtacattctccccattccacacacactcacaaacacgtacacttcccccattccacacacacactcactctcacacacttcccccattccacacacacactcacacacacacttccccaattccacacacacacactctcacactcccccattccacacacactctcacacactcccccattccacacacactcactctcacacacttcccccattccacacacactcactctcacacacttccccattccacacacacactcactctcacacttccccattccacacacactcactctcacacacttcccccattccacatacttatgctcacacagtcacacatacacacaaactcacttccatactcacaccctcaacacacccatacacacacactcccaattccacacactcttccactcacacactcacactcattcacttccacacacgcacacactccaattccactcacacacatttccactcacacacactaacactttcacacacgctcactcatacacttcccccaattccacactcttccattcacacacacattcattcacacttccacacacactcccacaatgccacacacacactacacactcacattcacactctcacacacacactctgccacacacacttccactcacacacacaaccagaaaacaagggaacaagctgtcccacctgggctgtccctgggggagcaggggagagtgcctgggaccgaagggctttgtagggcctcacgtagctttgcttggaacccaccaaagtggcatgggtgcgtcctggctgcagctgggaacccgaggtcccgggccagaccaagggcatgagcagggggcagcgccgggccttgatggaggatgatggaggcgcagctcctagacccaggtcagaggctgtctttgcaggacatgatggggccatctggtctctccccaaggccctgagggaatgacggtccacatccccggagtgcttgttaccctggtgcatccccctgaccctcccctacactggccaacctcacctggatctgcctcttcctggcatcccatcatcctctcactttttctggagttgcttagctgatccaagcagagatgggagtgcccaagggatgcacggtgaggtcactgggcgactcctccatcccctgggctctgtgtcccacctatgcagcactggatgagccagtggtggaaagaccctggtggaaacatctggggctccttggtgtgcatcttgagtgcccacctgtgtgctcttctgaagggtgaccccagcccggaatgccctgatgaggagaggagggagtcagagacctgttgggacatgtggccgtcctctccctgtgtggcgaggtgggcagatggctcaggacacttcatttaccaggatggaaactttgcctgcatctgagagtacactggtggtgccatctccttcaggcatggttggatccaggagcccgacggctaccatcaaaactggtgtccccaccctgggctcagcctgctgtcctctcagacagcccttgcccttggcatggcacctccaggctgacatcccagctcagacctggggtccatgaagggcccaagtacgatctgactgattatggctaggcaatgagtgatgcccaggtcccagtcacatgccctatttggggcaagagatgggctcagcctagtaccagcctatgggtagttcccaaagaaggattcagggctgctcctaggagatgtggtggatactgggcagagccccggcaatgcccacatgccctccaaacaactttcccttgctctgccttctctgagcctcaccaagcccccacgaagttgaggctcagagtgcctctgtggcctacttaggacctccatcagcagctaggatctccctcagcacctaggacctccatcagcagctaggacctccatcggcacctaggacctccatcggcacctaggacctccatcggcacctaggacctccatcggcagctaggacctccatcggcagctaggacctccatcggcagcgaagacctccatcagcaaaggctgggtctagacccccatgggctccagattccacccaactcccagc

SEQ ID NO: 27024 - DNA, 2300 bp, Homo sapien
ctgacggcagactacccttgaagctcagttactgcatttgtggagaggggtgaaacccctgctccagcccaggggccatctgagatcacacccccaaccccaaggccagggtggatctccctgcttggccctggggtggtccctgggcagatgagagggtccttctgcctgagcctctgaggctgccctcactgcagagctcgtggtcaaggggtgggtgggcaggttggatcccctcaagggcacaggggttagagtcttagagacttagggtgagggacatggagagtgatgggtttctgggaccctgagctggccctggcaaggcccacagggaaagctgtggagcgcagtcatctccgtggcaactggcctcatcgtccttgtcctggcttgggggccgcacgccttcccttccctttcaccggctggagtcgctttcttcagaggtaaccatggcaacccctttgtttctgaggcctgcccgccctcctccccgttctctcttcaggagaggctcagccagctccttcctggtcccggcacgtctctagtggcgccgactgacagtggcccaccagtgagtggggccagcccctggggtgggggagaacggccctgctgggcccagagatgtggcctgggccccacccctgccacagaggccacgttcattggctcactcatgccctgaaatttatagagagtacccacgtctgccacggggccacagatggggcaaaggcctgtccctgcctccatggccctgctaggggcagcctggaagtggggagacaaggcctgaggagggggtgcagaggcccaacgggggctggctttgctgcaggacgcactgcggggtcacgggtcatctgccagagctctcaaggccacaggaagcccaggactcttggctttacctcaaatgggctgaagcagaaacaagcatgtggttcacgtaactgaaaagtcaaggaaaggacctgctgaggtgcagcagggtccacgtgacccggccgtggttgctccggctttcctctgggctggcttcattctcgtgcagccctgttctcgggtagtgagatgtggaagactggccccttccctctctcacctaacccagctctggagaggtctgtgggcagatgggagagtcatttgacttcagcctcccctccggtctgaactctgaccctacagcaaaagtcccaggactgagcctctttggctagaactgggtcacaggctgacccctaaaccaactgctgtgactatgtagccagcctggtttatgccactccactcacctcaaaccagacccatgacttcaatgagatgttgacaggggaaccctggtttgcagatgaaactgagtgatcacagactcagagaggttaattaatttgtccaaatccacacagctggtaaagaatgcaagctccaggtctgattccagaacttctgggcttaaccctggagccactgtaggtcagtgggagtccaaagggttttaagtatggtggtgaaacggtcggggatgcagctggaggggtaaattggcgctggattttggttggcggtgaatggcatgcaaaggaggtggacgatattcaggatttggtaggacagtggaagcagctacgccccagctatcgcacggtccccagcatttgtaggaaaaagcccccagggctttgggtagcctcgcaggcccgcactgccgccaggacgcagtgcacctgagggcggagcacccacgccccgggccacctgactcactgtttgtcaactctgctctctgcagccacgccctttcctccttgcctccctccccttttggctcaggggcggcataaccccgcctctctcctgctgtgactggctgtccttgccgtcactccgctgcgtgggcggggctctgagggggcacaggtagaggcccttcgcgaagggattagcatagtcccaccccccggcgcgagcctcgggccgggcgctgattgggcaggcagcggccgacgcggcggcgccgggcgcagcgagtggcgggcgcgggctgtcagtcggcgaggcggcgggccgcacttccgcctcggtgtcagtgggtcgcgggcctacggggcgggggcggggcggcagtgagctcggccggcaaccgagggacccgcgtccaggtgagtggcccccgccgccgccacgcgaaggcccgggaccccggcgagctgcggggcctgggccgcgggctggggctggagccggggcggggaggggagggcgggccgggcaggacccgggtccgc

SEQ ID NO: 27025 - DNA, 2300 bp, Homo sapien
ttttataacagacccttttataaaacagcattaagccattcctgagggcagagccctcacagtcccaccacctctcaaaggccccacatcctaacattgtcacatggcagtcagatctcagcatgtgtttggagggacgcacattccaactctacaccccagtctttctgggcaggcagcttccttgctaccatggcaagaggagcccagtcctggattcagccgcgtctcctcaggaagccctggctcctcagtgctctgaagggggaagcacatcgctgcagttgtgaaggggacctgagtgagtgacagcaacttctcccgtctgcaagggcaagcacaccctggccgtgagcagggctgtctgcgccggccttcaggggctgccgcagtctggctgggaaggagggaggaaccgggagacactggagagtctctcaggggacgtggtggctgtcctgttgtctggagggaagcagctgctgctgccccgtgcggctgtggcagggctgcgggatgagccgcttgaggggtcacccagcactgggggccgttctcgccccggcgccctcaccctcagaactgtgcagagagctctgggctggtttttgtatttttgacacaagtaaggatgctgattttggcttccttctcttgtcgttcatcaaacgctgcttttcctgatgggagacactaatgtgcatgagttctagaatattgagctaaggtcgttgtgagaaaatgtaagtttacttcagtttatcctgggagtagctaacttacatagcagcctcaattctctagaattgatgttggtttcaggtagttgtgaaattttagacataattttccatttacttatacagccacttgttccagcctctggtgaatgtttgcaatgattttcagcaaaacttccagagccgtgtttgaacctcggatgctgaacacctcattgaagctcacctgctctctctgactgcccccatgactttttttttttttttttgagatggagtctcgctctgtcgcccaggctggagtgcagtggcgtgatctcggctcactgcaacctctgccttccggattcaagcgattcttctgcctcagcctactgagtagctgggattacaggtgcctgccaccacgcctggctgatttttgtatttatagtagagacagggtttcaccatgttgtccaggctggtctctgaacccctgacctcaagggatccacctcaagggatccaccggcttcggtctcccaaaatgctgggattacaggggtgagccaccacaccctgcgcccatgacttttcccaaattaatgttttattgttttcttacataactgtagataatgcttttaattttattttaattttattttaattatttatttgtttatttatttcgagacagagtctcattttgtcacccaggctgaagtgccgtggcacgatctcagctcactgcgatctctgcctcccgagttcaagagattctcctgcctcaccctcccaagtagctgggactataggcgtgcgccaccacgcctgtataatttttgtatttttagttagagacagggtttcaccgtgttggccaggctggtcccaagctcctggcttcaagtgatccgcccacctcagcctcccaaagtgctgggattacaggcgtgagccaccatgcccagccaataatgctttttagaaacaactcttgttatagggctgaattattggtctgttattcattgattgatcttccgttataaatgctccctctcgtttactttttgaaattatgtttgtgatgtgataatttattttactaatttgcttacatggaatttagattgattttaggatggtgaatgggtatttttaaaatgtttttaaaccgtgaaacttctggaagctaagtatgccaaaatttttttccctttagatcttcagtgtctattggatttttccaagagaaagtttgtaaaattccttacactgtagatgtggatcagatacgatgattcagtagaagagcacatgtcaggggcagtggaggctggctgctgaaggatgaacggagaggaagaattctttgatgccgtcacaggtgagtcaaaagagaaccaactggggacgtactggaagggtgaacgtccctggattcagatgttggacctggcgtttggggtgtaaagatgctcagtaaagcagtgtgtgggtgagcgttcacgatcccaaacacggactgttcagcaaaacctgacatccatctcagaggtgggaaaagccttg

SEQ ID NO: 27026 - DNA, 2300 bp, Homo sapien
caaagtgctgggattacaggcgtgagccaccacgcctggccatgattgagatttttatcaatagtgagcaaatggttgtgggatttggtttgcttcagatggactcttttccagtgtgtaaagagtttaaaagtgcgtgcccatgtttgtcctagaaggtgtgtcagcactgcctgtcagaccattttgggaggatgcgttgttagtagtacaagctttcctgcacttctgtatataaatcactatgcagtttggagaagcaacataaatgtcacagcttcaaattctaatctgttcctggctcatcctggctgggtcagctgctggtccttacccacatgctgcccgtgcgtgaatgccaactttgtgttttttgtctgatttagaagttggctggcactgggcagccgagcacctgttctcaagatgtcattgcctttgagcaagtaggactagtttggacagagtgtggcgtggtgacagcagggtccagcaggcaactgtcggtcttggcacaagctgcagggagcagccctgcttctgcttctgggaaaggggaggctgaggcctggacaagggaaagactggccacgagaaccacttgtgagggagtcttctgttctgaattcatgtagagtgtgcttccttttctagatatttctcttgagcagtattcctgttgctgcctgccagccttctcgtcctctggtcagcgtgctgtgccactgtcagaggcattgacgggattggctcttaaaaaattattaaaatgtcttgaaaaagataaatcaggccgggcgtggtggctcacgcctgtaatcccagcactttgagaggttgaggtaggcagattgcctgaggtcaggagttcgagactagcctggccgacatggtgaaacctcgtttctgctaaaaaatacaaaaaattagccgggcgtggtggcgggtgcctgtaatcccagctactcgggaggctgaggctggagaatcacttgaacctggaggcggaggttgcagtgagccgagatcacgccactgcactccagcctgggcgacagagattttgagattccatctcaaaaaaagaaaaagaaaaagataaatcagaagaggaaagaagttctagatgatagagaagaagccttgtgggtgaaaggaatgcaagccgcctgggctgggtagagcggggcgtgccgccagcacccttccccaggggctgcacccggggccggagctcctgctgcacagccagaagcaagctatgcaccttcgcaacgccgagacacgtcgtctgtcatgagttcacttccagatcgtccttgccagtgtctgccatgtgctgtgtgtctgtgagaccctggcagtctgtcaggttaggggccatggacgtggaccaagtcctttcctgataccctggatccctacagatcccttgttatagctaaaaatacacattcttttctcagacaagtattcattttgtaaattacataccttggtagtcaaccttttaaaatctaatttttcaactttctttcttctgtaatgattggaaattctgattccagttaagttggtaattatgtggtttagcttttctaatttttaatgactacaactgtaggtgtattcacagttccggaacaattaaaagctgacattttgattgaaaaagagagtacactaaaaatcctgttcctggacaggagtattttggggtataagccattccatctcggaaatttcaggggccttgtagaaagacaaggaaggggcacccccttcagaaagggtttagggtcctgagttcctgggcaatgggagtccctcggggttgagggtttggagtcagaggtgtgtaaggattgcttctccacctgcgtctctgggtacctctagccagacactgctgtggctcaggtggagagcaagcggggcatcagggtggaggcctctcctgcaccattgcgctctctgggtgggtcagatgtgctctggaagccatgtgtgtgtgtgtctgttgccagcgttaggccaagtgcgatgtcatgtttgtgtgtgtgtctgttgccaacgttaggccgagtgcgatgtcatgtttgtgtgtgtgtctgttgccagcgttaggccaagtgcgatgtcgtgtttgtgtgtgtgtctgttgccaacattaggccaagtgcgatgtcgtgtttgtgtgtatgtctgttgccaacattaggccaagtgcgatgtcatgtttgtgtgtgtgttgccaacgttaggccaagtgtgatgtcatgtttgtgtgtgtgtctgtt

SEQ ID NO: 27027 - DNA, 2300 bp, Homo sapien
tgaggtaggcagattgcctgaggtcaggagttcgagactagcctggccgacatggtgaaacctcgtttctgctaaaaaatacaaaaaattagccgggcgtggtggcgggtgcctgtaatcccagctactcgggaggctgaggctggagaatcacttgaacctggaggcggaggttgcagtgagccgagatcacgccactgcactccagcctgggcgacagagattttgagattccatctcaaaaaaagaaaaagaaaaagataaatcagaagaggaaagaagttctagatgatagagaagaagccttgtgggtgaaaggaatgcaagccgcctgggctgggtagagcggggcgtgccgccagcacccttccccaggggctgcacccggggccggagctcctgctgcacagccagaagcaagctatgcaccttcgcaacgccgagacacgtcgtctgtcatgagttcacttccagatcgtccttgccagtgtctgccatgtgctgtgtgtctgtgagaccctggcagtctgtcaggttaggggccatggacgtggaccaagtcctttcctgataccctggatccctacagatcccttgttatagctaaaaatacacattcttttctcagacaagtattcattttgtaaattacataccttggtagtcaaccttttaaaatctaatttttcaactttctttcttctgtaatgattggaaattctgattccagttaagttggtaattatgtggtttagcttttctaatttttaatgactacaactgtaggtgtattcacagttccggaacaattaaaagctgacattttgattgaaaaagagagtacactaaaaatcctgttcctggacaggagtattttggggtataagccattccatctcggaaatttcaggggccttgtagaaagacaaggaaggggcacccccttcagaaagggtttagggtcctgagttcctgggcaatgggagtccctcggggttgagggtttggagtcagaggtgtgtaaggattgcttctccacctgcgtctctgggtacctctagccagacactgctgtggctcaggtggagagcaagcggggcatcagggtggaggcctctcctgcaccattgcgctctctgggtgggtcagatgtgctctggaagccatgtgtgtgtgtgtctgttgccagcgttaggccaagtgcgatgtcatgtttgtgtgtgtgtctgttgccaacgttaggccgagtgcgatgtcatgtttgtgtgtgtgtctgttgccagcgttaggccaagtgcgatgtcgtgtttgtgtgtgtgtctgttgccaacattaggccaagtgcgatgtcgtgtttgtgtgtatgtctgttgccaacattaggccaagtgcgatgtcatgtttgtgtgtgtgttgccaacgttaggccaagtgtgatgtcatgtttgtgtgtgtgtctgttgccaacattaggccaagtgcgatgtcatgtttatgtgtgtgttgccaacgttaggccgagtgcgatgtcatgtttgtgtgtgtgtctgttgccaacgttaggccgagtgcgatgtcatgtttgtgtgtgtgtctgttgccaatgttaggccaagtgcgatgtcatgtttgtgtgtgtgttgccaacgttaggccaagtgcaatgtcatgtttgtgtgtgtgtgtctgttgccaacattaggccaagtgcgatgtcatgtttgtgtgtgtgttgccaacgttaggccgagtgcgatgtcatgtttgtgtgtgtgttgccaacgttaggccgagtgcgatatcgtgtttgtgtgtgtgtctgttgccgttaggccgagtgcgatgtcatgtttgtgtgtgtgtttgttgccaacgttaggccaagtgcaatgtcatgtttgtgtgtgtgtgtctgttgccaacgttaggccaagtgcgatgtcatgtttgtgtgtgtgtctgttgccaacgttaggccaagtgcaatgtcggagaggtggtgttgggtgtttccgccacatgttgtggcatggagggcccctgcttcccagcgtcctgtgaggggctccacatgatgtctgagctgccctttcttttattttgctgccattaatgtgtctctcttttttattctttgacctagggaagatttaggattcagatttatatcggaacaggtcagtcaccacccccccatcagtgcgttccactcggaaggtctcaaccatgacttcctgttccatggctccatctaccccaagctcaagttctggggcaaaagcgtggaggcggagccccga

SEQ ID NO: 27028 - DNA, 2300 bp, Homo sapien
acaaaccagagtgggcagaagcatcgagagcgtgacaggaaatcccaagactgcttccgcctcagaggcgtcccggctgcgattcgctgccctgttgtcagtgaggcctggctgtcaccgcacaccgcgtccgtgtctccagggggttcctttcttctcacacgtcgcgtgtacccatagcactcttgtgtttctgtttttcccagtatgcatgtttaaaatagaagtgacaagaatcacatccggttgtgtcctgtgggagggtcagaggcagaatctacttacagtggtgtaattaaagttatttaaccaaaaataggtatgtgtccatctcagcattcacctttatcaagtgactgatttttttttcttttctttccttttttttttttttttgagacggagtttcactcttgttgcccaggctggagtgcaatggcatgatctcggctcaccgcaacctccgcctcccgggttcaagcgattctcctgcctcagcctcccaagtagctgggattacaggcacgcgccaccacacctggctgattttgtatttttagtagacacgggttttcaccatgttggtcaggctggtctcaaactcccgacctcaagtagtctgcctgcctcaacctcccaaagtgctgggattacaggcgtgagccactgcgcctggccgtgactgattttttttcatgtagaattgtcaacacgagagatcacagtggagcactttgaaagaccgtcggttgtgtgcacgcacgcacacactcatgcacacgctgacacgcggttgcatggagtccaggttactcaggccggcacttctgagtgacaggtgccacctgcgtgtgtcttggcgtccacatcacacctgtgacggaagcacttctggaagtgaacactcgttttgaaagcttgattttgtagctttggaagctggaagcgatggtgtttggtgccgagtcctgtgtcatcctcggggcctatgagctccgtaccagccactcaaaagtgtctgaacagaaccgctccgtgactggtagctgggtctgaggattcaggattgtggcgttattcaaagaggagactttgaaattccccgatggctggaatgtggagcccaggtgcctctggtggagggtcatctgcttttccagactgtggttgtgaaccggctccttctccaagaaaggttgcaagctgagaacatccagaggtgagactcagacacattgaaagtgactgcatttagggaggtttaacgagttcttactgatcattccacttgttactggttaagataatttgcccacgggtttgtttccaagtcctcttctaggaccaggctcctggtatttcaggggctggttggctgcacagacagcccctcttctgctgtccttgaggacagacaccaaaccagaggtggaggaagaacggtaggaaggctgatggcaaaagcggctgtgtgtcgaggttattttaactttttactactttttgttactgtttctgcaaatgctaacacataaaccatgacctaacttttgtcaccttggatatctattgaatgttaaacatctctaataaagatggccaccacttaatgtgtggaaagtgatggccttctcgtgggccacgcgtttgggtgtgagtatggccttgaccaagggtcttggtgctttattcacttttagagatagggtcagttgcccaggctcgagtgcagtggtgcagtcatagctcactgcagcctcgacatcctgggctcaagcagtcctccagcctcagcctcccaagtagctaggaccataggcacatgccaccaaacccagctatttttttaaaacaattttgtagagacaggatctcactgtgttgcccaagctggtcttgaactcctgggctcaagcaatcctcctgcctcagcctcccaaagtgctgggattacaggtgtgagccactgtgccaggcccttggttcttttaaaaaattaatcctgtcatgtaggatgtccttacagaatgaaaaacctagcaagcttattccccaacagaacctaataccttggttggattctattgctaattgaaatgagaattcggttctatggtcattggttcagggtgtatgtattgtgagctgctggagacagaacggtgaacaggcatgcctcccggagagccatatgcaaagcacggagagccacatgcaaagcacgtgttggcaacatagcacatgctgctgctcaccaggctcacctgggatgacggtgtggatctgagtcgctggccacg

SEQ ID NO: 27029 - DNA, 2300 bp, Homo sapien
tccaccttttccctgttttacacgagggcacgaggatggggctgcagtatcagtgacgcacctgtcaccagcgggccacagagctttgtgttagcccctctcaagccctttagcttctggaaccgtttaaattcttaaaaattatacaggaccccaaagagcttttgtttatgtgagctttatctattgacatttaccatactaggaattaagaggacatttaaaattatttagctacataaaaataacaataacaaacttactacctgttaacacacattttaaaatgaaaagtggctacattttccaaaacaaaaaacgtgaatctttagctcaatcaatgtttcaaatggaagcattatgacagtcaaaagctggcaactaaacataactggcacaagctctgccaccgagacaatggaggcctgagtagtaggctccctgcagaatgaaaggactggagctgccagcatcaacaccaacgcatctcccaacaagggtgagtgaaaacacacacctaaagacctcagagagcacgtaagcacacagctgtgcatccactctgagggtgagccaccaagcacacggtgaccccggggagcgcccgaagggagtgaagtatctgaaggaaagaaggaagtgagcgatgggcaaaggagaacctgaggaccctggcacagtctcagctgcaaacatctagtcttgcttaactggggtgcagaggccactgcacctcagggttctcacgaagcgcctgacctctctattttattactattattattattattttttttttttgagaaggagtcttcctctgtcgcccaggctggagtgcagtggtgcaatctcggctcactgcaacctccacctcccgggttcaggcgattctcgtgcatcagcctcctgagtagatggaattacaggcatgtgccagcatacctggctaatttttgcatttttagtagagtcggggtttcattcaccatgttgcccaggctggtcttgaactcctggcctcaagtaatccgcccgcctcggcctcccaaagttctgggtttacaggcgtgagccaccgcgcctgagccctctaagagcccccgcctggcgtcgctgtaggcaaatcccaaagaacgtgtcccttcagcagccggctggggcgccacaaacactatctgttgtcttcgctttagtttgtgtcaaagtgactcaaagttacacaacactggcgggcgactgccgcctttttaccctgtggcctttcccatccaggcgtccagagggtgagcccctgccctccaggacccctcccttccaggaccctacccgtctgggactcaggccttccctgactcctccctcccggactcacccctcccagatccctcccctccgggaccctctcccctcccgggccccctcccctccgggaacccctcccctcccggactcacccctcccagatccctcccctccaggagcccctcccctctcgggacccctctcctcccggacccaccccttcctgacccctgccctcccggacccctgcgggactagatgtatacagctgagaccatatcacggttctcaccctcgctctaccctcccggacccctgctctcccggacgcgtggactccagctcccgcctgggtccccaaagcgctgaacccatggtcacttctatgcgtagccctggtgcccgccgcccacagccggaccgcactcctcggcctccgcctaacccctggctcagccacacgagtgacagctctgcccgcccgggcgggcgacgccgaggggtgggctcggccccacctgagcagttccccagcgcccctctgaaacccgcctgtggtccctggcgccgcctctaggggccgccgccgctcccctatgacacagcaacaataggggccgctctggtccaagcgccctgcggcccgcgcttccgccggaaaagagccgccggcgcgggggcggaccggggaggagcgagtgcgatggacggtcgccctcgccaatcgttggcaggttagagccggctgcgcggcttacggggctcaatcggcggcgagagcggcaggcggggcgggccgaacgcgggtttccggcggggcccggcaggcgccgaggaggaagagcgagcccggacggcgcctctcgaacgagtgtgggcgcgaggcaggtgcgggagtcgccgggcctggggcggccgggggcgaccggaggcgggggcaggggctgctggaccaaggatggggcgggggcagccaagacgagaaggtggccggcgcg

SEQ ID NO: 27030 - DNA, 2300 bp, Homo sapien
ctcagccacacgagtgacagctctgcccgcccgggcgggcgacgccgaggggtgggctcggccccacctgagcagttccccagcgcccctctgaaacccgcctgtggtccctggcgccgcctctaggggccgccgccgctcccctatgacacagcaacaataggggccgctctggtccaagcgccctgcggcccgcgcttccgccggaaaagagccgccggcgcgggggcggaccggggaggagcgagtgcgatggacggtcgccctcgccaatcgttggcaggttagagccggctgcgcggcttacggggctcaatcggcggcgagagcggcaggcggggcgggccgaacgcgggtttccggcggggcccggcaggcgccgaggaggaagagcgagcccggacggcgcctctcgaacgagtgtgggcgcgaggcaggtgcgggagtcgccgggcctggggcggccgggggcgaccggaggcgggggcaggggctgctggaccaaggatggggcgggggcagccaagacgagaaggtggccggcgcggcgggtggggcctgcgggggccgggccgggcgggggttctggggtctcgggcgccgccccggttccgcctgcggctctgaacgtggggctcggcgggagctcgggcgggtctgccccgcggagcgggtcgccggggtggcgcgtcgaggctggtgccccgcggagacggcgtcaagcctagggccggccccactaggcttggcggggctgccccggcccagcgccgagtgcgggcggtgcgatcgtcgtgagcggggcaaacgcggaaaggcagcccggcgtgtctgagtctgccttaggcagctctgggcgcaggccccctgctcgcaaacaccccagggggcgggagcttgccggaccgcaggcgacagtgaccgccgcgtctcagcgtcctctccgcgctttcaggatgacgacctcaggcgcgctctttccaagcctggtgccaggctctcggggcgcctccaacaagtacttggtggagtttcgggcgggaaagatgtccctgaaggggaccaccgtgactccggataagcggaaagggctggtgtacattcagcagacggacgactcgcttattcacttctgctggaaggacaggacgtccgggaacgtggaagacgtgagtgtccctgagccgcagcagcaggacaggcgacttctcgggccctcggagtcctcgctttggagttcgcggtgggggcttggccgcatctggggaccgctcgtggggccgtcatcgactgccctgctgatgggtcgtcctggtttccgcggtgacaggggcatctcggccactgtgtatcttgaactgtccgtgtgaggtgcctgggttggaggtgtggccctggagagcccggagctctgtgcctggccttgaactgtccgtgtgaggtgcctggggttggaggtgtggccctggagagcctggagctctgtgcctggcggcttcactcagtcttctttgtttttcaaactcttagttgttctttgttacatttgagagcagttcagcgttgactttttaactactctgggaatgttgtttccagcacgtctcagaaaccccgttgccatctgaaaggcccctttccctgctctctcccccggccttgcctttcatgggctgtctctgaccctggcttctctgccttgtggagaccctgccagcgaggggtctggcggcttagctgccccttgcgcaccccacccggttagacccagggctcagtacgctctcctgagactgggcacagtgatgccatctgcgccactgactctctcttcccctggcttgccaggacttgatcatcttccctgacgactgtgagttcaagcgggtgccgcagtgccccagcgggagggtctacgtgctgaagttcaaggcagggtccaagcggcttttcttctggatgcaggtatggggcaggccttggggttgtgcctttttgttgccctgcgattcggttaggaacttgcttacagtgtggtgcaattggcttttataaaccagcaggcgccggccacacccggccacacggcctgagatgccacctcagggctgcggtgcatgctacctggggccgaggtcctctcccagagtacggaggctccaggctgggctgcgggcaaccgattgcggtgtgaaatttccaggcagacagacatgctggccctggttctaacgatgcccagtgccctctctctgccccttgccgtgggtcactgaggcccccacagcagaggcagaggc

SEQ ID NO: 27031 - DNA, 2300 bp, Homo sapien
cctggcggcttcactcagtcttctttgtttttcaaactcttagttgttctttgttacatttgagagcagttcagcgttgactttttaactactctgggaatgttgtttccagcacgtctcagaaaccccgttgccatctgaaaggcccctttccctgctctctcccccggccttgcctttcatgggctgtctctgaccctggcttctctgccttgtggagaccctgccagcgaggggtctggcggcttagctgccccttgcgcaccccacccggttagacccagggctcagtacgctctcctgagactgggcacagtgatgccatctgcgccactgactctctcttcccctggcttgccaggacttgatcatcttccctgacgactgtgagttcaagcgggtgccgcagtgccccagcgggagggtctacgtgctgaagttcaaggcagggtccaagcggcttttcttctggatgcaggtatggggcaggccttggggttgtgcctttttgttgccctgcgattcggttaggaacttgcttacagtgtggtgcaattggcttttataaaccagcaggcgccggccacacccggccacacggcctgagatgccacctcagggctgcggtgcatgctacctggggccgaggtcctctcccagagtacggaggctccaggctgggctgcgggcaaccgattgcggtgtgaaatttccaggcagacagacatgctggccctggttctaacgatgcccagtgccctctctctgccccttgccgtgggtcactgaggcccccacagcagaggcagaggcccctgtgtggcttccctgctggtgctcacagaaacgaagcatcctgctcacactttccacagtcctgccccttccctggcagtgtgtcctggaggccaggggtgtcagtgcccagggtttctcttacccacagctgcagagcgtcttttgggtctagaggccgctgctcattctgccatctgtcagtgaccattgagcttgttgccgttttttgtgctgttacaggcagtgttgcaaagaatttcccggtacacagatcattttccataagccagtatcatctgtaggtgaaaactggtggcgggcctgtggtcaggaagcgtgtgcatgcgtttgcagtgtggagagagaaggccatgctctctgccagaggtggagctgctgtccccaccccaccccccttggcactttcaagagcaggggtggccctggctgaggtctctgtggagcacatggtctgtgttgctggtcacctgtgcaagtagtgtgcagcggcctgagaaaatgaacaggcatagccaaactccagttaaactttatttgcaaacacagatggcggccacaatttgccacctgctggtgtagaacgtgtttttccacggttttgccaagaaatagtgtccaactgttaccaccatctcccttttttccccgattttcctgttggtggcttttaagtcccccgtccctgctttgccatgagagcagggactcccagtgtccctggcgccctgcagcttccatagccattcggggtgtgcgtgggtgctctgctcccagctctgtgagctcgcaggtcgatgcttctgacactgatctgtgcacatgtgtgtgcacacgcgtgtgctcgattgtgagcgcctgccgtggccctgggccgcggtgtgctgagcgggccagttcgctgccttccactggttgaaggaaggagacgggtgtgtaaagaaccgcaccccagagggcaggagggtgagagggcttggtctggcagcagctaagtgccttcggagctctaggctccccatttgtgaaatgggcggagggggacagggcacacccgggattgcggcggatggggacagggcgcagagcatcgtgctcaggaggcgccactgccgtcccctcacctgctgggccgggtcctgtctcctcagcattgtgtggccaggcacacgcgcctctgcgtctcaggtccctcacctggaagccaggtcagaggatggctgtggtggccctgggtgagctggcgccagctcctgcccttacatgcccttcctcttgcaggaacccaagacagaccaggatgaggagcattgccggaaagtcaacgagtatctgaacaaccccccgatgcctggggcgctgggggccagcggaagcagcggccacgaactctctgcgctaggcggtaactgtcacatgtgtcacgtgagctcagggtttcctgggaggccagagtctactgtggatgactcgccccctcagca

SEQ ID NO: 27032 - DNA, 2300 bp, Homo sapien
tacacagatcattttccataagccagtatcatctgtaggtgaaaactggtggcgggcctgtggtcaggaagcgtgtgcatgcgtttgcagtgtggagagagaaggccatgctctctgccagaggtggagctgctgtccccaccccaccccccttggcactttcaagagcaggggtggccctggctgaggtctctgtggagcacatggtctgtgttgctggtcacctgtgcaagtagtgtgcagcggcctgagaaaatgaacaggcatagccaaactccagttaaactttatttgcaaacacagatggcggccacaatttgccacctgctggtgtagaacgtgtttttccacggttttgccaagaaatagtgtccaactgttaccaccatctcccttttttccccgattttcctgttggtggcttttaagtcccccgtccctgctttgccatgagagcagggactcccagtgtccctggcgccctgcagcttccatagccattcggggtgtgcgtgggtgctctgctcccagctctgtgagctcgcaggtcgatgcttctgacactgatctgtgcacatgtgtgtgcacacgcgtgtgctcgattgtgagcgcctgccgtggccctgggccgcggtgtgctgagcgggccagttcgctgccttccactggttgaaggaaggagacgggtgtgtaaagaaccgcaccccagagggcaggagggtgagagggcttggtctggcagcagctaagtgccttcggagctctaggctccccatttgtgaaatgggcggagggggacagggcacacccgggattgcggcggatggggacagggcgcagagcatcgtgctcaggaggcgccactgccgtcccctcacctgctgggccgggtcctgtctcctcagcattgtgtggccaggcacacgcgcctctgcgtctcaggtccctcacctggaagccaggtcagaggatggctgtggtggccctgggtgagctggcgccagctcctgcccttacatgcccttcctcttgcaggaacccaagacagaccaggatgaggagcattgccggaaagtcaacgagtatctgaacaaccccccgatgcctggggcgctgggggccagcggaagcagcggccacgaactctctgcgctaggcggtaactgtcacatgtgtcacgtgagctcagggtttcctgggaggccagagtctactgtggatgactcgccccctcagcacaggttgtttggaagtggaaatagaagattctaaaagttagagaccctgtgagctccctgggtcactccccactcccaccttcacggggtaggacgggtctgcatcccaccgtcgcctcacttcaagtggtgccccctgtagggttcaggggcagccgagtgcggtgctcagcagaggcgcaggcagtgcggtggggcccgcgtggatctggctggggcaggcccgcctgagctgcagtgttttccaggtgagggtggcctgcagagcctgctgggaaacatgagccacagccagctcatgcagctcatcggaccagccggccttggaggactgggtaacgtgcgccacccgggctctcgggcagcttctgctgggaatgctttgaggcccggtctctgtttcctttaaacttctgctggctctgtctgcgtagtgtcggggagcctgtgtgtccgcaagctggttcccctttgggaatgcgcttgtttgcctgtggctagagctgggtaggcgagggcttctgggcccctggtgaggaccccagctgggtacttcagaggagggtggctggccgagcggtggggctggaggactggagggagctggggttcctgcgccctgggtcccctggccctacatggctgcctgcctgctgccagctcatggagtgcagacccgtgtgcttggcccttcagaaatgcttgtccctttgggtgggatctggactgaatcttctaatctaagcacatgaattgtgtaatgggatggaacagaaatgaccttgcttccagaacacagccgcaagtgtccacccgccccacgccgctcctccaggcctgtgggtccccaccgccccgcttcttcctggctttggtgttgggaattcctgctcctctggcctggggaggggccaggctctttctggtgggctagagggcatcctgagctcgcatttccttgcccctcgcaggtgggctgggggccctgactggacctggcctggccagcttactggggagcagtgggcctccagggagcagctcctcctccaggtgagcctc

SEQ ID NO: 27033 - DNA, 2300 bp, Homo sapien
agggctgcagatagcacagacagccccagccgtcgggagcctggcaagcttggaagtgctttgggtagaaatggagttataggtgggagggctgtaggccttgggggggattggggcacaccctgcaggaagggcacccaggagggcacagtggtcagcgtggctggaaccaaggggctggcaagaccttgggcggtgaggaccagggctcccaccctgagaggcttggagcagaggacgatgtgcctcacccagtttctgagggacccctgtggctgcggactgttcccagcaagcccaggagagatggtgggggccaggtggtgggaggtgacatggggcacatgtccagggaccagctgtggcctgagaggctgggtgcctgtcctggcatggagggggcgtctggtggaggcatttaggatgggtttggattgcactgagcagcggggtgtgagggtctcacacgatccatagggggttggatgtccctgttgctggcccaacagaaagacttggggacatgaagccaggatggtccccgctggcccctgctgagcctgccctctgcccaccacagacgagacaagcaagaagatcgcacatgccaaggctgtggctgctgaagcccaggacaccgccacccgtgtgcagtcccagctgcaggccatgcaggagaatgtggagcggtggcagggccagtacgagggcctgcggggccaggacctgggccaggcagtgcttgacgcaggccactcaggtgcgcccatggccctcgcggtgcccctgatggaggcgggcacggtggggggcaaaggtctcaggtctccctctctgcagtgtccaccctggagaagacgctgccccagctgctggccaagctgagcatcctggagaaccgtggggtgcacaacgccagcctggccctgtccgccagcattggccgcgtgcgagagctcattgcccaggcccggggggctgccagtaaggtgggtgagagtcccaggggaaggtggacatcagggagggtggtggtggacgctgatggaccgtgccccgcaggtcaaggtgcccatgaagttcaacgggcgctcaggggtgcagctgcgcaccccacgggatcttgccgaccttgctgcctacactgccctcaagttctacctgcagggcccagagcctgagcctgggcagggtaccgaggatcgctttgtgatgtacatgggcagccgccaggtaccaggctggctgggtggatgcggcccgagctcaggctctgtttggaaatgagcggtgcctggtccctggtccccggtccccatcccgactgtgtgtctgtcactgccgcaggccactggggactacatgggtgtgtctctgcgtgacaagaaggtgcactgggtgtatcagctgggtgaggcgggccctgcagtcctaagcatcgatgaggacattggggagcagttcgcagctgtcagcctggacaggtgggaggcccaggagagaggccggatgcctccaactgcagggcccttgcccgttcgccatctctcccctctccgtgtgcacccaccacccttcacctctccatgcccactcgccacccctcgcctctccgtgcccactcgccacccctcgtctctgtgcccactcgccacccctcgtctctgtgcccactcgccacccgtctgtgcccactcgccacccctcgtctctgtgcccacccgccacccctcgtctgtgcccactcgccatccctcgtctctccgtgcccactcgccacccctcgtctctgtgcccactcgccacccgtctctgtgcccactcgccacccgtctctccatgcccactcgccacccctcgtctctccgtgcccactcgccacccctcatctctccgtgcccactcgccacccctcatctctccgtgcccactcgccacccctcatctctccgtgcccactcgccacccctcgcctctgccctcaggactctccagtttggccacatgtccgtcacagtggagagacagatgatccaggaaaccaagggtgacacggtggcccctggggcagaggggctgctcaacctgcggccagacgacttcgtcttctacgtcggggggtaccccagtaccttcacggtgagcccgcccggcctggggcagcctgggaggggctccgcagccccgagtcgcttgtgtcctggagagccgcgggttcttttggtatcttgcctcagtccgtcctgctgtagtctgaagtccccttggtccatcctggaggggaggcgcctcaggccagg

SEQ ID NO: 27034 - DNA, 2300 bp, Homo sapien
tcgaggcctccaacgcctacagccgcatcctgcaggccgtgcaggctgccgaggatgctgctggccaggccctgcagcaggcggaccacacgtgggcggtgaggcccctcacttcccctcagccccagcaggagcgcccccactgcctgcacctcccgcagccccggcctgcgtgtctgagccacggtctgccctggcatccacagacggtggtgcggcagggcctggtggaccgagcccagcagctcctggccaacagcactgcactagaagaggccatgctccaggaacagcagaggctgggccttggtgagtgctgggctccgatgggggcccttaggcctgctgggcatctgagctcccagggaccctcagcccccagccacatgcacacgtggggtttgtgggtcaccgcagcatggtttggggtgggagagctttggagatggctccccagctgcttgtgtgtcagccccggggagccctgcaggggagtccagggaggagcagcctcctgcgaggcactggctgccactgaggcaccagctgagccacagggcacagggcaagagatacgtggcctctgctctgctgacccgagggctacacgcgtgccaagctgcgcaatgagaaaggtgtgagctgctaggaccagagggctgtctcttctgagcctctattgtttcatctgtacaatggggacagctatgcctgcagtgggaccagaggccttcagggaacagaggctacgctgagactcaacacctccccacaggctaagggactccatgtctgagtgtccctgtccatctgtctgctgtgtgtcagccttggtcctcctggggtcagaagggtggaggtgggctgcaattgtatactgggggtgaagctgcctgggagctgaagctgcctcccccgcagtgtgggctgccctccagggtgccaggacccagctccgagatgtccgggccaagaaggaccagctggaggcgcacatccaggcggcgcaggccatgcttgccatggacacaggtatgcggagcctgggcccggctctcgcagccggccgaccatgaggctctgtgacagtggcgctggccacatgtggttggtgagcactcactgtgctgtggaagagacccccacagtgggcagctggggccagacacagaaagcctaccagggaggtgccagggctgcagatagcacagacagccccagccgtcgggagcctggcaagcttggaagtgctttgggtagaaatggagttataggtgggagggctgtaggccttgggggggattggggcacaccctgcaggaagggcacccaggagggcacagtggtcagcgtggctggaaccaaggggctggcaagaccttgggcggtgaggaccagggctcccaccctgagaggcttggagcagaggacgatgtgcctcacccagtttctgagggacccctgtggctgcggactgttcccagcaagcccaggagagatggtgggggccaggtggtgggaggtgacatggggcacatgtccagggaccagctgtggcctgagaggctgggtgcctgtcctggcatggagggggcgtctggtggaggcatttaggatgggtttggattgcactgagcagcggggtgtgagggtctcacacgatccatagggggttggatgtccctgttgctggcccaacagaaagacttggggacatgaagccaggatggtccccgctggcccctgctgagcctgccctctgcccaccacagacgagacaagcaagaagatcgcacatgccaaggctgtggctgctgaagcccaggacaccgccacccgtgtgcagtcccagctgcaggccatgcaggagaatgtggagcggtggcagggccagtacgagggcctgcggggccaggacctgggccaggcagtgcttgacgcaggccactcaggtgcgcccatggccctcgcggtgcccctgatggaggcgggcacggtggggggcaaaggtctcaggtctccctctctgcagtgtccaccctggagaagacgctgccccagctgctggccaagctgagcatcctggagaaccgtggggtgcacaacgccagcctggccctgtccgccagcattggccgcgtgcgagagctcattgcccaggcccggggggctgccagtaaggtgggtgagagtcccaggggaaggtggacatcagggagggtggtggtggacgctgatggaccgtgccccgcaggtcaaggtgcccatgaagttcaacgggcgctcaggggtgcagctgc

SEQ ID NO: 27035 - DNA, 2300 bp, Homo sapien
cctctccctgctcacctccccaaccccctgtgtgtagcccggctgggacagcccccccgccctccatacgctcagctcctgccccagctgcctccttcccagtccgtgcaccagcagacacagggtgggggcagagtgtgggctctttacccagcccctgggccacattctcttgtccactgcgctgcccgcctgcctgccagttgctcccggggcagctgtctgccgggaagcagtgagcccggtgattaaccctgctggtgctggcagctccggctgacacagcgcattctcagggccggcccccgctcccctcctggccagtgccgggggacagcggaggcctggcagcttggcctgatctggccgctaggaggcttaaagtgctctccccacccccacctctccccctgccccgccactcgcaatcccacccctccaaccacccgaccctccagggatcccaagaagccctcagggtctcaggagtctccacctccagtcccccaggctgtcagagccccaagctgtcaagggggagcccagagccagagcacactgcctggggccaagcccccacctggggacccgctactgcccagaggccactctctgcctcacacgggatctaaagcagctcagagccggactctgcgcctggactgcagattccttgatgtctccgccccctctccagccagcccctcccccacttggagcttctcctgccaaggggagccgcctcctctcccccctcccccaggtgggagaactaatagtgaagttatggaagaattgccgggccggaaagtaggaggagggagagagggtcccatcgccctcccgactccgtagagaaagggccatacaccctcttgggatttgagatttgcaggaggccagggcgccaggaaggtgtgcaaggaggtgcaccctccagggacagctgctagctcagaacccccaccagaaccggctggccagtgccccacaaacccacccagccccccgggactgtccagggaacccagcgagagatgagccccacagcccatctgggaccatggcccgcccagctggcctggctcagggatgggggtttgctgccagctcggcagctgcagccccaccccgccgccaccccctcggggcttccctggaggcagatttggccccggagcccaagggaagtaggagacccagggccgcagccacccaaaggcagacgaagacctgatctcggcctctaggtcctgtgctgtttgccaggcgtcctcgagccgccgatcgtggcaggaacgcgtgcgcggctgtgcagcgggttggaggccaggccgagagagctggtggagtccaccgggccccggagcacaggtgcttccaggcacccagcaggtgctcagcagctgtgaccagagcccccgacctccttaagagccaatttggcggctgtggggccatgagcaccgcccccgtcctctaaagggggctgcagctgcaggccagtccctcctgcccctatttccctatctgagagtatttttaagccctgctggggcaggcgggagccaggccgagttgaacctgacctggctgccccaggaagcagggggttcccacctaggctgccccgttcctctgcagatggtcattcgcgggtgcagagggcaccttcccgcagccagcaggacggacgctgttgggggaggagcgggggcagccgagtggtgcacccaagttaggggaacaaagagtgggcccctgggctgggaggagctggtgggcgctctgggggccagggcgtcgtggggagcgctagggtcccacccgggacccggagctacgacctgggctgggggcccggcggcgccgtcgtcccacggcctggcccgaggccagcaggtgccccttccgggaggcggccgggccggggtccgaagggttaaggccgcccggccgcccctccccctcctctctccttcccccccccaccccgcctccccggacctctccccggggctcggggctcgggcgctcgggcgggccggggcggggcctgacgtccgcgggcggagcgagccctgccggccgcctggcttcagacccgccgggctcccgccgcgcgcgctgtccctggagctcggggacgcggcccggagccgggaagatggcgaagcggctctgcgcggggagcgcactgtgtgttcgcggcccccggggccccgcgccgctgctgctggtcgggctggcgctgctgggcgcggcgcgggcgcgggaggaggcgggcggcggcttcagcc

SEQ ID NO: 27036 - DNA, 2300 bp, Homo sapien
tgaggcaggagaatcgcttgaacctgggaggtggaggttgcagtgagccaagaccgcaccactgcactccagcctgggagacagagcaagactccgtctcaaacaaacaaacaaacaaacaaacaaacaaacaaaaactaagaatagagctgccataaataaagcaatcccactgctgggcatatacccaaaagaaaggaaatcagtatatgaaagagatacctggccgggtgtggtggctcatgcctgtagtcccagctactgaggaggctgaggcaggagaatcacttgaactctgggggcagaagttgcagtgagccgagatcgcaccactgcactccagcctgggtgacagagcgagactttgtctcaaaaaaaaaagaaagaaaggaagagatacatgtgctacgatgtttatcacagcactattatttgtgggagctaaaaattaaaacaattgaatttgtggagacagacagtagaaagatggttaccagaggctgggaagggtagaacagtgggaggaggggggcaaatggggatggttaatgggtataaaaagacagaaagaataagacctagtgtttgatagcacaacagggtgtctacagtcaataatgatttaattgcacattttaaaatgactaaaagagtatagtattggattatttgtaacgcaaaggataaatgcttgaggtgatggatgctccatataccccatgtgattactacgcactgcatgccggtatgaaaatatctcatgtgccccataaatgtacacacccactatgtacccaaaaaattaaacataaaaaaactttttttttttgagacgcagtcttgctctgtcgcccaggctggagtgcagtggcgggatctcagctcactacaagctccgcctcccgggttcacgccattctcctgcctcagccttccgagtagctgggactacaggcgcctgccaccacgcccagctaattttttgtatttttagtagagatggggtttcaccatgttggccagacgggtctcgaactcctgacctcaggtgatccacccacctccgcccaaagcgctgggattacaggcctgagccaccgcacctggccactgagtcttaagttttctgaggctagttctacatcctaggatcatgtcccccgcccagagaagaccccaacataggccgcgctgctccctccgtctaccggtttggagcttctcctggcaacagggttcaggctactaacaaggccttcctcaagaccccacccataaccaacgaccatacttcgtgggtccatctttgtaacatctttacttccttggagcaaattcccaggaatgggttttcggggtccaagggtatgcacctctagcactacgacaaacgcggccaacacgcttcagggaaacggtgccccagtttgcattctgcttcccctgccctgccctgggggtctgactggtgaaacatgggatggcagagtggtcgggtgtttcagattccacggtgggccggggtcttttcctaccctcgggagccgtctgaatttctcctctgccgagttcctgcgggtgtccttcgcccaccggcccgggggagtgagtagcaggcaccaggtgagcaggcctccgctcgcagcggctacgtgcacgggcaggagcaccgccccacgccccaggtggccgcagggtgaggggaccggagggcgggaggcgcacaatggggggcacgcccgtatctctagcccggccggcagcgggcagcgaggctcagtcctcgccccttctcccagctgctattcggggctcccgaggcgctcagaggggtcgactgcgtccgtggggcacaacccaggggccaggctaagacgccacacacggcaacgaccctcaacgacaacgacccccacgacgccccgcgccccagggccagcaggctggggtccgagaacctccttgccggaagcggaagtgcgtcacggcgacggccggcaagcacgcaccgcgcagactcgctgtggtggcgtgacccggaagcgctcgccgaggcccctccttgcccgccgatatctctgccgggtgactagctgcttcctttctctctcgcgcgcggtgtggtggcagcaggtgtggcgcgcggcgcgggcttcgggctcagggctggggctggggcgggagtgggggcttggacgcgggggacggggtgcggggtgctgggtgcggctggggccgtgaccctaggggccggtttgcgccgggagccggggcacggttccggccgtactcacggcgcc

SEQ ID NO: 27037 - DNA, 2300 bp, Homo sapien
aataaaaaggctactgttgacacgctgagaatgccccatgccaagcctgggggccaagttgctccatttaataaaccacacagcaccctgcagagggccccatcaccattaccaccaccgccatcaccaccgtcatcaccatcaccaccatcgtcaccaccactgccatcaccaccgtcatcaccatcgccaccatcaccaccaccaccaccgccatcaccatcaccaccaccatcaccatcatcaccaccgtcaccaccaccaccatcacatcaccatcaccaccatcatcaccatcaccaccaccaccattaccaccatcaccgtcaccaccaccaccaccatcaccaccgtcataaccaccaccaccaccaccatcaccaccaccaccaccgtcaccaccaccaccaccgtcaccaccaccatcgccatcaccaccatcaccatcactgtcaccaccaccaccaccgccataaccatcaccatcatcaccaccaccgccatcaccactgtcaccaccatcaccaccactaccgtcaccaccatcaccaccaccaccatcaccactgccatcaccatcaccaccaccgccatcaccaccaccaactgctcccttctgggggccaacagccctgcagggcaggcaggatcctcagacgtgccacgccacatcgcccatcattgtcatcgcaattggagtggttttccaatactgcaacgttgtatcaactggcatgggaccttatctcctaagctgtgcttttggaatgccttggtgctcaggcacacattcatggctcccggtataagggagagaacaaagctttggagtccccgacagacctgggttcaagacccagctctgcacttggagttgcgtgaccctgagagttactgaaccacgtcatgtctccgcatcaggatggcctcgcttggtcccgagtgttgagggtctgaggagcagtgggcattgtgccctgaggggtcttcaaggaagtgcgttgtacagtcattcagccaacaaatatttgcctgcacgtttcgcttatgggaaacacctgggagactcctgaagtccaggcaggagggcaggcactaaggacagcagtgagtggggacagaccctgccccatccatggggccggcactctggaaggggaggcagacggcaggtgggtggtgaggcagggatgcctccttcctgtagtgaccagtgccttgagcaagtcacagaatagcaggatccgggcagcctccctcagcgggccacctatgagccaaaaagttcagaaagaggtggccactggaagagcaggaacagaatgttccagacggaggagcagcccccgtgacggcactgaggtgggaggttgtggctggtgcagggagctgcaagccaggggaaggtggcctgagagcaaggggtgcccggtgcccaccccgcctgcccatgccatggtgccccaatgcccagctgtgcttcagggaggggcaggcagcaccagtctcaggcagcgctgggtgggatgggcctgtcagagttggtggtgcccccagcagggtgttgcttggggccgagcgaccctcggtgggcagggcaggttggcgtgctgtgctgtgctgtgctatcctatgcctgaggagcctgtcccccagggctgctggtccccagagaagagctcagtgcctccaaaacaggaacctctcaaggcaggaggtgcccctcctccccgcctcagtctgcatgggctctggaagcccctcggcccatgggtgcgccgctgggctggagagtggcccttccctgcacagcgggcggcactcggtttctggccacaaaggcggcacccgggctggtggcctgttttgaggctccattgtcatcttgcaggaagcgagtcacgtcccagcgctgctccctggagtttctggaagatgccgtgggatgcgctccagcacagaggtacacgcccccgtccgccccgagctctacgactccgctcgggctgccactgacccctgcggggccagagggtcctgggaggaaaagagtgacctgtgtcctttgccttgcagaaccaaacacacatctggatcaccgagacataaaggcctgaagaagacccacttcatcaagaacatgaggcagtacgacaccaggaacagcaggtatgaagcggagccgggaaccgggccagggctgtggtctccataagcccacggggtcctgcccctgtcagccaagcaatcttccctccactcccaaagctcccgcccaccccacactccacacctctaga

SEQ ID NO: 27038 - DNA, 2300 bp, Homo sapien
ggcaggtgacacagaggtgggtgcaaggtcctgagtccctccacaaagatacagcgggttcccctccagactgcagacaggctcccgggctccagaggcaggccctgaccatcccggtgccacgggctcacaggttctgaagtcaggggcacccaggcacagagaggaaacaggcctgggcacaaggcaggctcaaggtcactttgctactgcaggaagtgcaggactctgcctggggctttgatcccaagcaggtgccttctccactcagaccctcgttcccttctgtcaatgaaggaggccagatggcacgcgggcccttccgggaagcggtggggctcctccaggggccgccctgcgcccgctgaagcgccgcccagacacacctccggacagggaagtgtgctggggcctcacccacgccgccctgggtccggagccttaaaatgtgcgctcgatggaggccatccgcgaaggccgccatacagcaaagggaacagaaagcgagagccccgcggccgcaggtcccaagacggggactcgaaccggcggggaggcgcgcagctcccgactccctgctgctgcgtccgaccgcctctaggacccaggggagcgccctgagcgcggcacctcgctggccaatgggagagcgcgacggcgatacatttgcatgtgggcgcgccgcggccaatgggcggcgggcgcgcgggcgcgcgggcagggggtggggcgcttcgcggcggcgggcgcagtctgaggatggccgcggccgcggccggtggagccccgggcccggcccccggccccgccgggcccccgccacccgccgcgccgacctcggccgctcgggccccgccgcaggcgctgcggaggcgcggggactcgcggcgccgccaggccgcgcttttcttcctcaacaacatctccctggacgggcggcccccgagcctgggcccgggcggagagaagcccccgccgccgcccgccgaggcccgcgaaccgccagcgccgccgccgccggagccccccaccgggctgcccgccaggacccccgcgccccagggcctgctcagccccacgcaggtgcccaccggcctcggcctggatgggcagcgccagaggtgagtgggggcccggccaggtcagcccaggacgcggggtacagggacggggacgggggccggatcagcccaggactaggggtcaggattacttggggcctcatcagcccaggacaagggggtcaggtgacctggggccttgtcagccctggacagaggccaggacaaaggggttgggttcacctggggccttgtcagccctggacagaggttcaggtgacctgagcccctgtcaacccaggacacaggggtcagggtcagtctgggccctcatcagcccaggacacaggggttgggttcacctgggaccttgtcagtcctggatacagaactgggggttcctgggctggctgagggtttcctcaggccctgtcaccccccacacatagggttcattgtcccctgaattctcccagcccctgaatacggggtctggatctccacgttgtcagtgctctgaaatgggttttagggttcagcccttattacccctgagacccccagccctgtgggttctggacatgcccccacccccatccactggtaccagtgcccgggacacagggacacatggacagccctgtgcatctcttcgcattctttgaaccgggccacaccgtccatgcccacctcctcagacccagcatgtgggccggggtcctcctggcactgtcactgacacctgttcccagaggcccctgcacagccacatctcccatcccacagccactggtctctggcacccctcctctccctgtcacttccctgctgagccccgcccttccccacatcactctcagctcggtatctttgggtctgtcacaccctgggtctccactgctccccctgccttgattccatttctgggaaccacctcagcccatcccagggcaaccccaaccatgagccctgcctgtccagcgtgtgccccctgcccagatggcccctggctgcccgacaccctgtgtccttctcccagagaccacaggacctgggtgaccctgcctcccacagccctcacctccaggagtgactgtgggctctgggcccaggactggctgcttgttgcggttccttctcaaagggagccactgtccacaggtccaagtgcctgctgggcggctgttcccagaggcagcccctgcaggtgtgcagcaaaggggccgacacagagctctt

SEQ ID NO: 27039 - DNA, 2300 bp, Homo sapien
cctctgcagccaaagcaccaaggtgagctgggcatttaaaaccacgcatcacagggatggcaggacacgggccaacgactgggctgggtgaggcctgggccagactggggtgcgggcctgactcagggggcactgcctcccacctgcagcctgtgacatgtctgcctgttgtcctgagaggccagagggactgaactcccaagagggaagtccaggtgtgttaaaggttgctttaatttctccagaatcacacgaaacaaaagccgtgtgttccctacacactgcccgcaggccaggttggcttttggccacccatcgacaccctggggaggggagaagactggcagcgggagcctagcaagggggttcaccagacccaggaagagaccccgttccttcctcagcattcctccttgtccctcaaagtctagcttagcgccagcaaagaagaactggctaggggcccccctactgcacagccgatccccaggacccggcgctgcagccagcacggacagctgcctcctgcctcctgcgtcctgccctccaccctcactcgcccctttctgttctcatctgacaccagattctctgcaagctgctggtgtatggcccaccctcccctgtcaggcccctcctcctggtgatagccagcagggatggagggcccactgtgtgcctgccccagcctcagcaccctacagcgctggacacactcactccccgctcacgggagcccccaggcacacaagtcagcaccccattctgtggatccagaatccgcagccacccctctgctatgccacccagccccgcgttctcctagacaggacagctgcccaccttcccctaggcctggcagaggccttggaggccaacttggaagggcggagggaaaggaaatggaggtgctgcatgctgcgtgagccccaatggtggcccgtgaaggcccacaggagggagcaggcaggcgggaggtgggtaggggcctgaagggcaggggcccatgctaggggtggtgatgaagaccctgtcttgcccactcgcccactgccttgttggccatcatgctgcctccccacacaccaggtgctcctagggccagcgctgtgcctgtcggtcccaccgggtccccagcacccagcacaggagaggctgggcgcatgcgggcaggtgcgaggtactgcagcgcattcgcggactgaccactgcatgtgcctggcctccggccacagcccgaccccctcactgagccagtttcatcctgacagtaccctgaggctgaaatcattgtcccctctttaaagatacgtaaacccatgaaagaaagctggacagagcaggcaggtgacacagaggtgggtgcaaggtcctgagtccctccacaaagatacagcgggttcccctccagactgcagacaggctcccgggctccagaggcaggccctgaccatcccggtgccacgggctcacaggttctgaagtcaggggcacccaggcacagagaggaaacaggcctgggcacaaggcaggctcaaggtcactttgctactgcaggaagtgcaggactctgcctggggctttgatcccaagcaggtgccttctccactcagaccctcgttcccttctgtcaatgaaggaggccagatggcacgcgggcccttccgggaagcggtggggctcctccaggggccgccctgcgcccgctgaagcgccgcccagacacacctccggacagggaagtgtgctggggcctcacccacgccgccctgggtccggagccttaaaatgtgcgctcgatggaggccatccgcgaaggccgccatacagcaaagggaacagaaagcgagagccccgcggccgcaggtcccaagacggggactcgaaccggcggggaggcgcgcagctcccgactccctgctgctgcgtccgaccgcctctaggacccaggggagcgccctgagcgcggcacctcgctggccaatgggagagcgcgacggcgatacatttgcatgtgggcgcgccgcggccaatgggcggcgggcgcgcgggcgcgcgggcagggggtggggcgcttcgcggcggcgggcgcagtctgaggatggccgcggccgcggccggtggagccccgggcccggcccccggccccgccgggcccccgccacccgccgcgccgacctcggccgctcgggccccgccgcaggcgctgcggaggcgcggggactcgcggcgccgccaggccgcgcttttcttcctcaacaacatctccctggacgggcggcccccgagcctgggcccgg

SEQ ID NO: 27040 - DNA, 2300 bp, Homo sapien
gggacacctagcccacggggtgggaagaggcctggggctctacggaatagtttgcaaagggcaggggcacttcccagcagtggggcagtgagtgtcccaggccctctgtggcttccgtgccatccctcacaccccctgcgtccccatccctgcaggctgcgggccggcctgtgcgaccgctgcatggtcacccaggagctggccaggaagcggcagcaggagttcgagagctcccacctgcagaacctgcagcgcatcttcatcctcagtgagccccacccaccagacaaccggggtcctctcccacggggccaggcgaccccaggcctgttcagcccatgtaggggcatggggaaaggaggcaggacgatcggccccacaccactgggggaacctcacaacccaatctacagacaaacacacaaagcccccagccggcgctggtgtggccctccctcaacacagcctccctcccctgggctgggggcatcccggcccccactgggcgcggcctccttcctgagatgcggaaggtcctgcagtgctgaggccccagtggccctcctgatgaccaagggcaagcccccttccctcgaggccggcactgctcattcaacagcatccaatcagccatgcacgcagccagcatccacggcgcccctgctgcctgccaggccctgggctacgtgctgggggcactgctgaggggcttccctggtgctgtgacgaccccacccctgcccctgtcccccccaacccctggctgctttgctcatcagtgccttttgcagccaacgagatgaacgggctgaaggaagagaacgagaccttgaaggaggaggtgaagcggcttcggggcctggggtgagtgggaaagggtcccagggctcagacacccaactccccagcaccccccgagcagcacccagcacacgtccctgggggaaccgcccatggaggactctcaggcagtgtcgggacagctgcgtcacctggggtcacccaggagtgggcccggcttttctgatcatctcccgagatgctgctctccctcaccctccctgtctctgcctcccctctagagacaggcccaagccccgggccaaggagggcacctcggaccccccctcacccctgctgctcccctcccctggtggctggaaggccatcacagagaagccaccgggaggccacgaggaggctgaggaagaccaccagggcgtgggcctacggggagaaggtgctgtggggaccgggtgaggctgggaggctgggcccccgcaggaccagggatcctccccctggggctgggccgctgcccctctgagcacctcccaagctcttgcccctggcttctcctcccacagaaaagccagcagggcacaggacatctccagtggccaaaatctccccaggggccaccctgcctgagtcgcgagccccagacatggtaagggcagggaccgggagcccaccatgtgcagctgggccggcgcaggcaggaggctggaggcagctgcactttcagtatgccagcctctcatgcgcctaaccctgaatgtgcccctcctttgtcccgggcaggagccactgcgctccatttggcgtgggtgggggtgcagctcagcagtgagcaggggcagagtgggagcagcccagggcaggcagcagaggctatggcagaggccacagcagaggccacgcatgcccccgcccaggctgacccacccatcctcacagagcccccagcgcatctccaaccagctgcacgggaccattgccgtggtgcggcctgggtcccaggcttgccctgccgaccgaggccccgccaatgggacgcccccaccactgcccgccaggagcagcccacccagcccagcgtatgagcgtggcctctccctggacaggtgcccgcctgccccaccctcacccagagtagcctcagatgagctcttctctcagcccctggtcccagggcagtccctctgattatccctcacagccctgaacttctctggcttggctttttctgggcacccagcctggagcaaagttcccacgtggacacctccagagtggccaggcctggggcgtgggggcaggggatgtggacattgtctgagaacaagtagggtgtggagggtggacaggtggctaggaccctccaggtgaggagcagggggccgatgtccctgccaagaagacacggaggcctcggcatctggccccaccttggagcccagaccacaggccacctctggccaggtccacacagcatggcctccagagctgggggctga

SEQ ID NO: 27041 - DNA, 2300 bp, Homo sapien
caggacagacatcacagaggagcgtgcagatgactggggggggtgcgtggacgggacagacgtcacagaggagcgtgcagatgactggggggggtggtgcgtggacggaacagacgtcacagaggagcgtgcagatgactgggggggcgttgcgtggacgggacagacgtcacagaggagcgtgcagatgactgggggggctgcgtggacgggacagacgtcacagaggagcgtgcagatgactgggaggggggcaccgggttaggcgttgcccccagaccaaggctgcaggtgccgaatcgcgctgcccccccaggctggatggtggggacagcgtgtggcttcctggatggaacaggaccccactttagctgtttcccaccacagggacgcccagaggatcgaggagctcttctccaagaaccaccagctccgggaacagcagaagacactgaaggagaacctgcgggtgctggagaacaggtgggcctgggaggacacctcgcagcatggccaggaccggtgggctcaggagaggaggaggtgacagggctcctcggagaatgagtttgggaaactccaggataaactgaaccaggaaggtttccccactgcaggacatctcagagccttaaggaaattgcattttcaagatttctccccaaactcagtggaacatgggacacctagcccacggggtgggaagaggcctggggctctacggaatagtttgcaaagggcaggggcacttcccagcagtggggcagtgagtgtcccaggccctctgtggcttccgtgccatccctcacaccccctgcgtccccatccctgcaggctgcgggccggcctgtgcgaccgctgcatggtcacccaggagctggccaggaagcggcagcaggagttcgagagctcccacctgcagaacctgcagcgcatcttcatcctcagtgagccccacccaccagacaaccggggtcctctcccacggggccaggcgaccccaggcctgttcagcccatgtaggggcatggggaaaggaggcaggacgatcggccccacaccactgggggaacctcacaacccaatctacagacaaacacacaaagcccccagccggcgctggtgtggccctccctcaacacagcctccctcccctgggctgggggcatcccggcccccactgggcgcggcctccttcctgagatgcggaaggtcctgcagtgctgaggccccagtggccctcctgatgaccaagggcaagcccccttccctcgaggccggcactgctcattcaacagcatccaatcagccatgcacgcagccagcatccacggcgcccctgctgcctgccaggccctgggctacgtgctgggggcactgctgaggggcttccctggtgctgtgacgaccccacccctgcccctgtcccccccaacccctggctgctttgctcatcagtgccttttgcagccaacgagatgaacgggctgaaggaagagaacgagaccttgaaggaggaggtgaagcggcttcggggcctggggtgagtgggaaagggtcccagggctcagacacccaactccccagcaccccccgagcagcacccagcacacgtccctgggggaaccgcccatggaggactctcaggcagtgtcgggacagctgcgtcacctggggtcacccaggagtgggcccggcttttctgatcatctcccgagatgctgctctccctcaccctccctgtctctgcctcccctctagagacaggcccaagccccgggccaaggagggcacctcggaccccccctcacccctgctgctcccctcccctggtggctggaaggccatcacagagaagccaccgggaggccacgaggaggctgaggaagaccaccagggcgtgggcctacggggagaaggtgctgtggggaccgggtgaggctgggaggctgggcccccgcaggaccagggatcctccccctggggctgggccgctgcccctctgagcacctcccaagctcttgcccctggcttctcctcccacagaaaagccagcagggcacaggacatctccagtggccaaaatctccccaggggccaccctgcctgagtcgcgagccccagacatggtaagggcagggaccgggagcccaccatgtgcagctgggccggcgcaggcaggaggctggaggcagctgcactttcagtatgccagcctctcatgcgcctaaccctgaatgtgcccctcctttgtcccgggcaggagccactgcgctccatttggcgtgggtgggggtgca

SEQ ID NO: 27042 - DNA, 2300 bp, Homo sapien
tgctggcctggggttgccaccttctccctggggacccagccacaggcacaacctgcacgggcacctctgtcctgtatcaccaaggcctggacatggcggggtggggtccctggccaatgagccagggcaggcaggcacgaaaactggctcagtccaggaggtcgcttggctttgctcagggaggaactcaaggtcgagccggtggtgttagacagcagctttgattgaaacagccatgcatggcagatgcagagggacccctccttgtgaggcagggctccccacaggcagtgagcccagagctcacattcatacctggaggctgcaagttcaaaatcaaggcaccaacttgttccacgtccggagaggactcacttcccggttcatagacggcaccatctcgggtcctcacatggtggaaggggcaagggacctccctggagccgcttgtagaaggacactgatcccccagcagagctgcagcctcacgaacttgccatctcccagaagccccgcctcctaacatcattgcctggggcgttaggatttcaacgagaatctggggtagacacaaaaaacatccagaccacagcacaaagcagctacacatgtccacgcacacatgtgcacacacacacgtgcaacacatgcacacacaggcacacacatgtaagacatgcacacacattcgtatccccacacacacacacacacacacgtgcacacagtccccacacaggcacacacaaaacacacgccagcagcaagcagaccccactcacaaagggcccagccaggaacagggaggtggccggaggaggggcctccacgaagttcccaggccagccagagctggagtggcccatgctgaccacaaccccctcccaagagcctggtcctgagtgggagggcatcgtggggccagagatgacccagccctcatcccaaacccagagctggccaccagccaccagcaggggccctgccagggagcaggaagtccgtcctcccctcgcggcagcggctacaggccaggctcccaggcttcctcctctgagccccgtgcattcctggggtactcgggtgcgctggggatcatggccccaaggactcgggaacccccgctctgcttccgtgcagagctaagacaggctgaggatgaggcagaggcggaggtggaggcggggaggagggagtggggaggggtcgtgggtaggacacagggggcaaggcatgagggggtcagggctgtaccccgcagccacagtgttgctgtccagggaacacacacgagaccacagtgtgaggctgctccagcacctgggccgtgccacccggggccaggccagcccccagcctatttgcccccctgggctccacctggccgggggcacccagcctacctggagactggagaagcccactcacaagcactcacagaccccgggcagactgcgcagaccagaggcccagcatgcgcccagtccccctcaagcagaaggcctgcttccccaggcagggcggggcaggctgggcgggtcgcttcccatagcagctgctggatttctgtccactgggttctggcagggacagctcttgagcttattatccccaatttacagacagggaaaccgaggccagaaaggggactgtcacctacctatggtcagcccacggtgagctgagctgtgaacagcaggaaggaccactctgtgtcagaggccctaccacctgtcccgaggtggcgagacagcacatttgctcactcccacctgcagcccccgacccaggcacccctgcaagccccccacccttccccgcccgggccctccgtgtcacaggcaccaaactggattctcagtgctaaccagcttggctcctgcagcccagcctcacagtgattatgaggaaacaatcccaactctatgtggcttcagacccaacctgtccggccactttctgcgagatggcagaacccgcctggcggctcagggcagtctctgcctcctttctgctcctggctgggagaatcgaaaacctgtcaagcgggtttggccaaaatcctgtcttgttgcctgtgcaggttcacagcccgctcacttctctctccctgtgaagagcgtgggggactccgcgcagaggtcgacagaggttgaggcagggccaggagccatgtgagtacccgggaccccggggccaggccacccaagtagccgggtgagctgggatccctggctggggtgctcaccagggaggctggaggcccagcttggactcctgcgaggagagccgcgggggtg

SEQ ID NO: 27043 - DNA, 2300 bp, Homo sapien
gctggtaaaggggtaacggaaggtcgcctagctccctaccccaatggcagccgacccccaccccagcctgccgcgctgcaccctctcctgcacaggcctgaacctgctgcggaaccgtctgtggggtcccaagtccaccacagaccaggggcttcagcctgctgccttcccagacgcagggaccctggacgcctccacaagcaccctgaatccttatctgctgtgggcgaagaggaaaggccaggaataagggcgcatgtggggcaccccagctcttcccagacggacagcgccggctgtccagacccccgtgggggggatccagtgacacccaccccgacggccccacatcgccgccttcctgccttcccaggtcttcacccttcaccagcgtcctctccgagccctgactgacaggagttgagggcccgtttctgcaaggaagaactttcatgcggtggctcccgcctgtaatcccagcactttgggaggctgaggcgggcggatcatctgaggtcaggagctcgatgagaccagcctgaccaacatggtgaaaccccgtctctactaaaaatacaaaaattagccgggtgtggtggcgggtgcctgtagtcctagctactcaggaagctgaggcaggagaatcgcttgaacctgggaggcggtgagctgagatcgcgccgctgcactccagcctgggagacagagcgagactccgcaaaaggaaggaagggagggagggagggagggagggagggagggaggaaagaaagaaagaaagaaagaaagaaagaaagaaagaaagaaagaaagaaaggaaggaaggaaggaaggaaggaaggaaggaagaaagaaaaaagaactttcatggccaccacgcctgggtccacccggtgtgctccgagaaagaaagaaagaaagaaagaaagaaaagaaagaaagaaagaaagaaagaaagaaagaaagaaagaaggaaggaaggaaggaaggaaggaaggaaggaaggaaggaaagaaagaaagaaagaaagaaaggaaggaagaaagaaaaaagaactttcatggccgccaagcctgggtccacccggtgtgctccgagaaagaaaaaagaaagaaagaaagaaaagaaagaaagaaagaaagaaagaaagaaagaaagaaagaaagaaagaaagaaagaaagaaaaaaagaaaaaaagaactttcatggccgccaagcctgggtccacccggtgtgctccgagcccgccgttccgtttcccgcaacctgcggagctgctccgcggcagcggcgcctccatgcagccctcaccgggagtgcgagcgggacacggttccctgacctgggtcgcctcctacccacacgcatttctggcgcctggaggaaactcttcccgagtccccgagagccggctgagagccccaccggggttggggccttcgagcctggcacccagatcgggccttagaggctggaccctgcccacctcccactgggaccccgagccttgtggccccgcttgctcagaaaccgaggaaatcgcggggctcccgccagtgcaccccgtcccagtccagcgacccgagccggccgtccctatggaagccggttccctgcaccgagccccgggtgcggccacgcaacgagggggcccacggggttccaccgccgcgtgtccatcggtgagcggggccgggatcaccgactcagccaccagacacggagcccgtctttaggccagccttcggcgggggccggggcagggaggcagagggctcgggactcgcacaaacttggagaagtctctgcgcccgactccccggggcccacgaagccctcggcccgcccgtctagctgcactggtccgggctccgcgctggccgccccgtgtcgtgcgtccttgtcgccaagccccgcgagcagggcctgccagggtcacgtggctctacggccggagccccagcgctgaccctgcggggaagaaggggcgggcgcggggagggaaggggcggcgcggcgggggcgggccggggcggcgcggagggggctgcggagcctcagcggcccgggcttccagtcttcggcccgccggtcgccgacccaccgccaccgccgtgccctgccgccctccctgcccgctggtgagtgctccagcccgggctgcagccgcgcgcccctccccacccggcccctcccagcgcggcggggccccgctctccaggccctgcgtcctgcggccgcgccaggcccgtccttcccaggcccccaccgagctcaccccggggacctccgaagcccgg

SEQ ID NO: 27044 - DNA, 2300 bp, Homo sapien
atgctctcctcttagggatgccttgagtgcagcatagagcccctgcagaagcttctggaacaccaggcagcctaagtgctgtgtgccggctgttactgtgaggctggtgctatgggtaaacgggggaactgctctgtcttctggctctgtcctacggcctgggggctgtcagatctggccacccacaccagcccttctcctggaaggagatggccctgtgcccgtgccctggtccgtgggtgtggggctgccgtgaggagggtgatttatggccacgtctgctgcataccctctctctcaccaccacaaagcacccgcatcctttacagagccgcctgcccaggcctgcagactgctccccacctcccccattgtggctgtctatgcccctgaccccagctgcaggcctggcctgcccccctcaaccctgcctggagacggcaggcaggaggaagtgggctgcaggggaggggccttgcagggggagtttggacaccacacctcacaccacgctctcccgctgccagtgggaagccgagtggctatttagtttccagaaaagtgctcagaccaggtagaagcttaaaacctcctggcctcctttatggtgagacatggggtctttagcggggcgtacagggctgggagaagggcctggcatcactcaagaagcctctgcactgggcaggtgcagggggcgtccctctgtccctcgctgtcgctggccggaggacaccagagtgggtgtcggcgtgtgtggcgagtgtggctggggctccggcttctccccatgactctgcagagccggccttgggatgtggggaaggggccgtgagcccaggaggtgaacctggaggagagccctgcctcagctcctgtgggccagcctggggggtgtgcaggctcctcaggggctcccctgggattagatgcagctgagcctgttctgagcggcatagactccccggccctgtgtccctaactggccagaaccacaaggggatgccttcctaagtccgggaggcactggggacatttatgaggtggcttctgaacaggaggacctatgctctggacaggactcacaaataccaaagctcattgtccccatcacacgggcctgtgcctgccaccaacgagcggggtccccggaccactgtggtccactgtcattccacgacctggtccccagtcctgtggggccccagagagatgggacgaccagccagcgtcacacagcctgtgaggacagtctgccagttcaggcctctggtctctgcgtccaggccctgcaaggacagatccccgtcaggccccgtcccaggccctcgtctgttacataattcgggcgtgaaatcccggaagggggagctcctgagcccgtccagcacccgggattggggtctccccatcacacacccttggtggcagggcctggctgggggcggcaagcaggttgaccttgcctctgtccaaggcgactggcatttgtcatgacttggggttggcttgagagtctccggaaacccaggtggctctgtcaccacctgatcctggccccaattctaggcaaaagggcagagccgatgggactgtggagggggccacccactcctggtggcctgggtgggctcagcccactggaggctcagagcagcgaaggaggccgtaccattctgcccgccccccccacccccggccctgcagcctgggagatgcccgggtctccccagggcaccctaggagccggctggcatggcatggaggctgctgcccggctactgaggaggcgcctctgtactggctgggctaaaaatagcggggggatctcgggcagggacagccggtgggaggcctgtcagggaggggccgggaggggcaggacagcagcctgagcccgggacccgccgtcaatggcgtgggtgctcccaccctgttcccggtggccgggccagccgcggcccagctgacaggctattttttcccctgcttgactaaatatggtcagggagcgcagcccgagggggccacttggccagggccgcgtgtttgggatgcttggccgggtatataagaactgcaaaggtgaggccggctcctgacccgaggggggcccccacgcccgctctggcctctcaggtcaggccctcccctcccctcccctcccctcccccgcccctgtgtctccgcgagccggctgtgtgcctgcgagagcgtgcacacccgcgggaccttcccttttgttccaccctgacctctaccttctctaccttgtgctgaccccgctggggtgcaggggt

SEQ ID NO: 27045 - DNA, 2300 bp, Homo sapien
ggctgcctcccgggaccccgtatccatgaggaagggctcagcacctctctccgaagatgcaggcgagaaagacgatgcttggaggagtccaggttcccagagggtggtcaggatctcctgagaggccgtccactaggggggcaactccctaggtgcctcagcctggccacagcagacacccagtgggcgagggagcgtcgctcccccggttctctccctccttctctcgctcttcttcaccctctcccccgtccccgcctcgcagcgtcaccaccctgaaccgccgcgcagtgcggcccacctgaagcggcagctgcgcagagccagcagcttacatgggcaccgggggtcagcagccaccgtcacctgcccagcgccactgccgtggcacccccgggaggctggtcccacacctggctctttgtggccagccgcccagcctccaccagcccctgatcaataccaatttacagtcaaatgcagggggccgccttcctgttaatgaatttcccggtgctcaccagctcctaatgagcctgttaaagagggtttaagtaaacttagcgagtggcaaactaagcactttggaatacttaattgtatcgatatgtttttcattgcgtttaaaaatgtctctgagtgggaagcagaggctgcctccttccctgccaacttctatgaccagccgtgaagccagactctgaaaaatgtggagaaagagccagaaggagaccaatgggacctcaaggttaggccctcaccagcaggaagggaagccgccccgaacctgctgggagcggggagaggaggaggaggaggaggaggaggcctgcagggtttcgaggcctcgcagtggcccagggcgagcctggcacgtgcggtggtgagaggtggaaagaaggctttgcaggtgcctgggggggacgggggccagggaggcgccagttgggggtgcaggccgggcacagacacaggaggcttgctaagcggtggggtccagctgggccctggcccctgtcctgccactgaccctggcgtggggtgggacagcagccccgggacatgaaaggacctcccgttgtcctcatcaggaagagaggtccaacatgactctgttgctcctccaggcagcccgtccatgcgaggggacagcccggagcgagttggttctctcttaccacccagggcagggcaatgtctccgcagagcctgcagtgtgcagaggccactgagcatgctgtggctgtgtggcagtgggtctgcagctgggcatggctgggttggagtttcacgtgggggtgggtgggggcggggggtgggggttgtgcttaaggctctggaggcatcccctctacaaaggaaggagcaaatggcagacagaagcagaagctgatgtcccatttccacgtagctgctgtgatttatcattttcacgtagccaaggatacaaaaagggcacccgacaccgcagcctgagcttcaacttcgggggcacctgggttccgccgctcatctgtgccctcccaagacctccgcaataaccgtccccggagtccagggaaaaggcctcctcaacgtccccagctccctggcacatgagctctcagagcctgggacactcccgcagcctggctcaagcccccacgacctgtgaggcattcatctggacggggtctgggggtcaaggggaaagctgggagtcccaaagggcaggagagtcaccccagacccagccagagtccacaggacttctgcccactcacaaatgaattgtagtcacttttcaaaaagtttcccgtctgcatagaaaaagagcacccagccgcctccaagcagaccccaccgtgagccgagctggctcctgtgcccggggcctcctccggggctcttcagcggtgaataccgcccggcccccggcatcagcgccgcgggaggccacgcgggaagtcaagctccccagcagggacctgcacagacgccgaccaccagggctgctctccccgaagcccccctagtctccgcccacatgtgccccccgccccccacctcgccgccctgcccctgtaaacgcctcctgaccctgacgtggctgggagagctgcagaagtgccgagtcccggccgggggcagcctcgccgccgctcagctcgggaatccctgccccccaccagcacctcagtgggggatactgcaagttcaaggtaagtttagccccacgcccggctgccggggctttgttgcggagcggcaggtgaatcgcgcccccagcccagccccgaagcccccatgccatccactgc

SEQ ID NO: 27046 - DNA, 2300 bp, Homo sapien
ccccaccacgcagggcctggagttgggccagacctgcagacccccttgatggcctgcggcaggacccttcacctgggtcaaggcctcctggtgctcctaggggcctcttgaggagcctgggcaccagcatttgcctttgaggacaggactgagggcctgcattttgcacgaatgtacctgaaatgtttgctctggatttacctttccaatggtgcctatgcaggaatcccaaagaatgcctggtggggtctgaggcgggtctcaggccgggagccctccacaggcagcaatatttggctagaatttaatgccattttgtttctttttatctatttttatggtgacctctttgtggtaattgacactgactttttaaaaaataaacttacccttttaatcaaatgtgtgaattgtttaaaggaaaaacattgtgtaaataatgttttcagggggtagaatccagacgtgagttttggaaacagagtccagtcctgcttctgacatttgaattgcttctccagcatcatcaccagaagatgggctacctgtgctcacaagcctcctgtaacacggagctcaccacctctcaaaggcaccttctgtcaggtctgcctggaaatgctgctcccgcagactccgcacctgaggccaggtctgcagcgaagctcatccacacctgaggccaggtctgcagcgaagctcagcccccttccttcacaggagaaatacttctgggtgtgcaccttccactcctggcagggccgtgagcccctgtggcagtgcctcaccctctgggagggaccctctccatctgggaacaatgtgggtacttttttctcttaaagggcagtgtcaggaatgaaagcagatacccaaaagcagtgggtctcgtggcctcgtgtctgcttccagaagtggagggcggcctgggacggcgggagccctgaggacaccaccgggggggtcccgggacctgatacgagtgggcaggagccccaagccctggaggaaggaaaaccatttcataaataactgcatggggttgtgggccttttctcacaagccgcagcacctccttcgtctctccacggtgaacccgcccgccacgctatgccaccaggccaggtcctgcagcaccgcctccgtggctaggacttcctcaccagcctggggccgtgaggtggtcatttccccccttacctgacttatctcaggattcacacacacacacttgactttcggaaacttcttttaaattaatttcactgacactaaaagggaagctttgtggagtgtgattgtggttacctgttaatacttggcaacaattatgagccctgatatgagccaacttcttccgtcttatcccctttgaggacgctctgttatcgcccccattttgcaaacgaggaaactgaggctcggaggcctggagcaatgtgttccaggacagacggcaggaagccggggtaggaattccaacagggagttccctctgtggaagggaacgtggctggcacctccctgccttccaccctcagagctagtgtgaaaaagaagacggggttatggaaaaggcaacgggctggagattccccggattcccaggctagggcgccggtctcactgtgcgcgcaggtggggcgcgtgccagaacagggcctgggggtcaggccgagaccggcgggcaccttcaccagggccgcccgtggcgttcccccagcccctctgccgcgggccccacgtggccccgaccctgcggcagcctttcggaagggcggagctgaaaaacggccgcttggctccactcggccccacagcgcccaggagcgaatcccgagtccgttcggaaccgcctcgccgcgtggcctggggcggcgtcgccaccgcgcgttctcggcctcccggctgcggcagcgatgccggtccttggagctggagcggggagtccaggaggcggcagcgctccggagagagacgccctggtcccccgccgcgcgttcccgcctctgtgccctgggggggaggagggggcggtcgccgctgccattggccgtggggggtgaggcgggccccgcgcaggaaaccccgcccctccctctgcggcgggggcggccccagcggatgaatgaagcggcgcgtggctgccggggaggccagagcgtggagcgctgcgcggcgcggcggccgggccctcgagacggggacggtgagtgcgcggggagcggggagctggcgcgggtgcacagggcccgacctgctggcgtaggagcgcggcaggtgccgccatcgtgggcagg

SEQ ID NO: 27047 - DNA, 2300 bp, Homo sapien
ggtccccaggaccaggttgttctttgtagtcccagtctgcttcctctgcagaggcccacaggaggacacgcccagagtctgttgtcccagcagcagggccagtttcctcctcacacccctggcagggccaaggctcagagtcacccagaacctgttaacctagcatgtgagttactggcacctccctccctgttcaaggggtgcaatccccacgtgcccattccaacaagtgggcaagacccagatcctgcctgaagtcagctgacactcagcaagctcactggggggccagacagtggtccatgtcccagaacgaaggcaacagcaaggtctgaggactgtcccatgtccttgtccaaaagccaacagtgtgcaccttgccacttgcaaatgaggcagtcatgtggctcgtgagggaacgttttgtggcctctgtccacagcccgcttgaggaagcaggagggctggcctggcgtggctctctcccagagctccaagggccctgctccctcctgcccccagcaccaggctgcacgttggcttttctgtggctcatctctgaccacctacaaccatctgctggggagagcaccaggacccaacacgttccagtggacgagtccaggaagccaggaatgtatattggctcagcagtacccaccccagaaatggattaacactcatggagacatccggatcgaagaccttgtaggcacaatactaagctcgatgagttaacttttcattctacaatgggctgagaaaaattttgccatttggaagtcagaccgacctggagccaaaactgcaatggggcttggtcaagccaaggggcccatcagagccccgaggagagccggcctctctgggcttagtctagcaaggagagcatgtccatccacctggccacccttcacctggcccagcctgccctgcctgccacgtgcccagccagctctccaccatgggagggacttgcccagcacctgctttaggggccacacccagtgagctacagattaggtcacggccactcgggagggaagctccctcatgaagaattttccaggcaccacctgctgaccttgcccagcaggaaggcaggacacagcctgctgagggcggtcagggcagcctggctgtggtcagcgtccaggtctcaccgagtggccggcctctgccctggctccctccagcagcacagagggaagtcgggctgtgtggtctcggcccgagcaacatcctactggtgtcctgcgatcactgacaacccagaacagacactctggcccagtaaccgcaggcccagctcttgggacgctgttctgggtctccggcctgaccctgcagtcgccttttgcctctttaagaacagagtcgtaaaacaggagcccaagcctggatcagacaaacctggagtcagacctcttcagcacttacaagctgtgtggcctagagtcaatcacttaacctcttggtgcctcagtttactcatctataaagtgggagtgataatggccacctcgtggggttgctagggactgaatgagacgatgctcaaagcaggggtaccatgcccggcacattccagcactcaacacctaacccctgctgtcactgtccttgtcattattaccagattcacaagcggagccggctaaggccaaggagctgtcctctgagatccatttgctcccgctgctgggaatgaaaacgtcgctgacaccgggctctgcagagccagtttctgattagatggaggtaacccaagttccaaaaaccacagctgaggagcagcagctgacaagctggttgcatggatgtggaaaactaccgcgttccagccgcctccagacagaaacaggacgcatagccaggtcccacggcagctccaaagagggccttgcacgccaagcggggcaccccccagcctgagggttcaccaaccacgcggaccacgcggaaacctagctgggcttctctctcccctcggggcgccagtgcgggaggcggtttctcccttggaagtggaagtcagatctgcttccaggttcccggtctagggccggtctagggcagctaagcctgcctgctccttcctttccatcctccctggtcaggggagcccaacagcaacgcgagggcacccgaccctctgcctgcacctggagggcgcccgggtccccccaagccacggccaggacgtcgcgtggtggggcagggaaaggggcgccgccgctgctggaaactagccctgtgcgctccgcccgcgctcccctcccggagatgtctcgagcgcc

SEQ ID NO: 27048 - DNA, 2300 bp, Homo sapien
gtggggaggggacagatttggggggacaggtggggaggctctccaaggggcagtagagctgacctctggggggctgttgagtgtgggaatgtgggcttgtgaggtcagcccagaggggccaggccaggatgggcctgtgggggagggaggggagccctcatctgatgccctcttcctgtccagatagtggaccctggaagggtagagcgcggtagattggcggtggtggcccacatgcctggcacctctgccatggcccagggtactctgtgaacgctggcaggaggagcagctctgaggaggggtccccactttctgcagacctgcccagcctgggaaggccagcctgcctctggcaccgagaaacccccagctgcactgttccaggaggtcctgaggcaccagtgcctggctcatggaacagccaggtccaaacccttcctgcaccaagtcacagaagccaagactaggtggctagggggtggagcccaccgtggacccttccacctacggagcatgtcccacaaagagggcaggaccaccactctcccggcctgtggacagagtcgctcagcccccgtggcgctctccacacctgctctggcagcgggggtgggagggcactcactgccatgtgccctgtctgggtctttctagaagatgcccttgaagactctgtttctgagaactgacataaaagcagaggacccccaagattcagttttctcaccaaacaaggtggcagcttctgaggcactcaggctgaactgggactccaagaacttggggctgaacgtggacatgccggtgatgagagtggcctcggtggccccggccaggcagagcaggatgaacgtggggttcttcagcaggagccagatggagctgggcagaggtgggggtgtggagaagagactgagggtcagagtggtgggcagaggtcggggtgtggagaagagactgagggtcagagtggtgggcagaggtcggggtgtggagaagagactgagggtcagagtgggccagacccagggtgggaggaacctgctgttcctgaggctgtcagctccccggtctgattacaaagggcccctgttccgacagggagtagagtggggtgcaggcaggtgggggacacccacacttattccagagaaacccagggggcgccaggctgagcctatgcctgtggcccacttgtcctgaaagctgcagtccctgattagggaaaaaccttatcagtgccttggccagagcttcagctcaggtggggagagaccccaagtgacccaggaccctgttccgtcactggccagcagcagggcctgaaaaagggaactggctggggcaggcagaggccaccaagtccaggaccggacaggccctgggataggggaatggaatcacgggaatggggactgtggccagtccccaaccgccagcccctgggagaagtggggcaggaagccactgggattcgaaccctccatgcaagaagcccctgggtagacggacctggctagcttggtttgcacttgggggccagtggccctgggggtggtgaggcctcaactggggcgagtccttggtgcatgggcctggagccctggggggaactgtgggaactctgagccgtctggccctgagggctcagcctcagcctccacatctgcctgttgcggtcctggctgtggggtctcaggataaggacatagccccctggaagctgggaaggccccacatcaggccttgcagtttctaacccaggaggtggccgacagcagtgcgtcggggctgcctgtccctgcacacgaggccctggggggtgaatggaggctctccctgtttttgttagcattggaggcctgagcagggctaacgcccaaccgctgcttaagcgcataagatgctgagatggaaaacgtgttgcatggtgtaaaccacgcaaagccctcccagccagtgcagtgatcgaggcagacagaagggaaaccgcctctgcaaagagaggctcggctctctctggggtacacagatcacccagactgggcaaagctcacattcatcccagctcacagctgcctgcatcctgttcacagcacgctcctgtgcgtgacccttctcccccactgagtggggggctctcggcctcaggtgggggtgtttgcagacacagctattgtcctgtccctggaactcataacatagaccaggggcagagactgttcctgaagccccaggtcatggcacaatagcctctcacatcagcccacagtaatgcaaattttcacaataaatga

SEQ ID NO: 27049 - DNA, 2300 bp, Homo sapien
gacctcacaagcccacattcccacactcaacagccccccagaggtcagctctactgccccttggagagcctccccacctgtccccccaaatctgtcccctccccacctgtccccccaaacctgtcccctctccacctgtcccctcacctgtgccctcctcacttgtcagcccagaagctagatgccagctaatcgcaattttttactgttggtggccactcaggcttcgacaaatgtccttgtcacagcctgcagggactcggcagaggcccctgggggaggagggggtgtggctgccctggaggggggtcagtggaggagtcattggcttcccactggggcaggggccgctgaccttggagcactctgggctctcctcctccccccgccccgccccgcccccccgctcccccttccccttccccttccccttccccttcccctctgaggcatccccgctgtgggctctggacagaggtccctcctagggctctatcagcgcaacagctaagcactcaggtgtggtgttgagtgctgccatgcaggcaggaattgatccctctatgcctcagtttccccacctgtaaagtggacccggctgatccaccaccctctcccaccacggccccctgcctgagtccctggctgaatccctccctctccccagggtacctggtggtgccagcgggtggtggcggcaccttcctgggcggcttctttgtgaacaagctcaggctccggggctccgcggtcatcaagttctgcctgttctgcaccgttgtcagcctgctgggcatcctcgtcttctcactgcactgccccagtgtgcccatggcgggcgtcacagccagctacggcgggaggtgagggccagatggcacctgggtacgcgtcggggccccaagcacccgcggtccctgggcatggaggaggagtggtgcagcacttgggagaggtggttttgaaaagggctacgtcacaggacagcggcaagggcaacacccgctcagcagggcacccggcagcatccacgtgaaaaggcaccatgccagcccccagcagtgcctgcgcttgggtcccggctgtgcccccgggcagtcatatgcctctctgggcctcagcactctgctctgtagctgtgtcaaatggaacaacagccctagtgttcggggtccttgaggctggtctctcggtgacataaaaagtgtcccaggatgtgctcctggagttgccatgtgctgggagtgggagggacacctgctggtcaggtggcaattagggaatatccaaaatacacgtaggtagcctgcacctcggccctgccctgcgggccccgggagtgcacctgcaggtgccgtgcaaggccgagaagcacaaagcagccgttgtggcattatcggaacctaagagtcatcagggtggacggggtcactacgctgtcctcacaacagaggccctgcccacaaaggagtggaggaagctcatcctgggccactgccaagacatactgtgaagtgggaaaaaggaaggagttggacaatgggcgcagtgtgctctgattcaagtgagaagtgcagatgtttgtgactgccgaggggcgtgtacgtgcagacgacccctgcaaatgcacagccggcctgtggctggagaaccgaggactggggtggggctggggccacgaggctgcctttgtgtacttggcgctttttctttcctaatgtttgtatttgatccatatgaatgtgttgcctgtccaaaaacaaatgaactagggaaaggggctgtgcatcaggcggacggtgctggggggcatgggtgtgccttccttgcgtgaggaggaaaaaccattctatcaccagaaggcagtgcccagtgtgagtgcccagcgtgctgggggcggtgcaagcttggcaagtttgtagacccgaaatgcaggctgcatggggacgagccccatggctgaccctgtgcctgctgggcgccagcatggctctggcctggaccctaccactcgcttgtcccccctctgcagcctcctgcccgaaggccacctgaacctaacggctccctgcaacgctgcctgcagctgccagccagaacactacagccctgtgtgcggctcggacggcctcatgtacttctcactgtgccacgcagggtgccctgcagccacggagacgaatgtggacggccagaaggtgagtggagccgctgcctaccgcccctgtcctcccctggaccctgggaaggggcccccgtgccttccccttgtaatcggagctattgttgggcttcccagg

SEQ ID NO: 27050 - DNA, 2300 bp, Homo sapien
ctttgggcaaataaatgacgatgggcccctctagtggacagttagggaatggaccccttcccaggcgggaacagcctcctgctgggaagcacatccccttggtggttagacacttgcccatgcccttgtgcagtgagcacactgtgcaactgaccatggcttcctcacactgcacagtacctagtattctaactacaatccactggattcccagggcaaaggatctctgagggtcacggacacatctgcaatagaaaaccacagcgtcagcacccacagaagtggggttgcatgccaagtcaccccctaggccagtggcctcctggaccagtccccagccacatcatcacccccccccaagtgggaagcccctcgtcagagatcagagacagtgaggtctctcctgccaccagtgacagacaggcccgcttagacctgggtgtttcctggagtgctcctgtctcaggatctgcagagctccgcctcagggtgctgcaaggaaagctctggacaagcgcacacccgaccccagcttaccgtagagttgccgttagtgcaggaatgctgctgaggaatgtaaagaaaattacaacgaatatgaaaaccagaaggaggggctttctctgacaagttgaagtgcatttccctgcagtggcatggccaaaaccagaggaaagattctgagggatacagctacagtctcggtacacctgggaagcccaacaatagctccgattacaaggggaaggcacgggggccccttcccagggtccaggggaggacaggggcggtaggcagcggctccactcaccttctggccgtccacattcgtctccgtggctgcagggcaccctgcgtggcacagtgagaagtacatgaggccgtccgagccgcacacagggctgtagtgttctggctggcagctgcaggcagcgttgcagggagccgttaggttcaggtggccttcgggcaggaggctgcagaggggggacaagcgagtggtagggtccaggccagagccatgctggcgcccagcaggcacagggtcagccatggggctcgtccccatgcagcctgcatttcgggtctacaaacttgccaagcttgcaccgcccccagcacgctgggcactcacactgggcactgccttctggtgatagaatggtttttcctcctcacgcaaggaaggcacacccatgccccccagcaccgtccgcctgatgcacagcccctttccctagttcatttgtttttggacaggcaacacattcatatggatcaaatacaaacattaggaaagaaaaagcgccaagtacacaaaggcagcctcgtggccccagccccaccccagtcctcggttctccagccacaggccggctgtgcatttgcaggggtcgtctgcacgtacacgcccctcggcagtcacaaacatctgcacttctcacttgaatcagagcacactgcgcccattgtccaactccttcctttttcccacttcacagtatgtcttggcagtggcccaggatgagcttcctccactcctttgtgggcagggcctctgttgtgaggacagcgtagtgaccccgtccaccctgatgactcttaggttccgataatgccacaacggctgctttgtgcttctcggccttgcacggcacctgcaggtgcactcccggggcccgcagggcagggccgaggtgcaggctacctacgtgtattttggatattccctaattgccacctgaccagcaggtgtccctcccactcccagcacatggcaactccaggagcacatcctgggacactttttatgtcaccgagagaccagcctcaaggaccccgaacactagggctgttgttccatttgacacagctacagagcagagtgctgaggcccagagaggcatatgactgcccgggggcacagccgggacccaagcgcaggcactgctgggggctggcatggtgccttttcacgtggatgctgccgggtgccctgctgagcgggtgttgcccttgccgctgtcctgtgacgtagcccttttcaaaaccacctctcccaagtgctgcaccactcctcctccatgcccagggaccgcgggtgcttggggccccgacgcgtacccaggtgccatctggccctcacctcccgccgtagctggctgtgacgcccgccatgggcacactggggcagtgcagtgagaagacgaggatgcccagcaggctgacaacggtgcagaacaggcagaacttgatgaccgcggagccccggagcctgagcttgttcacaaagaagccgc

SEQ ID NO: 27051 - DNA, 2300 bp, Homo sapien
cccagctattcgggaggctgaggcaggaaaatggcgagaacctgggaggcggagcttgcagtgagccaagatcgcgccactgccctcgagcctgggtgacagagcgagactccatctcaacaaataaaaaaaataaaaaaataaaaaaacctgtgtacttaactggtgaatcgtgtcttccagaggacaaatctggcctactccagcctattctagttggatggaacacctcacctcacacccgacagcccattcgacctcgttcattccccgtggagacccatcagtaacagccctgcccttcattcagccgctattcccattttacagacgactcaatcgaggcacagagacgctaagcacactcgcccaaatgtgaagtagcagggccaacattcaatcctatctactggcttccagcaaagggatcactggcgtttcctttgatgccaagatttctaagctctgatgtttgtgagctgcagccccctgacaagagtatcaggctccggttgaacagagaagtccaaagcagggcgagaacggacgaataatcacagagtcccgctgccagccaccggctcagaagccttgaattctcctagctgggcgggcccgggagggggttcctcagcctcccgcttccctcaacaccctgcgacccccgccccagcctgcccaggtttcctgctcccagcacagcaggtgcagccagccatgtgcacaaaggccaggctggttccctgggctgcactcgagcagctcctcccagccctgcacacatggggcagcagctctacccaacctctcccaggggttctggggaggagggagcaggggagggggcggggagggcccagagaagggacagtagtgccctgggggcccctgggcaacccagacatggaggggggggcaagcttgtgcctggccacctatgccagtgccaccaggtgctgggggggacacggaaaggacaggaatcttgccctcacctggctcccgagccaggggccggggcaccctgtgaggacactcagagggagggagtgtgcaaagcctgcagggcctgggaggatgcgtgctggggctgcctctcccaaatcctgctggggcgcaggctctcagggtggcttctgatgacaaatccaggcagtaataaggggcccagggcatcacatcccatagcgtcatgagaccagcccagggtgccagatgcagggccctgagtggggagggtgctgctctgggcacctgctttctgccctccctcattcacccctccccagactttgatgaaaccatctgtggctcccggcctctgcaggacccagcccctcagctcctcagcccctgcaggtgtccctcggtactgcctcacgccatcctgccccaggtgataactatgccctgagcccccaccatttccactgggcacatcccagaaatacgcattcacagaccaggcacgcccatgactgcggccagattttaaaaggaatcaccagaaatgtaatctccagtggtcctagagccccctgggcacccagcttctggcaccctgtggacacccaggagtgggggtcggcccaaccagctgcgcagccgcccagccctgccagcggggagcttcctccctccctgccctccggatacaccctcaccccaactgagcgagcccagggttgggggaggtgcatagttcccttcctagccggtgcgagaaattgcggagaacagggaagagggtggcaggaagggtctggtgcacgatacccgccgcgcccgctcggaatcctggttccctggagcgctcaccccagcccgccctgccccggggagcgcgagggggcgacccgccaggctgcacccgggcggggcggggatggcggcgggggctgcctccctcctccgccgccaccccccactgctgggcgcgccgcgcggccgccggctccgtggagacgcgcagagccgggagggcgcgggcgcggcgggaggtgtgcggggctggggtgcgcggagagcgcgagggaggagattctgagcgagggaggggagcgcgcccgggcagcagtgcgtgcgctcctcccggcgccacaagctcgccccgcgcagcccgagccgggctgggcgctgtcctcgggggcctggggaaccgcgcggtttggagatcggaggcacctggaacccgtggcaagcgccgagccgggagacagcccgaggaaccacgggttctggagctaggagccggaagctgggagtccggaggagagcggagcccggagcccggagcccgg

SEQ ID NO: 27052 - DNA, 2300 bp, Homo sapien
gggtctctgccctctctctcgggggcccctgacctctctggggtctctggcctctcacggggtctctgctcttttgggggtcactggcctcagagttctctgccctctgaggagtctctgccctcctggggtctctgccctctccgggtctctgctctcttgggattgctgccctctgggggtctctgctgtctcggggtctctgccctctcgggggtctctgttctgggggtggtctcttctgtctcagtgccatgtccctgccttgcctttctcctctctggtcgtcctagctcccaggacctaagctggccttggatgaacccagtacggtgcctctcctgcctgtatcggggcatccgggcactgccagcgtcccattactggactctggtcaaggagcttggtgtggataacgggaagttttggaaacttcccacccttcccagagggcttaaagggactggggcgaacgcccaacccagccacagccgtccagggctttgtttctgacatgccttaaaaggggacagagtggccgccgaggggacggagcctgccgtgtcccgtgtgcagcggcggaccaccaggcagagcgccaaggggagtgtccggagatccagcatgggaagagccccctgccacttccagcaaggagcacacaggtgcatccgttctttctgccccacactttctagggacagcaggccgagcccatggtgtgcgccgtcagcatgggctctgcagcctccgacccatgtgcggcctgcccggaccctcgctcctccgtgtgcggctcgcctggaccctcgctcctttgggccgtcactctccctactttgtagacctggaatgccatccctgccccagctccactgcccatgggtggccatccagcagccacggtggagtacacgctgcactgtggtgcccaggggccctctatcacggcaggactccccaacgcgatgtccccggggttcactgccccagccctcagtggcctgcctctctaggcattgcactggcagaagaaaatgttctcgtccaagctcacagccaccaaggtcacaggctaccaaggtcatggccacccacaccgggcagctgacctccaggatcatcctcgggagatgcccgcctggccccacctggccgccctgccccatttgccccatcaccccacaccactgcactccagcctgggcgacagagcaagactccgtctcaaaaaaacaaaagaaaagaaaagagaaaaagaactctatgtcctcatttcaaatgcagggagagtctctcggtttaaaccgtaagtgcccttcccaactcggcagacccgccccagtgaagagcattttcatgacttgggaacaggacactcaccttgccactaggcaggactgtactcactggctcggggggcgcccaggcaggagacaaagcattttcccatggcatatggatggcttccgtgtgctgcatgactgggcagtgtgagaaaaacgcaacccccagtgactgctgtagaggacaattcagccaaaaatcaaactgccaccgtcatctgctgagaccttgatttcccagggcctggtggtgctgaaatactcagaacatcctgaatgaatgaatgtccacttccttcaccagctctgtgctggggagggggcagggcctgcgtctgatcaggagctcctcccccggggaccagcctggaaccccttatagcgatcaggagacacaggagacaccctgaatgacgacactgagctctttccaatctcttgcttgtcccagcgagtacagtgagcacatctttccctgtgctctgggcaaacccctgcggcagcagctcctaccgtgaaattggtgtttctgggtcacagggtttgtgcctttgtgattttgttgctattgccaaataccctctgcagaattgtgccaaggcacctccccaccagcctgagcatttgcagtgaaacgctttagcaatcctgacatttctgccagcatattccacagcatgctctctttgccacattaatcaacaggagctcagaggaaaacttgaacttcaggctgagccatttcctgcaatctgaaaaatgaacgtggccttcggacacagggtggtcccttgccagggactggatggaactggttcaattccccgctcctgggcttcctggtgtgcaacgtgagccatgctcaccccagggtggctgggaaaaaacgccggtccgctctgagcattcgtttcagtgatggctgttcttgttcacgtgagatgtgccaactct

SEQ ID NO: 27053 - DNA, 2300 bp, Homo sapien
gcggcggccttgattggaggccgccttaagctcgtcatggatgcgttttgacctggcggccccgcccctgacccgcccccgagccgccctcccgagcgcttccccgcccggccccagcctaggccccgccctgatctcgccccctcttcaccgtccggccccggccccgccccgcggtggggcctccgcagcgacccgcggttaacgcttccccagagcttgggctgcgcggcggccgggagtcggaggcaggcggtcaaggccggcagggccggaccccctacttgccctttctcccagcaggcgctggactctgggggcgggcgtgagcccctccgtcccgcacccagacccgggcagcgagccctatgcctgcagtaattgtggggtttctggttttgttttttccttaacatctttattgagaccgttaagttcacccgcttaaagcgcacgattcggtggggttttgttgcgagcaaccgtggccactatctaattccagagcatttcacctccttaaaatgaagctgggcccggccgggcgcggtggctcaagcctgtaatcccagcactttgagaggccgaggaggaaggatcacctgaggtcaagagttcgagaccagcctggccaacatagtgaaaccgcgtctctactaaaaatacaaaaattagccggccgtggtgagcgcctgtagtcccagctacccgggagtctgaggcagtagaatcgcttgaacccaagaggcagaggttgcagtgaggcgagatcgtgccattgcaccccagcccgggcaacagagcgagactctgcctcaaaaacaaacaaaaaagaagccggtccccatccgcagtgactcgcgtttccctccccctcccccgtccccggcaaccgtgcatctactttctattcctatggagttgccagttctggctcttcctgtgaatggattcccatgctgtgtattttcgtgtctgaattctctgactttcgtctcagcccgcacccacgctgccgcagtccgcgctcgctgcttttaggctgaacgcggctgcgccgtgcgggtgcccgcgctccgggcgcccctcgcaggttcagccccgggttgggggcggcgcttgcctcgcggctgcgggtcccagcctgaacctgtgtcttgttccactgccgcgggcgcccgccacggagctgctgcttcctagggagacggttccatcgttgaaggaacggccagactgtctttcgcagcagcggcccatctgaccgcacagcacgaccgcacgagggtcccgagccctgaccctcgcagcactcgtcaccccggccgcgtggttgtggcggtctcggcggggcagggggtccccacgcgggctgattctagtttcgcgtgaccgatggtgctcattagccatatctgtacatctttttttttttttcgagtcggagtttcgctcttgttgcccaggctggattgcaatggcgcgatctcggctcactgcctcccgggttcaagcgattctcctgcctcagcctcccgagtaactgggattacaggcgcccgccactacgcccggctactttttttgtatttttagtagagacggggttatacgatgttggccaggcttgtctcgaactcctgacctcaggtgatccgcccgcctcggccccccaaagtgctgggattacaggcgtgagccaccgcgcccggcccatctgtacatcttctttggaaaaatgtgtatccaaatccttagccgttttatagttagattgtctttttattatcgagttataagaattatttataccttctacaaggaagttcattatcagatataggatttgcaaatattttctctcatctgtgggtcgtcttttcacttttctgatggtttcctttgaagcacagacttttttgtttgggtgcagtgtatttcttactgtgctttaaagaggaacacgttttaagaacccccgcgcggggcggagcagggcggagtccccggcgggaagggacccgagacctcggctgcgcctgcgccgacgccggcgcgtgagcccgagcgcgtacccggcggagcgcgcgcccgcccccgagtgcgcctgcgcggagctcgtggccgcgcctgctcccgccgggggctccttgctcggccgggccgcggccatgggagaggccgaggtgggcggcgggggcgccgcaggcgacaagggcccgggggaggcggccaccagcccggcggaggagacagtggtgtggagccccgaggtggaggtgtgcctcttccacgccatg

SEQ ID NO: 27054 - DNA, 2300 bp, Homo sapien
gtgtgtgtgtgtgtgtgtgtgtgtgtgtgtgtgagtatgtgacagagaaagagagcccctttccccagcctcaacagcaaacccttctggaatgccgtgccacacggggcgtcactggactgcagaggatgctctgaagaagcaattctgttgcacagtcccctgcagcagctcctgcacttcttggattagcacgcccccgagatgagctctgcacacacacacacacacacacaacacaaaagcaactaaagaagcaatttggtgtggtgatatttgtaaaacagaagttgggcaatgtctctaatactctttttagggaagtggttctatagtcctgccgacagtaggtagcagcgggaatgctgtccccgtagaacaatgttgtcagcacccagtatgcttgtctttctgttttctggggcagtggagggggcagcctgaccacccaagtctcagatcacccaaaccctatacaaccacccagcacccatcaatgtccccatcagagccccccgactccacctcacagtctattctgatgctgcaaccagatcccacctgtaaatcatctaacaaggaggtcaggcagctcactcaggctccctgggaaacctgccctggccactgcactaagttgatttacagaaatgtccagcgccccagaacttcggggcatcaccactgtcgtttcaagaaagtgtgatgcatgtccacaggttccagccaggtgagactgcacctgctaacagtggtcaacaggtcagcaaagattagggcccagcacccagagggtccttaacctgtacttgtggccaggattggaagacttgcgttcacggctgtccctggcacacagtacaaggaatgtcaccagttcccaggcccagcaggcctgcagggctaggagatggcagtgtcccctaggggctgggctggggccttctccacctttccaccaccatcattacagggacaactctgcgaggagctatcctcatggccaagtccaaaatccagatttagttttacctaaatgttttgaaatgaattggtatagcagttacagaagaaatttatctggagtggccactcctgatttttatttcaagaggtcaccaaccttgccatgtatctgccagcagatgtcaaaggtggatgagcaagggacccgcggtgctgggaaatggcaggtgaaagtgactttgtgttgccccatatctgccagtgcttagagagagggccctgaggaggcgctgaactggcatcagctgtgttgaacagtccccagggtgaccctcccggtggcccaggcttcgtgtggtcctctcccctaagtgccttcttacaactgagagatggcggcaaaggtgaaggaagccacggcttgcccatgtcatcctggttatataagactcggcaccctagagagaaagactcccctggtggctttgaaaagaaaacggccgtgctttgcactgcctatggagggacaggggtccgccagcagcttccaggagctgagtaaggcccccagcccgcagcagaaggacagagacccctacacacccagcttagggagagaggcccctgtggacacgtggcccctccgggggttatcctccaagggacattcttctgatggggacatcctctggggggatttctcttgggggacagaaatattcctggaagaggggattctctgcggggcaggcatcctccggggagagaatcctgctgggaggacatcgtcgggaagacatccttcctaggtacccggctcatcttccggggagaccgtcctctggggggcgggcaggctttggggacattttcgggagggaggatctcctagggcgggcatccttgcgagacggggtggggcgaatcctcccgggtgggcatcgtggggtgggggtgggcgttccgcgaggggcatcctcccgggcggacgttgggggattctcgggggagggaggggcgcggggcgggcgtcccggggagggaggggcgttgcgcgcggacgcgggcggggcctgggccgctccgtcccctccccccgcccgccccccgcgcttcctctgctttcggtttcgcttccgcctccagcgcgagccccgccgccgccgagcatggacgaccccgactgcgactccacctgggaggaggacgaggaggatgcggaggacgcggaggacgaggactgcgaggacggcgaggccgccggcgcgagggacgcggacgcaggggacgaggacgaggagtcggaggagccgcgggcggcgcggcccagctcg

SEQ ID NO: 27055 - DNA, 2300 bp, Homo sapien
agttacagaagaaatttatctggagtggccactcctgatttttatttcaagaggtcaccaaccttgccatgtatctgccagcagatgtcaaaggtggatgagcaagggacccgcggtgctgggaaatggcaggtgaaagtgactttgtgttgccccatatctgccagtgcttagagagagggccctgaggaggcgctgaactggcatcagctgtgttgaacagtccccagggtgaccctcccggtggcccaggcttcgtgtggtcctctcccctaagtgccttcttacaactgagagatggcggcaaaggtgaaggaagccacggcttgcccatgtcatcctggttatataagactcggcaccctagagagaaagactcccctggtggctttgaaaagaaaacggccgtgctttgcactgcctatggagggacaggggtccgccagcagcttccaggagctgagtaaggcccccagcccgcagcagaaggacagagacccctacacacccagcttagggagagaggcccctgtggacacgtggcccctccgggggttatcctccaagggacattcttctgatggggacatcctctggggggatttctcttgggggacagaaatattcctggaagaggggattctctgcggggcaggcatcctccggggagagaatcctgctgggaggacatcgtcgggaagacatccttcctaggtacccggctcatcttccggggagaccgtcctctggggggcgggcaggctttggggacattttcgggagggaggatctcctagggcgggcatccttgcgagacggggtggggcgaatcctcccgggtgggcatcgtggggtgggggtgggcgttccgcgaggggcatcctcccgggcggacgttgggggattctcgggggagggaggggcgcggggcgggcgtcccggggagggaggggcgttgcgcgcggacgcgggcggggcctgggccgctccgtcccctccccccgcccgccccccgcgcttcctctgctttcggtttcgcttccgcctccagcgcgagccccgccgccgccgagcatggacgaccccgactgcgactccacctgggaggaggacgaggaggatgcggaggacgcggaggacgaggactgcgaggacggcgaggccgccggcgcgagggacgcggacgcaggggacgaggacgaggagtcggaggagccgcgggcggcgcggcccagctcgttccaggtgcggccccgcggcgcggaagaggcctggggtccccggcgccccccgcccggctgcgtggacgggagacccccccatcccgggcggagacacctggagcctcctggagctcccgcagccccggggacccccccccagaccggccgacccccagccccagggcccggcggggaagtgcgggggccgcgcgtgggtgacagcggagctgagcctcccgggccccatcgtgtgtgggcgccgttccccccgggggtgcctcgggcgcgtcccgcccccagccgccgtggccgcccctgatggaacccctcccgcctcgggcccgcgcctcggcctcctggcggcccctgcgcaggccccgcggcctggggctggggctggggctggggctggggctggggcccgggccgggtctggcctgggaggcttcgcgtctgcacctgcgggagcccggggcgggccgacggggcctccgcttgttacttttgttaccgccgggcgcctgtcatcgccggggttacttttgttgccgcgctgggaacgccacactgtcgcagtccggcccccctgtcggggagctgggattgatctgggagcggccttccagctgagctgcccgggttgcggagggccgggaagtgcatggaactcgacggctccgcatggattctccccttggcacccagcactgtttgcgtttgcgcctggccatggtggagcgggcagtgagagagcacggaggggctccgccctgtcgccgggagggcagcggccaggcaggctgggcaggggggtggggtctggctctgtcccacaggacggtgtgacccctgggtgggctcttgacgggctttcctcactggagttcctcaggccgctctcctgaagcggtgctcagaggccctgaccatcctgccaggcgcccgtgacccctgacctcttccctctgcctcctgctgtggcttctgtccacaagcccctccccttcccctttggacccctcaggcctccccagctgcctgcgctggaccctggcggggctgtttcactttttcctg

SEQ ID NO: 27056 - DNA, 2300 bp, Homo sapien
tgaagtgaggagcctgttggagcagccctgggggccgatgcctggcggtgggcacctggggacagcaggcagtgctggccagccaacccgggcttcagggagagtgatgacccacaacaggcgggcagcaggaggctctgccccactcaaaagtgagccgggggaggctgagctctgacagtgcccaccctctgcctaggatctgcctggagctgggggtggttttttgaggggcttgaaggtggttcgggggggacaccaagcaggtgtcccaggcatgaggtggctcccctggcctgaggtgaaggccagctgtgttttgtctgatttgggtcagatagcagtccttgctgactgcatgctgggcatcatggggataggcaaagtggggtgtggggccagggaccaggggagagccactgaggagggggctggccacagggtcatcttgccaggtggaactggtagggaggacttatcctgtcccccagaccctgggcttggggtggggctggtgctgggagcccctaaggccccctgctgtctgggctgacctgctccacccacctctccccgtaatcaaaagtcctctgttaggaagctctgtgccaggatgacttggactcctcaggagggtgggccttttcagctcctcccacctcgcctgatggaattcgcacacacccctcccagcccagccaccgcgctcacccagcagtgaagggagaatctccctccactcacttcaccgcgggagagattagagcgacactattattttgagacagggtctcactctcttgcccaggcaggagtgcagtggcgccgtcttggctcactgcagccccgaccttacaggctcaagcgatcctcttgcctcagcctcccgtgtagcgtggactacaggcgagcaccaccatgcccagccgatgttttaatttttggtagacatgaggcctccctctgtctccaagctggccacgcccggccgatgtttcaatttttggtagagatgaggcctccctctgtcgccaggctgactgcgcccggccagagtgcggtgctcctgctgagcagttttgcgcccactcccctctcatcccctcccgcccttgctaactcacagcattgcaacagtcatgagtccccacctgccgaaaggaagctcctgcagccccctacaacccccagggcagcctttctcgggaattttcaagattcctgggggaggggctggcatctgcgccttcactgagcctacaggcaactggaagctttgagtcccctagggcagcgactgccctggcagcctgaggcagagcttggccggacctggcgacccctgagcttctgggaaatggacatggccagcaccgccttcaggttcctgcccagggcacggttccttcaggccggggatcccggggaggggttcttcccctcggccagggtcatcgttttgcgatctctcctgggagtctgggtttggagtctggtcttagccggtagcaactgacgtggcctgaccacccggcccgtccaggtccacgggtgaggggccgcggtgggggtgctcccagcccagcaggcagcgctggacagtgaccccggagcgggaaccagggctgcgctgggcactgaccgggccctggtaccggggattcaccctccccggggtgttcctgggccttgggtcgcctgggtccgctccggcgcctggggaggggtctgcggcttcggaaactcgcgggtctcccctgcccctccctgaaggcggcccttcagcgccgcgcgcttccgcccccacactcgggttgaggagcaaggagagaaaagagcgtctttctctcttgctcaaagctgcgtgtgtgcaacgcgccagtcccaggataattttaactcgcggccggagagaacgcgccgcccgcccggcgtcttttttgttttcgcccaggcgggctgggcggcggcgcggggcgggtggaagcccccccgcccaggtgggcccggctgaatggggggcttgtgcaggcgggggcgggaaggggaaggggaaggggccgcccacctcccgccccgcccgcccgcgcgccgcccgccccgacgccgcagctcagactccgctcagccatggccgggccgcgcgcgtgcgccccgctcctgctcctgctcctgctcggggagcttctggcggccgccggggcgcaggtgagcgcgagctccgggctctgaggctggacgtggagccgcgaccgccccagccccgaacccgccactccggggtgcccggcgcagcctcg

SEQ ID NO: 27057 - DNA, 2300 bp, Homo sapien
agctgtccagtcctgctgggttggtccccgaggcctgactacagcaggtgcctccgttgctggcttcccgctggctgccccctccctcctcccagagcctctggctacagcaggcagacagtggacagggccaagagaggaggctgccaccctaagggtcttctatgcctctctggactcaccaagggaagggtccgtgcttccatttttgcctggggggtggcatgtgcttcccatgtggcccctcgagctcgccctctgcctctccccagggtctgactggacgagatggaccccctggacccaagggtgcccctggggaacgggtaagtgcctgcgccgaacccagtggcttgggttcagaggtgaggtcccctggccacctctggctgctctgtgtccacaaggccaaggagctggtagttccaaggacagctgccctgcccgtgcctggggtggaggggcagaagggcagggtgccaagtggccagtcccctgtgcctgcctccctgcctcacctccacgtatggtcagagttgtcctggtatccagaccatggcagggagaagggggatggtttgggggaacccaccccaggtgcctcctcagaatgtccctgaagcccccagggccctgggcagaccaccaccagggacccccgggcacgcagcctgcagagtcccctgtgcctgcctgttggacactgaatcctttaccctgacggagcggcaccaccacccaagggtgcctttctccccttgtggcttctgagtacaaacccgaagccagcattctctctttggcttcataagacgtggctgtcagccaaccgggtgccactggccccaggcgcaaagcatcacagagggcaggaaggctgggctggggacacgaggacacagccctgcccttgggacccttgggagctcgtcaggcatgaggcggattctgagctgaaaacaggagggaaacagtagctgctggcagccgagtccgtggtgcccaggggtgtggggtgggctggtccccaggctttcaggaggggcctccagcctcagcacagggcccgtgcgtgccgtccagggaatgaggcatttcaggcagcaggggccagacagggcccagagggtgtggagggcagacagggcctggctgcccaaggctctggggctcgctgacgtgggcgggggctgaggactcagcaggctccgtgggtgggttatcgggagggcttcctggtggagacaggcaccccgggtcacttcggtgcctctcagccctgcctcaggttgcaccttcttgcagcgagcgctgggactctggtgccatctgtctccagcagctccccaggacggcaaagaccctccaggtcaagagggctcagaggccctgcccctctgtgaagtggggacttggaccctgttgtcctgggagttggagttgtgacgtcacacttcagagggaggggattgggtttgcaaatagaggcccagcccaacctagacgcctgctttcctcccacagggaagtctgggacccccggggccgcccgggctgggggtgagtatggagtgtggtcctctcctctccatgggagtttggggagctggagagtctggtctaaatggggtggcctccaggaatcccagggaccatccctggccctctcatctgcagcctctccggaggctggtgcctggatggggtcctggtgccctctctgggctgggaccagacacccatccctggaaccgccctttccccaggacccacctgagccatcttagggaggggtgaggcgcagcccttcttgtgcctggcaggctctgaccccatgtttggctttgcagggcaaaggcctccctggaccccccgtgagtactgacaacccttggggccctgagcaagcacgcaagtcccgagagcctgccaggctgggatgtcccaaaccgtgcctgggggtggggcttctcaggggcagccatctgaccaccccatacttggagcccctctcccttcggaggcggcacaccaaccctgggtggggatcctcggggcttccgggtgcagacctccccacctctctttacttccctccagggagaggcaggagtgagcggccccccaggtgggatcggcctccgcggccccccggtgagtggctgtcccagagcccctcagagtgtgctcacctgtggcctccacccccagactcaacagccaggggctcccttcccctctcccttttccctttctcccccaaccccaccttggtgggtgttggtagaagccctggccaa

SEQ ID NO: 27058 - DNA, 2300 bp, Homo sapien
gttgggctgggtgggttggtcactgtagggccgactccctgtgaggggttctggggcctgtgtccatcagggcctggcacaacccctggtgcccagtgggtgctgtggacggttgcctgtatgtttgcatgtgtgtgcttattcgtgtgtacatgggacatgtgtgaacatgttgatggccatccctggatgccgtgcggtcatcacccccatgggctctgagtaggggctcctgcatccaaggccagggaggctgtcaaagccgcacctcaggtccacaaggctgggagaagttggccctgcctttgggtgcactcactctggcccctgcaccctgcctgcgtgcacgcccctgggtgctgctgccggcgtgcaatgtaactggcagccctgaccgcaagctctctcctggcagggcctccctggacgagcggggtccaaaggcgagaagggagaacgggtatgtggctgcagccgctttctctctgggaggggaggcgaggggccgggaggcaaggggctggggggccagcgacctggccccagtgcaggtgtaggcaggcactcacagctctccttcctctacagggcagagctggggagctgggtgaggccggcccctctggagagccaggcgtccctgtgagtatctgcggcgccccagacccctccccatccagcctgtgtgcagaccctgccctgacaccctccttcctttccctgtagggagatgctggcatgcctggggagcgcggtgaggctggccaccggggctcagcggtgagtgcagggacatggcccggggtcgggggttagcactgagccattggcacatggccccagtttctgagcaggccggggtggcatttggttgccttgatgggccaggcccacaaaagcctaggatgccaggaggtgtggggccccatcttcttgtccctcacccgctgggagacggtcggggccaggccggagctgccctgttttcaagccttctatgctgagcccagccttgtgcccccatagactgagataatgacagcaccagccacagggccctggtggggggagccaggggcatgggtgcctggccccgagtctggcctgacaaattgggtccagggtatgcctgagttctgagaccccctaaactgccctgggaggtagccctgcctttgtccccagcaacccagccaggtggcttagaaccggctcctgtgtccacccactctgggggaaggctgagccaggctccctggggcctcttggggactcctcgaaccctgagacatccgctcacacctcacctttgtcttccagggggccctcggcccacaaggccctcccggagcccctggtgtccgaggcttccaggtgggtgaggttggggcaagggcctggcatggggggcggcacacccagacgggccagacccgacagggtatgggcactgacgagccaggacctccttccccagggccagaagggcagcatgggagaccccggccttccaggcccccagggcctccgaggtgacgtgggcgaccgggtaagtggccctctcagcaggaagctcccctgcaccccctctacccatgtaccacagtcccccacccccatgacagtcccccaacccccaccacagtcccccaacccctaccacagtcccccaacccccaccacagtccccaccccctaccacagtcccccaacccccaccacagtcccccaccccctaccacaatcccccaccccccaccacagtcccctgggacgcagacagggagaggcccttgcagctcccagtgggaaatctggccatgggcagtgtctccctgcgtggcggaggcagtggcatcagggccccgactgtggcgcctttggcccctctgaccttccacgtggtgttccttgtgggtgggaggctgcgggagcctgggccgctctgcctcctgccctgcgtagacgcctggcgggacctgcacacggtcagtgttcattcctcgagattggcgtggaggctgaggctcaagagccacgcctgctcccgcctagcgggtgtctgcggaggcgcggttgacagaggatcacgttgctataaaataggtttgaacaccatgtcccaagtgactgtaacggtcacagcttctacctcgtcaagactttttcctgctggtcttgcagcagctgcagcattagctccttgggggtccgggcagaagcggggcacggcctacccagggccccagctcactggaaggagcctgtgggtctggtctgggccccagccatgctccacc

SEQ ID NO: 27059 - DNA, 2300 bp, Homo sapien
tttttaactgaagaaaactccacttccacaggcctaaaactcaggtgaagcataaaattacgttcttgtttgagtcccttgataggcacatttctccttctggaggtaacaaatggagcagtcgtgagtccgagggaaggacggcctttctggctttcccgaggggggttttcatctatgattaagtctttcctttgcgtctgggtgaaatagaaacagcctagccccagggaccccagtctctggcagacccccacagcccagtgtaaactttttatgcctggggacaaaagacctcagttgtatgtgtttcatttagtgaattctttttttatttttttttgagacggagtcttgctctgtccccaggctggagtgcggtggtgtgatctcagctcactgcaatctctgcctcctgcgttcaagcgattctcctgcctcagcctcccgagtagctgggactacaggtgcccaccatcacacccggctaatttttgtatttagtagagatggggtttcaccatgttggccgggctggtctcaaactcctgaccttgtgatccgctcgccttggcctcccaaagtgctgggattacaggcgtgagccacctcgcccagcccatttagtgaattcttagacaacactgacaaatggaccctggaaatcccagaagctgccctacgtggccactgttgctggtggggtgaggggcagagccccttgcaggcggaaaacctaaggctttgctctcagctactcgcacggtcgggctgtgtgaggtgaccccctaccctcctggcctccgcggagcatgctgtctgggcccggtcggtccctctgctgtgcggttagactgtgtcagtctgtattctgcagctgtaacagaacaccgcagcttgggtagtttacaagggaaagagatccatgtggctcctagttctggaggctgggaagcccaagaccgaggggtgcatccatcgagggcctccccactgcgtcattccatggtggaaggcagaagggccaagaggaggtgccagagagagaaaggggcccaacccatccttttcatgaggaacccactgcggagacaacggtgttagtttactccggagagccgagctctcaaacctaatcacctcttaatagcattgcagtgcagtggccgttcaattgcagcatgtgttttggaggagacattaacccggctgactgtgtgttgacgcacctggggccagtcattcctgaggacccagctggagggggttccagggttttagggcagagaggttcagcccagcattaggcgtgttagtaagaaaaaggaatggaagcaaagtaagcgtgtgtaagagacagcaccgtgcagctaacaaagtcactcttcccaggaaagtaagtttttaaaaagcttcaatcaatcagtgcaatcacagaaatataaaaaatgtatatagaagaacggaaggaaccactgtcaatatttggatgtagtctaatagcaggtgtgtggatgatttgatttattttatcctcaactggctacttcccacccacccaacaatacacttagttcaaacacacaacttttctcttcacagggtcccagcggcctggtcggacccaaaggagaggtgagtgcccggcgactgttccgatgacaccatccatgggcgcctgctggcttcctgcccacctctgggcaaccaggcagccctgcagggcactgcccagatccgagatgtaaaaaagcttgctctggtcaaggctgggcaagacggctccgtgccggctgggaaagagcacgtcggggtggctctgggctcctgggctcgcccctgacccaccttcctctgttcctctgcagtctggcagtcgaggggagctgggccccaaaggcacccagggtcccaacggcaccagcggtgttcagggtgtccccgggccccccggtcctctgggcctgcagggcgtcccgggtgttcctggcatcacggggaagccgggagttccggtacgtcgcttttccggcttttccagctttcacagggttgagatcgtgttttttccggaaggaagttactttgcggggtgacggtgggaatgcctcaccgaggctgccgcccccatgctgacgaatgtgtggggtgaattccaggggaaggaggccagcgagcagcgcatcagggagctgtgtggggggatgatcagcggtaagtcagccacgtgcaccggctgcagcggggcccatccccgcctgggggtcccgtgcctggggctacacagaaagccttcgtgc

SEQ ID NO: 27060 - DNA, 2300 bp, Homo sapien
aaaaattggccaggcatggtggcacatgcctataatcccagctattcaggaggctgaggcaggagaatcacttgaatccaggaggcagaggttgtgctgagtcaagatcgtgccattgcactccagcctgggagacagagcaagactccatctcaaaaaataaaaaaataaataaataaagcaatttgctttccatcttggtgtagtttccttcatgtttcttgagtttgaggtatgttaaacttcttgggtctgtaggtttgtagttttaaaaaaacttttcaatcattatttttttttgttgttttgtttttgttttttgagacagcgtcttgctctgtctcccaggctggagtgcagtggtgcaatctctactcactgaaacctccacctcccgggttccagcgattcttctgcctcagcttcctgagtagctgggattacaggcacatgccaccacacctggctaattttttatatttttagtagacacgagatttcatcatgttggccaagctgatctcgaactcctgacctcaagggatctgcccgcctcggcctcccaaagtgctgggattacaggcgtgagccacctcacctggcaatcattacttcttaaaatgtctttctccccatccttccacccccaggggacttcaaatcacactgcttgaagcggccccacagctcactgatgctctgctcactctcttagccttccctctctgttttacgttagacgacttctgttgccatgtccttgagagttttaagtccttgctttcctccttggtagtgttttctgaaacctgatgttttgcccaaaactgatatattattttcatgtatacatgtgtgagtttagatttgcatggctgagctttcatagcccatcgttgaatcattgtaatatattggtctgtgtctaaactgtgatgaaatgagcgaaagattcagacccggcttagaagacgatgtgcaagtcacaggcctttaagtgtcctaatgcctagacagagaacagacaaccactgagtgagatgggaatgtgggtgagaggttaagtacaggaattatttcaagattgcaaaaataagtctcttaaagaccacatattgcatagttcccttaacagggaaggcccagcctaggcaaactcctggacacagaagattagtggctgcaggcgggggaggggcagtgtgctgactgctacaggagaccggtggtgaatgcagcggtggaggcgggcccagcgctgggaatgtaccaccaccgtcgcgctgtgcattttttttttttttttgagatgaagtctggctctgttgcccaggctggagtgcagtggcaagatctcgactcactgcaacctccgcctcccgggttcaagcgattctcctgcctcagcctcccgagtagctgggattacaggcacgcactaccacgtccagctaatttttgtatttttagtagagacggggtttcaccatgttggccaggctggtctcgatctcctgacctcctgatccacctgcctcggcctcccaaagtactgggattacaggcatgagccacagaacccggccatgcgctgcgcattttacgcggatgaagcggatggcctgggcactgtggactgtgggtccagggagctgttttgacaacgtcttcattcctgccgctgtaatggggcgcacgtgcacgcacggacgtggcttctccccagggtgtcaccgcgtaggtatcacgctgattccagcgcagccgccctcgccgggcctcagcggggagtggccgggcagcaggggcgtggctgggaaccgggcgtggcctgagctgggggcgtggcctagctgtgggggcgtggctgggccgtgggggcgggccctccgcgcaagcatccgccgacgtggggcggggccgggcgtgcgggcggttgggcgggggcggggccggcggcggcgggtaacggagggggcggggctggcgcaggggtggggttgccgttgcggggcggggcggcgcaggcgctgtgcgcggcactcagcggttttccctcccccaacggcgcgccggctgtggccggcgcagagtagtgctcgggccgggggtcgcctcccgcctcccgcctcccgcctcccgccgcccgccgcccgcgtcgccctcgccgccgttgggccgcgccgcgccgccatgtcgggccccggaccgcgggagccgccgccggaggcaggcgcggcaggcggcgaggcggccgtcgagggcgcgggcggcggggacgcggcgctgggcgagccggg

SEQ ID NO: 27061 - DNA, 2300 bp, Homo sapien
gtctgtcctgtgtttacaaagacatgagccttagggagtctttgatatgttaatgctcactgaatttctaaacccaaaacatttattttatcttttttccaagagagtctcactctgttgcccaggctggagttcagtggcacgatctcggctcactgcaacctctgcctcccaggttcaagcagttctcctgcctcaagcctcctgagtagctgggactacaggcacacgccaccacgcctggctaatttttgttttttgttttgttttgtttttttgagacagagtctcactctgtcacccaggctggagtgcagtggtgtgatctcggctcactgcaacctccacctcctgggttcaagcgatttctcctgcctcagcctcctgagtagctgggactacaggtgtgcgccaccacacccagttaatttttgtatttttagtagagacggggtttcaccatgttggccaggatggtcttgatctcttgacctcatgatccgcccacctcagcctcccaaagtgctgggattacaggcgtgagccaccgtacccggcccaatttttgtattcttagtagagacggggtttcaccacgttggccagactggtctcaaactcttgactttgtgatccacccgccttggcctcccaaagtgctggaattacaggcgtgagccaccatgcccagtccaaagcatttattttagccatttcatttaatgctgtttttcctgtctagttgtaattctgacaccagagactaatggatgacctcatggcttgtgctttattgattattatgactttattgataatttaatattagtatatttagagtaattatgtgttgcaactcctaagttaaagacaaaaaggggtccgggtgcggtggcttacgcctgtaatcccagcactttgggaggccgaggcaggtggatcacctgaggtcaggagttcgagaccagcctggccaacatggtgaaacctcttatctactaaaaacacaaaaattagccaggcatagtggtgcatgcctgtaatcccagctactcaggaggctgagacaggagaattctcctgaacctggaaagcagaggttatagtgagccgagctcgcgccactgcgctccagcctgggcaacagagcgacactccatctcaaaaaaaaaaaaaaaaaaaaaaaaaggctgtttgttaccttcctggcagtggcacgaggggaagaagagcatagctgagctgttgtgttgagggcatgtgcgacaatgcccttttcaccctgcaggctcacaccacggcctccctcccctccacactactgctctagcattataatttaaaatatgtaacaaattcagacgattgggatgaattcccttgtggattgggccttcggttccatggttggtgacgaggggttagtcgcccccttcacatggctccgggaggactgggttggtgcattcctggcacggtgtgttcccagctcgttcccggggcggtgcgttcctggggcggaatcgtccaggcttttgcaactgtcttgacacttgatcttattttgccacagaatggcttatttttgtctattaaacgttccccgtgaaagcccttaatgaaattcacctctaaagggtaaaagctggatttagattctaaaatttgcacaaatattttgtttttcaggtcttgagtcaccacgtccgaatataattcttgggttagtaatctgccaaaaaatcaaacgtcccgcaaacagtggagagttagacaagatggacgaaaagcggacccgacttcaaccggaagaagcggacgttccggcctatccaaaagtagccacagtcccgcagtcggaaaagaagccctccaagtatccactctgctctgcagacgcggctgtcagcaccacacctcctgggtcgccgccgcctccgccccctcttccagaaccaccggtgctaaaagtgctgtcatccctcaaacctgcagcccccagcccagccacagcagccacaacagcagcggcagcctccacggcagcttcctccaccgcttcgtctgcttccaaaacagcatcaccgctggagcacatcctgcagactctctttggaaagaagaaatcattcgacccgtccgccagagagcctcccgggtccaccgcaggtctcccccaggagcccaaaaccacagcagaggacggggtgccggcacctccgttgttagatccgatcgtccagcagttcggtcagttctcaaaagataaggctctagaggaagaggaggacgacaggcca

SEQ ID NO: 27062 - DNA, 2300 bp, Homo sapien
aatagcaatacattccacataaacaaaagctctttggtgttctcaacttgtaaaagtgtcttgagacaaaaggtttgagagccgccattcaagcatttggaagtcagtgtgtgtcctctgcttgaatcgccgctcatcagctgcttctagtcaatagaaaatgaagcagttttcagctggggaaaaaaatgtgcttagaaatgtggaaatattaaatttggtacattctgttttaacctgtagtttgttcacttcccagcttcaaggatacccacatttttctttctggggaaaagttgttactgatacaatatggttgcagttttatgaacacattccccctgtgatgggctgtgtagtgtgtagaattacacactaattatacacacaaaaagttgtgttagaacaggtttttttgcttgtgccttgatatacatatgtttttattttacaagctgactgaaatgttatagtaaattttctctgttgaagacattatgaaatcagttttgtaaatataaagtgatctgatcttttccgaaggtatatccttcattgaattctacttaacagaaataactacatttttctgattactcagaactcaaatctagtagcgtgtttattcgcagattaacataaattgaatttttaaaaatcagttttcgttcccgagaacttcttaatttctttgcttttataaatgttcagtgttggctgggcatggtggctcgttcatgtactccccaaaactctggaggctgaggcaggaggattgcttgaggccagcagttcaagaccagcctggataacatagcaaaaccctgtctctaaaagaatttttttcaaaaattagctgggcatagtggcacgcatctgtagtcccagttgctcatgaggctaagccaggaggatcacttgagccccggagtttgagactgtagtgagccatgattgggccactgcactccagcctgggcaacaaagcaagatgccaactctttaaaaagtaaagtaaaataaattaaatgctcagtgttgcaaaatataaaagtttatttccagtgttttctgagcagtcgtttctgaattcttgaagtaattgttttgaggatgatagttttaccacattgaagagatggtgactatgacgatgccgtttggcttatcagagggaatgcctgtcttatttttattttttgtagagacggggtgtctacatggtgacacgttgcctgggctggtgttgaactcctgggctcaagcagtcctcccaagcagctgggatcacagatgcgaaacactatgcccagttgtcactgtccctttaaaaggaggggagttggaatgtttgtccctttgttctgaggttgccagggagaccacagagggaaggcagttggtcttgaggctgaggaagaggtgagagctggggctcagtttggaagtgtcggctttggggcaaggacctagctagaaactcggcacctggaacctttgagtgttgtgatgtgactggttgagagaggatacaagagaattgtttcttaaacacacgtggtgaactgtatcgtgttgattttagtacgtcacaaacattagtattctaaaatttttcttgtttttaattaaaataattcagatacattattaagaattttcaattattacattcttatataatttcgatgttcagccttttcactttttgttcttgttcctctgttttgtggtggattttattgagtggggtccatctcggacataggctccaaatggaaaagaagctgatgcttggcgactcctctctggccctggtctggctgggcctctgcctgcctccctggggcaagcctgggactccactccttcctgcgctgccccggcccctttctcttgggggttggtagcatctgctgtcctgggtagaggtccttaaggacactgcttgcgtgctggttttcaacccccaagctgtctttgtgggtcacacagtatcactcaaataataggttacttgagaagttcggtactcccttttaattgttgtcgatacgtagtttacttaagatatgtaaaatattttcttattttcttttaggagcttactccacgggaacagcctctagataatctgagttgttgaaaatacgaagcctgttactcgtgaacagtggctgacaacagtgttgttgtgagcctggctgtctgcttggacccagaggtttcgtctgccagggtttttggttgtatttaggatttcagggaaaagtgtccaagctttcagtgttggagcaggt

SEQ ID NO: 27063 - DNA, 2300 bp, Homo sapien
tcttttgctagtggagttcaaattcaaatacccagactgtagattctccaaatgcctttctcaccagggagggcagctcccaggaatagtgacggcaggtaagctgggataaagctgacttcgtcaccttgtaggtggggaaggccagagtggatagtctggccaggcctccacagccgagccagcttctgctggggggcgggggagatgagaacgagaggcaggttccagtatcctctggacttgcaggaaggaaggcattctgcgtatcgctgagcactgcggtgagctgagtgagggttccctttcctcatgttttcctgcctttttcttcctcttggttctcttgtccctgagccgccttgtccactctttctattcccttagtgcctttccatctatctctcctgagtgcccagcgtgaaactgtacccaagagttaaaatctcttaaaaatctcaccgtcttgcagaaacaaattgtggctggtttaaagatcctcagctaaagagactgggctgaggttcccccataccagttggatttagagagagcctcttgtagggaggcctcatgtggtcttcacctgggcctcagcatgtgagccctcctttaacagagagcttgcccaagatctcactgcttgttaaaggtggtctcaaccccgtctgtcttctaagcttcccactaccccatgtctgagagcaaaaagccctctttgcaacctgagatcacactcaagatggaagactgtcaagcccatccctgccagattctattaatgtggtcctaatgggccacaccagcaaaaacaagctgcgttgtattcctttgaagaaaactaagtctgcctcagaaactagcagaccctgtaatcttcagcggtattattaaaaagcacacctgcctcaaagcccctggttcatccatggaagcatcgcagaagcctctgtattaggggcagctttacggcactctgggccccttttactcttggccagggccaacgccaaaggctagatggtccatgcttccaggtagcgtatcactgttcacagaagcagaaacaagtaatggggccacctccaccccccccaggtccctgccctcggagcaagtggccagtgcccatggtgcctcgaggcaacagctgcccctcctgccccctcccagtctctttcctgcagtatctggggacagacaggtgatagagtgtcactctagttactattgagcgaactgaagaaaatccacatggaaggttgacatctaccatacctcactttcccctctcttgatagtaagtgtctaatctttccctccaacccctgtgggcaaacatgtccatgcgttctttgagttctagctactggtcagtagttctgagtgtaggattgacatggtgggaggaggcagagctttgggaccacaccgccaaggtccctggggcctagaggtccagcgtgcccgcctcccttcctcgctgtgctcctttctctcccccccacccccacgctcctggtttctggagccgagcttggggtggggaggcagcaggtagggtcttcaagttggagagaaaccccgcccacacctggacctcgcccctcgctgccattcccagccgaggccgtcaggggcctgcgttttgagaaacacaatctggaagagaaaacctgggccttttcttcttttatcccctgtccccgcccccctacacctcttacaaatttagcccaggagctttctatccccaccgacttgaagggtttatcggtcttaagagcgaaatcctggcggagtgcagtccctcggggctagcatccacgttccgcctgcgccctgcccgggctgttccgagggatccccgcaagggcactgccccagctttcactcttggagtcggggaaataaggtgtccacaaaggatgcaagcaagtcattgtcagtgcagacccgaagggcgcgtccggagtgcaggtatgaaagacgggcgcatgcgcgcagtccggggccgggcttcgcagcccgggctccgctctagccccgcagcgtctcggtggccggtctcgtcctccgcccgccgcgcgggggcgccgctctagccccgcgccatctcggtggccgtccgcccactccgcggcgttcggggaaatggctgcgagaccctagaggcctgcggcctgcggtaagtggcgtcccgggcgccgggtagaagagccggccgccgcttgggccgccctcgggagcggggcggggccggcatcggagcccggctggcgagagccgcggatcccgca

SEQ ID NO: 27064 - DNA, 2300 bp, Homo sapien
aggaggagcattaacctgtgacccacaggcaggcactgagacagcctctttggactggaatgttaaggaatgtcgccttaaggcgctagcactcaagctttctgctcgtgcatccccttgcacactttctccttgacgttcaggctgggcatggtggctgacgcctgtaaacccagcactcccagaggccgaggcgggaggatggcttgagcccaggagatcgagaccagcctgggcaagaaggcaagaccccgtctctaaaaaactttaaaaaataaaaataggccggatgcggtggctcatgactgtaatccgagcaccttgggaggccgaggtgggtgatcatttgaggtcaggagttcgagaccagcctagccaacatggtgaaaccccacccgtactaaaaatacaaaataagtagccgggcgtggtggcgggtgcctgtagttccagctactcgggaggctgaggcaggagaatcacttgaacccaggaggcggaggttgcagtgagtcgagatcatgacagtgcactccagcctgggcaacaaagtgagactccttctcaaaaaatagaataaaataaaatcaaaataggccgggagcggtggctcacgcctgtaatcccagcactttgggagtccgaggcgggcggatcacgaggtcaagacactgagaccagcctgaccaacaaggggaaaccccgtctctactaaaaatacaaaaattagctgggcgtggtggtgcgcccctgtggtcccagctactcgggaggctgaggcaggagaatcgcttgaacccgggaggcggaggttgcagtgagccgagatggcgccactgcgctccagcctgggcgagagtgagacttcgtctcaaaataaataactaaataaagaccaataactgtttcccatagggttatgtagttgcaaatgaaaaaattactggcatgtactgcctctgcatatgaagcataattttgtcaagaccttatacctgcagatttagctctttcgattaacggaaaatgtccaaaatcagtctcctccaacctatttgccgaactggacttactgtcgctgagtagaccgaccgacatagcttacacgttgttcagctcgcttgtaagcaaacacacgaaaccacctcacccctgacttcagaaagaagccgtcccgtgaattcctcacagatgaaatcaggagctgcccctcaaggactctatttcttccttcggctctatcaaatattttaaggtacttcccagcaacggaaacatgggaccctgcaatgacagacttcgcattcctcctgagcggacaggcaataagcaagtaaacgcgcaaatacccaagtgcggcctcaacccgcgctcctgccgggagggtctccagtcaccgagtaaccccggccctgccccgcgccgccgccgggactccgccccgcaagcaagtggggtctcctttgtcccgcgcgccctggccgcgtcccgcccttcggcgtagcccatgggaggcgccctgagggcagggcccttctgattccccacctggcctcgagtgaggacgcgctcaacaacatctcgagtaaagcgggggaactcgcttcaacgcgcagacagcacagctctcgcccagcccggtctcgggtcagccgtctctccctggacctcagggacactagccctggaaggccgccggtcgggaggggactccctccccgtctgaggggcggccgcggacacccggcgcctttcccccgccccaccccgtgcggcctcacgcaaacgacaggaaaaaagctgggaccttcgcctccgactcagtgtagacgtcgccatcccggttccagatttccgcgctccaacgcctccgcagcagccatcttgccagagggccgacgccttttgactctggcgccaacccgtagtgcgtggtcgccgcgaggggagttctgcgcaagtacggaagctgaggttccgcgcttccgggaggccgtccgccccgccccctcgcgggggcgcttcattggtcatcggctcgcgctctcgcgctctcttgctgtcgcgagaggtgctgaggggcggcctccggtgcgcctgccctcccgctccccgcccccgcccccgcccccgcctccgccgcggcccccacctctgcctccttctactcgggcgccccggcggccgccacctctccccagcccaggagaggctgcggagccgcagccgcccagaccgcgcagcgcgggaggcaggttccgcacggtaagatggcggcggcgggcccgggcggccgggcc

SEQ ID NO: 27065 - DNA, 2300 bp, Homo sapien
aaaaaaaaaaaaaagaaaaaaaagaaaagaaaaagagagttgcaggagaggccaaatctgccgtgagttttatcaggaacaacaagacaaaatacatgacatgtgctttagcaacaaatatgtacgtggcaaacctattttgtttgtttttttttaaataagggcatgaaagctgacactcaggagggggttacctgtgggaggggcaaatggctgaagccccagaggcagctgttccggctttgggagaatgggtggatacctgagacaggcaggggcacgccaccgtccactctgtctttctcttttgccactgatacatacgttacacatactactttatacgaagtactgctaaagtgtttcaataaattaaaaaactttggtctcttggctgaaaatgggatgaatgcagggtggtgagatctgagcagccagtcccttagggagacacccaagcgagagagaacatcggcagaagagatggagagcaaggtgagatcaagatgctttggccagagtcaatggctgctgctagacagattaccggacaaaagagagggaagaatagaagatggtcacaggtttcaagcatgagaggccctgcaagatggggccacaaataaggaggaaggactggaagaagaacaggtttgagaagcagggcaagtttgacgtgactattagacatgcgtctggagaaatcaagcaggtgtctgaattacagatcctgagctcagagctgaaaacatgaattagtgaaataaggggcggggggggcggtgctggggcacagggatatttaaagccaagaattcagcaaagaccataggaagagcgtagatagggaatgagaatcgccattacttggaggatgccaaccttgaaggtaaagcagagaaagtggcaccagcagaagaaaacttgatgtggagcggcaggtaaagtggaggagaaaccaggagtcgctgtcacacacgaacacccatctttcgttgtcaactgcaaaactcactgagaccaactttttattcacgacaattaatggtaacttaaggactcattttctttttcttttttttttgagacagagcctcgctctgtcgcccaggctggagggcagtggcgcgatcatggctcaccgcagcctcgacctcctgggctcaagcgatcctcccacctcagcctccagagtaactgggacaacaggagcgcaccactctgcctggctaatttttttatttttagcagagaagggagtctcgctgttgccacggctggtctcgaactcgcgggctcaagtgatccgcccacttcgacctccgccaccgcgcccggccctaggaccaacgttaagagctccctaggaaaaggcaccttttctctcggcccattcggtgatcggcactcacagcgcttccactccgggcagttacgtgcgcccatgaaaagcaacaactttgtagaactggccagtcctgttagcaggaagaactcggtagtctcaaactccagcataaaaagattcagcagaagaaaacacccgtgtgctgaagactcctactttccatgccacactttacatcctcacccgctcggtttctgctttaaagcagcagattttattaaaaagacttcgttacggacgtcgctcctccacagagacagctaccgccgcccctcaggctggccgggaccgccccagaacaccagcgcctgaggccgcgcgcctggaggctgagccctgactgccccctgggcaccggcgcggggcggccgtccgggcctggactcactgcgcgccccaattccgcacctgccagcgccggcgcttccaaggcccccagagcgggggcggcgcgcaccccggccacatcccgcctgcccgcccggcccggccccgggagacgctcggcccggccgcccgggcccgccgccgccatcttaccgtgcggaacctgcctcccgcgctgcgcggtctgggcggctgcggctccgcagcctctcctgggctggggagaggtggcggccgccggggcgcccgagtagaaggaggcagaggtgggggccgcggcggaggcgggggcgggggcgggggcggggagcgggagggcaggcgcaccggaggccgcccctcagcacctctcgcgacagcaagagagcgcgagagcgcgagccgatgaccaatgaagcgcccccgcgagggggcggggcggacggcctcccggaagcgcggaacctcagcttccgtacttgcgcagaactcccctcgcggcgaccacgcactacgggttggcgcc

SEQ ID NO: 27066 - DNA, 2300 bp, Homo sapien
gagcaccatctcacacagttctttgtctttttccagtctgctgttgactgggttagctcagcccgaaaggtgcccccacctttgaggcagttcccgcacgtgatgtccagtaccgcggtcttccctcttgctgctgcctgtcagtcatggcagaggaaagtgtcatctgtcagtctccttttcatggactcctcatcttgagaattgtagttgggctggaaggttgcagggctaagtggggtgcagggaggagccccaggcccagggctggcttgtcttggtttacaagaagctgtgcggggtctcctggggcgtctgtggggggtgtggatgcagaggctgagcaacgggcgccatacgtagtgaggtgtggatttgctttaggaaaatctctagcatcgtctccctatagcagcacttgaaataaacaagaagttaggtgggccaggcccaacaagagggaggcacgcagccttccagaagcagaggccagtgggtgctggctgtgactgccctgtccgcaaggtcaccctgtgtccttgaaaacccaggtgttgactgtctattgtccctacataatttttcaccttaggcctcaaagatgcttgggtgcggggcagctctcagaatccaccagaagcgtggagagcctccatctggccactaccagcacccagctttataatgtccctgtgagatggccccttcacccacccagccatccctgcatggcccgtttcttcagctcatccagccttcactcaggtgtccaggggtgcctcctcagcccaacctatttgaagtaacaccccttccctacccctttcactactttgatttttgtctacctgccccagaacatcagctccaggaggaaggggactttgggtaaccagatggcaaatgtctgctgcagcatgatcacagatctcggtaggaaatcaccatcacagagtgaatggaagcgaatcacctcaaagagggtgctgttgacagcgatacgtttagcaacagtttccaaacttcctggctatgggctagggctgtttggggcaataaacctctctctgccaccatcttttcacctaccctacgtcaggatggatgaaagtatgaccttgcttttcagggtgcccgtgtctttctgttcagagggccctgggagcaggccctgcagtgcagtgggttgggctgttggagacctgagggctagggggagggagggggtaaatgtgggtctgttctaagtgcaaggccctgccttagacgtgtctccctcggcccctgggtggtggctgctgcgtggaggatggactgaggtgggccctagtggaggtgggggcaacgcctgaggagcaggccctgccgcctcctggggaaaggctgcatggttgaggccttcccctgctggcttcatccttggcatggcagcaggagcacacagagtgggggccccaccccgtcacccctgcccccgagcccagaacctggcctgtgatgggtcctcaggacaccttttgtccaggaacccaggggccaatgacaaccttcacaggcatctgctgagaagacatgggccagcgctggatttgtccagctctcccaggcttggtccaagggctcaggagtggacccatccctgccccgaaagatccattttaaaaatcagtgaccctgtacttttactctctttgcacttggttaagactttatccctgattttatttgatcggtaaggcagggactgccatcattccccattttatagacagaggacagacggccccatggctccgtgtcgtgtccaagggatgggctggcacctcttggaccaggcttaccaccagggcccttctctgaagccccagtctgaccggcctgctgctgggaatccccctctgcccccacactaacctctgctggggctgagccagggcgcgtcggacagtcagggcgacccagccagggcgaccgttggccccgctcctatggggcagcagggaccgacgtcagcagggtggggcgggcacccgagtggtatgccccgccctgccccgcctgcccgccctggtggccgtctgggggcgacaagtcctgagagaaccagacggaagcgcgctgggactgacacgtggacttgggcggtgctgcccgggtgggtcagcctgggctgggaggcagccccgggacacagctgtgcccacgccgtctgagcaccccaagcccgatgcagccacccccagacgaggcccgcagggacatggccggggacacccagtggtccaggtgtggcgggggtg

SEQ ID NO: 27067 - DNA, 2300 bp, Homo sapien
cggggcccaggagaggccaccaggtgagccccttgccgagtggcccctggtctgcgtgggggatgggccacatgggcttgcagggccaccatggtgaggtgggtcccgcaggcgccttttgggctctgtagcccgaggctgtgctctgcaggtaccagccccgggcaccgcgcttgctttgtgcatatttctgcctttctggagtggctggcaggtgatgaggctgggacttggggacatgggttggaggagtggccacatcatctcattttctttcatctgtgctaacgatgccagatgccgtccccaccatccgctggcccccaccctcgacaggagagtctgtgagcgcaggagcgtctgggccagggtgggcctatcagctggctggagggcggcttgtcctcagggtgggcctatcagctggctggagggcggcttgtcctcacggtgggcctatcagctggctggagggcggcttgtcctcagggtgggcctatcagctggctggagggcggcttgtcctcagggtgggcctatcagctggctggagggcggcttgtcctcagggtgggcctatcagctggctggagggcggcttgtcctcagggtgggcctatcagctggctggagggcggcttgtcctcagggtgggcctatcagctggctggagggcggcttgtcctcagggtgggcctatcagctggctggagggcggcttgtcctcagggtgggcctatcagctggctggagggcggcttgtcctcatccacgatgcggcaaccccgtgcccctcagtcctccctccctgcgcccgctccttggggagctccagaccctctagcgatgctggcggcctggatcgaggccaggccaggggtgggaggccttcccggtggttgtagcagggtggattggtgcaggagctgaccggggcttcccaatcactgggctcaggccctcgtgttactgttgctgaggttcagaggggcggaggcggcccctgtaggtggggccgggagcaggcccaggcaggcctagagtgaccagattcatcaagtaaaaacagactgcccagaggaatgtgaatttcacataaaccggaggggatatacttctactaaagaatgaatcctcacttctccgaaacccggtttcattgagtgtcttgcggtttttctgcacccaggtggggagcagagacagggtcaagtgtgggctgggctgggcagggagagtgctaccccagcccgccctggtgcccaaggccaagtcttgctaccccaggagctgtgtccaccccgcagaggctccgcgggaggaaggaggccccatctggatgccaggccccgctttggggctctctctcttcctccttttgccatgatgttaactattccccctggtgccagtggaggggcctcagcagcagatgggggctgggccgccagccaggttgcacccagaagggagcctctgaggggctatttgggacaatgaagtcatggggacgggatgggggttgttggatttggccgtcatggtatttttgcatccagaagtctttttgaattttgtcctcaatgatgtttgaagcacaaaaaccgtgcggagcttcactgtggtatatgctcatcaccgtctcctcctcggtgccgtttttagttgaaaaggatccacatgacaaattgtaggccaattggaaggcctagaagcaagatgtgaaaaacaatgtgagttccacagcagccgcccgactgggacacatgcgtggctggtcccaggttcgccccagccctgtgtgcccggagtctcccctgagtacccgaagtccttaacaaaacaggccaggacggtggcttctgagctgctcctctggaggcgatgaaaacaccctcttctccaggggctcagcctgcaccagggtggggtttctgagaggcccctcctcacccgaggggtgccgctgaggggcctggccacactccccctgtctttgcaggacgctgctgaccggggcggtgggctccctgctcctggaatggtacggctggcagagcatcttctatttctccggcggcctcaccttgctttgggtgtggtacgtgtacaggtacctgctgagtgaaaaaggtaacgcaggccgggcgggctagtcccgggcgcccacagctgcccagtgcctcctcccctggtggcagccgctgagcagcctggagcaggagcccggagacgatggctttgacctcccaaagaatccgccagtgaggaaaagcgctcgggtgctgagctgtcagcgg

SEQ ID NO: 27068 - DNA, 2300 bp, Homo sapien
gggggttgttggatttggccgtcatggtatttttgcatccagaagtctttttgaattttgtcctcaatgatgtttgaagcacaaaaaccgtgcggagcttcactgtggtatatgctcatcaccgtctcctcctcggtgccgtttttagttgaaaaggatccacatgacaaattgtaggccaattggaaggcctagaagcaagatgtgaaaaacaatgtgagttccacagcagccgcccgactgggacacatgcgtggctggtcccaggttcgccccagccctgtgtgcccggagtctcccctgagtacccgaagtccttaacaaaacaggccaggacggtggcttctgagctgctcctctggaggcgatgaaaacaccctcttctccaggggctcagcctgcaccagggtggggtttctgagaggcccctcctcacccgaggggtgccgctgaggggcctggccacactccccctgtctttgcaggacgctgctgaccggggcggtgggctccctgctcctggaatggtacggctggcagagcatcttctatttctccggcggcctcaccttgctttgggtgtggtacgtgtacaggtacctgctgagtgaaaaaggtaacgcaggccgggcgggctagtcccgggcgcccacagctgcccagtgcctcctcccctggtggcagccgctgagcagcctggagcaggagcccggagacgatggctttgacctcccaaagaatccgccagtgaggaaaagcgctcgggtgctgagctgtcagcggctccgccacccaattcgatctggaaggttccatctagggctaaggcagacacccaggaagacctgctgggcacaggtcaaggcagggtgcaggagcagccgagtctttgggtggccagggggctctggaggaggccgtgtggagggtcgttcagaacgcggttctcaaaggtgatgctgcctgttaggtgtctggtaggggaggccaagggaggctggcgcccatgtgcaacctgaggcatggacgaggcctgctgacccctctggaaccacccccaaatccccaatcctttggcaacgggtggcgcctcccgccctgatagccatcagtttgaaaccgttgctccctcagatctcatcctggccttgggtgtcctggcccaaagccggccggtgtccaggcacaacagagtcccctggagacggctcttccggaagcctgctgtctggtgagctgggacctgtgccaccccttggagcagcggcagggccggtgaccatgggggtgtgaacctggccggacctgacagcccttgagccagcagggcctagggctcagagaagtgggactctggcccccaggggacgcctctcggggtgggtcccacaggcccggccagctcgtgcggcaccagagtcacggtccaccattgggccccgcagggcagccgtcgtctcccagctctctgcagcctgctccttcttcatcctcctctcctggctgcccaccttcttcgaggagaccttccccgacgccaaggtgagtcgggggctcccgcagggtgaaggagcgcccagaaggcacgaggcttgagctgcaccaggcactgtgggtccttggcctgcagatggtggaaccctcggctcctcctggactctgagggtcctggcactgccaggctcttcctctggagaggaccccgtccatgctcggggcaggtttctgtgtttgaggctggaaatgatgcgggcgctcggtgccttcctgctgcggctgcagccctcccagccctcatcgtgacctgctggcccacagaacccgacttcagagcctgaggaggccggtgcagaagccgggatgtggacagaggggtcacctgcggtcagcacggttccttctctgaggctgtcttgctgccctgccgggtggtggtcaagagctgcacattcccaggagcagggctggccctgccggagagctttcctgggcagtggtgggcacgggggcgctgtccagcctgagtatcctcttccagatggccagatgccggccctggccccctctaaggccaaactcccccctgcagggctggatcttcaacgtggttccttggttggtggcgattccggccagtctattcagcgggtttctctctgatcatctcatcaatcagggtgagccccagggaggggaccggggctggaagccacaccctggttcacctcgctttcgaggggcaggatgctcccatcctggggctgcagcttcagcacacggagagctgggacagaggggca

SEQ ID NO: 27069 - DNA, 2300 bp, Homo sapien
agattcaaggggaggggacacaggctccatctcttgagggaaagaatgtgggtgccagttttaaaacagcctcagcagggcaccctcccacgatgggcacaaaggtgcccaggcagtgctgggatgggaagaccctagaattttggcaaaccagtgtgggagacaagtgtccctggtgcctctcagacactatatttccaacccacagatagataagttgcgggggcagagaagagtgcttggaccccaaggggggtcacagggacctcggcctccccatccatggctgtctggcccagggcccctcctgtaccccacatggccaccaggttgtccaatggactccaaggaggaccagccagagctgggctggaaggcgaggcgtgccctgagggtggacacccccggcagcccccactccatgcacgagcacagcctccctgtcagcttctttgaaagttgagagcgtcttttgtattgcaaaggccaaagggccaagcacccctttaattaaaatgcacgtcctttaattaaaggcctcataacacatgaagggcatccactgaattacgatgtgtgacatagtcattaccctgctgttaattactaattaatgaagctatttcaataaatagcttcctcaccgtcgctccccctcggacaggccccctgctgggcacgtcggaacacagacctcggctccgcgccagcagccggcgacgctgaata[450 bp omitted]taatcccagcactttgggaggccgaggtgggcggatcacaaggtcaggagatggagaccatcctggctaacatggtgaaaccccgtctctactaaaaatacaaaaaattagccaggcgtggtggcgggtgcctgtagtcccagctactcgggaggctgaggcaggagaatggcaggaaccagagaggtggagcttgcagtgagccgagatcgcaccgctgcactccagcctgggcgacagagtgagactccatctcaaaaaagaaaagaaaagaaaagaaatgacagataagtgcctcttaccaggaggggaggtgagtaggagagccctggggaggctggcgtggggcggtccgggcctggggacaggacctgggggtcagggagctcgggcaggcacagccccagccctggagggacatgcggggggtggggcgggaggactcagggcagtgggcttggggagaagccgggaagtgaccaggatggggcctctagggcttgtgggctgcgaggctggcaggggcagccacggctcaactgcagcgcgccgggaaactggttctcccctccacaggcctctgtgtttcccagcttctccggaccggtcatcacaatagtaaatatttccaacaggactccccgtcacagggactcgaaatcttcatgcaaagtcccgtgggaaagagcaagcgtagagctcggtgggcactgcagcgcccggaccaccagagctggcaccgcccgcatgtgaccccgccccagcccgtgttcctgagctggtgtcctcggtgatcccgtgcccacagccctgtgcctcgcccagcctccccaagcccgcggacccggagccgctccttagacgatgattgtcctggatggggccgggactgcagcccccgccacagaactcctacccgagccgtctgtccacactgcagcccggccctgccctgctgggccctgtggtctttgaggggaagggcatgggggcgtgctggaccatggggaggggcggcgaggagagcctggagctctgccctgggccaggattctgccccttgtcctttaagggggaggcaggacacgctgcgcacccgggggaaggacgcgccgtggtgc

SEQ ID NO: 27070 - DNA, 2300 bp, Homo sapien
tagcgcaagagtccctggcgacacgcaggggccagagcgggggggcgcgccgcaatagcagcagcgccagcgccaacaccctgtcccgctgaggggccgcttcgggtcggggtcagggtcgtgggcgctctggtgcagccgcggcgcagcgtgtacccggagcccgcacactccctgctcggggcgccctgtggccaggcttgaggggcagagtgagagggagtttctagaacctgttgaaaaacgccacgagcgttgcaggccggggagggcgggaaggtggagggcagcgcggcctggggctccccgggggtgggaggggagctctgtgagctgcaggaccgcctcttccctgccagccgcttcctgggcatctatcagcgaaacgcgtgaggcttggtgggctttcccggagcctccgaacccctggggtccagccacactggatgggaatgtggccagcctcggactcgccttttcagtcctcttccaaccccgcatgaaggccagaaccccagcccttctcccaggtgggaacctgcctggaggcccggccgagtgctgaggctagagtgtgctgagggatagtggcttctccggtcctggcttgggtgggagactgggccaccctggcctatggcacgaggtggagcggcccgtcgggcccttctgtgtgacctgggaagggccgcataccctccctgttctccaggctccgccccaggaggagccacagcgatggggcagtgtgcgcagccccgggaggggagtgggagctgcacgtgtgtggggcggatgtgctgtctggaaggttctgggaacgcagcagtgaccggcctgtccggtggttccctgccaggtgcggggtgtgaggagacagatgcatggataagtctccgtgggaaactcaggcctttgtcctggcggaggggaatgggtctgaggcagcctctgccgggctggcggcctgtctggctgcgcgtcctgcagcaccggcctcacccccagcacacgcccgccaggagcgcaggggccccgaggatggaagcgtctgtctgaggcgctgtcctgggaccccaccccgccttcggggctgatgcacagaccgggaattgaggatacctggtgtggaggaggccgctgtgtttgggcctgggtctgaagggtgagtgggtgtcattgtggccacgggccggggtcgggggagcattcaggtggccggaggaggcctggcacagggaagggcagtgaggggcccgggtggggccaggagatagaggggcgggaccaggcctgtgggacagtttgaatcacgcggggagtttggtctttatgggaagaaaggcgccgtggccattcggagagccactctggcactgctgccggtgcggtccggggctgcggggcctcctcctgggcctgaactgcagggctggtgggggccatgggggaaggtggctccacaggtccccggagctgggggagcaggaggatggggttgaccaggagggaaagctatggagctggagaatgcaggaggcccccgaggggaggtgcagccagcgctggtggggaggcctctgaggggtacgcggtaattgacatcacgggtgtgggtgagagtggctttcaaagcatcggctggagcagggtccccattaaagccagagacgctgacgccatggggctggggttggggctgggccggggctttgggaggtccgaactccccagcagggagccagggctctgggccagttcccaggcccagttaatcttcagtagaatcgatcgaccttggctcagagggttggaggcagggatgggcagggggtgaggggtgaggcgcacgaaacagcacccgggtgaggcccctgctgcggcccctgcgggaccagccacgaattccgggcttcagccccgccagcttcagaggcggcgttttcggtgcgacgctgccacctgctggctgtctgggagttgcacccagaggctcagaacccgtgtttctcagagggcccgggaggggcgaaactgcgggttcccaggccctcccggattctgcgcaggtggacgctgggggctgtttcacaggcgcccacatgataggggagctggaggaacctgccgtctccgccatcgagcgcccctccgagctggggttggacgctgccagtttgcacagcagcaggtgagcctggggggttgagggctgagcgggggtcccagccgatgaagcagccccgcaccttggccagcttctcgaacctcctctgggcagaggctgtggaggctgcgaa

SEQ ID NO: 27071 - DNA, 2300 bp, Homo sapien
cttcgaggtccccctctttgcggctcacccttctccctctatggcccccttaaccccaacccccctcggctgcctctctgagtaaaggacaggccagcgccgagcaggtatgtcccctgccagggtcccccgcacacctggatcttctaggctggggagtagtggaaggatctgcggggctctcgaagccgtctgggaggaacgtcaatgaccagaggaaggaacaagggtttcgggtgggattggccaattccctgggtcatctcagaaccacgagcttgtcttcctgggttacagggtcctgagcttggccgaaaagggacaaacgaagggccgggtgtgatgaccctgcataggtttgacagccctgtgtccttccaaatcaagtgagtgggtctgggtccccggccccctccagcctggggtccaagcctccctggtctcctcgggcagtcagcctctctgctccagtgccgtcagttgtcacctacgtgggtaaaacgccaggagaggctggatccccagctcaccggcctgtggcccgggcatcctgggcttgcagagggagggccgagggtggtaactaggaggagtggctctgagccggggagggaacacggccagagggggatgaaggccacacggagcaccgcgggagccccgccgtctgcgcagggttcagcctttcagcctcgatgtgggaagtctctccatctgttcaggttttctttgggtctttttaccagccatgtttcgcagtttgcagcgtacaagtctcacacttcctttgcgaaattattcctaagtagcttattctttctgatgctatttgaccaggacgctttctgcatttcatcttggggtgttcactgtcagtgcagaaatatcctacgccccatgatcttgttaaactccttcgatcatcttatcaggttttacttcattttattttatctttgtagattccttaggcgattccacctacggcgtgaggcgtacttctacatcttttttgctaatctcggtgatttgagttccatgttcttgcctcactgccctggctggaacccgctgtgcagtgtgggaggagcgggaggggagggtccccttgacttgctcccttccgtggggagacggtcaggctttccccaggaagcgtgctgtaggtttccatagattcgagacggtcaggctttccccaggaagcgtgctgtaggtttccatagattccattgctaggttgaggaggttcactctcatttctggtttgttgaaagtttttttttaattataaatgggtgtcagattttgtcaaatggattttctatatcagttgggatgatcatgtggcttttgtcctttattttattaatatgatttattacattaattgagttctggctgttaaaccaatctttcagtcctgggaaatatcccacttgatcatggtgtacagtattatctttttaaaataaattgttggatttggccaggcacggtggctcatgcctgtaatcccagccctttgggaggccaaggtgggaggatggcttgagcccgggaggtcgaggctgcagtgagccgagatcgtgccattgcctgggtgacagagtgagaccctgtttcaaaataaataaataaatagtcgaatttggtttgctaagttaaaaaaattaagtaagtgtcccgctcagcagcattaattacattcacgatgttgtgtcaccatcaccaccagctacatccccaactccaaacagaaaccctgtctccatgaataacaactacccattcctctccacccccagcctctcttaacctagaatgtactttctgtctgtgaattaggctcttctagatatctgatgcaagtagaatcatacaacatttgtccttttgtttctggcttatgtcactcagcacaatgcttccgaggtcgctcagcagggggcttccgaggtcgctcagcacggggcttccggggtcgctcagcacggggcttccggggtcgctcagcacggggcttccggggtcgctcagcacggcacttccgaggtcgctcagcacggggcttccgaggtcactcagcatagtgcttccgaggtcgctcagcacagcgcttccaaagttatttacctggtagcgagtgtcagacttccttcatttttctggctgaatcctattcccatgggtggatggaccgcattttgtcctccattcatctgctgggggcaactgtgctgtttccacctttcagccattgtgagtaacgctggtatgggagcctaagtgtctgtttg

SEQ ID NO: 27072 - DNA, 2300 bp, Homo sapien
tcgcttgaacccgggaggtggaggttgcagtgagctgagattggaccactgcactccagcctgggcaacagagtgagaccctgtctcaaaaaaataaataaataaaaataaaataacaagcctcagagaggatgtggagaagttggaattgatggcgggaatgtaaaatggagcagccaccgtgggagacgatttggcagctcctcaaatagtggaacaccgaactgccttacgatccagcaattccactcccaagggtaggtccggaagaatgaagacaaacacccaaacagacacttaggctcccataccagcgttactcacaatggctgaaaggtggaaacagcacagttgcccccagcagatgaatggaggacaaaatgcggtccatccacccatgggaataggattcagccagaaaaatgaaggaagtctgacactcgctaccaggtaaataactttggaagcgctgtgctgagcgacctcggaagcactatgctgagtgacctcggaagccccgtgctgagcgacctcggaagtgccgtgctgagcgaccccggaagccccgtgctgagcgaccccggaagccccgtgctgagcgaccccggaagccccgtgctgagcgacctcggaagccccctgctgagcgacctcggaagcattgtgctgagtgacataagccagaaacaaaaggacaaatgttgtatgattctacttgcatcagatatctagaagagcctaattcacagacagaaagtacattctaggttaagagaggctgggggtggagaggaatgggtagttgttattcatggagacagggtttctgtttggagttggggatgtagctggtggtgatggtgacacaacatcgtgaatgtaattaatgctgctgagcgggacacttacttaatttttttaacttagcaaaccaaattcgactatttatttatttattttgaaacagggtctcactctgtcacccaggcaatggcacgatctcggctcactgcagcctcgacctcccgggctcaagccatcctcccaccttggcctcccaaagggctgggattacaggcatgagccaccgtgcctggccaaatccaacaatttattttaaaaagataatactgtacaccatgatcaagtgggatatttcccaggactgaaagattggtttaacagccagaactcaattaatgtaataaatcatattaataaaataaaggacaaaagccacatgatcatcccaactgatatagaaaatccatttgacaaaatctgacacccatttataattaaaaaaaaactttcaacaaaccagaaatgagagtgaacctcctcaacctagcaatggaatctatggaaacctacagcacgcttcctggggaaagcctgaccgtctcgaatctatggaaacctacagcacgcttcctggggaaagcctgaccgtctccccacggaagggagcaagtcaaggggaccctcccctcccgctcctcccacactgcacagcgggttccagccagggcagtgaggcaagaacatggaactcaaatcaccgagattagcaaaaaagatgtagaagtacgcctcacgccgtaggtggaatcgcctaaggaatctacaaagataaaataaaatgaagtaaaacctgataagatgatcgaaggagtttaacaagatcatggggcgtaggatatttctgcactgacagtgaacaccccaagatgaaatgcagaaagcgtcctggtcaaatagcatcagaaagaataagctacttaggaataatttcgcaaaggaagtgtgagacttgtacgctgcaaactgcgaaacatggctggtaaaaagacccaaagaaaacctgaacagatggagagacttcccacatcgaggctgaaaggctgaaccctgcgcagacggcggggctcccgcggtgctccgtgtggccttcatccccctctggccgtgttccctccccggctcagagccactcctcctagttaccaccctcggccctccctctgcaagcccaggatgcccgggccacaggccggtgagctggggatccagcctctcctggcgttttacccacgtaggtgacaactgacggcactggagcagagaggctgactgcccgaggagaccagggaggcttggaccccaggctggagggggccggggacccagacccactcacttgatttggaaggacacagggctgtcaaacctatgcagggtcatcacacccggcccttcgtttgtcccttttcggccaagctcaggaccctgtaacccag

SEQ ID NO: 27073 - DNA, 2300 bp, Homo sapien
ccagcactttgggaggccgaggcgggcggatcacgaggtcaggagatcgagaccatcctggctaacacagtgaaaccccgtctctactaaaaatacaaaaaattagccgggcgtggtggcaggcgcctgtggtcccagctactcgggaggctgaggcagaagaatggcgcgaacccgggaggcggagcttgcggtgagccgagatcccgccactgcactccagcttgggtgacagagcgagactccttctcaaaaacgaaaaaaaaaaaaaaaaaagaaagtgaaacgtcaaccacagagtgggagaaaatatttgcaaatcatatatctgataagggttttaatacccaggatttataaagaactgctacacttcaacaacaaaaaaattccatttaaaaataggcaaaggactcgaatagatgtttctccaaataagatataaaatggccaataagcacatgaaaagatgctcaacagcactcactggtcactagggaaatgtgaatcaaaaccacagagacaccacctcacatgcgataggacggctgctctccaaaaaacaaaaaattagttgggtgtggtggcatgcgcttgtaatcccagctactcgagaggctaaggcaggagaatcgcttgaacccgggaggtggaggttgcagtgagctgagattggaccactgcactccagcctgggcaacagagtgagaccctgtctcaaaaaaataaataaataaaaataaaataacaagcctcagagaggatgtggagaagttggaattgatggcgggaatgtaaaatggagcagccaccgtgggagacgatttggcagctcctcaaatagtggaacaccgaactgccttacgatccagcaattccactcccaagggtaggtccggaagaatgaagacaaacacccaaacagacacttaggctcccataccagcgttactcacaatggctgaaaggtggaaacagcacagttgcccccagcagatgaatggaggacaaaatgcggtccatccacccatgggaataggattcagccagaaaaatgaaggaagtctgacactcgctaccaggtaaataactttggaagcgctgtgctgagcgacctcggaagcactatgctgagtgacctcggaagccccgtgctgagcgacctcggaagtgccgtgctgagcgaccccggaagccccgtgctgagcgaccccggaagccccgtgctgagcgaccccggaagccccgtgctgagcgacctcggaagccccctgctgagcgacctcggaagcattgtgctgagtgacataagccagaaacaaaaggacaaatgttgtatgattctacttgcatcagatatctagaagagcctaattcacagacagaaagtacattctaggttaagagaggctgggggtggagaggaatgggtagttgttattcatggagacagggtttctgtttggagttggggatgtagctggtggtgatggtgacacaacatcgtgaatgtaattaatgctgctgagcgggacacttacttaatttttttaacttagcaaaccaaattcgactatttatttatttattttgaaacagggtctcactctgtcacccaggcaatggcacgatctcggctcactgcagcctcgacctcccgggctcaagccatcctcccaccttggcctcccaaagggctgggattacaggcatgagccaccgtgcctggccaaatccaacaatttattttaaaaagataatactgtacaccatgatcaagtgggatatttcccaggactgaaagattggtttaacagccagaactcaattaatgtaataaatcatattaataaaataaaggacaaaagccacatgatcatcccaactgatatagaaaatccatttgacaaaatctgacacccatttataattaaaaaaaaactttcaacaaaccagaaatgagagtgaacctcctcaacctagcaatggaatctatggaaacctacagcacgcttcctggggaaagcctgaccgtctcgaatctatggaaacctacagcacgcttcctggggaaagcctgaccgtctccccacggaagggagcaagtcaaggggaccctcccctcccgctcctcccacactgcacagcgggttccagccagggcagtgaggcaagaacatggaactcaaatcaccgagattagcaaaaaagatgtagaagtacgcctcacgccgtaggtggaatcgcctaaggaatctacaaagataaaataaaatgaagtaaaacctgataagatgatc

SEQ ID NO: 27074 - DNA, 2300 bp, Homo sapien
ggcctggctcctctcacagactctttgagagcgtatttgtgaaacgtagcatattgtgggtgattagatttaaatttcaatacactttgttaaaaatagagttggctctcgccaagaggaggccgcaggaaggggctctcaacggctcgtctttggaatattaatagtatggaaatgttattagaataatttttcatcatgaataataaattaatggaataattcggcagcgccacgtgacataccctgctaagaggggctttgttttaacagaatggggagggtgggtttggggtgtgggggagggcagagctgggggagggtccgcccagggcaggcggggttgggtggaagtgagtgaggtgcctgaagagatgaaggctccggaggcatttggggaggaggacagagacctgggaccaagtcctcaggcacttttagcttcatgtctcagccagggttctggccctggccggctccttcccacagaaaagctgggaagagatcttggtaggtgtccggccccacacaccatcctgctgggggtggctgggttggacttcaccatccccacagccctgcagcctcccctcctgcatctttctccttggtaaatgccaggaacctcaaaagcacccagaggcccagagaaattgagcacacaggggtggggaattcaagagcaggagctgtttctagggccccaggggcagggccagggtctcctggtcatttctgtgctcgggacccctgctgcacctgagctcactgtggaaactgcctgagggggccacacggagctgatggggacaagcatgcagggtgggcacccttgtgggctcagcttggtccagggtgtccactgggggacggggagggagatggagcaccagggaagaagcgtctcttcatgtggtcagcgccccctccttctccccactccctccttttgcctcccttcctgctgctgcctgcacggtgagaacagagatgagatggcccctgcccgggagcagtcagcggcaccacaaccctcccaggccaacccagctcctgacagagagggagggaggcagcctggggctgggggccctggcagcagtggcacacggagtgtgcacatggatcctagtcagccttttgcagggcgctgaagccagtgggggcccccagggaggttttgggggagtgttgagggggcctgaagggttccgctcctcccacccagggaaccgccatgccactagtgggctgtcctggagactcggggagaaagcacacaggctgtcgggaaaggtgggtcgcaggcgggcagggcagccctgctgtactgatgggcaggcgctgggtgggtggaaggcaaagccatcaggtcatccccctctctgtccctgcattgggccaaccaggtgtgtcaggaggatatttgaccattcctgagaggcacattctctctctctctctctctctccctctctctctctccctctctctctccctctctccctctctctccctctctctccctctctctccctctccctctctctctccctctccctctctcccccctccctctccctccctctccccctctccctctccctctctccccctccctctctctccctctctctccctctctctccccctctctctccctcctctctctgtcacacacatttgcacatcctgcagtgtgaatggagtatgaatgtgtgtggtaggcgacagctgtgtgtgtacgtccgggtgcgtgtgtgcgtgtgtacatgtgagcgtgtgtgcacgtgagttagagcctgagtgtcccctgcgtgggttagtgtgtgcgcccgcccggtgccctccgtcttgggagtctgggctgctgctccgcgggctctggagccggcgctccccacgagcccggactctccgccgcgcccgggagctgcgcaatcggctgctaagacgccggcgccaccggctgggccctgttctcccctctcttttctacagtcttacccgcagctgacagggttcgaaagagcatgaaacggaggagacgttacagcaacgtgtcagctgaaatgatgggcgtagacgcacgtcagcggcggaaatggtttctatcaaaatgaaagtgtttagagattttcctcaagtttcaaatgaggcgaatcccgttttccgcgatgctgcagcgcgcgggttttaaccgcagggtcacgcggaacgccgcgccgcgcgactgtgcctcggtctctgcgcccggctctccctccggtccgcaagaggaggaaggcccgcggcgtgcc

SEQ ID NO: 27075 - DNA, 2300 bp, Homo sapien
cccatgacaggcatgtgtgttgtatgcacgtgtttgttgtatgttctctgtacatgtgtgcatgtatgtgcctgtgtgcacccagatgctcatgcatgtatgtgtgcttttgtgtgcacctgtgcatttgtgtgtgggggagtgctgaggtacagagagcagctccaaggtaggaaagaaccaccctgggccctccggactcccagaatgctcaggccctcctgcctggcagtctttgcccatgaggatgttccggctggaaggctcttctcatgctcccacatccctttcccaactcatccttcaggtcccaacttggtctgtctcagagaccaccatgtgcgtcaaagctctggcactcctggggcatgggctccccttggcctccacttcccaaagccgccccactctcaagtccctcaccagccactaggggtggtgactggcaaggagaggccagacagggattagtcaccgggtgcggctagtccacctccttctccaaccaggatccaccctcccaggccaggcaggtcctcctccaccccattctgacatctgcttggtggcatccctccccagatagcagcctgaggacctgtggagggggcaagagcagagcagagcaggctctacactgcctcatgcagggacccccggctgagtgtggcccagagtggtcagcccccaacatcagctgctccccatatggccctggggccaagacaccctcagggatgtcttccatcccaggaaggccaggtgggacaatttgccttccgggcaacacacattcctgcctcccagtaccctgtgtcccctgggcctccacccactgtgtagcacaagcatgtgtcaacagaaccctgtggccaggcccctgagtgtcaggaagtcccctagaagactgagctgcctgcccctggctcacagagaggtggggggcaaatgggggtctgcttggagcagggcagtggcagagagaaggaccagccccgaggggcttgggcatggcagggattgggcctgccctccaggtctctctggacactcttaccccagcccctggcctcctcaatgccacacttaaccaagtccccctcagaccacaaccccatgccctcgcctgctcctgaccctcagacacaggtgcccagctgccaatgctgttcccgcctcctgaaccccaaagtcccctcacctcctgccctgccctgacttgatgtggcctcacatcccagcctctgctctctctcccgtgctgtgcctgccccacccccacctcctgcaccccaaagtcctctcacctcctgccctgatgtaggctcacatcccagcctctgcagtctctccagtgctgtgtctgccatcaccctgccacctgcctccccgcctgttggacaacaagcaactgtgcttgttggggagactgcagacttcaggccccaccccagggctcagcagcctccagcctggccctcacacacccccacctccttgggaaaggctccaggacacatacggtccacaccagcctcctcctctgagctgccgtggccagccgtccttggcctcagatcatgttctgtcagtcctggtcccctggccccactcccttgaaggcagccagtgaccagagccccagaaggttcagttgcaggttccaagtgaatttagggatggggagactggggaggccctgctggagctgcataaaggcactttcagtgactgggggcctccatgctggccatggtgctgcctgtacttcatgcagcccagggtcctgcactctgggccctttcctgggggaggaaagaaacccagacatcagccctggggaggtggaaggaccccaaaaggggctgagccccagccactagccactcaccgatccaccggtgagcggggctggaaatcggcctccggcgggatcgtctcaggctcaggcacgaagcacaggggccctgtcgtaagtggaacctccatctgcagcaggtgctgggtgtggagaagccagtctcccgagggtggggcagggggtacggatggctgtcactcagaaggacttcccacccgggatggtcagtctcacaaacgacaaggagactaccctaggcttacacagaccccagggggcagggcccctcagtgcctctcaggaaggcagaaggggctgtggtcctggcccagttcctgggactcctgcctcaggctgcaggcactccctttactctgtgcacttgcagggatgaaacccacctccaactccacggactctactgcccagggcttcccca

SEQ ID NO: 27076 - DNA, 2300 bp, Homo sapien
cagaatctcaaatttatattacggggaaacagcagttagtgcattttaaaagatgattctggggccaggcgctgtggctcatgcctgtaattccagcactttgggaggccgaggcgggtggatcacctgaggttgggagttcgagaccagcctggcaaagatgatgaaatcctgtctctactaaaaatacaaaaattaaccgggtgtggtggtgggtgtctgtaatcccagctacttgggaggctgaggcatgagaatcgcttgaacctgggaggcggaggttgcagtgagctgagatcgtgccactgcactgcagcctgggcgacaaagtgagacttcgtcccaaaaaaaaaaggggggggttctggaattgtctgctcacaagtggagaagtcaacaggaagaaaattagaaaataaattggatttctgaagccctcagtattctaggatgggagcaggaggcaggaagtggtggccgggtcattggttcattagtccaccagtgttggctggtgttggggcactgcccccagggagagctgcttgtggtcacccctccagtgaagcaggcctgtttcattgtctgggatcccacagtctccctcattgcctcagctactttcccacctggtgtccccgactgggtgctgttatccttcatagtgtagcctttgatgccaacatgaaaggtcaatgtggcagggatgaggttgtgagatgaggtctggagcatattctctttatgtagaaccttctggttacttgggggactggggggcggggagcgggaaaactaaaaatccaaaaacgggcgtcacagactggagagccccgtgttttacttccggctctgttttctgtaatagcatcttggcactctcagacgatgcgtctaggtgggagccttcttacctcacactggaccccgtctcaccggcctgtgtacaggtgtgtgtgcgcacacacatacagacacacctcacacgaaagtcattttaaggcagtgttggagggacccaatcatgaccagacccttagttgagtctctccaaggagatgccgtcccagaactgctgaccctcagtctaaatttgtgccctgggcagctcttcagagacccctacgatggggcactcaggcactcaccttctctagcagacctttttgcctcatggttccgtcactttaaaaccactctctgaggttccagtcactacacagacatgttttcataaggaagcccaggtgagttggcatccagagtgagggctgctctgcacccggagcacagagtccacacttcggatgctttctcttggctgaggagctggagccagccagggccctctgtgcaggggcctactgcaagagcccaacgctgtgcccaggaaatcatgggaatgtgaacccccttggacttagaggcaggggccatctgctaggaagggtgtgtggaaggagcctctgaagcacccttgaaggattctgggagagctttggtccaggtatgggagagtgtcccaggaggaatgtcaaggcccagaggtgggcgcccagggcctgctgagtaatcagcgagcttggggtctgttctctggagcaaactgcctcacggccctgcacatcctggtttgccaatggaaatatctctgccttacaaagctgtttcagttcccatgatgccgtccgtgtctgtcataagcgttgtcgtcagcaggcaggggtttactcctctacctctggattcctttgcaggtaagagtagagggggctgctaccttgccagttctagagaggcatagcttcgtcatttagcctgaattcagagccttgccaatgatgcttcgtattttgagacggcaccctggtttgtgttcgttattaatttctctgtcttgatttggttctcacattggcgactacagctttctttctggaaggagtagccccatgctgtgcaggttttgtttttgctccacctgtgcttaagcaagaggcggttggcattctcagcatctcgtgttgtagaagtggtgtaacttgtcacgtttgcttttgcagagtaacagttacccctcaatgagcgacccctacctgtccagctattacccgccgtccattggatttccttactccctcaatgaggctccgtggtctactgcaggggaccctccgattccatacctcaccacctacggacagctcagtaacggagaccatcattttatgcacgatgctgtttttgggcagcctgggggcctggggaacaacatctatcagcacaggttcaattttttc

SEQ ID NO: 27077 - DNA, 2300 bp, Homo sapien
gcaggcactcagggcctgcccaggatgcgcaggccttatcacacagaagcaggtggcagggtgcccccagggaccccactgtccctacaatccccacacatcttctccatgtgggccaccatcctggaaacgtgctgttcattttcggatgtaccccaaatgcacagatttcatcctggcctgagatgtctgcccatggcccaaacacatcaaagtcccaggggatccagattcatcctcagggcaccagacatcccccagctctgttccagggaaacaagcccagcccgctttccccagctttaggcgaggcagggctccagggagacctggagcaacttggagcagcagtcctctctgtggctgaccggcctgctgggggcagtttccacctcctcctgcagcagtgtgagaggctgtctgctaccccactgatgcggatgtccaggcttggagccgtcttgggactccattgccgtccctgctgtcactgttcaccctgcttagcgcatctgcccgggcccactttgtggaaaacactcatttgacgtcaacctgcctgacaccccattccaggtctttctcctttagcaggacccagatccaggccacgtgaagatgttacagctgccagagctggaaagaaaaatatcaacctggaagcctctgtagggagttagccacaagggtggcaggattggatactggctgcagggagcgaaattcaacaccttgaccagaagggcgtccaggttggggatgctgaggggttaggaactgagaactgggctctctttgcacagttgctgctaagaaggggctgtccatcctcgaacaaagatgacaagtcccctggcccggcctaggctggggcacagagcactgcttttcctcctggtgatgaaatcggggtcaagaatctaacatgagaacttggttataagccggcgagcctctcgcaggtccaggggtgcatccacacaacagctgacctccgggaccgggcccagggctccgctgcggctgaaggccagggccgcaaagcgaacaaagcccgcaggtcccgcggcaagggccgaggcgcgcgacctggaacacgcgggggctcggagctctgggcgggcaggtgtttgcgcgcgggggaagggcagaccgaccccggacagacccgtagcccagctgtcggaccagaacagcgtttagtcttcggaccttggggaaaactacagaggcctcagtgccggtagcgcgtcgggggtgcggctgtggccggggtgtgtgtgggcggctgtacacctggcagcagcccgccagccccttcccgccaggccccgcggcgcctccggacacgccccacgtgacttccccggctcagggcttccccgcccagccggctgcggtccccgccccgccgcacgagactgggacctgagagcgaaatccatcccgtaagacgggagcgcgcaggcgcgaagtgtggcggcccggcgcggcgctcccggcctgccccgcgtgcacgctgacgccgcgcagtctcgtcccctgccgccgccgtcgccgctgctgtcgccgccgccgccgccattggagtcgacgcctcctcagtgcgtccgcgtcccgggctcaccgccgctgccgcctcgccaggggcccgcgcgcccagcagccgccgccgccgcccggccggcgcccggggaattggcggcggggcccggggccgcgcgagctagggtgacaggcccggcctctaggggaggcccgagccggcgggcgccccggccccgcgtctagttgttcatgaagcatgtcggccaccagcgtggacacccaggtagcggggccgggttacaggggccgcggccggggccgaggcgcggggtctgggttgaggtcctggggctggaacgcagagcccggggtcgcggaggccgggcccaggcgggaccggggtctcggggccggggtcgcacgtgaccgcgcgtcggggccggcggagctcgcggcccgttggagaccagttctctggtgaataactttgtgtttccctcttcccccgggttgtgtgtaccccacgtcccggcctgcggcggtgcagagaacaaaaggacaagataataaaggtgagcggagtcccgggacggccggcgcgggctggagtggaggaggacggggaaggaacggtccaggaagctgcgtctggaaccggaaactttctctcttccgccagcttcagggagataaaacttgaggttgtgcgacgattctgggagatttgacaggtcgaagacaggggcttctca

SEQ ID NO: 27078 - DNA, 2300 bp, Homo sapien
ccgagggccctggaaggagcttctgtctccacttcagcccagcaatactgatctgagacttctggcctccagaactgggagagaataaattgccgttattttaagccccccagttccgggtactttgttgagatagctccaggaaactgaaacacctccagggtcctgcattgccggcactcagccatctaagaaggcccctaagctcggagtggccacttcccgcagggccagtgctgcctcctgtgactggctgggcatttgtgggtgaaggcagcaggtaacagccagtgttgacagagccctggcctgacgccaagggctgcatacccagtttcttccacacactcatcctgtgaaaggggagtaattaacccaccacggaggaggaaagtaggcctgaggctgaaggccctgtaactggctgtgaggctctgaactccagtggtgaccactgcaccgtcctggcccagggatgggagctgggtgagaagacagacaggggctccaagagtccgagtgtctactctgaccacccagacacccccttgctgcagtcttggccgccaaacagttcagtgtcctgggaagcaggcactcagggcctgcccaggatgcgcaggccttatcacacagaagcaggtggcagggtgcccccagggaccccactgtccctacaatccccacacatcttctccatgtgggccaccatcctggaaacgtgctgttcattttcggatgtaccccaaatgcacagatttcatcctggcctgagatgtctgcccatggcccaaacacatcaaagtcccaggggatccagattcatcctcagggcaccagacatcccccagctctgttccagggaaacaagcccagcccgctttccccagctttaggcgaggcagggctccagggagacctggagcaacttggagcagcagtcctctctgtggctgaccggcctgctgggggcagtttccacctcctcctgcagcagtgtgagaggctgtctgctaccccactgatgcggatgtccaggcttggagccgtcttgggactccattgccgtccctgctgtcactgttcaccctgcttagcgcatctgcccgggcccactttgtggaaaacactcatttgacgtcaacctgcctgacaccccattccaggtctttctcctttagcaggacccagatccaggccacgtgaagatgttacagctgccagagctggaaagaaaaatatcaacctggaagcctctgtagggagttagccacaagggtggcaggattggatactggctgcagggagcgaaattcaacaccttgaccagaagggcgtccaggttggggatgctgaggggttaggaactgagaactgggctctctttgcacagttgctgctaagaaggggctgtccatcctcgaacaaagatgacaagtcccctggcccggcctaggctggggcacagagcactgcttttcctcctggtgatgaaatcggggtcaagaatctaacatgagaacttggttataagccggcgagcctctcgcaggtccaggggtgcatccacacaacagctgacctccgggaccgggcccagggctccgctgcggctgaaggccagggccgcaaagcgaacaaagcccgcaggtcccgcggcaagggccgaggcgcgcgacctggaacacgcgggggctcggagctctgggcgggcaggtgtttgcgcgcgggggaagggcagaccgaccccggacagacccgtagcccagctgtcggaccagaacagcgtttagtcttcggaccttggggaaaactacagaggcctcagtgccggtagcgcgtcgggggtgcggctgtggccggggtgtgtgtgggcggctgtacacctggcagcagcccgccagccccttcccgccaggccccgcggcgcctccggacacgccccacgtgacttccccggctcagggcttccccgcccagccggctgcggtccccgccccgccgcacgagactgggacctgagagcgaaatccatcccgtaagacgggagcgcgcaggcgcgaagtgtggcggcccggcgcggcgctcccggcctgccccgcgtgcacgctgacgccgcgcagtctcgtcccctgccgccgccgtcgccgctgctgtcgccgccgccgccgccattggagtcgacgcctcctcagtgcgtccgcgtcccgggctcaccgccgctgccgcctcgccaggggcccgcgcgcccagcagccgccgccgccgcccggccggcgcccggggaattggcggcgggg

SEQ ID NO: 27079 - DNA, 2300 bp, Homo sapien
cagggcctttccttccacttccaggagtgacaccaaccttgtctcctctccgagccccaagcagtgggaagagagggtcccataacaggccatggcagcggcctctgctgcctgcccacctcagagggtccccagcttgagagttcagagcaaacctgggtgctgcatgtgtctctcccctggaagaagcaggctggagacagtggcccctcttcccacctccccggtgcactgcgggcagactgggaaccaggcagcaaatccacccagcttgaggcccacgtcctcctgaaagggccccaggcccacacccggggttttgctgaagtgaccaaaggtaaccgctgtgctgagggggcggtggaggacagggagggggcgaaggcgaggtgggcgctggaggacgtgggggtgaaggcgaggtggtcgctggaggacagggagggggcgaaggtgtggtggacgctggaggacagagagggggcaaaggcgaggtgggcgctggaggacagagagggggtgaaggcgaggtgggcactggaggacagagagggggcgaaggcgaggtgggcactggaggacagagagggggcgaaggcgaggtaccctgagatcatcccagaaaacacactgggaagttctaccttgtgtctagcctaactcctttgctggccctcaggccctttcccgacagccctcccctcctatgcccctgagcttcctgctgcctctccctctgcgccctgcagccctggcttctgggctctatcctcagcagggcctgcagacaccccagaggccttaagagcctgggaggggtttccagccacacccttcactttgatttctgcaggaaaccaggtggctctgggccttgcataggaaagggttgggggtctcgctggggcctggcaacactggcctgagtatgaccagaacagtcaccagaggcctcctgggagggcgggtgcagccccagcccccgccgtgagtgggggtcggggggcaggtgtgaaagtgtggtgggcagcagctgggtctatgcggctcagcagtgggaagagaacgggccaggcttccaggtgagctcagggacggttttcactgcagctaaccctctcctgcccacctgcgctccccgtggcaaccagcggccctgcagcgtgcgactcctctttattcttccaaactctgtgagcctgcacgctcccatccaggacggaacagcaggggagagtggctgaaggatgacagggggcttttagggccagccgggtggatgagctgggtttgctggggttgagggctcagtcgggggttggggggtgtcgaagtctgggccccatccagctgtcctttttgtcccgcccaggtgtccctggggttcctgttctgcccctggcttctctggggttaagtcctcctccctgttccctcactgtggggtttggcagtgtggcacagtgtggagcttggaccggcagccagggtcacagcagacctcaggaactccgattccagtgccaacactgagtactcctcttttgggggcatcagagcctctcccttggctacctggggaggctggtatggagggaggtggagggagatgggggaagggggagcgggaggtgagggcagctcgggcccttctttttgctctgatcttcctggcctgaggacaagagctgctcccagacctgcagaggccccttggggcagagggatgtttcagagaacagccgggtgacctgcctccctgctctgcgtgacgcagccctaggcccctgtgaggctagagtcacccccgcaaggtgggaggtcacggcccctgcctgcacaggcagcacagctcacatgtccttccttgagccttctctgcttccggaggctgccctgggcgcctgaccttggagccatcatctccagctccccaacccctcccccacagccctggggcagacaccagcctggggaggggtctccatgctcagttccttcccgtcttgttcagagagacgtggcctgcccacgtgcagtcagcggcatccgcaaccctgccaggggccccgtgacacgcccccgctgcacagagcatgtgaccccagaggccaccctggccacttccagaaagctgtgggccctgggatactcccctcccagggtgtctggtggcaggcctgtgcctatccctgctgtccccagggtgggccccgggggtcaggagctccagaagggccagctgggcatattctgagattggccatcagcccccatttctgctgcaaacctggtcagag

SEQ ID NO: 27080 - DNA, 2300 bp, Homo sapien
tccgagaaaacctcaccacccacagctggccaggccccaacaactgacctgggccaagtcacaactgtgtcacccgcgaaccaggtgtgcagaccgaacccgcctctggaggctgctctaacgttcacgaggcaacactgcgcctggggtccccgcggctggctgctgccgtcagtgtgcaccagggcaggtggagtgtgggctgtgcacggcgtgggacctgtgcagacctgctctgctgaactctcaaaggggctgtcctgaccccttcaccagaactcgtaactttggagcaggggatgcccacgacggctcctggctctgacactggctcctgcaagggacactagagcatcgttgcatcctcagcaagtgaagtcttttgctttcaagaggaagagcaggcagcctggcaggacagaactgcaaggcgcacgcatgtccaggcagcttcccctgagagagaaggatccacacacacaggcaaggctgagcaggtgcccctccctctccctcaggacctcagcagccggctccgggccttcctctgcttacgtggcactgggcctctgcttacccggctcctctgcttacgtggcacctttgcgaatcaccttctaggagtccacgtccttccaccaatggctccaagtgcctggaggaaccagggttatgggggacggggatggtaccgctgtatttaaaaatcaatgtcttatatatcgtataaataaacattaattttttcacatcttttaaaaatcgggatataatcctcacaccataatagtcacccctttacagtgtagtgctcagtgggctgcagtatattcacagagctgtgcaaccatcaccaccatctgattcctgaatattcttatctccccagcactgcaaacaacctgacgctccccctccctccacaactggccacacctttgctctctaacctttggggcttggaagctaccccctcacccgcccatgagcctggactacagatctggggtggctccccgcagtgcagaaaacctgacccttggtcttctgttaacccctcctgatccccgggactgtgggacacacaaccaaaattaggaaggcaagaatcctcagtaattcataaaatctcgagtggggcaggaattcaggttgccatgggaaacccatctcaggctcctcaggcggtgggtggcagtcagggagcctgccctgccactgagtaaagaccaagtggcagccctggcccggccacctgccctgatctcccgctgttctgcccccatgggctttccgaccggctgacactctggctcactgtatccacgtcctgctcctctcgggcctggctgggacccttccctgcctccagcgcaagcttcttccggaagcgcaggctttacggggttcagccccatccagaccccaggacctgccctgggcagctgggtcctgcctccaccgtgcacaaggcctcaggctgtcccaacccgaggctccctaggcccctcccgcgcaggcaggaggccggtccaggcagttggagcagacctggccttcaggtctcagccttccagcagaggagctccctgtgggaggtgggcgagcccggctcactccctcctcctgagtcctcggcccgcccgcccgtggaggggacctctgagctctggacccgggtccaggacttctccaagccaaggaatctctgagactctcagagaaaacgcctcgcggatgcgggtcgctcagaccccacacggggaaggttgatggggatctcacgccggagggcgcacggcgggagcaggtgctgggcaggtcatcctgcaggagggggcggacgccggtcatccctgccgcgtccagggcgggctcccctcagctgcaggtctgtcctggggccgcggcgccgcccctcgctacccgagaggccgcgccatcgcccctttaagaacggtccccctctccggccggcgcgaagcccccaggggccgcaggcgggggtgggaggggagacgcagcgcagctgttacccggggctggggctgggccgggggttgcggggaggaggggggaacgggatgcggagggggcggggtccaggctgcggcgcgtggggagcgggcggagcgggggcgggggccgagcgcggggcacccgggggcctcctgtataggcgggcaccatgggctcctgctccggccgctgcgcgctcgtcgtcctctgcgcttttcagctggtgagtggcgacccctccgcgagcctcctggagcccccggtgcccgacccacggcggc

SEQ ID NO: 27081 - DNA, 2300 bp, Homo sapien
ttcagcttccactgactgtttggttacccaatgccagatgttggccccaactgtgccccttccaagactgccttcccttttcctctcctccttttcagcttctcaaccttcacagtctgcctcttccaggcagcccactgtgactaatccagcacatggctcccactctctgaactgatggtacccacacagtcctgaccacgagatcggtgctgaaatctacactgttccaactgccacttgtgtagatgctgctggtgcctgtgcacgtcaccttggccctttcctttttgtgcacaccagtggtttcttactgcaagaactggcgactccctcctgagggcaaataaatggcactgagacaccattttgtacccacaaggcctgctgccgtcaaaagactgacaataccaagtgttgacagagatgcagagcagctggacctcacacatcactggcggaagcgtgaaatgcttaccatctttttgttgttgtttagagatgcagtctcactttgtcacccaggctggagtgcagtggagtgatctcagctcactgtaacctttgcctccagggttcaagcaattctcctgcttcagtctcccgagtagctgggattacaggcgtgcacccccaagcccagctaatttttgtatttttagtagagacggggtttcgccatgttggcccggctggtcttgaactcctgacctcgggtgatccacctgcctcagccttcctaagtgttgggattacaggcatgagccactgcgcccgaccacttagcatgttttaataacgttccatacacacttacccaggacccagaaatttcacttctaggtaattacctaagaggaagaaaaaatatgcctacaaaaagacctttcaagacagctttattcatactagccaaaacttagacaccaccccagtgtgcaaagtgtgaataaatgaaggaatgtggcgtgttttccatggcacactactcggcagttacggatacgcacaacgtggctgaatctccgagatatcacgtaaagggaaagaagccatcacgaaagtgtattttgcacgactctatttgtgtgatattccagaacagacaaaactaagatatggggatactggaatcagaagagtggctgcctctgatggaaatgttctataattcactatggtagacgttacctgggggtatgcatttgtcaaaactcattgaactggacgctttgcggtgtgtagcttatatctcaaaaatgtttattctccatcatttcgaaagtcacccagatcaaggaggaatacgtggaatgcacagaaaagtacaaagtaaaaacaaaacaaaaagtgacctgcaattaacctcccacaggtgatcgctttttcagctttgtaccttcctagtgcagactcaggtcccaccagggcgcacctgcgctctggggcgtctgcgtggcaggggtggggacccgcagacgctctcaaccccgccgcctcccaccagggcccaaaggctcgggtggtgggagacagaccccagggcgggagcatgggccccaggacgcaaccctccacccccgcgccggtcccccggtcccctgctgcccactgcctgtgaccctcgcctccctgcctgtcgcccgctgccccagtcctcctacccgagtccccctgccggtccccggctgtcctggcccctctgcccccgccccgtagacctcgctcccctgccggtcctccatggcccccggtcctcctacctgcgtcctcctgcccggctgtcccagccccgcagctcccgccccaggcccccacccgccccgcccccgttgtcggcccccggtgaacgcgccgtcccagaagcacctcagcttggttccgcggatgaacggacgcttctcccgcccggcccccaaaagctgccgtcctccgcggccactacgaccagctgcggtccggggcccggggtgggagttggactgcgtggctgcgcgtccccatggcgaccgggcgggtgcgcgcgtcaggggctggggcctgaggcggaagtcccgcccttgccggctcccgtgagaccttgcaaagcgcaacgtagccggaagctggtggcggctggtgggcgaccgggcgcatcctcattgcagtgcggcggccctacctcggccctggcctgaccccggcggccctgcccgcccctccctccaggtaagcgcgcggctcggcggcgcgggctcggcctgaggccccggctgccgcggcgtcgtccccggccttcgcgggcggacctccctgccgca

SEQ ID NO: 27082 - DNA, 2300 bp, Homo sapien
aagacagaggtttttgttttttgttttttaaaagctctgcctacactgtgaataggaaagctggtctacacagtcctcttaaacacagtgaaggagggaagggctggcactgggaaggtcagcagtacacacgtgtgtagcttcccatggcttacagagttcagcgtgttctctgtgtagtgagaggtagagggaacagcacacggctccattcatattgagaggtggatgagcctcagacaacgcactgaggcatgggctggcagggatccaggtctgctgcctccaggctggactatcttctacagtttgctcggtggcgtggtgtgcagggccactgggtcattcccccttgacgctggggttggtaccaccccttcctccggctttgaatcttaactatatcaattttcctggtcctgaattagatgggccaccagttgaagttgtactttgctgaagctaggagagctgcagagacatccataggttttctcttcaccctaaaccttgttgctgctgtcccagtagggtccccgtgagtcactgtggtgggggctgatggtctgaagccactctccttgtcctgcagcagccacactgtcgcccccatgcctcagaatggccccagaaggacctactgcaggtcccccagcaggctggactttccacacactccaggcagcggggcacaggcgggagcctccctgcactgcgttgggaaggtggtggggagggtggagcgcagagtccctgggctccctgtcgttggcagtgatcagcccaagtgtggtgtgtcgccttttaggtggaaaatcgaattttgcagccaatctgtgtgtatttttaaagactaccccttgctgtggatttcaccattagaagacaggactttttataactggtgcagtcttggtgatgaataagcttaagcaaagcggcagcagtaatgatatggtcttcctgatcatcgccctggccgcagcctgggagcctcctgggggtatggggaacagatccttcagtaagtggtccctgcggacccctgctgcgagtggtcctgtgaccggggcttccaagcagctcaacagattgcccctcaggttttctgttgtgtggtgtttttggacagacgttattttcttttttgtagagtagcctgtttgtaagtttaaagtgtttatttttctcctttgcagcatcatggccagcccaagaaccaggaaggttcttaaagaagtcagggtgcaggatgagaacaacgtaagcctctgccccccaccccccgccctaaggcttggtcagggtcagtgagttccgggaagttgtactctgagcctgtagttctgggaccctcctgcagtggatggtggttggcgtggctctggacgtgcatggcttgtgctggctggtggcctgggtggccggctcttagagtggtgccatttctggcgctcatcagtgctggctgtcgggggtgggggcgcctccacatttctcaggtcactcgctctaaggacaggtccgcctcgtcttcccatctgaacattttattacacggaggctctttcccctcacgccttgccctgacccacacccccggccaccctgggcagccctctgcattcgctccttgaggccacctgtcgggtctttggggtccctgggctctgccctgagccacctggtgagtcacttgtggcccctttgcaggtttgttttgagtgtggcgcgttcaatcctcagtgggtcagtgtgacctacggcatctggatctgcctggagtgctcggggagacaccgcgggcttggggttcacctcaggtcagtgtcctgccgctctggctctgcggagagcctgcggccaccccagcatctgttcctgacaccagaggtgctgacgccagggaagcttgggggccacctcccattgcattgccagtgtccactctagtgacgccatggcacagagttccagctgctggccactcagcctccctgcggctgctgcttgctgtgtctaattctcaggacgatgctgggtggagggtgtccctgggtgtccccggtgctggttgatctgctcgatcctctgctttccagctttgtgcgctctgttactatggacaagtggaaggacattgagcttgagaagatgaaagctggtgggaatgctaagttccgagagttcctggagtctcaggaggattacgatccttgctggtccttgcaggagaagtacaacagcagagccgcggccctctttagggataaggtagagatgggcccgattcactcttg

SEQ ID NO: 27083 - DNA, 2300 bp, Homo sapien
ccctgggctctgccctgagccacctggtgagtcacttgtggcccctttgcaggtttgttttgagtgtggcgcgttcaatcctcagtgggtcagtgtgacctacggcatctggatctgcctggagtgctcggggagacaccgcgggcttggggttcacctcaggtcagtgtcctgccgctctggctctgcggagagcctgcggccaccccagcatctgttcctgacaccagaggtgctgacgccagggaagcttgggggccacctcccattgcattgccagtgtccactctagtgacgccatggcacagagttccagctgctggccactcagcctccctgcggctgctgcttgctgtgtctaattctcaggacgatgctgggtggagggtgtccctgggtgtccccggtgctggttgatctgctcgatcctctgctttccagctttgtgcgctctgttactatggacaagtggaaggacattgagcttgagaagatgaaagctggtgggaatgctaagttccgagagttcctggagtctcaggaggattacgatccttgctggtccttgcaggagaagtacaacagcagagccgcggccctctttagggataaggtagagatgggcccgattcactcttgcccatggtgtggggctgccctgccgtttgtggcagctggactgtggcctttagtggttctggagtcggttcttctgctggttctgacacacccactgggccacacacaacttgccgccctggagcagaggcttcctgcccagaggggaggcaaatggcttgcggggggagacagaccttccccgcctccaggggagaaagcagctgtgaccgtttattgcctctgtgacatgttgggcacagtgtttctaagaagtctggaggccaaataggtgggtccccctgtgttggaagttggagctgcaccaactaggagctccccagcactgttgttcattgtaaagtgagtcctggcctcgcatccacacctggtctgtgcacctgagcaggggccgtcgagggggccgggaggaggctgcgggtggtgggtgctccaggcgggccgtggggggtgcgctggagtcgacggtgcccgagggcatcgccaggcgcctttatgctctcgaatgccctgtgtctccttgtcaggtggtcgctctggccgaaggcagagagtggtctctggagtcatcacctgcccagaactggaccccacctcagcccaggacgctgccgtccatggtgcaccggtagctgctcctcgtggggccttagtacagtttccactgggtcctgaacttagtagattgggtttcccacagaattctccccttctttgctgttgtgacagctcttttcccagaagtcagtgggaaaaacagctttttaaaattgccaaaacaatacaagcttttagtaaatttagacacccatagagctgtctcagatagcgccccaggtaagctccgcacgccttccaggtgtgcacacagccgtgtctgccgtggcgctgtgggagttcacatctccatctgctcacgggggtgttgtctgcccttccccagagttgcccatctgcctgtggcactggccctggcacccttgaactgaccccgtcatggatgcgtcccacatcccactgcaggaacgtcccgggtggggtgactgggtagcacgaggcctccccacctcatctggagccctgtagtcctgccacatccacgtgcttctgacggaaggctttgcactgcgggcaactccggcttgattccaggccctcggccctcttgcctcacctctccccgctgcctcctgccaacagggagagtgcagagcccactgtggaggcctctcgtgttgcccatgaggctggcattgctggggtttcagcacctgagcccgagcagccactcagagctgaaggccaccctggcctcaggtgctctcaggggtgacgtgaaggcactgcccacgtaggccacatggttctgggggtgcttctggggttacctcagacttcacccagttttggccttaccagccttcgattctcggtttcagagtctctggccagccgcagagtgtgaccgcctcctcggacaaggcttttgaagactggctgaatgatgacctcggctcctatcaagggtaaggacttgagagctggggacgcctggcgtgggccaggcccacagggttcagtctggtgggtagggctgcttcccttggggcctcccatgtgcagtgggtgtgggacccaggcatgcgcggtgcagggtctga

SEQ ID NO: 27084 - DNA, 2300 bp, Homo sapien
ccgtccccaccaggccctcgggacactggctgctgctggcctggggttctgggagctgcagaagggatgtgggacacagagggtttctgggtgctgtaaccatgggctgtgccaacgcagtaccagccagggtggtcctgagaccttggaggttctgcaggaacacagcagcccaggctgtcaggagctgctcctgtgtcagaccagctgctggcaaaggggtcccgccctgatgaaagtgagggagatgtgagccccattgattcctagactccaccctatccaagcagggcaggtctccggcaccctgtgccctggagcttcttctggggctcaagtcgtgttttgagagcgatttctctctttcgcctgctcctcagcctgaaatgaggggaggatttggggctttcgtcagggcagacagtgaagcatgaggcagagacccaagagcaggcctgacaccaggatggagcatgggcccccgggggctgggctgtggtgttacaggagaaggggaagcccagagcagggcagcgcggggcagctgggtgcctgcagctgcccgcagaagcagccaaggcacctagggtggggctcttgtgagtggaagtcacggtgcgcacctgtcagatgtccccgtggtcaccctggccccgtgtcttcccccgtcacagcgctcacctgtcacatgcccctgtggtcactctggccccgtgtcttcccccgtcacagcgcgcacctgtcacatgcccctgtggtcactctggccccgtgtcttccctgggagaggaaggcctgggagggccctggaaggggcagcaggccaggtgtccacgctccagctcccacggccccgtgactttgccgagcgtcagcttctggttcccgccagggccgccgttttctcgtctgcacgggagggctgcggcctggggaggcccaggtaccttccagccagagtgtcacgaccgggccttttctcctccccccgagctttaaagtgaccaaggtgcctggactgtgctgggcatggagccgtccccacagcagggtagatggggctggggcggtggcactgtccattgaagatagcgctggtgtggcttccccagcccgtcttctgctccagcaggccccggccctgtcctgaagtctggaggatggggttggccctgctgttccctggccttgcacgctgctcacgtgtgccctcaccccaatagcacaccgagctggcctccctctagggagaggccagcatttgtgctaatccagtctctgctgcagctcttctgggcatctcagagttatagggcccgcccagagccgctggcagcccgggggccattgagagacagtcctggacctgagtctgtgggccctgaggaaggatgcctggcagcccatgttaagtctgtcaagccttgtctttgtttttcattttaggctacaaagtttggatcccaagcgagtcagaaggtaacagaggagaagcttctgcaccctggtgcatctgaaactatcctgagtctgacgtcacgtgcagcacctgaagctgcctggttccctcttctcaggccacatgctcagagctgaggggtcccagcgtagaagggggtgttcctgccatgctgttcccctcctcatgcccgggtggctgcctcatggacccactcagggcctgcagggccaaactcgtttcctgttcactggtagctggtaccggtgtgtggccactgcagccggccaccttgttgggagcaggactgcccggcttggcagatggcccacgctggcggtggccgctcagccagaagggccgctgtggttggtgctgtgcctgcggcacactggacgcgtctgcacttcgaggcaacggagcgtctctttgctctggccagggcttcccccagtcggggcagtgtggcctcaggcctttgcatgttttttattctttaggatgtgggtaggggccccgcggttcccacttggtggtcagggctgtgatctggctgtcctcgggttcagaatcacacccaggaggcagtacccatgtgaggctcaccatgaaagctcaggactgcaggcgtggagctgtgcatggctctaggacgcgcctttgccccctgggcgagggtgtcctttctcacgaggtgcccatccgtcacccccgtggcccatatcaccccttcctctctgagggagtctccccacgtgcccacccccagctgcagggacgcccatctggctttttcgtgggcctcccagggtcctgaggtgcagtcgctcgcgcagtttct

SEQ ID NO: 27085 - DNA, 2300 bp, Homo sapien
cagctcccacggccccgtgactttgccgagcgtcagcttctggttcccgccagggccgccgttttctcgtctgcacgggagggctgcggcctggggaggcccaggtaccttccagccagagtgtcacgaccgggccttttctcctccccccgagctttaaagtgaccaaggtgcctggactgtgctgggcatggagccgtccccacagcagggtagatggggctggggcggtggcactgtccattgaagatagcgctggtgtggcttccccagcccgtcttctgctccagcaggccccggccctgtcctgaagtctggaggatggggttggccctgctgttccctggccttgcacgctgctcacgtgtgccctcaccccaatagcacaccgagctggcctccctctagggagaggccagcatttgtgctaatccagtctctgctgcagctcttctgggcatctcagagttatagggcccgcccagagccgctggcagcccgggggccattgagagacagtcctggacctgagtctgtgggccctgaggaaggatgcctggcagcccatgttaagtctgtcaagccttgtctttgtttttcattttaggctacaaagtttggatcccaagcgagtcagaaggtaacagaggagaagcttctgcaccctggtgcatctgaaactatcctgagtctgacgtcacgtgcagcacctgaagctgcctggttccctcttctcaggccacatgctcagagctgaggggtcccagcgtagaagggggtgttcctgccatgctgttcccctcctcatgcccgggtggctgcctcatggacccactcagggcctgcagggccaaactcgtttcctgttcactggtagctggtaccggtgtgtggccactgcagccggccaccttgttgggagcaggactgcccggcttggcagatggcccacgctggcggtggccgctcagccagaagggccgctgtggttggtgctgtgcctgcggcacactggacgcgtctgcacttcgaggcaacggagcgtctctttgctctggccagggcttcccccagtcggggcagtgtggcctcaggcctttgcatgttttttattctttaggatgtgggtaggggccccgcggttcccacttggtggtcagggctgtgatctggctgtcctcgggttcagaatcacacccaggaggcagtacccatgtgaggctcaccatgaaagctcaggactgcaggcgtggagctgtgcatggctctaggacgcgcctttgccccctgggcgagggtgtcctttctcacgaggtgcccatccgtcacccccgtggcccatatcaccccttcctctctgagggagtctccccacgtgcccacccccagctgcagggacgcccatctggctttttcgtgggcctcccagggtcctgaggtgcagtcgctcgcgcagtttctgaaggtggtggtcagttccagggcagggagcggctgctccagggttgtgttgctgagagcctgcccggtgctgccttagtgttgcggcaccccatggtgggttcgaaggcgctgctggttactaatgccgcccctcaccttgctctctcctcacctgtcttcttgctgtcgggtaaagttttggggtcacaagcagcagccggagccggtaaagcccgtgtctgctcgtgcatgccgcccgcatctccgccgagaatgtgcttggcttcctctgtccctcctgcgtgctgccactgtcttgtgtcacctcacatgtgcgcacgctcagaccctctccctggcctcggtccgtggctctcctttaagatccaggatctgcatcaggcttggctgtgtgtgcctgtcacccctgcgcagtaccactgcgctccccccgggcaaaaaaatgagacccccatctccaaaacacacagacccccaacgcaggcctgctgccggggaggtgctggagggagggcgggggcactgggcgcagagctgctgagcagggtttcctggccacctgcgctcccttgaacgcagtgcaaaggggaggatctttgctctgtgacgagttcttccctttccggcctttgatccgtgctgctccctgcctttgggggaagaggaggcctcacaccacatccccaggtggccgtgtggcctcgactccactgacccaggatcaggagaggctgagctcctttctcagcagcttcttcctatggccccagcctccgtgccctcttccctccaggggggactcggtgcctgcctggggaggaaggagaggcgttgca

SEQ ID NO: 27086 - DNA, 2300 bp, Homo sapien
ccagggcagggagcggctgctccagggttgtgttgctgagagcctgcccggtgctgccttagtgttgcggcaccccatggtgggttcgaaggcgctgctggttactaatgccgcccctcaccttgctctctcctcacctgtcttcttgctgtcgggtaaagttttggggtcacaagcagcagccggagccggtaaagcccgtgtctgctcgtgcatgccgcccgcatctccgccgagaatgtgcttggcttcctctgtccctcctgcgtgctgccactgtcttgtgtcacctcacatgtgcgcacgctcagaccctctccctggcctcggtccgtggctctcctttaagatccaggatctgcatcaggcttggctgtgtgtgcctgtcacccctgcgcagtaccactgcgctccccccgggcaaaaaaatgagacccccatctccaaaacacacagacccccaacgcaggcctgctgccggggaggtgctggagggagggcgggggcactgggcgcagagctgctgagcagggtttcctggccacctgcgctcccttgaacgcagtgcaaaggggaggatctttgctctgtgacgagttcttccctttccggcctttgatccgtgctgctccctgcctttgggggaagaggaggcctcacaccacatccccaggtggccgtgtggcctcgactccactgacccaggatcaggagaggctgagctcctttctcagcagcttcttcctatggccccagcctccgtgccctcttccctccaggggggactcggtgcctgcctggggaggaaggagaggcgttgcaggtcagcatggggtggctgcagccggcgttggcctcaggcacaggctccacagggcctgttcccaccagcccggcccggcagggccgcatggtggcgcgtgagggaggaccctggagggggaccttcctgcaagaattggtgggggccgcggtctccgccttctagaggtggcggcctactgcccttcgggtgttgtgtgcaaagccccgtttcctgctccctgcgcttgtatcctgctgccttccctcctgctggtgaagctcgtgctgccctttgctggcctgtgctgccactgccgacccgtgtcccgtggtggagctgtcgtggggctcacgtgacttcccttcctacaggcgtccgagctgggccacagcctgaacgagaacgtcctcaagcctgcgcaggagaaggtaacgggcagctccgggtggttgtgcctggagcccttcactccaggggacgtgggtgtgtcaggggtgttagggggattgtttgtccagcagctgggactcagcgaggccaagcctcacaccccacctctccagcacaggcgtcctcctcggggcctgggctcctcttggaccccccagctggtcccttcccctggcctagggcctcccttgcagtgcccccagcccagcacccccagcccacctccgttcctctgcctcacccctacagctggccccagagcccagcacccccagcccacctccgttcctctgcctcacccccacagctggccgcggagctgtgcccagaggaggctctggtatgggaatgatgcctgccatcctagggggtcaagagccccgccagctccctgcctccttcggggcctgactgggacaagtggggaagacccacctggggcagcgtgggctgtccttaggtcacgttgctatttgtcagcagtggccggcaggggccacgtttgcagacaccaggcctcacagtgacatggtttcttgatgctggaatccctttggggccactgtagaactttctggggctcagcctgatgggtatccacatgcccctgatatttcggatgccctcacccgggggattcctgcactcctgaagctttaagctttcatctctcccgcccccattaatgccgctgtcttcatccgtgcaggtgaaggagggaaagatttttgatgatgtctccagtggggtctctcagttggcgtccaaggtagggagcctgccagatacgcgggcacagtcgaagccagtctccatattccacggccctgggcgtgagagcagggtgtgccccgtgcagccctcagcccagcttggcagtggccgctgtcctctgagacgggaggagagctgcccagcctgacagcccgagggatatggaaacaacttggcccactgcggcccggtcagccactaactgtcacttctccctctgctcttatcttgctgctgctggccttttcctcggtaagtaagtgccagcgcc

SEQ ID NO: 27087 - DNA, 2300 bp, Homo sapien
ggttctgtcctgtccctttgtcgtttgtgaccccggcagctcgccggccctgcctgagccggatcactgccacgtggtctgaggggtgctgcagaggtgtcaggagtccaggagcaggggcggggtgaacaggcagacgggtccgcccttgtggagctcacatttcatgagccaggagtgctgggtgcctgactgcctggtctgtgatgaccctgacgctggcttgcatgtgtgggatgtgggtgcacatacctgttcccaggagcctgtgagccggggctgcacccctgcgcccggtgcctggtgcctggtgcccgtctgccagcctgggcgccctcctctggccatggccaggactgcaggcaccaccggccccctgggagcccgccacggcgacgacctgacaccatctctcaggctgctcctccgggacagccagttggtggatgggctgtgcaagaggtggccatgggtggggtgtggtggctcacacctgtaatcccagcactgtcggaggccgaggcgggtggatcacctgaggtcgggagtttgagaccagcctggccaacatggtgaaaccccatctctactaaaaatacaaaaattagctgggtgtggtggtgggtgcctgtaatctcagctactcatgaggccgaggcaggagaatcgctggaacccgggaggctgaggttgccgtgagccgagattgcggcattgttctctagcccaggtgacaacagcaagactccatctcgagaaaaaggaggtgctcatgaagaggtgtatcctgaatctgaatcggtgtggcccagggatccagggaggtgtggagaggttggcccctctcctccgcagcatccagcctgggcctttgcctccagcaggtgtcacctcttcctctgtggccgctgtgccagcgctggcctctcaccgagcacctccagctcatctcttgcctctggaggctgagcctggggccaggccaagtggtttctcttcagctaccagagcagcaggcagggtcgggagaggctcatcctccctcaggcctcaggcaacccagggtcgggaggcctcgagggggctggccctttcgcactgtcctgagtgcagaggaggcatggacttggggactgggctcacaaggccgacagctgcctccagtggtcctgaagcacccatgcgacgcgtggtattaggctggggtccttaaagacagaggtagggacacgtatttgggtgcactcgggtctatcggggaggcagatgcctcggccggatccaccttgagctgtggacagtgagtgtcttaggaggctgtgcagtgaggccgggatgcccacacttgcgtcaccacccagtcattgggcaagggccgctggggtgcatctgttatctcccaggcagtcccggggcagggacagctgtgagcggtgggccctttatagccagcaggtgctacgggactctgcgctgcctaggtggggccttacgtcacagcacgggtgggacaggggcagggccagggcaggggcagggccagtgttgggctggtccagttgggagcagcccagggtcccgtcgggtcaggggcctgttttccaggcctgggcacctgctgaagctctggttaccggcaccagtctgcaaagtgggttgggtggtggcagccttcaggatgggctgggagggcatactgggggaggggaagggtgaccacatgggtgggggaccaggtgccactgcagcctgctccccacagtgggcagccagaatccctagtgtccagcacccacacgtggcggccttggcatctgagtggctttccctgtgagcccctccttgcaggatggaccctctgggagtgaggagtaaaagtgttgggccgtgcagcccctgcctcctcactggtgggaccctgccctgctgtgcagtggggtccttcgtgctgggatctttgtggtccccgttcttggagagatgcccggggcggcagacaggaagggtggagggcaaagggaggggaggagagagaggcaggccgaggggtgggtcggggggtgggctggggcagtgacttctgtggaggagaagcctttcataagctccagccttcctgtggccacagcaggaccagagtggaccagcacaccccaggagagaggactggggtcccaggagtaggaggaggtgggtgacttccctgtggtcctgaggctgggtggataaggggctgccaggagatccactcagcctgtgatctgagggtgactgactttcagaaaagtctagatagaggc

SEQ ID NO: 27088 - DNA, 2300 bp, Homo sapien
tccatgagtccctgttctcaaatgagggctcctcccagccttgtggcatgagcaggcacttcccatgcctgtttgcccttccagagctcacagcctgagaagtgggggcagatggttctccaggtgcggccacccagggtggacccccgtgagggttgccacaccaaaagaggagggctcctgctgtgtggggtcgggaggctcctgaggtggcatcacaggtgcccaggccccagaccagtctgctctcgggatggcaggaaggtggctgggcatcctaagagtgaatggaagacagataggaggctacggccattgggaccccaattctatcaggggcccgagaccctgctccctggaccccgattctatcagaggcccgagaccctgcttcctggaacattaggggaccaagaccctggtcccacccctcagggtgtctggctgggcactggccaggacccactgggcggtgccaatgagtgtgagtcgggggagctgctcccgagagcagagctgcctttcagtagtgatcctgagactcccctgtggggtgtcctgggccggcacccctcaccctcacgggccccgggagcacgggtcttggtgagcccttgctggggtcatctgggatgtgacctgggatggccctgggcctggcgcctccaagtacttctgttgaatcctcctcattcaatgggagggattctgtcctttatgtaccccatgttactcatggggaaaccaaggcagggaggccccagtgtggcctcatagaccctcagctctgtggaaccaccagtctgggctcctagggagccagcggcctccacgctcagtctacagctgggaagggtgtgcgggtgcaggggtccaccatgaccctcagagcagcctcagggactggcactggggctggggctgggcgagcggatcgttctgccaggtttggctgcccttgggtctgctcatgtgcctctccctcccccaacccccacagtgacgtctacccagcccccctacctccagagcacaccatcgtcttccttgtgcgcctacttcccgagacaccccgtgaggccttcgcgctgtggcagatgacagccgaggacttccagcccctccttggggttctgctggatggtgacgtgggccccgcgtcgcccccagcagtcaggaggagtaggggcagggaggccccagagccctgggaggccttcagaggaagtccagcctccaggccaggccctcagcaccctctgggtgggaggcaggtgtcccgggcagggggctgtgggccacattgagggtcacctccagcttggcaccctcagggctgctcctgtcctgtcgtgggggccgccctgctcaaggtataggcccggctggttgcagcccgttctcacctgctccaccccttccctggcagccgggaagaagtccctgacctacttccaccgtgaccccagggctgccttgcaggaggccaccttcgacccgcaggaagtgaggaagattttcttcgggagcttccacaaggtcctggtgcagctcgcgcccctctcccccgttcccccagctctggggcagcccagccccacagggacctgccggatgccaactcctctccctaggagagcaggaccttccttgggagggaacattgacctggggctctgttcctctaccccagctcttccatcttaattggagttgaagagcctcccagcccatctctttgggacccacagaccccgggaggctcctgcagcaggtgccatttggtccattttacagaggggaagccgaggcccagcaagggggggttctcccagggtcccccgaaacctgaggtgaggtcaggttcctgaccccaggtcccagggatgggtgttactccccagccctggcctggccttgggggctcaggtgggcaccggccccgcctgggctgtggagaacctcccgtgccgtctcacaggtgcacgtggctgtgggccgctccaaggtcaggctctatgtggactgccggaaggtggctgagcggccccttggggagatgggcagcccacccgctgcgggcttcgtcacgctggggaggctggccaaggccaggggcccccggagcagttcggccgcggtgagttgggccctgcccacctgctgggccacgctggtgggggctggcagcctctctgagccccggggctgagccggctcccctgcgttgcagtttcagctccagatgctgcagatcgtgtgcagtgacacctgggccgatgaggaccggtgctgtgagc

SEQ ID NO: 27089 - DNA, 2300 bp, Homo sapien
cacctcttcacagaccacccctggtcgcctgagtcgttcattacacagccagccccttgcagaagttgaacgccctggctctcgtgctgtcctaaggcccctgtgtattttggggtttttcagatgctccagtctgtcccgttgatgtgtctgttgttcacaggcgagggctgtgctgcttaaattattacagatttctttaagatgtcgatgccagatgggctggtcctcttttgtattattcccccagaattttcctggctctctttgcttatttcattgttcagtgaactgtagaatcgacttatccgtttaacctaaacaattcagttggtgtttttactggaactgcattcgctttatagatatactcgggaacagatgatgtcttcatgatgttgaatcttctcatccaaaaacacagccatcctgccttttgttcacagggcctgttgtggccctcagtacagtgtggggatggtctcttcctacagacccactcggttctccttcatccctacgtatgtcctcttttttgttgctattataagtgaggtgttttctctcattacagcttctacctcattattttcacactggccgtgaccgctgtgtatgacttttgtacccagttttctttctcaattatcttctttgtggttttcttggattttccaggtttacagtgacatcacctgcaaataaacacttcaccttcggcttttcagtcttgatcactcaaatttctttttcttgtctaatggtgttggtgaatactccagaattttgtcagagaacagtggcagtagcagatactctcattttcttcttggcctaacagaagtgcttctagcatttgaccattaaagtgctgtcctggaagcggagacaggtgcattttgtcatgtggtagtgaagtccatccactcttcttttattagatttaaaacaccaagaatgcacattaaacaagctctagtgctgttatggacataatgaaatgactgtgcgtcttggagctattaattgtaggatatccctaaatactggatgattgctgcatccgtcgaaaatctgacgtggtcgctgaattctcgttatccatgccatgtgctgcagagctcagcttgctgacattttgttttggatttcgcactgatgcttctaaataagactgtcacagttttctttatagtgtttggaacctcagtttgctttgttcaaaagataatttgagtttaaatagcagcagtgtcctctgccccacagggttggatttcccataaaacctgagtctagtgttttggggtccagggcttaagaaagttttctgtctcttccatacagttggcctgtgggggtctctggcttttcctcggtgatttctgcagcgccccccacaccccgttagaacccagagttgggcaggggagggctgggggtgaggttggttggaactggcttcacaggcttggctctgccattctctagctctgcagacccctgctgtgggttctcccagaccctcccagggtgagcagtgagggtgctggggctgcccctgctcctttaatggaggtgtctccatgtcggtctgggtctgaatgcccagagggctgggagggctggctgtgacccagaggggccacaggaggggtggcaagcgtgaccttgtcaggccctacccgctgcctgtgtctccagggagagcccgggccacccggacagatgggaccagaaggtcctggaggccagcagggctcgccggggacccagggccgtgcagtccaggggcctgtggtaggtgtcactccttccctgccctcctgccctgtgccccctccgcttcgctgtccagcccatcttccccctccagggtccaccaggggtcaaaggagagaagggagaccatgggcttccaggcttgcaggtagtgtggctggggccagggggccacaggggttggtgggggtgggggaaggacagggatggagatggggagtgcctggggggcacaggggttgggggtgaggcctcacaggcagggccacctctggatgtgaccctggcccctgcctggccggcccctctgttctctcccagggccaccccggccaccagggcatccccgggagagttggcctccagggaccaaaggtgccggctctgggcttggagggttctgtcagggtggtagagactggcctggggacggggggccttggagatggaggctgtggggtagggagggggaggtgctttctcctgggctcctgcctcacctgctgcaccaccccctt

SEQ ID NO: 27090 - DNA, 2300 bp, Homo sapien
agcagtgagggtgctggggctgcccctgctcctttaatggaggtgtctccatgtcggtctgggtctgaatgcccagagggctgggagggctggctgtgacccagaggggccacaggaggggtggcaagcgtgaccttgtcaggccctacccgctgcctgtgtctccagggagagcccgggccacccggacagatgggaccagaaggtcctggaggccagcagggctcgccggggacccagggccgtgcagtccaggggcctgtggtaggtgtcactccttccctgccctcctgccctgtgccccctccgcttcgctgtccagcccatcttccccctccagggtccaccaggggtcaaaggagagaagggagaccatgggcttccaggcttgcaggtagtgtggctggggccagggggccacaggggttggtgggggtgggggaaggacagggatggagatggggagtgcctggggggcacaggggttgggggtgaggcctcacaggcagggccacctctggatgtgaccctggcccctgcctggccggcccctctgttctctcccagggccaccccggccaccagggcatccccgggagagttggcctccagggaccaaaggtgccggctctgggcttggagggttctgtcagggtggtagagactggcctggggacggggggccttggagatggaggctgtggggtagggagggggaggtgctttctcctgggctcctgcctcacctgctgcaccacccccttcagcctgtggcctggccagaaggctggagagctccagcccaccccaggcaggagctgtcactgaggcagggtgggtgggggagtggctgggtaggagcctggcagcctcagctgcctcacctttgctgcttgggttacagggtgtgttgggtgctgctggggggctgtcaccatgggagggctgggtacaggtacaaaccccacccagcttgcgccttcctttgccatcagggaatgagaggcctggagggaactgctggcctgcctggacccctggccccagggtaggcaccgacctcccatgaccccgacccccacccagggttcctgtgttccaggggtcaggcagaggccagtctgaacaccagctgccacccctaggttaccccaggaagtgcctgggagggcctcacttctgctggaactttctgcagggccctgtgggtgggtgagcgtctgcccaggagcactgcatgctcccaagtgagggctctgtgctgaggactcagttcctgggagaccttggaggggggtctcctggcatcggcctcgggctgagtgctgggcaggccaggttgcctccctgcaagcgccactttaggggaagcccaacttgcagtcacactggagcagctggcacagctggggacgtttagagcagcgtgctgacagtgctggaggaggggtgcagggcatggggagccagggcctggaggcaggggaggcaccacctgccggaggaatggcctgaaggaggctggggccagccaggcatccaccgcccttgtcaggtcagggggcccctgggacatctgggaaccagggctgaagtgggagcagatttgctgggggcccaagccaaaccctgacttctgtgtctatgcaggggttccagggcatggcaggggccaggggcactagtggagagcgaggacctccagggaccgtggggcccacagtaagtgcatttccaacacccaccagccaaccaaaggtgggggagcgaagggtgcaagccccacatgcaaccactcagggacttcctactgacagctcagggacttcctactgaccacctagggacttcctgttgacagcccacagacttcctgttgacagcttcctgtttactggcctggaacttcctgttgacccccctagggacttcctggtgacagcccatggacttcctgttgaccacccaaggacttcctgtcgctctcccagggacttcctgttgactgccagggacttcctgtttaccactcagggactttctgttgactgcccagggacttgtgtttaccactcagggacttcctgttgacggcccggggacttcctgttgaccgctcagagacttcctgttggccactcagggacttcctattgaccacccagggacttcctattgaccactcagggacttcccatttgttgttggaggcctgttctgagctgggagcttggtgttggtgctagtacaagagagtgtagctaagggctggttctgcacctctcccaaccccacccagg

SEQ ID NO: 27091 - DNA, 2300 bp, Homo sapien
tgctccaggcctcaatgtctcctgggcaaactggggactctgtggtggcgtagggagccatggattgagccctgagaagctcaggtaggcagccaggtggggggtggcagacccagagccttgggcagctgccagcggccgcctctgccagctatcactttgcagccgtgtttgcaaacctcagcaggcttgccaagcctgtgcaacccgcattgtcttctggctgggcctccgccagggacactccacaggagccactcaagggcagctccaggacactgaggctggaggtctgggtggccaaccctggacggggctggctgactggagtctccatgcgctgccctgcatgggcaactgccaccactgagcagcctgtccgcgggaatgtggctgcagctccccacacctcccaaaagcccctggggtgtggcccactcagcctgggatagtgaagcagctctcaccccgtttcacaggccccaggcccagggttacccaacacgcacggcaccagcctcccaaagagaggaaattctcccgcaacccggtggctcctccctcagcggcagacccaggcttggcatcctggcaaggtgtgggctgggcctctacagcatacaaatgcctccccatgtgggggtgccctccctggaccagcgagctgggatttggcagcagggctggagctggcggacttcagtgtggaagacgagcccctgcagctcagctggccattggctgcccactcgcaagtgggccagctcccagagaccatggcctgcccaacctgccctcctccatggtggcagcccccaggctatgcacccccacccagccaggtaccctgagggatggtctcaccccatttggagtggctgagcctggctgggaaacgtggaaatgtctctgctgccccttacccggcccctccagggccgccgagacccccagacagtctggctcaggcctgggtaggtaaccaagcatctcaaccgagcacaaggccgagcctcccgcagctcagttctctcagcctcgaagcctcctggttcctatcctgccttggggctccatgtgcactggcccacgctgcaggggcctggctggaccagtaggcttcctcccagcagccttcttgggccccccaccagaaagaacatatcttcagacaaacagacttcgcccaagactcccccaaaccccacattccagatctgtgggtgaggggcctctggggccagctaaggttggggtgctgccgggacaccacagtgcctgctcctgccccggcccctgccccggccggttgtccctgttgctccgaggtcacagcgtgccccgccacccccaagcaaggcctttgctgttctttgcttccgaaggtgcctgggctctgtactgagaacctggccacttggagtgttcccacgtcaagggggaggaaagggcagggcctggctgggacgctctgaatcaacccttggctggggctcaggcggggcagagctggtggctgtcgttctgacgtaccagcccgggccggacactcacagccacggggagtgttgatggctgtgtcccctctgcccacccagacccctgtgctccttgcagggcgacctcagtcacagtgcacgatggccacgccctcacctaccacgtcaatgagctgagcgatggacaggccgaagcggacgaggaccacgtccgagatgttggccacgggtcgggaccacttgttgtaaccggagaagagtttcttcaggagccgctcctcggcgtgggcccgggtctccacatggctgctggctgcggggagaggcaggccagtggctcaggtgcaggcgggacaggagccgggagctgtccaggagctctccaggctgccccagccccctgcccagcacgtccacttcctttcagctcctcacatgagcccttcccaccccaggacctgtgtgtgtgccgggcgtgcgctctgtgtgtgtgtgtgtgccgggcgtgtgctgtgtgtgtgtgtgtgtgtgtgtgtgtgtgtgccgggcgtggcgtgcgctgacctctcttggcctccggctctctcccacccctgggtgtaattgtgatttcctcggggaagcttcccaggcccctcagcccacggaggccttcccagcaccttgaccgcaccacaaaaccaggcggcggatgggccgaggactgctttgggtctcctgtcacactgacttccagggaagggctgtgtctctagcagctggcgagtcagaggacactcgggggtaacagcagcaaaggag

SEQ ID NO: 27092 - DNA, 2300 bp, Homo sapien
atgtggatttggctctgccaatggcatttgctctgcgacaccacaggcaggggcttctcaccaaggtggggcctgaaccaaagggcagaggccagtctataccatgcgggaaccgctggccttgccacctctctgtccccttcctaagcagagagcctcatgggctgtgccgcagggagcgggggtggggttctgtgagtgggtcagaggtcagaggtcagcaggctgccctcacggggcctcgggggactttgctcttctcccctccctgtgtttaccagctgcttgctcagcccaaatatccatccagcttggaaccttctagttcctggcacagaactggcccatggaggggcttcatgtaggccagaaggaccagggtcttgcactgcccaggggcttgggaagagcaaggagaggaggaggaggagagggaatccttccttgggggacttcagtctgcctagggaaacaggcccttgaaaccatcgagggttggatctgcagggtggtctgagggagagccgtcagcagggtgggtggcagacacccatggctccaggaaagagttcaggaaagtagacctgggatctcccaggaggctgtcccagtgagggcacgtcagcccaaaactacatctgaggccagcaggaggccggggtgcagaccctaaagccagatggcctgggttggaatcccagtactgactgtgagcttcggcaagtcgctcggcctctccgcacctgtgttatctctttggtaacgtagggacaattgaagaggccacctcaagggggccgtggaagtgcagggggtccctgcatccagcttgcttggaccagcatgtgggaaggccacagaagcagggcaggtgttgtcgctggaccaggcaattcaggagggcagtgtcgtcgttggaccagccactgtgcagcggctgtgtgttctgaaagctctaattgtaggcactgcccacagagcggacagacagctctggccagtgaggaagagctcctgcccgtcccaaagcaggtgtatgaggagccatgagctcaacctggaaccagaggtgggcagggaggggggagaggggtgggcaggagcagtggctgctcagggaagctggggggaggaggagaaggaaggtagggggtagggacaggggagatgggagagcgatgggaggggcaggagctgtagggctccagaggcctgtgctggagagggggttgctgcagggaactcctgacggagccccctcgcccgaccagcagccttgcagccttggagggaggggcgtgaatgcggagggtcaccggacctctccagccccttctgctctgccttccattaccgacgacggaaatctccgttttcgggggctgtgtcccagctgcagagcctgaggctgggccaggggcgcggctacagggatggccgggtctgatgtttctgcagagcctcgccctctcctcctgcacacgagattcagccgcacaaggcgcccctcctccaacgcacctgctgctctgtgggcggccacctcggcacccacctgagggcggggcccctccctggggaccgtgcgcctgggctcccctctggacgcctcttgggtctctgcggaggtaccagggaaggcgggggctgcaggcggacagagagtcctgaacggctcgctggggaacaagaccagagacgcgattttcaggctgcagacaccggctggcgcgatggagtaacccagatgtgctaggggtgcccctccttgcgccggatcccctagatgtgccccccacccctgcaggcagggagcgggcgcccaggctggagatgtggggagggaggtcagactgactccgggaccccccagtcgcactcagtgaccccggggtccccgtccccggctcaggcacgtctcgaaccccaggagaacaaggaaactttacccccgcccggggcccagcgcagcctccccgtccccctgggcgcgcggtccatccctgctcattctccctggcccttgctccctcctcccttttcactctccgttccctccccctcccctgctccccctcctcccccctcccctgctccccctcccagccggctgaggcgggcagggccgggcggggccgcgccacggagcccacagcccggcgctccctgccgcgccgccgccgcaccgcgccccacaggagaagacgaaccgggcccggcggccgaagcggcccgcgaggcgcgggaggcatgaagttgggcgcgcacgggcctcgaagcggcggggagccgggagccgc

SEQ ID NO: 27093 - DNA, 2300 bp, Homo sapien
tgaccgggtgaaggggagcttcactgaacagctcagaggcgacccgcagtgggtcactcctctaagcaagcaggtgacccattgtcatctggagtctggctgagtctgggtttttatgggcttcagaggggaggaagtgcatgctgattggtccgtgggtggtcatgcatgctgattggtccatgggtggtcatgcatgctgattggtccgtgggtggtcatgcatgctgattggtccatgggtggtcatgcatgctgattggtccgtgggtggtcatgcatgccgattggtccatgggtggtcatgggtgggcccagaaaaagtatcacaagttctcactgtggtccacagaactggcagccctggcctgaagatgaggcttcactgggaccccccgctttccacccaggagcccatctgccccctgccaccattaacctgctctccacggtgcccacggtgcccagactgtttgtgctgaaggctgcctgcaggcccacactgacctgcccttagtgtccctcagcctccctcccatgcttgtcagcgcccaaagtctgaaggggggccagggcagcagaggctggtgtgtcagtgctgccccaagggtgagtacacccaggcgggctgtgacagtgcctgggctcagcctcaactttgccctgaaatcagagcaggcactgggagcagggagaggccaggcagcgggggcaggggcttcctggacctccgagagtgcagagatgcctgggtctgcagccacagctgggcccccaccctgtcaactcagaagtgggtggagcttccacctgttcccagctcccaccagctccacagagcgcacagccccggctacacctccccgacggcagccagcatcatggcagcccattccagacaggccgccgctgctatcaccttcaccgttgggtgatccagtctggttacatgctggcctctccctccccctgccttcgacacaatcaagggaacagatcatggaaaaaatgcagaaggagcctgagtggacactggacgtgtgggtttgagtctaatttttgagcagatgaagaaaggcccctccttttctttgaaaattgaagctggaataacacagagtatccaacagcagatccgtgtggagggccagctgtgagcaaatttcagtgtggacacagcacagtgcaggcacagccctaaaggagggtaccacgcagcgggggtgaatggggggccccggagcacaaagcggagggtggttttgggaggctggagttgctgttttgtgtgcacgcacccccttcccccactccctgtgtcttccacctcagactgtcccccactcccttccctgggtgaccctcagagctgctcatcctggggagcaggtaaagtcagcaccttggatagctctgtcacacagaggaggccaggccttgagcaaggccccctggcttcagctcctaacagcttccactcctacaagcgtgcagcttcgggtcagagccccgcgaccccacagcccacccagaagacgtcctcgtggcacggctgtcccattgcactttgccaagtgttggctggaaggtggtgggagaggagtgacagtttgatgaagaatgaatgaattaattaattaaggcacagggtaatagaggctggccaggcccggtccccgttccttatttcctaatgcagataaattccagtaatttctgtggggtgagaaatgggcatcagaaataatggttttactatcaaaaattgaaacatagtgcctgtgtgtatctgaaacaatactcgttgttcagatgtctctggggcaagaacagctcgatgccgagggaggaggctttttcgattcccgcactgcgaggtactcagcagcgatgaagcccccagggctgggccacagctgtgccatcacacccccggccccggggctgaccctttgctgacgtcagctcaccagtgccagctcagcttccctgcaatgcccttgatatttacaaggtagatgctagaagcccgggatgctttgctgttgggagggaaacgcctgccagacggagtaaaccagctgctccggaattctcaccagcactgggagggttggtgttgctgctcagcacgggggctcagaagccctccccacgcccccattatcctcagcttccccaggctccatccagcaggagggagcagacggtgggccctgcctcctggccttgagaccagaagacggcccagggtttgaagcaggtgaaagtctgagctacttctgcaagtgcagcctttg

SEQ ID NO: 27094 - DNA, 2300 bp, Homo sapien
ggaggtgttagagtagccgggttcagagacggatggtaggaggtgggtgccaggggctgggaaggagaaatgggggtgagtgtttaatgggggcagagtctcagtttgggaagatgaaagtcctggagatggacggtggcaaagttcacacaacagtgggaatgtgctgtacttaaaccactgaacttcatgctttaaatggtgatgatggtacattttatgctgtgtatttcacaatttaaacaaacgacaagggcagagccctcttcctcctgggctgggtcttggccagcagaggggaccttgacaagcccatggtcatctccttggggcccaaaactgggcttagcagctataagaactttgtcagttttgagcatactgaggcctgggcgctgggccggggattccagggctccctcatccttcatggcctggaggtcttggaatcaccttctggcacttcccagatggcctcatcctgtgtccagtgtggacatgccagcacagccccgctccagcccctgtcccggtcagctcctgctcctcactctctgcccctccatcaccttccacacccgggagctgaccccacacagccctgcgcctggtccacaccctcctcgcctccttcccctggctctggggcggtaccactgtgctgtaggaagggcccacagcatcaacctgctggtttgaagaattggaaactgaggcccaaaagtagaacaagggggcccagggaaatagccagtctgtgggcagaacccggagtctggccgcccgcggtccccactcctggcaggactcagaaccaccaggtcaccaggggtccctgaggggcagacaacaggcacctctcaccttccagcacccacctgccccaaccaccaacctcagatgtccacaccactgagagacccaggtgctctcaaaggcggaacaggagttcactgaggaggagcccctaagacacacaccagttgtaagcacctggatcttctcagaccaacccacaagctgccggtttaaggattctaaccggaagcttcttccgtgtgtacagagctgggcttccgcacttgctcctgtgagcttgtctgtccaggacctcctgcagcccctccacccggccaggcccgcacctcctcctgcagcccctcccctccactgggcccgcacctcctcctgcagccccggccgcctcctccctcatggctgctgcccgcggaccccccaactgtggtgctccttgccctgaagtctgcatggcccacgggaaaatcccagcagcactgggaccctccgagggcggctctctatgccatccccatacctgccttcttccctctctactctcttctagaaccttcctgaacttcctggcccctcccagtccacctccagccccgcctcctccttggagccccccagttaccctgaaccagtgccccctacaccgccccccgtcccctgcctggagctgcgtcctgcgggtgttggttctgtttccatccgctccccctccttccctccagccggggccatgtccccaggcttggggattctctgacagtgaccaccggaaagtcccagcacccaagcttggctgagtccttgggagccctacccggctgcagccgtgtctgctttaataaaatgcaaaacacttcatttctttttcaatttaaaaggaaaatggttcatctcaagagttcatctcaggagacaaggactgtgccgagtgtcgcctcctgcctggagtgaccctgggcggggacccctgggtctgccgtcagccagcagagagagggagctgcaccagcctctcacatgagcaggagcacctatggagcacctgctgcatgcagtgggggcagggaaagaggtgaggccgcacctgctggagggggactgaagggcgagcagggtctgggggtggctctgagggtggagagcacacggcgcccggtctctccgcaatgccatccttcgtggccctggatgtgctccctgcctcggatgtcacctcgtgcctctctgcgtgccgggttggtccctgcagcctcatgaggagtggtcgcttggcctcggtttggcctgcactgtcctccggcctcacgtggccttgtcttcacacccagcgtggtcatgtcttgggagcccgtcacccacgcacgcctcagggtggagcccccgcctggactcaggaccccgggcaccacacccaggcggtggccccagaccctcccctgtccaaacaggagatctctcataatgcagccaggtggtgtccgggg

SEQ ID NO: 27095 - DNA, 2300 bp, Homo sapien
gagggcacagtggggcagagcttcacgccgctgtccctaggggcatccatcgccaacgaggacagggccagggcgggtcatctctccatcagcccgaggtggcgggtgggtgcccggctggcgcccttcagccagcgtccctccagcctggcactgctcagcagggtgctctggaagacctctcttgaccatcctggctagcttcggggcccattcctgacggaggagcagagggcagctggtgtgggcccctcagaactggagctgtgggaggacccggagctcgccatgcacacccagcatcccatggtgacccagttttggctctgggtctgaatgggcttcccagggcacgttaacttggactgggagggcaaactggcttccgggaagttccgatgcctgggaggagaccgtggctggagctgggggcccgccgccagacagggtggggggcaggatgagcacttgagggagggtgctctgggtgcagggctgagtcctacttaacaaacacacctggccatgggacagctgtggaaagaaaggcaggaacaagcgtggtgagcgcgtgcagacgcgggagcccagcgctgctgatggggaggtgacatggcgcagccgctgcagagaacacacaggcagcggctcctccaaacattccgcataaaattaccagacgacccagcaaccccacgtcggggcacaggcccccaacacctgaacgcggggtctggccgagacgtgcacacccaggtaggcagcagcgtcattcacgagaggcagaggcagcccaggaggatgagccagcgtggtccatctgtgccatggaatttactcagcctcaggaggagagaaatcctgacacaggccacaacactgacaaccttgaggacattttacaaagtgaaataagccggtcgcaaaagggcaaacactgtacaattctacctgtaggatgtattagagtagccggattcagattcagagagacggatggtaggacgattccacctctaggaggtgttagagtagccgggttcagagacggatggtaggaggtgggtgccaggggctgggaaggagaaatgggggtgagtgtttaatgggggcagagtctcagtttgggaagatgaaagtcctggagatggacggtggcaaagttcacacaacagtgggaatgtgctgtacttaaaccactgaacttcatgctttaaatggtgatgatggtacattttatgctgtgtatttcacaatttaaacaaacgacaagggcagagccctcttcctcctgggctgggtcttggccagcagaggggaccttgacaagcccatggtcatctccttggggcccaaaactgggcttagcagctataagaactttgtcagttttgagcatactgaggcctgggcgctgggccggggattccagggctccctcatccttcatggcctggaggtcttggaatcaccttctggcacttcccagatggcctcatcctgtgtccagtgtggacatgccagcacagccccgctccagcccctgtcccggtcagctcctgctcctcactctctgcccctccatcaccttccacacccgggagctgaccccacacagccctgcgcctggtccacaccctcctcgcctccttcccctggctctggggcggtaccactgtgctgtaggaagggcccacagcatcaacctgctggtttgaagaattggaaactgaggcccaaaagtagaacaagggggcccagggaaatagccagtctgtgggcagaacccggagtctggccgcccgcggtccccactcctggcaggactcagaaccaccaggtcaccaggggtccctgaggggcagacaacaggcacctctcaccttccagcacccacctgccccaaccaccaacctcagatgtccacaccactgagagacccaggtgctctcaaaggcggaacaggagttcactgaggaggagcccctaagacacacaccagttgtaagcacctggatcttctcagaccaacccacaagctgccggtttaaggattctaaccggaagcttcttccgtgtgtacagagctgggcttccgcacttgctcctgtgagcttgtctgtccaggacctcctgcagcccctccacccggccaggcccgcacctcctcctgcagcccctcccctccactgggcccgcacctcctcctgcagccccggccgcctcctccctcatggctgctgcccgcggaccccccaactgtggtgctccttgccctgaagtctgcatggcccacggga

SEQ ID NO: 27096 - DNA, 2300 bp, Homo sapien
tgtctctcccaatgtcctggacaccagagcaccttaatccttgctcccatctcagctctggtgcatctgctcaaacgggaactggggtcacttttccttcatcctctgtggatcagccctgaccttgggtcccactgggctctgacatcaaacctgagatgactgcttgcccaggagaggtcacgtgtagcccgggcactgccgaggggcaccggatagtctggggcttccccccacaggatgaggggccccagccctgcagggtttacattttgagctacggctgctccctcgggtcttctggtgagtgggaaagaccagcggcaccagccagcgtgtgcagggagatgccacggtgctctcttccttctgcatactgaagtcctctccctcccctgaaagcaccaggctggtgcctcctcccttaacaatcgagagaaaccgcagccgcttggggcaagcccacttcatgctggtaatcacagccaatgcgtgggcacagaggcagggaggcggggatccagaaagtacccctggatgtgcacaagcttgtgtaagttgccgtctatccccaacgtcctggataacgtacaggttagcattctgcctgcaccgacccttctgtattcagcctagttaaaaacaaaacaacaacaacaaaaacaggccccgtggccactagctctggaaaccaaagggcaaacacaactcaagagctcactctgcaccagggttagggctgttttatgagcaggtcacctgcgaggacggcgccagcgattcagcagagggcctttctctgggtagaacccatggtgccaggcgaacgtgcaaacaggctggatgtagtcagagacgcactcgaagatgacacccctcctggatgtgcagaggaaggcccagtggcggggcacctcacagggcgggcagcactgagccgcaggggtcccttggtctcccagcagcagctccagagggacccctcccaggacacatggctgccggcaggggggaggccacctccgcgcacttgcccccaaggaaacaccgtcccatctgtgtccaggaggcacagatctgcctcctttgtcccgaggtgtggcactgggcttcctgctggcctgtctgctgccctggggccaccctccagtccctgcccctgccacaggccccttctggggtctgcataactaagtccaggccccttggggggcttcaaggccctctaggagtgactctctcccatcccccaccccatggcccttgctcctcttcttgcctcccggcctctgtggccaccccctttcccctgggctgctttccttgcagggtgcctccagcctccacagaccctccctgcacacaccctggggtctagggggtcctactgcctgggcaaccctgacaccgagagcatgaggtcaccatgggctgagccctaacagagtcttggggagagcccctacccccatcccttcccggaggcgtccactcccagggcccagctgagaagactccagtcctgctcaggcggctgggcaccgctctgggaccccaggagcgctggggccaccaggcaggtccacttggttagtactaccggactcaaaggtgaccgcagggtcagtgtgcacatggccgggggattgggcaggctcagcccagagctctggtcccgcgggccttggtcccttctgcctccccctcctctccccctgccctcccctccccctcccccactccccctcctctcccccctcccctccccctccactcctgtctcccccctccactcctgtctcccctctccccgtccccgccactctcctcccctcccattcccctctcctcccctccccctcccctcctgtctcccctctccccgtcccctctccctcccctcccctccctttccctcttctctcctcccctctcctctccttcccccctcccctcccctccccgtccctccctctcccctcccttcccctccctctcttctcctcccctctccttcgactggcgtcgcgggggttaacgcggggcggggcgaggcggcgggcggagccggcgcggccgcgggccaggcgccgaggtgcgcgcggagcgaggtggccgcagcgtctccgcgcgcggcccaagcccggcaggagtgcggaaccgccgcctcggccatgcggctcccggccggggggcctgggctggggcccgcgccgccccccgcgctccgcccccgctgagcctgagcccgacccggggcgcctcccgccaggcaccatggtgcagaagtcgcgcaacgg

SEQ ID NO: 27097 - DNA, 2300 bp, Homo sapien
cccagctgtgggtgggggcccttccctccccaccaaacatgggggcttggtttgtgggcagggatgcctgtccagcctgtgccaggacagtctctgctggtgtctccccctggggctccccatcaccggtctccccaccaccactggccccacagaatcactgcagcccccctcgccctgagccagagcaccccgggtcccgccagcccctcacactcccagcaaaatgggcaaggagaagacccacatcaacatcgtggtcatcggccacgtggactccggaaagtccaccaccacgggccacctcatctacaaatgcggaggtattgacaaaaggaccattgagaagttcgagaaggaggcggctgaggtgagctccccaggctatggtcttggccccctgagaaggaacccccaactcccgtggtggccaggcttggcatctcccagccccagggcatggggctcaggtgacctcctccagggcaggagggacccccgctgtggggcactcaggcctcagagggtctggtggggcagcctctctcttagggggagcttggtgggggaggggtggccatcgagctgccggacttgccctgtggtgagggaggtgacctgggagggtctgcagaaggctctggaactctgccatgttgagctggggctggagggcgctggagccttacccccttccccccagggccaaggctggggctggagatggtactgccctcacttgtcctagggccctgccagggcacacgctactattaatagctgattgatgggcagccggcccgtctgctccattttcttgtgctgggctgtggagggctgctgtccagggcagccctggggtgggggtcctggatgaggtgacctcctagctgaccttttgaagcgatttctctttggtggctgagacggtggtggggagcggtcatgagacggggtctgctctctgatccccatcccccacccaggactctggggagaagcccactcctgggagggcctgtgggagctctcacctggatgatgagggcggaggccagggcccaaggtgggggcactcgctgtcctgggctgagcctctgccctggcggggttgggggtgctctgagctgcacccctgagtttgggctgcatcaccctttacctggccttgtcaggaggaggcgggggtttcagagggccgctgtttcaggccccagctgggtcccatctgggtctgctccagactgggcagcctcctggagggcagagtcctgtctgtgcgaggccctggcgaggagttctgcccagctgggtagtgaccgccgctgctgccctgactgaagcccgtccccttctgtgggggtctcactggccgaggccccccagcttcccgtgtccggcagagcgaggaaggggaggagaagcctcagagggatggggaggctggagcagcgggaaggagctgcgtggccaggccctcctcctgacctcattcagttttcctttctccttaccttaaaaaaacacacacacacagagggttatttatctgacagccccaaacacggtggtattattggcctctggttgaggaagggatctgggggcgtccgcagcttcagataaaggggagccctcgcccgggaggggtttatcccatctggcggcttcgctcgtagagcgagcgactcccaggcccttgcgccacctgctggtggacctgcgtagccgcgcccatttcggagcaggtgcggaggccggccctggggggcagggtctgggtgtggggtcccgacggagggggccggcgtcccaggaccccgacggagagcaagggggtgctggagcccatctcccgcctctcgcggccactctgctgtaacaagcagctcgcaccaccagggactcctgggtcccgggtcccgccctcagccgtgaccctcacccgctccagatggggaagggatccttcaagtatgcctgggtgctggacaagctgaaggcggagcgtgagcgcggcatcaccatcgacatctccctctggaagttcgagaccaccaagtactacatcaccatcatcgatgcccccggccaccgcgacttcatcaagaacatgatcacgggtacatcccaggtgagcagggcacagcaggcggggctgggggagaggccgctgcacccttcaagggacactgggggcccctggggtcactgggatggtagggtctcctgtgcttcctgtgagggcaggggacccctcacctgggccaccctcacccagtctggctcagagcccccct

SEQ ID NO: 27098 - DNA, 2300 bp, Homo sapien
cgctgaggtgcagcggggtggggcgctgggcgggggggcctgggtctgtctggatctgactcgcccttggctggcgctgtttcccagcagcagccggaggtcggcgcacccggaggggagggtccctggaagatgtcagtgggtctgggagcgggcttccggcgttccctgcaccgtgggagaccagcctctcagggggagggtggttctgcgctggatcctcggggcctgtcatggtgcgcccaggagggcaggcacgtgaggacagggactggaaaccagcagatttccaccctgaggcctgcacccccgggcctcattagggagagcccctcagagccgggcttcgttggttctggggcgtcccccatgagcagggccggggaggggccggtagacccaggctcgtctcccaggctgcagcccacctgctcccctcccccgcctgccggctccggtcctcggcgtctgccctgtccccggggaccgcttttcgcggctcaagcgtgttcctgccctgagccggctctcgccccgtctcccgggcccgccgcgctctccccgcgccgtctccgtcccggtccctccctcccgccgcctccctgccctgccccccgccccgcccccgcccgcggcgcgtttctcccccgcctcccgcgtccgtctttgcagcccgcgcctcccgcatcgcctcgcgtccccgtggcgcccgcccgcgcgcgtccgcgccccgccccctcccgcgcggttccgcattggcgtgctgcagggcgcggtgcactgcgccgccaccgtcaataggtggaccccctcccggagataaaaccgccggcgccggcgccgccagtccctctggctgagacctcggctccgggtaaggacgctcggcccccgggcctccgcccccgcccccgtcttccgaagagggacccccggggccggtcctggggggcagagggtggccgggccccgcacccgcccccgcgcgcgcccggagtccggcttccgggggtccccgcgtcggccgggctgggcccggggtggggggcggcgcggggcggcggggccgggtcctgggcggcgatcgccccgtagccgtgaccttggggccgcggggaccctgcgggccgggggctgatgggggtcgggcttcggggcgctgggccagaggacgctgagggaggtggtgagatctgggggccctggcctccccacccccacccgtgttcccaccccagggtggcttctgtcctctttccctcccccagccacctgtccgcgaggagcagcgtgggtttctccactgacctctgtgatgggacagggctgtgacccagggtcctgagtcacagggagggggggagggagggtgccccctatacccccacggggccgagggcatctccacctggcacttgctgggctcggcagggccgggtcctccttcctcaggctggaacagggacccccacctcccggccgctgtctgtccctgtgagagtccgggaggggggtgcctagagctattctgggttcctaatctgggcagcgcatctccgtcggggctctggcccagcctgccgggcagggatgaggggaagatggcgccgtccctgcctgaggaggggagtggggagcagtggccatctctccccggtggcagcgggtgggggtggggcgccgtgtccctggccctgccgccggggaggggagtgcgcgtgcaggacagggccctggagcgctgggcaggtgactcatcacccggctctgctggtcacggacgtacccagcctggcgctgcgtggtctctccaaatggtggctaaccccttcccaaggagcagcccgcgggctccaacgcccagttatttacagcagatggggctgtttgggctcaagtgtggggtgggggcagtgcacagcctctgcttgccctggccaggcccagctgtgggtgggggcccttccctccccaccaaacatgggggcttggtttgtgggcagggatgcctgtccagcctgtgccaggacagtctctgctggtgtctccccctggggctccccatcaccggtctccccaccaccactggccccacagaatcactgcagcccccctcgccctgagccagagcaccccgggtcccgccagcccctcacactcccagcaaaatgggcaaggagaagacccacatcaacatcgtggtcatcggccacgtggactccggaaagtccaccaccacgggccacctcatctacaaatgcggaggtattgacaaaaggaccattgagaagttcgagaag

SEQ ID NO: 27099 - DNA, 2300 bp, Homo sapien
cccccaacactgttgcattggggattaagttacaactcgtgcactttggggacgtggtcaggccactgccgttattcagcagttagcattccgtagttagtagccattcagtcctgttcagtctccgcggtggctcggaaccatcagtgtgttagtgtttagccttgtgaccgcagccccgttagctgtgtgttccaagtgtctgcggaactgagtcggtggctcccaggaccccgaggggccacaccgtggaccaaacgtgtcctggcgcctgggagaccctttggagcagccaccgacacccttgcccagagtcagcacacaggtgctttggggaggttgccacattccactctcaggggccactcctgtgggtggcaaggccccacggcacatgtgagcccctggcactgctatgggtgagccgggagccgagggggaaggggtgtctggaaaaggtagcccagagtcctggtgatcccttgggggagtggggtgggcatccccgggaccccggcctgggccactcgagcacctgcagcaagcccacttccaaatccctgcctaaccttcaggctgcaggggaggcgttaaatatagagaccagctgggtggggtggggcgggccttgctttcttgccaggcggttatttttattcctggctcctgtttgacggcatcggcagcactcggaagtgccggggcacctagcaggccctccctgcctcctctcctgcctgtggcccaggagcccaagtccctggactcctatggggcagacgcagccacagaccagggtcctcctgagaggccctctccacaggctggggagaactgtttggccccgaccctgggcccccacctttccttcctcctcacacctgccagcaggccaggtaggggtccagtcgctggggatccccatggatttgcccagtcgcagctgctgggcccgacccggggcctccatgtcaacacccagtgggaactcagggctgagaggacaggtgccagggctctgcccccactcagcacacacctcccgagaccccgctggcaggaagatccgagtgcgtgggggtgggggggcagcgtgggagggaagacctgaatacctgggtgagacgacaggatcttggggtctggagaaagcccctaaccttggtcttcacacaacacatggctgccacatccccttcctcacaacccacgttggtcattacccgcgtgtgccaggacctcagggactccccacttcctacagagcgtggcccggtctttggcttggcatcctgaccccatatgagcatcagctacaaggcgctgaggtgcagcggggtggggcgctgggcgggggggcctgggtctgtctggatctgactcgcccttggctggcgctgtttcccagcagcagccggaggtcggcgcacccggaggggagggtccctggaagatgtcagtgggtctgggagcgggcttccggcgttccctgcaccgtgggagaccagcctctcagggggagggtggttctgcgctggatcctcggggcctgtcatggtgcgcccaggagggcaggcacgtgaggacagggactggaaaccagcagatttccaccctgaggcctgcacccccgggcctcattagggagagcccctcagagccgggcttcgttggttctggggcgtcccccatgagcagggccggggaggggccggtagacccaggctcgtctcccaggctgcagcccacctgctcccctcccccgcctgccggctccggtcctcggcgtctgccctgtccccggggaccgcttttcgcggctcaagcgtgttcctgccctgagccggctctcgccccgtctcccgggcccgccgcgctctccccgcgccgtctccgtcccggtccctccctcccgccgcctccctgccctgccccccgccccgcccccgcccgcggcgcgtttctcccccgcctcccgcgtccgtctttgcagcccgcgcctcccgcatcgcctcgcgtccccgtggcgcccgcccgcgcgcgtccgcgccccgccccctcccgcgcggttccgcattggcgtgctgcagggcgcggtgcactgcgccgccaccgtcaataggtggaccccctcccggagataaaaccgccggcgccggcgccgccagtccctctggctgagacctcggctccgggtaaggacgctcggcccccgggcctccgcccccgcccccgtcttccgaagagggacccccggggccggtcctggggggcagagggtggccgggccccgcacccgc

SEQ ID NO: 27100 - DNA, 2300 bp, Homo sapien
gagacgagaaccaggaggcggcccccgagggcatcccgcgggtcctcacggaggctgcgttctcccaccttggccaggatgccccgggaacaccatgcagcgtctctgaggcttcctgtgcagaggggctcacagagcccccaccggcctggtttagtaaatgcagtttttaccttttcactttaaaggaaaatgaaaattcctcctttcagacgctctgtgactgatgttgaccggtgttgactggtgaggttgagaatgaggtgagctgggtcaggccagcctagagggaagcgggtgacctggaaggccgtgctgtcaggcgtggtcggcagtcggccccacggctccttcagggtgggcctggaccacagacacctcaccagggtctcccgtccctgggcggctgcatatgggtccaagcaagccacaaaggctgtgccagccaagcccaacgcaggccgcccctacagtccctgcccggccctgcaccctccccaccccttcccaggtgctgatcaccagtactcactctgcaccccaaaccccaaaccccgtctcagcgtctgcccctgaggaccctctgagtgtcaacccaactgacccgtctgcctcatcagtgacccctcggggctgcacacctctcccatcgcaggtcctggcactgctctccggcaccgagctccccctcccaggtggggctcaggcggttccctgccctccgtccttagacctcagctgaaacctgagctctccccaccacccgcccccgccagcctctgcactgctccccacgggaaggccgttctcccttggtttaccgttccctgcgcttggctcggccatgtgcacatagtaggtgcttaccacactcgtgcaatgaacacacagagcggtgcagggcccaggacagcgccttccccacgtgctcagggggcacaagggcgtccctccaagtcttgctcaggggcctcccagggtccctgcccagctgtgggtcctcactgagcacccggcgaggacagagtacggcatccgttggcctcgatctccggaacaacacgggcacacggccgtcccagccagcaacgagagccacgaaacaaatccacccgggctgactcccgaagccctcggactgttccgccccacggacctcccggaccctctcttccacggggaagacaccgcccagccaggaccgggtgtataaagaaacgggatttccgtaggggcaggccgatttcccctgcggggccgagggaggtgtggggaggattctgcgctggggggaggaggagagggaggacgcctttctgcctgggaagggaaaacgcgccccctcctgattggcatggcgggccgtcccccgggccccagggccctgccgggaacgctctgggctccccaaacatggggtctccgagcagtggggcccagcctctgcctccggcgactggagactcacctcacccgcccaaatccgccccgctctccgactgggccccgcctcccactgccccgccatccgcccaccctttcaccgccccctgcgggcagcaggcgcgtcctggggctgggcaaccggggtgcaggttccggagctgccagagctgtgagggggactcgggagagatccaggttcctctggctgcgaagtccctggaggccgggccggagggctccgcgcacgtagcactttttggcccgcccggcgcccccgtcgcctccacaagggctgaagaggacgggcgggctggaccaggcggggctccgagacgcgtccgagacgggggcctgggcccgggagaggggcgggggctgggctcccggacccgggcgcggggccttttaacccctgcagacccaggaccggccgggccgccccaagacgaacgccgcagggctgggctcagcccaagccagacggcgagagtcgcaccgaggtggaagctgggggcgcggcctcgccggggccaggaaaggggcggggccgggtggggcccggggaggagcctgtgcgccccgccctccgtgacgcgccgcggcccccgcgcatataagtgggcgcgtccgcgcgtgcgcaccccgcgcgcgcctctctgtcgtggcgcggcttcccgcggtcttctctgcaaatgggctccgtggcctagcgcccccgtccccgccacccgtgatcgtgcgccgaggcccgcgaggggtcgccgcccaggtgaggggcgccgcgcgcgggtgggacgagcaggcccgaggggcggggggcgaggggcggggctgggccgggggctcctctcctc

SEQ ID NO: 27101 - DNA, 2300 bp, Homo sapien
cgcgtgtgtgttcaggtgtgcgggtgaactgtgcgcatgtgtgggggtttgtgactgtgtgtgtgtgagcgtgcgtcacacatgggtgtgtgcaggcagctctgggcagccatcctgctcagctgccctccccagctccaccctaggctctgacccctagactcgggccactcagggcagggtgtggtagcgcctgcccctgcccccgccgggtcctcaggggcctgtcctggcctttcgggacattcagggcgtctgggtcagcgacagctcctgagagcagctgtggtcagggctgggagcttgaggtggcaggcaagggcggctggggttccaggcgggcaggctggggccagcgtggggtccacgtggggtgggcccaggtccgcgtgttctcagactcctcccctgcaggtggttctttggctgcatctcccgctcggaagctgtgcgtcggctgcaggccgagggcaacgccacgggcgccttcctgatcagggtcagcgagaagccgagtgccgactacgtcctgtcgggtgcggccccggcctccgagcctgtgcttgcctgcgggggctcctggctctaagccctcccagccacgtggtgaacccggctcgctctggctgagacgggggacatgggctcctctccagggagctcccatcccctccgcccacctggcccgctcctccctggggcctgggtcactggctgctagggtagtcgtggggcagggcccctccctgggagggcaggggcttctccagccagccctgcccgaggcactcgtgggaggtcctcagcacccatgggaacctcgcccagcatgagacctgagcctggggtgtgcggggcgcagagaaaccccatccctgcccctgaggatctcagcatggctgggattttaggcagctgccatccaggcggaggccactggctgcctggcacgggggcaggaggggccagagagcttggccagagcgtgcagggcaggagggagccgttctgagggaggggaggcaggggtggtactgaggaagcaccaacagcaactgtggggacccagaaactctgcgcaggtgtggccagcagggctggggacgcagggaggcgtcggagttggggtggccacacagctcacgctctccctcccagtgcgggacacgcaggctgtgcggcactacaagatctggcggcgtgccgggggccggctgcacctgaacgaggcggtgtccttcctcagcctgcccgagcttgtgaactaccacagggcccagagcctgtcccacggcctgcggctggccgcgccctgccggaaggtagccgctccgccctgacttggtcacgcggggtcaggctggggggtcacaggctggcatttcctactgggagaggttggccgggcagcatgggaggggtcctgactcactgacctggggcccactggagggaagcccatggttctgcagagcacaggtgtttgcctgagttgggggtggggccaggagaccatccccgggcctggccactctcggagaggccagcggcactctgcagggtcctggctccggtctgtctgggtgtttcatgctgggctgggggcagcccccaggagagtccacccttgtgtcagacactcagaaacccccaacccaggctgatcgtggccctaaatctgaggctaaatccaggctccctgtgctggcttcagactggcacttcctgaaggatgagcccctgccctgtgtccccgactcttcctccagcacgagcctgagcccctgccccattgggatgactgggagaggccgagggaggagttcacgctctgcaggaagctggggtccggctactttggggaggtcttcgaggggctctggaaagaccgggtccaggtggccattaaggtgatttctcgaggtgagtgggccccgatcagggctctgtgtggccccgtgcctgccctgggccaccctcccaccccgccaacagggacctctggcctcgagccccaagcagcacccacagcgtccatgcgagagtggttccctttcaattgcacctatgtttttacctaaatacatttattataaaagaaaattttaggccgggcacggtggctcacatctgtaatccccacactttgggaagccaaggtgggcggatcacgaggtcaggagtttgagaccagcctggccaacatggggaaaccacgtctctactaaaaatacaaaaattagccgagtgtggaggcatgtgcctgtagtcccagctactcgggaggctgaggcaggaga

SEQ ID NO: 27102 - DNA, 2300 bp, Homo sapien
tcagctctgtacctgctgagccgaagtgctgatggctgccgtccacaggccccggccaaagcctggctcaggagggagctaagagatgagactcccgtgtgcagagacaggtggccccggggaaggaagaggccactcggaggctccgagaacggaggcagcgcgggggcttcctggggcccgtgcatcggaggaacaaggccaagcggagggaagcagcaggaaccaggacccctgcagatggtggaggcaagaggctttatctgagcctttgggaccctggccacctgcccagctccatctgcatgggagaacctaggggaggggctggttctggtacctgggcccactgaggccttgagctgagcttccagttctggcaggtccccagcacagcagcctgggggctcctctggcacagaaggcctcgccctctgtgctctctgcagccgccactgggattaaggggaccaggtgtgtctgtggcacctgtgccctcctaggcatctcgccagccaccagctgaacaggtttggtgctcctgggtatctgggaggggctggggacgttcctgcctcctggtgtggcttagactgaaagtcctgcacgtccgaactcagggatactcgaggcttcctggacatagactcacgggcccagagtctggccgggctctgagggacgctgcccggccaggtgccccggcaccctccttccgcattccccaccccccacccctccccctgcatcctccccaaccgaccccagacagagctgggagggcctgagggacactgcccaggccggcaccccgctgcccctccccaccttggtcagcgctgagctgggctgcccagaaatctatgagcctgttaaataatccagattattgttcttaatctcaaaacaatgagtggaaggtgccattatttctctttgcaataaaaataaaagttgaaatacgcagtttagggactttccttaccaccccttgcagactttgaatttcccttcccgccccttcctgcccccttgtggctgccagtccaggtccctgggttggagctcccgggtggacacagtagggtcagtgggagggtggggcggggaggggcctccagggagggggtgtcccgagtctcaggggctggggggcaggcggccgtcgggtgcaggtgggggtcacggcagggctcactcaggcatgagtcgggagaagggaggccagctggaagggggcaggggtcctgcgggctggacaggaggaggcagaggctggaggcgggaggggctgcctgggagggacctgtggccttgggccccagcgccatgggcgcttccaggccgcactcacggtccttgcctgccccctggcgtccgtgtggaggaaggcagtgcccgtttcttcagccgtgggtgcccctggctctgcctccccggggatcccccaaaaccctcgggccctcctcttccgggaagtcctccgggccgacccacacagctgtcgctgccctgattccactccctcttccctgcttggcccttacccgagggcgggcctgcccatgaggccgctctcaggacgcctgcccacagcagctcctgacattgggccctgtgctcaggggtggagtctggggctgggtgagggcaccgacgggtggaggggaagctgccggaagcggggagagaggcggcccccacctgtgcccccgcagctctgagggttgggaaggcagcgcctgcagccctcaccttcctgccctcaggctgcgaggcttgttcccagagggccgttggcttccctgagtgcctgagtgtccataagttggacccccaagaagccccaaccgggaggtcctcctccccctctcctgcgctcaggccggccctggcggtgcttgcccagtgggttcccatagtgcgggcgctaagtgctcagatgggccccagtgggcctgaggacttgtggggccggctgggccctcaggaggagccggggtgctctggagcgcctgtgggtgctgggtgtggctgcttcccggcctgtcatgaggaagtgggacggcccgcctgccacgcccagctctgggtgctccagctgggccacagcctggtcctgccgctgcgcccgcccgccatggtgtcccgggaccaggctcacctgggccccaagtatgtgggcctctgggacttcaagtcccggacggacgaggagctgagcttccgcgcgggggacgtcttccacgtggccaggaaggaggagcagtggtggtgggccacgctgctggacgaggcgg

SEQ ID NO: 27103 - DNA, 2300 bp, Homo sapien
gccacacctgtagtcccagcactttgggaggcaggaggatcgcttgaggccaagagttcaaaaccggcctgggcaacatagtgagagcccatctctacaaataataaaaaatttatctgggcatggtggcgcacacctgtagtccggcaggaggacggcttgagcccaggagatcgaggctgccactgcactccagcctgggcgacagagtgagaccctgtttccaaaaaaaaagtaaagaaaagaaatggtgggcaaaagcctcacctgcacgtgaggagacggcggtgggtgtggggaggagacggcggcggggggagtggaggggaggagacggcgggggtgggttgtggggaggagacggcgtcgggggcgggaggagacgggcagcgggtggggggaggagagggcggcgggggcgggaggagagggcggcggggggaagcgcgggaggagaaggcgctggggcccctcgaaggccacccccaatgtagtatttacaattctccacatttctcaacaccccccaccacccccagcagggcacctctctggtgcagagcctgccctgagcctggcgatgtccagtctcccagggcccctgctggctccaggctatcagcccggacacagcttggctgctggggtgccctgagagccaggccacgggtgtcactgccaccccacaatgcacacaccagtccccagacgtgaggtttctgagaagcccatctgtgactccagggcaggcaggtgcgaggggcttgtcattggctggacactggtcacgcctattggagggatgcattcagccacacgcatgaagtgggggcatggatgcgtgtgagatgtgggaaaggggcgtgaggctccctgaaggccacccaggtgcggaaggggctgctgggggaggccggcaggaggagtgagagactgcagatggcctcaccccacccccgtgcctcaggacccagaggggaggtgggaggagtgagagactgcagatggcccccaccccaccccactcaggacccggaggggatgtgggaggagagagagactgcagatggccaccaccccatcctcctgcctcaggaccctgtaccgtgctgctgggttttgctgggatttgctcccccagtcctgccccgatctggggacctacctgagcgggcagagtttgcttcagcatgcgggggcttggcgctgtccagggagagggtgggaggtccccagccagggactcacccgccgccccttctccgtgtgctcatccccctgaactggggccaggcgtccgcagcctccacttccccgcagtggcctttgggtatggcctgggcattgactgactcagaagccggtcatcgggcagcatggggcatctgggtgcctggcctgcggccgagctccctgcaatcagcatctcgttttactgcatgaaagccggggtgctgagagccccctcactcgcctgtcctcagaatttactgcagaggccggaggctcggcacctggtgcagggttaatgatgttaaaatatctggccaacacttaaataagcaggcaatttttcacctgagtgcagctcaggcttggcaaccactgcaggtgctgaacagcagcgcttctccgtggaacccccacttctccgtgggcacgggcggctgttggactgtggtgcccttgggcatgggccaggcctgactgggcagagccattccgcctgcctgggccttgcagagggcgggagagaggctggccctgcccaccccgccctcctcgggcccctcctggagcccgcccccgccccagcccaagctgccctctgccgtcgggttggggaggggacggtgcactccagacgccaaggaggtcgaggacaggaggtgctgtcggtgtgcctgaggcagggggtccgccctgcgccccacccagccccaacgccagcccggacgccggtgggaaccgtgtgcctcctggatccaggggacctctgagtgaccgcagggccggggtcccctgtcaccccacggccagggcagggagcgctggacaccgggtcccaccggccctgccagttcctcttccgggctcgcgggctcccatggccctcgggcccagcgtggtgaccccgggggatggagccgttcctcaggaggcggctggccttcctgtccttcttctgggacaagatctggccggcgggcggcgagccggaccatggcacccccgggtccctggaccccaacactgacccagtgcccacgctccccgccgagccttgcagccccttccct

SEQ ID NO: 27104 - DNA, 2300 bp, Homo sapien
ggtgttcagatggaggcttgtggcaggagctctgccacatcaggccaccccccatccgggtttatgtgtctggagggcacagctctgagggtctcagtggtcagcgtgcattctctcccccaagactggccccactacccccaggcttcaccatcctcagggcccagggaagagagcttgtccccaccagggacaacagatccaaagtgttcactgcccgtgccctggtggccacaaacagggttgagcaagactgagcacaaactggcccctggtgcccagcagtgaacaggagtgactgttgaccctgcacagaggggactatgctgagcgcaagaagccagtcccaaggctgcatactgaaagcctgcactgataggacattcttgaaatgaccagacagagccggagagatgagtggttgcagggctagggagaggtgggagggagcagcgtggctgtaaagaacatgtcagggtcccgtgggggtggcactgccttgcgtctgtatcgacgtcaaggtcctggcgtgattctgcactgcagtcctgcaagatgctaccactggggatgctggatagagggtaacgggacctctgtgttacttcttacaactgcagatgaatctatacttatcttaaaagtaaaagtttaactttattattattattattattttcgagacaggcctctgtcttattgcacccaggctggagtgcagtggcacaatctcggctcactgcaacctccacctcctgggttcaagcgattctcctgcctcagcctcctgagtagctgggactacaggcgcccaccaccacgtccagctaattttttttttttttttgagacagagtctcgctctgtcgcccaggctggagtgcagtggcgtgatctcggctcactgcaagctccaccttccaggttcacgccattctcctgcctcagtctcccgagtagctgggactacaggcgcctgccaccactcccagctagtgttttgtatttttagtagagacggggtttcaccatggtctcgatcacgtccagctaatttttgtattgttagtagagactgggtcttactatgttggccaggctggtcttgaactcctgacctcaggtgatctgcttgcctcagcctcccgaagtgctgggattataggcgtgagccactgcgcccagccattattattctttttagagacacagggtctccctctgtcacccaggctggagtgcagtggcaccatcttggctcactgcagcctcatcctcccaggctcaggtgatcctccggcctcagctttccaagtagctgagaccacaggtgcacaccaccacacccagctaatttttcaaattatttgtagagacaggggtctccctgtgttgccgaggctggtctcaaacttctggcctcaagggatcctctcaccttggcctctcaaagtgctgaggttatgggcctgcgccaccgagcctggccaaaagtttaactttaaaaaattagattagaaatcagaaattgaaagaaagggggtagggtggagcccaggagaggggagacatccaggacctgcctggccccaaaagagaaggggaggctgctctgcccccaccccgcttctccgtcagtgggctgcagggccgggggtaaggggtctaactcctactgcttcccaaccctccgcgtcagacagcacccccttctccaaacaaccccggctttgtcccctggagccctaaataacaataacaatagctggcatttattgagttccagcccaggcagggagggcagggcagaaacagcacccaacaggactgggtgcaaggctcacacctgtaatccggaaggatcagaaagacccaggtgggaggatcacttgagccccgggggtgaagactgccgcatgggtgacagagcaagacgctatctcaaaaaaaaaaccacccacatccacccacttcctgccaggcctaacccctggggcctccatgcaccaagggaaagctcttccagggtggggtcaccgggaggaggggggaggctcaagttacagaacagcctggtaggggctcaaagacgcccatcctggaagaggccccagcactgacctccgtgggggtggagatgaggaggatggaaagggtgtcttcctccagcatcttcctgaaggtgaaggaggggcaccttggggtgtctaagattgtgaccccaggagacccccagctagctggggtgtgctgtgggggaacggggggatcccagaggccctgagcccaactgaacagat

SEQ ID NO: 27105 - DNA, 2300 bp, Homo sapien
cggctgcacctcctggcctccctctggaagcaggtccagtttgctgcccgcacccaggactacgaacagatggtggacttggtcaccacggacgacatgcacccattcctggctcctgcaggccgcgacctccgcaaggccctggagcgctcggcgttcggccgctgcgcccggggccaccagcagcagggcggccactactcgctgcaggtggactggtacacgtgggccacctcgcccatccgcaggtacctggacgtggtgttgcagcggcagatcctgctggcgctgggccatgggggctctgcctactctgccagggacatcgatgggctctgccaggccttcagcctccagcacgcacttgcccagagctatcagcggcgggcgcgcagcctgcacctggccgtgcagctcaaggcccagcctctggacaagctgggcttcgtggtggacgtggaggcgggctcccgctgcttccggctgctcttccccagcaaccgggagacgctgcctgacccctgccccgtcccctacggctccctgcagctggccgagcacccccacgccctggcaggccggccgggcctgcggctcctgtggcggcgccgtgtctactcagcgcagggatccagcccgcccctgccactgcctggcactgtgccggacccacacaccctggccgtggagacggccctgtggaagcagctgctggagctggtggagctgcagcgctggccggaggcggctgctctcatccaggagaagggcgaggcgtcccagcggcgggagctggtgcaggtgcagcggagccactgtggccatttcctggaggtggcccgggagctgggcagtggggacaccctgcaggtgcagctcggcaccagcctgcagcacggcttcctggtaccgagccctcagctctggacggtggcaccgggcttcagcctctgcctggagcacgtggagcggcccggagactgcttctcaggccgtgtgtaccgggccccgagggaccggtaccgcgacgtggatgagtacgcctgcgtgtgggaaccattctgcgccctggagtcggccaccggcgcggttgccgagaatgactccgtcacacttcagcacctgagtgtctcctgggaggcgtcacggacgccgcaggggcagctgcagggcgccttccgcctggaggccgccttcctcgaggagaactgtgccgacatcaacttcagctgctgctacctctgcatccggctcgaggggctgccggctcccacggccagcccacgccctgggcccagcagcctcggccctggcctgaatgttgaccccggcacgtatacctgggtggcccacgggcagacgcaggactgggaccaggagcgccgggcagaccggcaggaggctcccagacgggtgcacctcttcgtccaccacatgggcatggagaaggttccggaagaggtgctgaggccgggcaccctgttcaccgttgagctgctgcccaagcagcttcctgatctgtgagtggcttccaccagcagaggctgggctgggggaccgccccgggcccctcacttgcaggaggggggagctcgtggggcagcagcccctttcctgggagtcctgttggttttccagtgtctgccttcacccccagccgcaaggaggaagccgtgcgtggactagaggaggcgtccccgctggtcaccagcatcgcactgggccggcctgtcccgcagcccctctgcagaggtaggtctgccccacccctccagcttcccctctggcccccagccccaccctgcatgagtgctcagggaggctgccccctctcagtgatccccagcaggttcctggagcggcagacctacaacatccccggaggccgccacaagctgaaccccagccagaacgtggcggtcagggaggctctggagaagcctttcacggtcattcagggcccaccaggtagggcccatgccgggggagccgcaggctgccttgggccacagggacccacagggtgggctacaatctcctattctctggctgcaggtacagggaagacgatcgtgggcctccacatcgtattctggtttcataaatcaaaccaggagcaggtgcagcccggaggccccccccgtggggagaagcggctggggggtccctgcatcttgtactgcggcccctccaacaagtcggtggatgtcctggcaggtgcgccggggtcggcggtgggggcctttggggagctggcacgcggggcaggactcacgtcccccaactaccctcaggactgc

SEQ ID NO: 27106 - DNA, 2300 bp, Homo sapien
ccaggccaccatcaccaaggtgctgcagaaataccacacggagcttggccgggttgccggccgccgagaggactgccgcgccttcttgaccttcactgtggacccccagggcgcctgcaacctcgatgatgccctcagtgtccgagacctgggtcccaggtgcgaggtggctgtgcacatcactgatgtggccagcttcgtgcccagggacggggtgctggacgtggaggcgcgaaggcagggcgctgcgttctatgcccccggcagggagccagtgcccatgctgccggccagcctctgccaggacgtcctcagcctcctgcctggccgggaccgcctggccatctccctgttcctcaccatggagaaggccagtggccagctgaagagcctgcgctttgcaccctccgtggtccagtctgaccgccagctgtcctacgaggaggcggaggaggtgatcaggcagcacccgggtgccggccgtgagctgccggcccgcctggactccgtggacgcctgcgtcgtggccgcgtgctacttctctcggctgctgcgccggcaccgcctgcggtccgactgcttctatgagcagccggacgaggacggcaccctgggcttccgcgcggcccacatcatggtgaaggagtacatgattcagtttaataggctcgtggctgagttcctggtgggcagcgagtgcacgcggacggtcacgcctctgcggtggcagccagcaccccgcagccagcagctcaaggccctgtgtgagaagcatggggaccgggtgcccctgtcactgcacctcggccaccacctgcacggcggcgggggcagtccccccgacacgcggctgcacctcctggcctccctctggaagcaggtccagtttgctgcccgcacccaggactacgaacagatggtggacttggtcaccacggacgacatgcacccattcctggctcctgcaggccgcgacctccgcaaggccctggagcgctcggcgttcggccgctgcgcccggggccaccagcagcagggcggccactactcgctgcaggtggactggtacacgtgggccacctcgcccatccgcaggtacctggacgtggtgttgcagcggcagatcctgctggcgctgggccatgggggctctgcctactctgccagggacatcgatgggctctgccaggccttcagcctccagcacgcacttgcccagagctatcagcggcgggcgcgcagcctgcacctggccgtgcagctcaaggcccagcctctggacaagctgggcttcgtggtggacgtggaggcgggctcccgctgcttccggctgctcttccccagcaaccgggagacgctgcctgacccctgccccgtcccctacggctccctgcagctggccgagcacccccacgccctggcaggccggccgggcctgcggctcctgtggcggcgccgtgtctactcagcgcagggatccagcccgcccctgccactgcctggcactgtgccggacccacacaccctggccgtggagacggccctgtggaagcagctgctggagctggtggagctgcagcgctggccggaggcggctgctctcatccaggagaagggcgaggcgtcccagcggcgggagctggtgcaggtgcagcggagccactgtggccatttcctggaggtggcccgggagctgggcagtggggacaccctgcaggtgcagctcggcaccagcctgcagcacggcttcctggtaccgagccctcagctctggacggtggcaccgggcttcagcctctgcctggagcacgtggagcggcccggagactgcttctcaggccgtgtgtaccgggccccgagggaccggtaccgcgacgtggatgagtacgcctgcgtgtgggaaccattctgcgccctggagtcggccaccggcgcggttgccgagaatgactccgtcacacttcagcacctgagtgtctcctgggaggcgtcacggacgccgcaggggcagctgcagggcgccttccgcctggaggccgccttcctcgaggagaactgtgccgacatcaacttcagctgctgctacctctgcatccggctcgaggggctgccggctcccacggccagcccacgccctgggcccagcagcctcggccctggcctgaatgttgaccccggcacgtatacctgggtggcccacgggcagacgcaggactgggaccaggagcgccgggcagaccggcaggaggctcccagacgggtgcacctcttcgtccaccacatgggcatggagaaggttc

SEQ ID NO: 27107 - DNA, 2300 bp, Homo sapien
gctgccccaggataccccgggtggctcggcccactcctcagcctggcatcggcaggggtggggctggtcccaccgtcttgcgcacccagcctgacctgactgcgtgccccctgcagggcggcagttccgggtcgtggtgctcagcactgtgcacacctgccagagcctgctcagccctggggcactggcccctgagttcttcaccgacgcccgcgtgctcaacaccgtcctgacccgcgcccagtcccagctggtggtagtgggggacgccgtggccctctgctccttcggggcctgcggcaagctctgggagagcttcatccgtgagtgcgtggagcggcacagtgtctgccccgagggcctgtccatggagcaggtcgagcagggtgtggcgcagagacggcgctggcctccccgaggcacacaggctggggcagcggggaactgggaggctgccccagagccagtaggggacctggccgaggagcaggcggctgtggtgacggccatggtgaaggcagagccgggagatgaggctctgagcccagcatcccgtgacatcacggcaaccacagcgcagacggaggctgcggcagcaccagcaggagacgcagtgaaggaagacgtggtgcccggggcctgtgcggcaggagcggctgctgcagcgggcgtggagtccacggaggctgaggatgcagaggctgacttctggccgtgggacggggagctcaacgctgacgacgccatcctacgggagcttctggacgagagccagaaggtgatggtgaccgtcggggaggacgggctgctggacactgtcgccaggcccgagtccctgcagcaggcccggctgtacgagaacctgcccccggctgcgctacggaagctgctgcacgcggagcccgagcggtaccgccactgctctttcgtgccagagaccttcgagcgggcgtcagccatcccgctggacgatgcctcctcgggccccatccaggtcaggggccgcctggactgtgggatggccttcgccggggatgaggtgctggtgcagctcctttcgggagacaaggcgcccgaggggcggcttcggggccgcgtgctgggcgtgctgaagaggaagaggcacgagctggcgtttgtgtgccgcatggacacgtgggacccgcgcatcatggtccccatcaatggctccgtgaccaagatcttcgtggccgagctgaaggacccatcgcaggtccccatctacagcctccggaagggccggctgcagcgtgtggggcttgagaggctcaccgccgaggcccggcacagccggctcttctgggtccaaattgtcctgtggcggcaaggcttctactacccgctgggcatcgtccgggaggtgctgcctgaggccagcacctgggagcagggcctccgcatcctcggcctggagtacagcttgagggtgcccccgtcggaccaggccaccatcaccaaggtgctgcagaaataccacacggagcttggccgggttgccggccgccgagaggactgccgcgccttcttgaccttcactgtggacccccagggcgcctgcaacctcgatgatgccctcagtgtccgagacctgggtcccaggtgcgaggtggctgtgcacatcactgatgtggccagcttcgtgcccagggacggggtgctggacgtggaggcgcgaaggcagggcgctgcgttctatgcccccggcagggagccagtgcccatgctgccggccagcctctgccaggacgtcctcagcctcctgcctggccgggaccgcctggccatctccctgttcctcaccatggagaaggccagtggccagctgaagagcctgcgctttgcaccctccgtggtccagtctgaccgccagctgtcctacgaggaggcggaggaggtgatcaggcagcacccgggtgccggccgtgagctgccggcccgcctggactccgtggacgcctgcgtcgtggccgcgtgctacttctctcggctgctgcgccggcaccgcctgcggtccgactgcttctatgagcagccggacgaggacggcaccctgggcttccgcgcggcccacatcatggtgaaggagtacatgattcagtttaataggctcgtggctgagttcctggtgggcagcgagtgcacgcggacggtcacgcctctgcggtggcagccagcaccccgcagccagcagctcaaggccctgtgtgagaagcatggggaccgggtgcccctgtcactgcacctcggccaccacctgcacggcggcgggggcagtcccc

SEQ ID NO: 27108 - DNA, 2300 bp, Homo sapien
cagcctggccaatagggtgaaactccgtctctactgaaaaaaaaaaaaaaaaaaaaaaattagccaggcatggtggtgggtgcctgtgatcccatctactcgggaggctgaggcaggaaaatcacttgaacccaggaggcggaggttgtagtgagttgagatcgcgccattgcactccagcctggcgacaagagtgaaactccgtctcaaaaaccaaaacaaaaacaaggattcaccagggtctggcacctggagagtgggtggtgaggcctcaagctgcccacactgccccacgggacatccacaggggccccaggagggttcagccacccccatgtagcacaggaagaaactgaggatggcagaggccgggtggcctgcttgcgttctatccaggaagtggcagggccaggacctgaaccctgcacttgggctacgctggccaggctgcctctcgggagggttggggggagccctgggcccccctcaccgtctggcctcctctccaggagcccctgctacacgtggccctgctgaagcaggagccaggagccgacttctctctggtggctcccggcctcccgccaggccggctctacgcacggggtgagcgcttccgtgtgcccagctccactgccgacttccaggtgggagtgcgtgtgcaggctgcctcgttcggcacctttgagcaatgggtggtcttcgactttggccgccggccggtgctgctacaaaagctggggctgcagctgggccaggggcgtcgcccaggaccctgcaggaatctggcgctcggccaccctgaggagatggagcgctggcacactggcaaccgccacgtggtgcctggcgtggagcggacggccgagcagacggccctgatggccaagtacaagggccctgccctggccctggagttcaaccgcagcagcgtggcctcgggccccatctcaccaaccaactatcggcagaggatgcaccagtttctctatgaggaggaggcggctcagcagcagctggtggccaagtgagctgggggcaacaggagcagctggggtagcaggagcagctggggcaatgggagcggctggggcaacgggagcggatgggggcgtggacttggcagcggggctggcagctgtggccccatgagctgacccaggccatcctgccaggctgaccctgcggggccaggtgttcctgaagacggcattgcagacgccagcgctgaacatgctcttcgcgcctccgggagcactgtacgcagaggtccccgtcccctcctccctgatgccagacacagaccagggcttcctgctgggccgggcggtcagcacagccctggtggcccctgtacctgcacccgacaatacggtgttcgaggtgcggctggagaggcgggccagctcagagcaggcgctgtggctgctgcttccggcccgctgctgcttggccctggggctgcagcctgaggcccgcctggtcctggaggtgcagttccagattgacccgatgaccttccgcctctggcaccaggcagtggacacactgcctgaggagcagctggtggtgcccgacttgcccacctgcgccctgcccagaccttggtctgtcccacccttgcggcgtggcaaccgcaagcaggagctggccgtggcgctcatcgcgggctggggccctggggatgggaggcgtgtccccccgctactcatctatggcccctttggcaccggcaagacctacacgctggccatggcctccctggaggtcatccggaggcctgaaaccaaggtgctcatctgcacacacaccaacaggtaagcccgagcctggcctgcccccacctcacctgacgcccggcccaagtctacaccgggcaggcggtcaccccctggatgtgctccagtcctctgattctgcactccctgtagccgaccagctttgggctttggctttatcaggcccagctcagggcaccgagggtggccgggtctgctgtcaggtgaggagctgggtgcctctgccggggccctggcccaaggagagtgtcacggggaaggctgcagcatggcccacccaggacttctggggatgagtcttgtttttcgtttttatagaaacacagatctttgtcctaaccacaaggttcccctttggtttatgtggtttcctctggttcctgccaccaccacctccccaggccggggccttcccatccctgcccagtggggagtgggaggaagagcctgggacagtggccatacgtcccgggctgatttctggattgggggttctgggga

SEQ ID NO: 27109 - DNA, 2300 bp, Homo sapien
caggctggagtgcaatggtgtgatctcagcttactgcaacctccgcctcgccccccccgaccccaggttcaagggattctcctgcctcagcctcctgagtagctgggactacaggcacctgccaccacgcccagctattttttttttttttttttgtatttttagaagagatggggtttcactatgttggccaggctggtctcgaactcctgacctcaggtgatctgcccaccttggcctcccaaagtgctgggattacaggcgtgagccagtgcgcctggccgagagccaatctttcatcccaccccagactcctgagtgtgactctatttctggactctctgttctgccttggaactgtgtgtccacaccgggttcagtggctttgcagtgtgttatgtgtttagtaagtcatgccagcacccgctgggaatcctttttagtcatcatcctgggctgggtgttgggattcaagcctgtaatctaatcccggcactcaaggaggccgaggtggggggtttgcttgagcccaggagttcaagagcagcctgggcaacattgagaaaccccatctctgaaaaacatagaaaaaactccaaaatagttaactgtggtggtgtgcacctgtactgtggtggtgtgtgcctgtagtcccagcgactcaggaggctgaggggggaagactgtctgagccagaggtcgaggctgcagtgaactgtgattgcatcactgcactcccgccggggcaatggaaggagactcagtctcaaaaaaaaaaaaagccctgtccagcctttcttggtgatgtgatgcttttccaaatggacttgaaagtcagtgtgtccaccatgcgactgcaggttagtttaggaggaactcacgtctttgtgtggtgttgagcctctccatccaggaacacagcgttccacacaaattctcccagcgttccacgcacatggaccctgctcagcgcccggcccctggggctgctattgtcgagggcctgccctctcccaggagctccaacgtgattggtctgcggagaggctccctggtggttgacggcccacccagccgacctcccgaggtcgctgtgagcccccagcctggccctccccacgaggtgctggccttgggtggcagccttgcttccttgtttcaggggcagcatcactgtccgttatctactgctgcagaacagatcgccccaaagctcaggggcttaaaacaacacagatgtttattttatttatttatttgttttgagatggagtcttgctctgttgcccaggctggagtgcagtggcgcaatcttggcgcactgcaacctccacttccttggttcaagcaatgcttctgcctcagcctcccgagtaactgggactacaggcgcccgcccccacccctggctaatgggacgtttattttaaacatagacatctaacagctgggcgtggtctaggtgggagggttaggcctggggtctccctgagatggcagtaaggctggggctgggactcgagctgcaagtgggctggaggcctcagctcctctatggggcctccccacagggctgctgagggcccagagccagtccagagagccaagagccaggcgtgctgactctgggacccggcggccacttagccattcctgccatatcctggttggtgacagaagggacttggggtcccagcagcaccagggccacgggcaggtcctgcctgtcaggggacccaggcttccaggtcagctgtgcctggatttctccaggggctgatggtggagtcaccagaccatcctgccgtccagggccgggcagggtctcaccccttccgcctggcacatcatcggggcgtctctggtgtgtgaagggctggacggggcgtggggccctggaggggtgcgggaaaggacccccacccccagccgcctccgccttcgacggcgctggcccttcagggaggggcgtcctctgctcgctggcgcttcccgaggttccctcgcagcgggggccgagctgtcgctggaggcggggcagggcggggcggggcggggggcggtgaggtaatttccgcgatcagcgtcagtgcccgggccagaatcgaaactgagagctcctgggcaggctcggcagggcaggcagctccaggagggtgagcgcgggggtcccagggcggaggggcgggggcgcgggggtccaggggcggctccaggagggtgagcgcgggggtcccagggtggcggggccgggggcggaggggggggtccgggagggtgagtgcagccgggggcgcgga

SEQ ID NO: 27110 - DNA, 2300 bp, Homo sapien
ttttattatttatttagcagagatggggtgttgctgtgttgcccaggctggtctcaaacccctgagctcaagcattcctcttgccttggcctcccaaagtcctgggattacaggtgtgacaccatgcctggccatgaaaatttttctttgtttaaaaagtttttatattctgtactttctagtctatatctaatcctaatgagtcattctattatagtagcattacagtgtttttattacggtaaaatatacataacataaaatttaaccattttaaacttttttttttttttttttttttttttttttgagatggagtttcgctcttgttgcccaggctggagtgcagtggcacgatctcggctcactgcaacctctgcctcctgggttcaagcaggtctcctgccccagcctcccaagtagctgggactacaggtgcctgccaccatgcctggctaatttttagtatttttagtcaagacaggatttcactgtgttggccaggatggtctcgaactcctgacctcaggcgatccgcctcccaaagtgctgggattacaggcgtgagccaccacgcccagcccattttaactgtttttaaatgtgtggttcagcaccattcagaacagccacagtgattgtgcagccatcaccgccgtccatttccagagcttttcatcatcccaaacagaaattctgtactcattaaagaacaactccctgtactccctcccccagcccctggtcacttctgttctactttctttctttttcgttttttgagagagttctcactctgttgcccagactggagtgcggtggtgtgatcacagctcattgcagcctcaatctcctaggctcaaacgatcctccagccccgccttccgagtagctgagactatcccagctttgtgtattttcttttggttgtcgtttttaattttcacatttctgtttggttataactcctgtttctataccaagattttctttccacttggttgacaatgtttgctttcctcttggagctggtccgatagcacctgaaagtctctggattctgcgttcaagagccagcttctcttgtgtatttgttcctttgagaatcaaccagactaccctttgccaggaagtttgatcgtgttctggatgctttgactactgtgctatggactctaggtcttgttttaagtttcacagagaatgtagacttttttttttcatagcaagaaatcgacctggttaggttcaggctgcaaattttgcaccccgttcctgtgtctgtgttcttaggccagtttattttagagactttccagtgcactgtggatctgtcccatatgcgccactggggcccatctgagacctgggcagtggcctatcctgtaggtcagttttcttccctttgccctttagggtcaggaccacgtagagactgtcttgggacgacccaggcgctcacacacagctgtgtgccatcctctcttctcccctctcctcttgtcgcctcccccacactctgactccaggctcgttgccctctggctggaaaccaggggcttttgtgttccctgtgctaggtaggggatggagagtgagagggcaacagggagcccccacactcttgggccaccattcctttagtcaggaggaagattcccctgtctccaagctttttgggccaggacagccattatcactgggttttagcaggggttggacttgctgaaggcaaagccaggaaagacaaaataataataatttttaaacccggggcaggccaggcatggtgcctcacacctgcaatcccagcactttgggaggccgaggtgagtggatcacctgaggtcaggagtttgagaccagcctgggcaacatggtgaaacctgtaatcccagcaattggagaggctgaggcaggagaatcacttgaacccaggaggtggagcttgcagtgagccgaggtcgtgccactgcattccagcctgggcgacagagcgagactccgtctcaaaaaaaacccaaaaacccaaaaaaacccagggcgtttccctcctctctttctgtcttgaatgggtttcccttcccgttccacagaccagcgaggacttcttggagtgctttctgcacctgaaactcagttcagggattggggctggctttgagttcaggccaggagagacggaagaactggcaagccgggagcctgcgtccagggaagttgcttggaattccaggcccctcctgtcctcctgctctgagccccacgtggagggagtggctctgtgctttctacccaag

SEQ ID NO: 27111 - DNA, 2300 bp, Homo sapien
ctcccaaagtgctaggattatgggcgtgagcctccgcactcagcctaaatttgcatttttaagcgactaagtttgagataatttgttatgccagcagaagaaagctaagttatcttggaggtgatttttctttttttttagatggagtttctctcttgttgcccagtttgtctcttggagccccagagtgaaggaggcagaacaggccccagggctcaccccaggccgacctcggtgggcttgcgcaacacacaggcatgatgtagccaccctcccatccccaggcccccctcagcactcctcttcgactttattgacatttatttccaaaacgtgacgataggcaaactcagataaatgacacacatagaccgcgtgaaccctctcatatttaccagataataaaatagtagcactgacaaaggctcaatttttttttttattcttccccagagacaggctctgttgcccaggctggtcttgaactcctggccacaggtgatcctcccacctttgtctcccaaagtgttgaggtaaaaggcatgagccaccgcactcggccaatctaatttttaaaaacaccttttcctcactggctggagcacgttctactttactgggaactgaatgaatgtgcaactctaattacagcccctccgaagtgcagtggcttgggaacctcccgttccgggaggcggcctgcagagccctcctcctacaagtgtgagcacagggtcagggttccatccaagcgagcacctgcttcctattttccgactaatttcggtcccctgatacggaatccgggatcctgcagacaggcagcgggtgacagcaagcacaagggtgttcgatgacacctggagaggtcaggagagccagtcctgcggtgcagaggaagaaacccagcacagaggccaacagagccagccccagcctctgccaataaaacatataaatgagccctgggggctggaggagggccacaggatccaagctggctgccggatccgagtgggatcggggtgccgactgtgggacatgggtgggatggggtgccggctgcgggactcgggtgggatcggggtgcgggctataggactggggcgggatcggggtgtcatctatgggatcgaggtgctggctatgggactggggtgggatcggggtgctggctatgggactggggtgggatcggggtatcagctatgctatgcgatcggggtgagtgccggctgtgggatcggggtgccggctgcgggactggggtgggatcggggtgccggctgtgggacagcggtgggatcggggtgggtgccagctgttgggctggggtgggatcggggtgccagctgcgggactggggtgggatcggggtgccggccgtgggacagcggtgggaccggggtgttagctatgggattggggtgggtgccggctgttgggcaggggtgggatcggggtgtcggctgtgggactgcgataggatcggggtgctggttgtgggactggggtgacagcttgaggggtgaccgagccctcccggccgctcccggatgcccctcgccctccacgctgggagcgccgtggctggctgagcctctggcatgttccgcgtgagtccgcgcaccctacagcgtcctcctccacagcctcgtgttcaggcgtccgccccgcaggggagtcccctcgcgcccattcacacacagcagcgtccgggcgaggagcgcccgtacctggaggcctgaaggtaccgccctgccgcgcgtgggcactgctccctggcgccgtccgtccactgaccatcgtccctcggcccggccgcccgcgcggggcaggcaacgcccgaccgggggcctcggggaccaggaggaacctgcggcgttaggagctgacagtgtcggtccgcgcacgcgccccggggcccgtcgggccttatttcacggccccgccttcctcctccgcgagcgccaaataagtgtccggccctcccagccccgtgcgtgcgcggccccgccgcctgcgtcactaggaagcgcgcgcccgcgccgccgccgccgccgaatccccaacaaggagcgaagcccgcggccgccgccgccgcccgccgccgccgcagctcccgacgccgccgcccccgccgggtgcctaagcaggcccggcgcggccccaggtaagcggcgccggcgagcccgcggcccccccgcggcgaggcctctcgctccgctcacgcgccgccgtccagtcaggggtccctgcggagcgtcaggacgttacggcggggggaggggagggccggg

SEQ ID NO: 27112 - DNA, 2300 bp, Homo sapien
cctgctagcacgctgacagtcagtatggctgacagtcagtaccccattgcgtgtgcctgcctaggtgctgacagtcagtacccctgttgtgtgttcctgctagtgcacactgtgcacatctactgtgttcctggcactatgccacgggcttccacacacctggtccctgtgctccagatgaggacacagaggctcagagagggcctggccagagtcacaatgagtgtgaggcattgcggtgctctgagcctgactgggtgggtcctaccccacccacatgagaagactctggaggtcccagagagggctacttctcttgatccctagcacctgagctccagcacccggggctggagtctgcctgaaggatgctgaccatccccaactgctactgtggtggccaacagggaggacacagctgctgtggtgggcagctctgtgtgcctctctgcccttcttcctccttcgcagagctggcttcctaggaatggcccaggggccaacacctctgtgtgtatattagtttgatatggcttcatagcaaatcaccacaaaaccaacagcttaaaacaactctcattcattacctcctaattcttagtaacccaaggctgaaaccaagtgggcagttgggctcagttcttgtgtggaggccctggggtcaaacctgcctccaagcccattctcttcttgttggcagaactcacttccttgcagttaaggtcttgttgtcttgctggctgttggctgggagcagttctcagatccttgccacgtggccccctcatctcaacaacagaaaaccttctttggtttgatccctccgatttcttcaaccaggcaaaggaaactgcttttaaagggctcctgtgatgaggtcagggcccgcctggtgatcctccagtcttaagggtacctctgggccacacaatgtcacattcctgggcatcacccccaccagactcacagtcccggggatgatgccggcttgcacgtcaggggtcaggactctccaggccaccctaggatgtgactggccttgggtgctcccaccgcactgctagagctgaggcttgcccctggcttttgtgttgctgagccagcctcatggctctgcaagtctcctgaggttttcagggttttgctcctggccctatgacttagttgcttgtagggcaaagcacttttctccctgcctcggtggcttcatccctgcaatggcaaagacgctccgtttgcctaccaggctttccctttgggagttatgaggagagggggaggcaggataggttgccccccactcactaagtgcgcacaaccctggcacccctcctctccatcgtctgggggcatcattgtttcatcttacccctgagaaacaaaggcccagcgaggtcagacgcttgcccttggcctgggccacacagtgagtgaaggtctgagcccaggcgggaaaccacctctttcacggcaaagcctttgttctggcctcactcctccactttcactcttctccgctcagatcctgcccatcccctgggctcacaggagatgccccttggaggcctccaggccagcgcccacccctgtggctgtggcatcctctccgatggcaggcacagacctggaccctgttggcgccagcccagcctacagcggccttggcggcgaagagctctgcggccccaccccatgggtgggacctgctcctccggcattgcccctgccccgcctgccctggggaatgggggctcatctccacccccaccccactctcaggcctcacaaagccaagttggagaagcagctgtcccgctgtgagcggttggagggtggggggtcttgttgcagttcgggtagcccccctcctccgccctctccccctgagagccgcggccccttccgcagccaggcgcttgctcctctctctcttcctccctcccttcctccctccctccttcccccgcccccgcagtctctctctctctctctctccttcccccaaccctccctccctcctccccccgctccttcccccaaccctctctctctctccctctgtctccctccctctctctctcccgccgcgcccgcctcccgcccgccctcgctccctccactcctctcccctcccctccccggcactgcagcaccagccgtctgcagctccggccgccacttgcgcctctccagcctccgcaggcccaaccgccgccagcaccatggccagcaccatttccggtaggctccggggccacgggctttgtggggcggcgggatctgagcagaggcctcgtctg

SEQ ID NO: 27113 - DNA, 2300 bp, Homo sapien
aaaagtcacactttatgaaaaacatttttttttttgaggtggagtcttgatattgttgcccaggctggagtgcagtggtgggatctcggctcactgcaacctctgcctcctggattcaagtgattctcctgcttcagcctccaaagtagctgagattacaggcacctgccaccacacctggctaatttttgtatttttagggtagatggggtttcaccatgttggccaggctggtctcaaactcctgacctcaggtgatctgcccacctcggccccccaaagtgttgggattacagttgtgagccactgcacccagtcaaaacatttttttaactagcactaatgtgcatgtgaaaaacatctttgaaatgctcgtgcactttctgcatttgatcttggtgagaagtcaaaatctgctccaagacctggcactatattggggcaaacagtcagtacagctattgtgtgcctgccagcatgctgtcattactcctattgcgtgtgcctgccagtgcactgagagtcagtacacctatggcatgtgcctgctagtgtgctgtcagtacagctgttgtgtatgcctgctagcacgctgacagtcagtatggctgacagtcagtaccccattgcgtgtgcctgcctaggtgctgacagtcagtacccctgttgtgtgttcctgctagtgcacactgtgcacatctactgtgttcctggcactatgccacgggcttccacacacctggtccctgtgctccagatgaggacacagaggctcagagagggcctggccagagtcacaatgagtgtgaggcattgcggtgctctgagcctgactgggtgggtcctaccccacccacatgagaagactctggaggtcccagagagggctacttctcttgatccctagcacctgagctccagcacccggggctggagtctgcctgaaggatgctgaccatccccaactgctactgtggtggccaacagggaggacacagctgctgtggtgggcagctctgtgtgcctctctgcccttcttcctccttcgcagagctggcttcctaggaatggcccaggggccaacacctctgtgtgtatattagtttgatatggcttcatagcaaatcaccacaaaaccaacagcttaaaacaactctcattcattacctcctaattcttagtaacccaaggctgaaaccaagtgggcagttgggctcagttcttgtgtggaggccctggggtcaaacctgcctccaagcccattctcttcttgttggcagaactcacttccttgcagttaaggtcttgttgtcttgctggctgttggctgggagcagttctcagatccttgccacgtggccccctcatctcaacaacagaaaaccttctttggtttgatccctccgatttcttcaaccaggcaaaggaaactgcttttaaagggctcctgtgatgaggtcagggcccgcctggtgatcctccagtcttaagggtacctctgggccacacaatgtcacattcctgggcatcacccccaccagactcacagtcccggggatgatgccggcttgcacgtcaggggtcaggactctccaggccaccctaggatgtgactggccttgggtgctcccaccgcactgctagagctgaggcttgcccctggcttttgtgttgctgagccagcctcatggctctgcaagtctcctgaggttttcagggttttgctcctggccctatgacttagttgcttgtagggcaaagcacttttctccctgcctcggtggcttcatccctgcaatggcaaagacgctccgtttgcctaccaggctttccctttgggagttatgaggagagggggaggcaggataggttgccccccactcactaagtgcgcacaaccctggcacccctcctctccatcgtctgggggcatcattgtttcatcttacccctgagaaacaaaggcccagcgaggtcagacgcttgcccttggcctgggccacacagtgagtgaaggtctgagcccaggcgggaaaccacctctttcacggcaaagcctttgttctggcctcactcctccactttcactcttctccgctcagatcctgcccatcccctgggctcacaggagatgccccttggaggcctccaggccagcgcccacccctgtggctgtggcatcctctccgatggcaggcacagacctggaccctgttggcgccagcccagcctacagcggccttggcggcgaagagctctgcggccccaccccatgggtgggacctgctcctccggcattg

SEQ ID NO: 27114 - DNA, 2300 bp, Homo sapien
aatatagtgccaggtcttggagcagattttgacttctcaccaagatcaaatgcagaaagtgcacgagcatttcaaagatgtttttcacatgcacattagtgctagttaaaaaaatgttttgactgggtgcagtggctcacaactgtaatcccaacactttggggggccgaggtgggcagatcacctgaggtcaggagtttgagaccagcctggccaacatggtgaaaccccatctaccctaaaaatacaaaaattagccaggtgtggtggcaggtgcctgtaatctcagctactttggaggctgaagcaggagaatcacttgaatccaggaggcagaggttgcagtgagccgagatcccaccactgcactccagcctgggcaacaatatcaagactccacctcaaaaaaaaaaatgtttttcataaagtgtgacttttatcagacctctgcattcttgaaattaactctggcttggctgggcgtggtggcccacacctgtaatcttaacactttgggaggctgaggtgggcagatcacgaggtcaggagttcaagaccagcctgaccaacatgatgaaaccccatctctactaaaaatacaaaaattagccgggcgtggtggcatgcacctgtaatcccagctactcaggaggctgaggcaggagaatcgcttgaacccaggaggtggaggttgcagggagccgagatcgcaccactctattccagcctgggcgacagagcaagactctgtctcaaaaaaaaaaaagaaagaaagaaattaactctggctcctagaaggagccctatatctcagcaggacactcagtcattcaacagacatctgtcaagcacctgctgtatgctggagctgtgggtacgtcagcaattagaggaagagggcaggggtacaggagttcctgaccaccccaggccagcacgctcctatagcagctggcaaggagcagatgactcagacttcagctcagtccacaggacagccttttctggccactgctctcaggagatgagatgtgtggctgcaaaaggtaaactcctggctcctgagcaggctctgggcaatctgctcaacgctctgtgcctcactttctcacccagaaagtgtggacaatgagaggacttatctggctgggcgcggtggctcacgcctgtaatcccagcactttgggaggccgaggcgggtggatcacctgaggtcaggagttcaagacctgcctggccaacacggtcaaactccatctctactaaaaatataaaaaattagccgggcttagtggtgcacacctgtaatcccagctacttgagaggctgaggcaggagaatcacttgaacccaggaggtggaggttgcagtgagccaagattgtgccactgcactccagcctgggcaaaaagccaaaactctgtctcaaagaaaaaagaatcatggcagaaggtgaagtctatgttagtcccagttcccaggtcgtacatggcggcaggagaaagagagagagaaggggaaactgccacttttaaaccatcgggtctcctgagcactcactgtcagaacagcctggaggaaactgaccgcatgatccaaccacctccctccaggtccctccctccacacgtggggattacaattcgaggtgagacttgggtggagacacagagccgaaccatatcagcatgtatggggggcactgaaacttgtgcttggtgcccattcattcaacgagtgtgtgtggctggtctcctcatcttcaactccctgccgagtctcagataggcagcctgcagttccttcaccacaacaggcacatggggctgggtgccagtgagtgctggggcttctccgagcactatctcacacccaggagcgtgggcacgcatggcattcgcatgtgccgtcagtggacattaaacacagccatgaagaagccacgaagaagtgctgcctgccggccgtgcgcggtcacgcagcgccaactccctcctggggccttctggggccttctggggcatgggagctggggccgcctgagacaaacatccgtgacgctgggctgaccccacagaacggtgcgggcctcgctcttggagtcagccctgctgccagccagtgccgggtgctggggactcagggaggcccgccgggaccactgcgggacagtgagccgagcagaagctggaacgcaggagaggaaggagagggggcggtcagggctctcaggagccgggtcctgggcaaggcgcagccgttttcaaattttcaggaaagcggtcggctcacactcgagc

SEQ ID NO: 27115 - DNA, 2300 bp, Homo sapien
atctgtttgttccattgacctctgatgtcacttgacttctcagaagcagccactccctgcactgggcgtttgtaggaaatgagctcctggaggagggggtggggaagttcccccattgcagggcacactcagccccaggaaggaaacgtgcctcgtccctgctgactccgaatcgcagtcagagtcgttctgcttgtgccgtgttgaattcccggcatccggcatccagactcagcctcctccccaggccacggccgccgtggccagtcggtcaagcccttctaggaacttcctttgagctggcgcccttgttcactgctgacgccactcagaggcttgtgcacgtgtcctgcttccaggcagagctgggaactcgcaccccgtcttctgcacgcggccgtggaatgtcgggatgccggcgcttccttcccgtgtgctcttggcggggtgggcttcttgccctgagccgcatgtcacagtttctgcagaagtttagggttggagtgggctgacctctctgcaggtgtccccagcctctgcctggggtctgcctcctactcccaggaccccctgtcccccagaggggccccaagctggcaggctcacactcagggcagcctcctttgttctgacttctgcacagtgggcctgggtggctgcccgcggctcgcttgcttgatgccagtgggtggagagggtgatgggcagagaggcaggtggtcaggcccccagtcccgtcctcacactctgtgccctctgccgccccccgccccacagggaaggtgctgagctactggtgcttcagtcccggccacagcatgcacgagctggtccgccagggcgtccgctccctcatccttaccagcggcacgctggccccggtgtcctcctttgctctggagatgcagatgtacgggccacccctgccagggcctgagcaccggtgacacctctgacatcagcggggtggaagtggtgggggtccccatgagccgggtgctgggggtctcgggcctcgagggctaaaggggtgctggtgcacttccccactgtctgctccctctggccacgctcagccctttcccagtctgcctggagaacccacacatcatcgacaagcaccagatctgggtgggggtcgtccccagaggccccgatggagcccagttgagctccgcgtttgacagacggtgagggcctgtccctgggccctgctggggtgggaggtgggggagcactgaggcctgaggtcctgagcagtggcctctccggctctaggttttccgaggagtgcttatcctccctggggaaggctctgggtgagtgccctgaatgccccagctgtgcccatcctggatcctggacccctgctcccaagagctggtagggaaccctgcagacatcctgcccctgccttgaccccggcccctgcacttccaggcaacatcgcccgcgtggtgccctatgggctcctgatcttcttcccttcctatcctgtcatggagaagagcctggagttctggcgggtgcgtctcccctgtgttctgggcggggtgggtgagggcagggctggagcatgaagcaggcagtggtcacagctcctgcttgccctcatcggatcggcggcgtgaccagggctgccgtgtccctgcctcttcctcccacaggcccgcgacttggccaggaagatggaggcgctgaagccgctgtttgtggagcccaggagcaaaggcagcttctccgaggtcggcacttggccggggctctgggcctgctgccccctcgtgcctcccctgcctctcacagcttccccaaggctgaccactggccctgaccatgggctccggcggctcccgctgcctcttcagggctcctgcgtttccttcctggccctgagtgttgcctcttatcttacaaagcccccagcaccgggtgggtgtggtaacagtggccctcctgtctgagtagccctagtcggccaccctggccctggggttccccgtgttttctgggaagcactgagcaggcgtggggtcagcctgggatccgtgccaggaagaagcttccagaacccgattggccttcctggctaggacgatccttcatcttggagcatgagacctgggtctccctcatgggggaggaaggggctgggggggggctccaggctcagcctcaccaactttccttccagaccatcagtgcttactatgcaagggttgccgcccctgggtccaccggcgccaccttcctggcggtctgccggggcaaggtgagctctccagggccctctgccctga

SEQ ID NO: 27116 - DNA, 2300 bp, Homo sapien
gggtctcgggcctcgagggctaaaggggtgctggtgcacttccccactgtctgctccctctggccacgctcagccctttcccagtctgcctggagaacccacacatcatcgacaagcaccagatctgggtgggggtcgtccccagaggccccgatggagcccagttgagctccgcgtttgacagacggtgagggcctgtccctgggccctgctggggtgggaggtgggggagcactgaggcctgaggtcctgagcagtggcctctccggctctaggttttccgaggagtgcttatcctccctggggaaggctctgggtgagtgccctgaatgccccagctgtgcccatcctggatcctggacccctgctcccaagagctggtagggaaccctgcagacatcctgcccctgccttgaccccggcccctgcacttccaggcaacatcgcccgcgtggtgccctatgggctcctgatcttcttcccttcctatcctgtcatggagaagagcctggagttctggcgggtgcgtctcccctgtgttctgggcggggtgggtgagggcagggctggagcatgaagcaggcagtggtcacagctcctgcttgccctcatcggatcggcggcgtgaccagggctgccgtgtccctgcctcttcctcccacaggcccgcgacttggccaggaagatggaggcgctgaagccgctgtttgtggagcccaggagcaaaggcagcttctccgaggtcggcacttggccggggctctgggcctgctgccccctcgtgcctcccctgcctctcacagcttccccaaggctgaccactggccctgaccatgggctccggcggctcccgctgcctcttcagggctcctgcgtttccttcctggccctgagtgttgcctcttatcttacaaagcccccagcaccgggtgggtgtggtaacagtggccctcctgtctgagtagccctagtcggccaccctggccctggggttccccgtgttttctgggaagcactgagcaggcgtggggtcagcctgggatccgtgccaggaagaagcttccagaacccgattggccttcctggctaggacgatccttcatcttggagcatgagacctgggtctccctcatgggggaggaaggggctgggggggggctccaggctcagcctcaccaactttccttccagaccatcagtgcttactatgcaagggttgccgcccctgggtccaccggcgccaccttcctggcggtctgccggggcaaggtgagctctccagggccctctgccctgacctggttgcctgttccctggtgggtgcttatggctccccagcagactctgggccctgggggctgcccggtcccctccttgggtcccacgagagcgactgctggccctgctgggagcgtgtcctgctctgggcctgggcaggcaggatgggagtttcctggccacaagagttggaggtggcgtctgggagctgtggaccccaagtggggtcctgacccacagatggagcttcctcccacccctggttggggacggagcctcggggaaggtggctgggctgggtgtgggcaccagggagaggagcccccacggccccaggcagctccctggtgtgtcccctaggccagcgaggggctggacttctcagacacgaatggccgtggtgtgattgtcacgggcctcccgtaccccccacgcatggacccccgggttgtcctcaagatgcagttcctggatgagatgaagggccagggtggggctgggggccaggtgagttacagcagggtggggctggggtaaggcggtctggtgactgagcccccgccccgtggccaagggagcccccgtgaccgagccgcctcgccccacagttcctctctgggcaggagtggtaccggcagcaggcgtccagggctgtgaaccaggccatcgggcgagtgatccggcaccgccaggactacggagctgtcttcctctgtgaccacaggtgcgtgcagtccggtggcaggcgcggcgccaggggacacgcccacaccccactgggcccctggactctccttccccacatgaggccccgtctcctccagagcctctccggctactcggggtcagcgtggggcccctgcagcagatgagggtcttcacttcggtgaactgaacccttgaagcggctgtgggcagggcagcagggctatggccaccccccaggttcgcctttgccgacgcaagagcccaactgccctcctgggtgcgtccccacgtcagggtgtatgacaactttggcc

SEQ ID NO: 27117 - DNA, 2300 bp, Homo sapien
agggccaagctcttcatggtggccgtgaagcaggagttgagccaagccaactttgccaccttcacccaggccctgcaggactacaagggttccgatgacttcgccgccctggccgcctgtctcggccccctctttgctgaggaccccaagaagcacaacctgctccaaggtgccctggcttgcagaggccacccaccctgagggcagtgctgccgccgcgtgtggggtgggggccatctgggtccaaggtggtctctgttctctagagaaaaaggggcagatggggacagacgccccttcctctacaggcttctaccagtttgtgcggccccaccataagcagcagtttgaggaggtctgtatccagctgacaggacgaggctgtggctatcggcctgagcacagcattccccgaaggcagcgggcacagccggtcctggaccccactggtaaatggggccccaggtgggaccctcagactcctgcgtggaaggcagtgtgggccagagtcctgggctgcttggggtgggcatcctcgggccctgcttggccccgcctctctgttcccctatgggagtgatgggggcctccacctccaccaccagcaccagcagcaccacctccacctccacctccacctccacctccaccaccacctccacctccaccaccacctcctccaccaccaccacctccaccaccaccaccaccaccaccacctccacctccaccacctccacctccaccaccaccacctccacctccaccaccaccacctccacctccaccaccacctccaccaccaccacctccacctccaccaccacctccaccaccaccaccaccaccaccaccaccaccaccaccacctccaccaccaccacctgcaccaccacctccacctccaccaccaccaccacctccacctccaccagcagcagcatcacttgttggggagaccctgtgcaactccatgcacagccctgtccctgccatagccccgacccctaagcacagccctgtccaactgccacacgtcccctgcctcccatgcatggtcctggggggtcaactgcacacgccagggtcctagggtcctagacccctgtcctccctgtttctgcctctgtttggggtggagtccaagtctccagaggcggaagcatctgtgttcgtgtgttaatgaacagcccctacagagttcccctagttcacccaggggggaacctagcctgttgggacgaccccagatcccttctgggcttggtactcactgggatatcctcatgcctgcacccagcctacggctctgagctcctgagtggggctttggcctgcccgccactgttccagcccccatccagcaggctggtgtctcctctgatgcccccagcacccaggcgtgtacctgcctgggttttcccgccctggtctgaggtgggtgaggcctggcctccctagccagccctgcccccccaccccagggaactttccagatgctctcgaccagctttgtggctctacatctcttcatcaggaagaacggcgccggatcccaagctgaccgtgtccacggctgcagcccagcagctggacccccaagagcacctgaaccagggcaggccccacctgtcgcccaggccacccccaacaggtagctgactcctgaaccgtgtgcagcctacgacttggtgggtccctcagtggcttcacgaggctaactcttgagtgtggccggggctgcccctgtggggagccatctcatggtggggactgctcccggttctgcaccccgcagttgtcctgagcagctctccaggagttcctggaggaagggcgggcagggcggtgggactctcagtcctccaccccagcgccactctgagccatgctactcccacaccaggagaccctggcagccaaccacagtgggggtctggagtgcccagagcagggaagcagggccagcacgccgtgagcgcctacctggctgatgcccgcagggccctggggtccgcgggctgtagccaactcttggcagcgctgacagcctataagcaagacgacgacctcgacaaggtgctggctgtgttggccgccctgaccactgcaaagccagaggacttccccctgctgcacagcaagtggccctggcgtggggaacagccggtggggtggggggcaggggacaaaatgggggctgtgccgggtctgattgaagctccccgcagggttcagcatgtttgtgcgtccacaccacaagcagcgcttctcacagacgtgcacagacctgaccggcc

SEQ ID NO: 27118 - DNA, 2300 bp, Homo sapien
gccggggctgcccctgtggggagccatctcatggtggggactgctcccggttctgcaccccgcagttgtcctgagcagctctccaggagttcctggaggaagggcgggcagggcggtgggactctcagtcctccaccccagcgccactctgagccatgctactcccacaccaggagaccctggcagccaaccacagtgggggtctggagtgcccagagcagggaagcagggccagcacgccgtgagcgcctacctggctgatgcccgcagggccctggggtccgcgggctgtagccaactcttggcagcgctgacagcctataagcaagacgacgacctcgacaaggtgctggctgtgttggccgccctgaccactgcaaagccagaggacttccccctgctgcacagcaagtggccctggcgtggggaacagccggtggggtggggggcaggggacaaaatgggggctgtgccgggtctgattgaagctccccgcagggttcagcatgtttgtgcgtccacaccacaagcagcgcttctcacagacgtgcacagacctgaccggccggccctacccgggcatggagccaccgggaccccaggaggagaggcttgccgtgcctcctgtgcttacccacagggctccccaaccaggtagggcacctgcctggctgctcctggcagcgccccaaccgcacgcagccctgggagtgagcagcaaagccccaggcccccctcagactcaagtctctgtctccaggcccctcacggtccgagaagaccgggaagacccagagcaagatctcgtccttccttagacagaggccagcagggactgtgggggcgggcggtgaggatgcaggtcccagccagtcctcaggacctccccacgggcctgcagcatctgagtggggtgagcctcatgggagagacatcgctgggcagcaggccacgggagctccgggcgggcccctctcagcaggctgtgtgtgccagggctgtggggcagaggacgtggtgcccttccagtgccctgcctgtgacttccagcgctgccaagcctgctggcaacggcaccttcaggttggtgcctggccactacagttcctgctgggtgtagccccaggtgatgggctgagggggaaagggcaggcccttgtcctggtggcaacgcctggcagacgtgtgcagtgggccggttgtctcacaggcctctaggatgtgcccagcctgccacaccgcctccaggaagcagagcgtcatgcaggtcttctggccagagccccagtgagtgcccacggaggcccccagcacacccaacgtggcttgatcacctgcctgtccagctctggtgggccaagaacccacccaacagaataggccagcccatgccagccggcttggcccgctgcaggcctcaggcaggcggggcccatggttggtccctgcggtgggaccggatctgggcctgcctctgagaagccctgagctaccttggggtctggggtgggtttctgggaaagtgcttccccagaacttccctggctcctggcctgtgagtggtgccacaggggcaccccagctgagcccctcaccgggaaggaggagacccccgtgggcacgtgtccacttttaatcaggggacagggctctctaataaagctgctggcagtgcccaggacggtgtcttcgtggcctgggcttggtggtgggagttgagggacagggagttggcagaggcccctcccagcctgccatgtgacactgtacttcctccacggtgggctcagccctgccctcatcctcacagccgcagccaagctgcagttggtaggggatccaccgacacaccaggctgcctgggctggtctctgggttgggagctgccccaggtgctgaggagggcagctccctggctggtgaggcccctcccagaaccacccttggactgagctctggggagggatggtaccaggtgggtgaggggggctgcctggggagggaggggttcctatggggcgtggcgaggctggcccagccctctccccgcccatatatgtagggcagcagcaggatgggcttctggacttgggcggcccctccgcaggcggaccgggggcaaaggaggtggcatgtcggtcaggcacagcagggtcctgtgtccgcgctgagccgcgctctccctgctccagcaaggaccatgagggcgctggaggggccaggcctgtcgctgctgtgcctggtgttggcgctgcctgccctgctgccggtgccggctgtacgcggagtggcagaaacac

SEQ ID NO: 27119 - DNA, 2300 bp, Homo sapien
gcactggggacaccccacacccactgtgccagcctagggcagggagcccgaggaagccacaggctctgccctgctcagtgctggactcagtgcctggcccaggctgagaaggagataaactgcagccttgggggtgtggggaaggggcaccacactgggatctcagaaatgcccaaaacctgtgtcaaaataggagactgccgctgtgagaccctgaggagtcttctggtgatcatggaagaacaaatgttaagctagaactgaaggaacctcatcaggggagaggcagccatcctgccgtccccacatctggtctttgccatttctgtgtcctgtggtggtcagcagcaaggtctctgagccgaaaggaggcactcactttggaggagtgcagggtccccaggtccccacactttgtcttgtcctgactgagaaagaaacagactgccctgacctctctgacttggccagcgaggttgcccttaggctcaaacccaagccagggtttgaacattcccagacacttgtaagatgtttaggttgttaacataatgttcaggtttcaaaacattgaaagaaactagccccagccctgaacccagatcccccccggcttcaggcatgaccagtgaacacgcccttctctcactggtcacctgaggatgccgcactctgtcaacaggttcccctaatacatgctctgatctgatcgccttggcatttagtgattctttccctggaattctccactggccccatcgcagggaactcccaagtgggaaactcccctaccaccacttttggggcaacttcagctaagggttcagctgggacaaaacagggagccactcgggaacctgggacaggaccagagagaaaacccgagggacagagtgggtaaggaaaactgctgaggaagggcccaaagggcactctggaaagaagtggcactggagggctggggtgggggtggtcctggccagggagtcttaccttgtcccacaaagactgcagctcttcctgccctcctaagtcccagaacatgagccgagcctttcccacatccacagtgccgactggggagaggaggaaacaggcaaggctcatgaccttggtcctcgacacacccagtcccagctctcccaggggatggggcaaaccatgctggtgccactcaaatgagacttgagaggggcccgacagggctgtggccacgggccagctggactgtgaatatcacggcatcctcaaggccccaaacccacagcctgctattgagacccttactgtttaggcccacggtggtggtgattttggatagactcatccccttgtagttcttgttaaatcgggttttcgactgctccaggaaggtctgaggagagaggcagaggcgaaacacatcaaggaggggctatactggcttccaaatatccttactcaggtctgttctttaaaagacagaaacagaaacagagcaacactctgctcttcaggaggctggtggtgactatcctgccgtctcaggtgaaatttggcttccgtctgggtagtgaacgtgcagctgacagcacaaaaccgaagggggcgccgccaggccgtgggaaaggtgcgcgcaagggcgtgggcactcaccgtcttcccagcattgtccaggcccaggatcaggatgcagtactcgtccttctgaaacatgtacttgtacaagcccgacagcagcgtgtacatcctgccctgggcaccccaacataggtcagtgtgcagccagaaagcacctcccctcccccgggcttctccacggtggtcagtggcgccccacgtccagccgaccgctcaggacgagagcctgggggccattcccgactcctcgtccctctcccaccccgtccctctgtaacttctcccaggtcagccgccactgtgtcctgctcacagcaatgactgcgacctctccgcatacacatcggttccggcccctcccctgctcgcgggactacccagccgggtgttcacagtgagctcagccgcgctcccgccctcccccgaggcttcgctcccacgcttcacgcgcgcggaacggggaacacactcgctgcagccccgcctgggccacggcaccctcgagcgccagccccgcgccccacccgggagcagcgagccaccggcgcgctccccaggagcccctgcaggcgccgggtagggacgccccatcaccccatttcttaaaacggggacggccctggggggagcggactacagggcgggtgagcagcggcgcggctgctcctggagtgcacctg

SEQ ID NO: 27120 - DNA, 2300 bp, Homo sapien
agaaactagccccagccctgaacccagatcccccccggcttcaggcatgaccagtgaacacgcccttctctcactggtcacctgaggatgccgcactctgtcaacaggttcccctaatacatgctctgatctgatcgccttggcatttagtgattctttccctggaattctccactggccccatcgcagggaactcccaagtgggaaactcccctaccaccacttttggggcaacttcagctaagggttcagctgggacaaaacagggagccactcgggaacctgggacaggaccagagagaaaacccgagggacagagtgggtaaggaaaactgctgaggaagggcccaaagggcactctggaaagaagtggcactggagggctggggtgggggtggtcctggccagggagtcttaccttgtcccacaaagactgcagctcttcctgccctcctaagtcccagaacatgagccgagcctttcccacatccacagtgccgactggggagaggaggaaacaggcaaggctcatgaccttggtcctcgacacacccagtcccagctctcccaggggatggggcaaaccatgctggtgccactcaaatgagacttgagaggggcccgacagggctgtggccacgggccagctggactgtgaatatcacggcatcctcaaggccccaaacccacagcctgctattgagacccttactgtttaggcccacggtggtggtgattttggatagactcatccccttgtagttcttgttaaatcgggttttcgactgctccaggaaggtctgaggagagaggcagaggcgaaacacatcaaggaggggctatactggcttccaaatatccttactcaggtctgttctttaaaagacagaaacagaaacagagcaacactctgctcttcaggaggctggtggtgactatcctgccgtctcaggtgaaatttggcttccgtctgggtagtgaacgtgcagctgacagcacaaaaccgaagggggcgccgccaggccgtgggaaaggtgcgcgcaagggcgtgggcactcaccgtcttcccagcattgtccaggcccaggatcaggatgcagtactcgtccttctgaaacatgtacttgtacaagcccgacagcagcgtgtacatcctgccctgggcaccccaacataggtcagtgtgcagccagaaagcacctcccctcccccgggcttctccacggtggtcagtggcgccccacgtccagccgaccgctcaggacgagagcctgggggccattcccgactcctcgtccctctcccaccccgtccctctgtaacttctcccaggtcagccgccactgtgtcctgctcacagcaatgactgcgacctctccgcatacacatcggttccggcccctcccctgctcgcgggactacccagccgggtgttcacagtgagctcagccgcgctcccgccctcccccgaggcttcgctcccacgcttcacgcgcgcggaacggggaacacactcgctgcagccccgcctgggccacggcaccctcgagcgccagccccgcgccccacccgggagcagcgagccaccggcgcgctccccaggagcccctgcaggcgccgggtagggacgccccatcaccccatttcttaaaacggggacggccctggggggagcggactacagggcgggtgagcagcggcgcggctgctcctggagtgcacctggaggcggcgcgcggctggcagggaacgactgcgaaggaagaacctgggtcgcggcccccggctacgtccgccccaagccgccgccgccaggtctgaggctccccgacaagcagccaaagctggctcctgtcacacccgcgtcccacctcgagtcctgggccgcccctcgggcctcgcgcctcaccgcacagcctgcggcctacctgcgtccgccgcgccctcggagccgctgctgctgacccccgctgacctccgctgaccccgcgctaaccccgcgcggcgcctgacgggacgcgggccggcctcagggaatgagctgaaccgcgtcccagcggcctccgcgctccgcttcccggctgcccccgcgcgccaagcacttccggaagcggcggcgctcgggaggaagtgccgatcggctgctggggcgaaaagggggcgccgggccgctctagccggtgaggccggcgggctctctgtggctgcggctgggaaaccgcgcggaggaggtgcccggccggggaccaggtggccgcggtttgcggggacgcggccctggccagacagaagagacgccg

SEQ ID NO: 27121 - DNA, 2300 bp, Homo sapien
gggaggcggagcttgcagtgagccgagatcacgccactgcactccagcctgggcaacagaacaagactccatctcaaaaaaaagataaaaaattatagtaatataaaaattagctgggtgtagtagcgtgagtctgtagcccagctcctaggggggctgaggcaggaggatcggttgagcccaggaggtccaggctgcagtgagccaggactatgccactgcactccagcctggttgacaaagtaagaccctgtctcaaaaaaaattaaaacaaccaccaaaaaaaaactgacgataggctggagacctactctcttccacataagccttgcactgctgctcgggctgcagtacagtggctgcatctccactcactgcaaactcggcctcctgggttcaaccaattctcctgcctcagcctcctgagtagccaggaccacaggtgcgcgccaccacgaccggttcatttttgtgtttttaaggagatggggtttcaccatgttgaccagcgtggtcttgaactcctgacctcaggtgatctgcccgcctcggcttcctaaagtgctgggattacaggcgtgagccaccgcgcctggcctccttccatgcttcttgattcaccccagaaggaagacgtagacgcctgaacacagacacagctgtcaaagcacgcctgccccaggaagctgagacaaaactgcaaagcaaagggagggccgatcctgacccgaccctgtgtgcgtgccccttacgcccctaaggttggcatctgacaacaaagggctttacctgcagttctccttaaagcggcactttccctccaggaagaacgggcacggcttcagagacttgtgagtggggtacaggtaaagcacacggacacccgccgagccatcctccgcctcttccgttcccaccaccatggcgttgtgatactccagagtgccccaggagctgtagtagggcgcgctcacctttgtcccactcagctcttcctcgtcctctccctcttcctcctcctgcccacctgccgcagattctggccccgcctctgctttaggaacggtctctgatccggacccacgggccgctgctggtgcctccaccgcctcagtgatggcctcccggaaagcctggtactcagcatcttcctggcggcccgggcgctcttcgtccagcgcggccaacaagctgctcttcctgacagacaccaggctggcctcggtgagctcgatgagctccttcaggtccccctgcagctggcgcaggtcagcctgctcagacgaatccaggccggcgcccaaggccagctccacctgctgcagctgcgcacggtaggtctgcaaggccgactccaggctctcctcgtccatgctgagagagggaggcgctggaccagggctgcaagaagagaagccagctgagccccgcgtctcgggaccgaccccacagcctgagggcgggcacgggcacgggcacgtcccctttccctcggggagacaccggctcagaggcacagctcccagcgcagaggtcgcagcccgggtacccccgctcaggctccgcgcttcccttccgagccgccgtgggctcgccgctagccgggtcccgcgtcactccggagccccttccccgcggggcgccccgccgcctcaccctccgccgagcccacccgccgcgcccgccgccttccaggccggccgcgcccccccgcccggcgtctcttctgtctggccagggccgcgtccccgcaaaccgcggccacctggtccccggccgggcacctcctccgcgcggtttcccagccgcagccacagagagcccgccggcctcaccggctagagcggcccggcgcccccttttcgccccagcagccgatcggcacttcctcccgagcgccgccgcttccggaagtgcttggcgcgcgggggcagccgggaagcggagcgcggaggccgctgggacgcggttcagctcattccctgaggccggcccgcgtcccgtcaggcgccgcgcggggttagcgcggggtcagcggaggtcagcgggggtcagcagcagcggctccgagggcgcggcggacgcaggtaggccgcaggctgtgcggtgaggcgcgaggcccgaggggcggcccaggactcgaggtgggacgcgggtgtgacaggagccagctttggctgcttgtcggggagcctcagacctggcggcggcggcttggggcggacgtagccgggggccgcgacccaggttcttccttcgcagtcgttccctgccagccgcgcgccgcctccaggtgcact

SEQ ID NO: 27122 - DNA, 2300 bp, Homo sapien
ccaaggtgggcggatcacgaggtcaggagattgagaccatcctggctaacatggtgaaaccccgtctctactaaaaatacagaaaattagccagacatggtggcgggcgcctgtagtcccagctactcgggaggctgaggcaggagaatggcgtgaacccgggaggcggagcttgcagtgagccgagatcacgccactgcactccagcctgggcaacagaacaagactccatctcaaaaaaaagataaaaaattatagtaatataaaaattagctgggtgtagtagcgtgagtctgtagcccagctcctaggggggctgaggcaggaggatcggttgagcccaggaggtccaggctgcagtgagccaggactatgccactgcactccagcctggttgacaaagtaagaccctgtctcaaaaaaaattaaaacaaccaccaaaaaaaaactgacgataggctggagacctactctcttccacataagccttgcactgctgctcgggctgcagtacagtggctgcatctccactcactgcaaactcggcctcctgggttcaaccaattctcctgcctcagcctcctgagtagccaggaccacaggtgcgcgccaccacgaccggttcatttttgtgtttttaaggagatggggtttcaccatgttgaccagcgtggtcttgaactcctgacctcaggtgatctgcccgcctcggcttcctaaagtgctgggattacaggcgtgagccaccgcgcctggcctccttccatgcttcttgattcaccccagaaggaagacgtagacgcctgaacacagacacagctgtcaaagcacgcctgccccaggaagctgagacaaaactgcaaagcaaagggagggccgatcctgacccgaccctgtgtgcgtgccccttacgcccctaaggttggcatctgacaacaaagggctttacctgcagttctccttaaagcggcactttccctccaggaagaacgggcacggcttcagagacttgtgagtggggtacaggtaaagcacacggacacccgccgagccatcctccgcctcttccgttcccaccaccatggcgttgtgatactccagagtgccccaggagctgtagtagggcgcgctcacctttgtcccactcagctcttcctcgtcctctccctcttcctcctcctgcccacctgccgcagattctggccccgcctctgctttaggaacggtctctgatccggacccacgggccgctgctggtgcctccaccgcctcagtgatggcctcccggaaagcctggtactcagcatcttcctggcggcccgggcgctcttcgtccagcgcggccaacaagctgctcttcctgacagacaccaggctggcctcggtgagctcgatgagctccttcaggtccccctgcagctggcgcaggtcagcctgctcagacgaatccaggccggcgcccaaggccagctccacctgctgcagctgcgcacggtaggtctgcaaggccgactccaggctctcctcgtccatgctgagagagggaggcgctggaccagggctgcaagaagagaagccagctgagccccgcgtctcgggaccgaccccacagcctgagggcgggcacgggcacgggcacgtcccctttccctcggggagacaccggctcagaggcacagctcccagcgcagaggtcgcagcccgggtacccccgctcaggctccgcgcttcccttccgagccgccgtgggctcgccgctagccgggtcccgcgtcactccggagccccttccccgcggggcgccccgccgcctcaccctccgccgagcccacccgccgcgcccgccgccttccaggccggccgcgcccccccgcccggcgtctcttctgtctggccagggccgcgtccccgcaaaccgcggccacctggtccccggccgggcacctcctccgcgcggtttcccagccgcagccacagagagcccgccggcctcaccggctagagcggcccggcgcccccttttcgccccagcagccgatcggcacttcctcccgagcgccgccgcttccggaagtgcttggcgcgcgggggcagccgggaagcggagcgcggaggccgctgggacgcggttcagctcattccctgaggccggcccgcgtcccgtcaggcgccgcgcggggttagcgcggggtcagcggaggtcagcgggggtcagcagcagcggctccgagggcgcggcggacgcaggtaggccgcaggctgtgcggtgaggcgcgaggcccgaggggcggcccaggact

SEQ ID NO: 27123 - DNA, 2300 bp, Homo sapien
gtgtgtatatatgtgggaggtcacctgacccaagcatggcgggctgagtccaggaggggtctgcatgttggaggtgtacccagggatcagtgatggtggtttctgaagccccatgtccctggtgaaggaggactgaaccaaggactctgtgagggcaggtgaggcgctcacagcctcgcgaaggtggagaagggcaggggcaggagagggctgcggaggaggggccacggtgcagcaggccgtggggactgccatgcactctgcctggtgtcacatgcccacagcagcctcggtgacgagagcacggagcccaagaggtggggtgtcgtggctctgcccaggatctgagctcattggtcaaagcccgggtcaccatgcacaatcctctggcctggctgggccactgccctctgtccatctcttgcagtggtggggtcggacgccgtggactctgcacagtcctctgccctctgtccgtctcttgcagtggtggggtcagatgctgtggactctgggacctgcagctctgcctttgctggctgggaggtgcacacgcgaggtataggctccagactcctcaccaagatgggctatgagtttggcaagggtgagtacaagctgccctggagaagtgggcaggctgctgcagcatagcccaggtccagcagccatcaggttcccggggtcccgcagccatcgggttcccagggtcccgcagccacagcactgccatccccgtgctcctcagattcccggggtcccgcggccacagcactgccatccccgtgctcctcagattcccagggtcctacggccacagcactgccatctccgtgctcctcagattcccggggtcccgtggccacagcactgccatccccgtgctcctcagattcccggggtcccgcagccacagcactgccatccccgtgcctccgcaggtttgggccgacacgcggaaggccgggtggagcccatccatgctgtggtgttgcctcgagggaagtcgctggaccagtgtgtggagaccctgcagaagcagaccagggttggcaaggctggcaccaacaagccccccaggtgccggggaagaggggccaggcctgggggccgcccagctcctcggaatgtgtttgacttcctcaatgaaaagctgcaaggtcaggctcctggggccctagaagccggggcggccccagcggggaggaggagcaaggacatgtaccatgccagcaagagtgccaagcgggccctgagcctgcggctcttccagactgaggagaagatcgagcgaacccagcgggacatcaggagcatccaggaggctctcgcccgcaacgctggccggtacgtgtggggcccagctcagggcaaagggcgacccagggtggccctgcccccgggatacatgctggaggtcacctgacccaagcatagcgggctgagtccaggaggggtctgcatgttggaggacgggcagcgggcacacaggcagtgggtacggcagactggggttggtggcatggcccaggaccccacgctgactagtgagcccctccgcaggcatagcgtggcgtcagcccagctgcaggagaagctggcaggagcccagcgccagctggggcagctccgggctcaggaagccggcctgcagcaggagcagaggaaggcagacacccacaagaagatgactgagttctagagaccccacaagcactatggacgaagcgtgggaccccagcacgggctgccctcaggaagaccagtgttgcccgaggaggggccggcctgctggcctggggcgtgcagacactgctgagtggagacagagctgcggggtcccatctggacacttacttgcccacctgccagtgtcttgggcatttccttggcaaggacattaaagtgatttcatcacagtgtcattcagtggagatcagctggctgcagggtctctggggagagaagggtctgtgcagggctgtggtgagagacgggctgggctggaggggcctaggaggccggcattctcccttcttacccttctctgaccaaggcagatcggaggccagggtgcccgccaggctgcctgacacccacagatgggtggagctcagtgctgctccagcgggcgagacgggcgggagaggactgtggcccaccacgtggggcactcttggtgaggcaggcggacctggccctgtgggtttgggggttctgtgccagctctgctcacgtcttcgtgtgtggaggggttgtgagttaggctgtcagaacagtgcgggctagaggcgcacacg

SEQ ID NO: 27124 - DNA, 2300 bp, Homo sapien
aaggggctggaggcaggtccgcgcacccagctcggcacgcgcgcctgcaccgggccttggacccgaggctgacgaccccgccccccgccccccacctctacccccaaggcccgaggacgctgtagcccccaggaagagggcgcggaggcagcgggcgaggctgcagggcagtgcgacggcggcggaagcggtgagtgccaggctgtcccggggaccagggtggggtccgcagggcaccgaccagccttcctcgcccccagtccctactgaggcggacccacctctgctccctcagcaagtcggacaccagactgcacgagctgcaccggggcccgcgcagcagcaggggtgagcagagggcggggcgggggcggccgggcggggcttactgtgcagcgcgtgccaacccctgggccagacccgctcctgccccctgcccggagtgaactctgccctgaccccacccccagccctgcggcctgccagcatggatctcctgcgcccacactggctggaggtgtccagggacatcaccggaccgcaggcagccccctctgccttcccacaccaggagctgccccgggctctgccggcagctgcagccaccgcagggtgcgctggcctcgaggccacctattccaacgtggggctggcggcccttcccggggtcagcctggcggccagccctgtggtggccgagtatgcccgcgtccagaagcgcaaagggacccatcgcagtccccaagagccacagcaggggaagactgaggtgaccccggccgctcaggtaacgtgggccagggtagggcgctgtgggtggggccggcagatcctcagcaggttggatggtgctgacccctcctcgggttggcttcctgtctccaggtggacgtcctgtactccagggtctgcaagcctaaaaggagggacccaggacccaccacagacccgctggaccccaagggccagggagcgattctggccctggcgggtgacctggcctaccagaccctcccgctcagggccctggatgtggacagcggccccctggaaaacgtgtatgagagcatccgggagctgggggaccctgctggcaggagcagcacgtgcggggctgggacgccccctgcttccagctgccccagcctagggaggggctggagacccctccctgcctccctgccctgaacactcaaggacctgtgctccttcctccagagtgaggcccgtcccccgccccgccccgcctcacagctgacagcgccagtcccaggtccccgggctgccagcccgtgaggtccgtgaggtcctggccgctctgacagccgcggcctccccgggctccagagaaggcccgcgtctaaataaagcgccagcgcaggatgaaagcggccagcctcgcagcctgctcttcttgaaagctgggcgggttggggcggggggcttctctggaaggcttggagctgtcccctctggccttgggggactggctgcccccggggcgcccgggcctagccgaggcggtgctcctgccggccagactctcggtcagtgcgggcacggggtcccagccactcctagggggcagcgcagccggcagggtggccgcccccgggtgggacttggaccctggactccacgggagggctccgccacccagcctggtgttacataaggggtggtggaggtgggcagtcgagcgttaaagagtaacctgctgccgggaagcccgccaagcaatcgcggccccttccccggctctggcagctctgcgagcgcgcccgtggggaacgggccctccccggcggggcgcgcgggcgcgcgaggtgggcggaggcctcggagctgtgccgggccgggcctccctccctaggccagcgcgggagcgacccggagggggcgggcccggggcggggcctcgaagcgctggccggcgggagcgcggccggccgggcccgcccgcctgcggtgtggacgccgcgcggccaatgcgcgcgccgggacgggacgggacggggcggggcggggcgggacgagacggggcggggcggggcgggccgggcagcctccgggcggcgcggcgcgggcggcggccggatccagggcgggggtcggcggcccggccagcccggcccggcccggggccgcgtcctgagagtcagccctcgccgctgcagcctcggcgcccggccggccggccatggagcgccccccgccccgcgccgccggccgggaccccagtgcgctgcgggccgaggcgccgtggctgcgcgcggagggtccggggccgcgcgccgcgc

SEQ ID NO: 27125 - DNA, 2300 bp, Homo sapien
gtgcgctggcctcgaggccacctattccaacgtggggctggcggcccttcccggggtcagcctggcggccagccctgtggtggccgagtatgcccgcgtccagaagcgcaaagggacccatcgcagtccccaagagccacagcaggggaagactgaggtgaccccggccgctcaggtaacgtgggccagggtagggcgctgtgggtggggccggcagatcctcagcaggttggatggtgctgacccctcctcgggttggcttcctgtctccaggtggacgtcctgtactccagggtctgcaagcctaaaaggagggacccaggacccaccacagacccgctggaccccaagggccagggagcgattctggccctggcgggtgacctggcctaccagaccctcccgctcagggccctggatgtggacagcggccccctggaaaacgtgtatgagagcatccgggagctgggggaccctgctggcaggagcagcacgtgcggggctgggacgccccctgcttccagctgccccagcctagggaggggctggagacccctccctgcctccctgccctgaacactcaaggacctgtgctccttcctccagagtgaggcccgtcccccgccccgccccgcctcacagctgacagcgccagtcccaggtccccgggctgccagcccgtgaggtccgtgaggtcctggccgctctgacagccgcggcctccccgggctccagagaaggcccgcgtctaaataaagcgccagcgcaggatgaaagcggccagcctcgcagcctgctcttcttgaaagctgggcgggttggggcggggggcttctctggaaggcttggagctgtcccctctggccttgggggactggctgcccccggggcgcccgggcctagccgaggcggtgctcctgccggccagactctcggtcagtgcgggcacggggtcccagccactcctagggggcagcgcagccggcagggtggccgcccccgggtgggacttggaccctggactccacgggagggctccgccacccagcctggtgttacataaggggtggtggaggtgggcagtcgagcgttaaagagtaacctgctgccgggaagcccgccaagcaatcgcggccccttccccggctctggcagctctgcgagcgcgcccgtggggaacgggccctccccggcggggcgcgcgggcgcgcgaggtgggcggaggcctcggagctgtgccgggccgggcctccctccctaggccagcgcgggagcgacccggagggggcgggcccggggcggggcctcgaagcgctggccggcgggagcgcggccggccgggcccgcccgcctgcggtgtggacgccgcgcggccaatgcgcgcgccgggacgggacgggacggggcggggcggggcgggacgagacggggcggggcggggcgggccgggcagcctccgggcggcgcggcgcgggcggcggccggatccagggcgggggtcggcggcccggccagcccggcccggcccggggccgcgtcctgagagtcagccctcgccgctgcagcctcggcgcccggccggccggccatggagcgccccccgccccgcgccgccggccgggaccccagtgcgctgcgggccgaggcgccgtggctgcgcgcggagggtccggggccgcgcgccgcgcccgtgacggtgcccacgccgccgcaggtaccgggcgccggtgggcgggggcgccgaccaagtttctctcgctgcaaagatggcgtcagtgctgcccaaacttcgggcccccgggggcggggcagcggggagggcggccgcgtcggtccgcgcgtgtccgtgggtcccgccggggctgcgccgggcggccggggagcccttcccgccgcgccgggctgggggcggggccgggggcggggccgcgccgtccacaccggccgcagccggttttcgaggcgggcgccgagcggatccgcggcggaggttgagggacccccctcccccggccaccgcctccgctgagtctgccccctccccatccgcagggctcttccgtgggcggcggcttcgcgggcttggagttcgcgcggccgcaggagtcggagccgcgggcctcggacctgggggccccccggacgtggacgggggcggcggcggggccccggactccgtcggcgcacatccccgtcccagcgcagaggtgagcgggaggcccggtgcctcgggactcggtgtgcgcaggggcggtgggtggggtgcggagacaccggccccgacggaggccaggtcaggg

SEQ ID NO: 27126 - DNA, 2300 bp, Homo sapien
ggggcttctctggaaggcttggagctgtcccctctggccttgggggactggctgcccccggggcgcccgggcctagccgaggcggtgctcctgccggccagactctcggtcagtgcgggcacggggtcccagccactcctagggggcagcgcagccggcagggtggccgcccccgggtgggacttggaccctggactccacgggagggctccgccacccagcctggtgttacataaggggtggtggaggtgggcagtcgagcgttaaagagtaacctgctgccgggaagcccgccaagcaatcgcggccccttccccggctctggcagctctgcgagcgcgcccgtggggaacgggccctccccggcggggcgcgcgggcgcgcgaggtgggcggaggcctcggagctgtgccgggccgggcctccctccctaggccagcgcgggagcgacccggagggggcgggcccggggcggggcctcgaagcgctggccggcgggagcgcggccggccgggcccgcccgcctgcggtgtggacgccgcgcggccaatgcgcgcgccgggacgggacgggacggggcggggcggggcgggacgagacggggcggggcggggcgggccgggcagcctccgggcggcgcggcgcgggcggcggccggatccagggcgggggtcggcggcccggccagcccggcccggcccggggccgcgtcctgagagtcagccctcgccgctgcagcctcggcgcccggccggccggccatggagcgccccccgccccgcgccgccggccgggaccccagtgcgctgcgggccgaggcgccgtggctgcgcgcggagggtccggggccgcgcgccgcgcccgtgacggtgcccacgccgccgcaggtaccgggcgccggtgggcgggggcgccgaccaagtttctctcgctgcaaagatggcgtcagtgctgcccaaacttcgggcccccgggggcggggcagcggggagggcggccgcgtcggtccgcgcgtgtccgtgggtcccgccggggctgcgccgggcggccggggagcccttcccgccgcgccgggctgggggcggggccgggggcggggccgcgccgtccacaccggccgcagccggttttcgaggcgggcgccgagcggatccgcggcggaggttgagggacccccctcccccggccaccgcctccgctgagtctgccccctccccatccgcagggctcttccgtgggcggcggcttcgcgggcttggagttcgcgcggccgcaggagtcggagccgcgggcctcggacctgggggccccccggacgtggacgggggcggcggcggggccccggactccgtcggcgcacatccccgtcccagcgcagaggtgagcgggaggcccggtgcctcgggactcggtgtgcgcaggggcggtgggtggggtgcggagacaccggccccgacggaggccaggtcagggccccaggtttgtaattaccagccacccccaagctcttcagccctggaggagctgagcagaaatgatcgatgactgggagtccctacacctccctccaccgcagttcctcggggctagagctcagaacccggagcgggtggctgtgcgtctctgtgcagaagaggctgcgcggtcggcatggggcgactgtccaggaatccctggggctcctgaccgccacctcccaacccctgccaggccggacacctcggtctggctgccagggcaggggcgggccctggcctggctcgctggggcctggggagctgcccgtgcttccagcccagtctccccctggctgctgccggctgctggccactcccacctcccaggcctggcgtgaggcccacagctgctgttgcacaaccctggttaatgtgtgatggggggaggcctgggcctggcccgcccctctgccagggcttcagacccctgcccagccccagtatctgaaggaaccacagtggagccaagcccgcgatgtggagaactcaggcttcaggagaccctggccctgctcctggcggctccgggtggctttcagctctctctgcaacctgagctgggggaggagccaggcctcatgcccagggctgggagtggggagcctggtgtgcacgcgtgcccaggcctgcacgtggaccgaccaggggaggggcccagagctctggctgggtcacccgcaccccgcccccatctcctccagagccaccccaggaaaagcccggctggacgaggtcatggctgccgctgcccttacaagcctgtccaccagccctctccttctg

SEQ ID NO: 27127 - DNA, 2300 bp, Homo sapien
gcggcggaggttgagggacccccctcccccggccaccgcctccgctgagtctgccccctccccatccgcagggctcttccgtgggcggcggcttcgcgggcttggagttcgcgcggccgcaggagtcggagccgcgggcctcggacctgggggccccccggacgtggacgggggcggcggcggggccccggactccgtcggcgcacatccccgtcccagcgcagaggtgagcgggaggcccggtgcctcgggactcggtgtgcgcaggggcggtgggtggggtgcggagacaccggccccgacggaggccaggtcagggccccaggtttgtaattaccagccacccccaagctcttcagccctggaggagctgagcagaaatgatcgatgactgggagtccctacacctccctccaccgcagttcctcggggctagagctcagaacccggagcgggtggctgtgcgtctctgtgcagaagaggctgcgcggtcggcatggggcgactgtccaggaatccctggggctcctgaccgccacctcccaacccctgccaggccggacacctcggtctggctgccagggcaggggcgggccctggcctggctcgctggggcctggggagctgcccgtgcttccagcccagtctccccctggctgctgccggctgctggccactcccacctcccaggcctggcgtgaggcccacagctgctgttgcacaaccctggttaatgtgtgatggggggaggcctgggcctggcccgcccctctgccagggcttcagacccctgcccagccccagtatctgaaggaaccacagtggagccaagcccgcgatgtggagaactcaggcttcaggagaccctggccctgctcctggcggctccgggtggctttcagctctctctgcaacctgagctgggggaggagccaggcctcatgcccagggctgggagtggggagcctggtgtgcacgcgtgcccaggcctgcacgtggaccgaccaggggaggggcccagagctctggctgggtcacccgcaccccgcccccatctcctccagagccaccccaggaaaagcccggctggacgaggtcatggctgccgctgcccttacaagcctgtccaccagccctctccttctgggggccccggttgcagccttcagcccaggtaagactcagatgtctgcatttaggggtgtgggtggggacagggctcagaacctacagccacccagcctctgtggggcaagcagagccctcaaacctgggactcctttctaaaatggactcccgcaccctcagtgccccctactgaggccaaagcggcaggacccaggccttctggcctccctgacctgctcacctccacgcggctggccacacacgtctgccaaccctttcctgtgccgggggggtttctccccaagccctggggccagctcctccaagacgctctgcccaccagtctcaccggacttggtgaacaggggcagctcaggattagggactccctggacccacccgaagttctaaggcggggggcccgtgtccccacagagcctggcctggagccctggaaggaggccctggtgcggcccccaggcagctacagcagcagcagcaacagtggagactggggatgggacctggccagtgaccagtcctctccgtccaccccgtcacccccactgccccccgaggcagcccactttctgtttggggagcccaccctgagaaaaaggaaggtgagcttgggggcggcccccagggaggggcgggtgtggcggctgagcctgaccctggcccctgttgctgcagagcccggcccaggtcatgttccagtgtctgtggaagagctgcgggaaggtgctgagcacggcgtcggcgatgcagagacacatccgcctggtgcacctggggtgcggcggggcctggggtgcggcggggcctgcgggttggctggggttgtgaggcccggccaggccaccccttcagctcccactggctggctgtgtctcccgcaggaggcaggcagagcctgagcagagtgatggtgaggaggacttctactacacagagctggatgttggtgtggacacgctgaccgacgggctgtccagcctgactccagtgtcccccacggcctccatgccgcctgccttcccccgcctggagctgccagagctgctggagcccccagccctgcctagtcccctgcggccgcctgccccgcccctgcccccgccccctgtcctgagcaccgttgctaacccccagtcctgtcacagtgaccg

SEQ ID NO: 27128 - DNA, 2300 bp, Homo sapien
tgacatttggacacagacgtgcacaccgggagaagccgtgttgagacagaggcagagctcgtgcgatgcctccacacagaacgccggctgggggaggggctggaacaggcaccagctcggccgacatcctgattctggacttgagaatacgtttctgttgtttgagcctcccaggcttgatagggcggccccagcagacgagaacaggcggaggactcacatccctgagtctaaggagagacaggagagactccgggacggggtgtacccaattcagaaatgattctgtgtgtcctgtgactctgtgaggcagggctgtcttctgatgagggggacccagagaccagtcgtgtctcagacgtccagggcgctggcagccgcagggcctgagctccctcctgccctgtcccagtgctgggcagggacccaggcctaagccaggaagcctccctcctccagaagacttcagctcgtttgagctcagagttttggaaattttcaggactaaggctatgaatgctttaattccttattctgtggttttttgtgtaagaagttttttttttttttttttttttttgagatggagtctcgccctgtcgcccaggctggagtgcactggcgcgatctcggctcactgcaggctccgcctcccgggttcacgccattctcctgcctcagcctcctgaatagctgggactacaggctcccgccaccatgcccagctgctttttttgtatttttagtagagacagggtttcaccatgttggccaggatggtctcgatctcctgaccttgtgctccaccctcctcggcctcccagattgctgggattacaggcatgagccaccgcgcccagcctggaagttttattctttttccttaagaatgtttcttcaagcgtgagggatggccacagtgtaggtcatttaaccgagttctcagtttgggtaagagttgctcagccacggctgggtgttctcatcgttcctgggatatgccagttgccgtatgtgggattctgttcagaaccccattagcctcgagcacggaaacacgtggcagacgtcccaccctggacgcactggtgccctccggtgtttgctgccctgcttcaggcggagacacaggcctcccgctgcacacctgtggatgggctctcgcgtgggtcgtcctcccactggccgcactctgtgccccatggccctcctgcgccccgcccggcgtcctctcacggcctctgtctgtgctgagcttgggtaactcttgttcttacctccacagagtctgtagaagaggcgacaccagggcttccaaatgaacaaccgaaaggaagatatggaaatcacgtcccactaccggcacctgctgcgggagctcaacgagcagaggcagcacggcgtcctgtgcgacgtctgcgtggtcgtggagggcaaggtcttcaaggcgcacaagaacgtcctgctgggcagcagccgctacttcaagacgctctactgccaggtgcagaagacgtcggagcaggccacggtcacgcacctggacatcgtcacggcccagggcttcaaggccatcatcgacttcatgtactcagcgcacctggcgctcaccagcaggaacgtcatcgaggtgatgtcagccgccagcttcctgcagatgacggacatcgtgcaagcctgccacgacttcatcaaggcggcgctggacatcagcatcaagtcggacgcctcagatgagcttgcggagttcgagatcggcgcctcgtccagcagcagcacggaagctctcatctcggccgtgatggctgggaggagcatctccccgtggctggcacggcgaacgagtcctgccaattcttccggagactcggccatcgccagctgtcacgacggagggagcagctacgggaaagaggatcaggagcccaaggccgatggccctgatgatgtttcttcacagcctctatggcctggagacgtgggctacgggcctctgcgcatcaaggaagagcaggtttcaccgtctcagtacggagggagcgagctgccttctgccaaggacggtgcagtacagaactctttctcagagcagagtgctggtgatgcctggcagcccacgggccgaaggaagaatcggaaaaacaaagagaccgtccggcacatcacacagcaggtggaagatgacagccgggccagctccccggtgccgtccttcctgccgacgtcggggtggccgttcagcagccgagactcaagtaagcctttcactcgttacgggggctcagctgccccagtgtgtc

SEQ ID NO: 27129 - DNA, 2300 bp, Homo sapien
ggaggccgaggcgggcagattgcttgaggccaggagttcgagaccagcctggccaacatggtgaaaccccgttcctactaaaaatgcaaaaattagccaggtatgctggcgtgcgcctgtagtccgagatactggggaggctgaggtgggagaatcactcgaactcgggaggtagaagttgcagtgagccaagatggcgccactgcactccagcctgggtgacagagcgagaccaaactgactcaagaagaaacagaaaatctgaatagacctataacaaataaagaatcagtagtcaaaaaacttccaatgaaagaaaagttcagaaactttcactacagttattgtactttttagcttccaaaaagaaaagtcaatttcaataaagaaattgaatcaatagtcaataaacttccaacaaaagaaaagtccatctctgtctctctctatatatgtatatgattgtatatatcacttcactgttgaattctatcaaacattttaagaattaacaccaatcctggccaggcgtggtggctcacgcctgtaatcccagcactttgggaggccgaggcaggtgcatcatgaggtcaggagatcgcgactatcctggctaacacggtgaaaccccgtctctactaaaaatacaaaaaattagccgggtgtggtggcgggcgctggtagtcccagctactcaggaggctgaggcaggagaatggcgtgaacctgggaggcggagcttgcagtgagccgagatggcgccactgcactccatcctggccgacagagcgagactccatctcaaaaaaaaaaaccaaaacaaaacaattagctgggcgtggtggtgggcgcctgtagtcccagctacatgggaggctgaggcaggagaatcgcttgaacgtgggaggtggaggttttagtgagccaaggtcgcaccgttgcactccagcctgggtgacagagccagattccatctcaaaaaaagagaaagattccatcatattccttgagagcatagtgttgcctttattttaagcaggtattacaaccttcttatttaggttctattttttttgaagttaccatttcaggtcagagttagccatagcagtatctcagatttaaaatgtacacaaatagttttcttgccttgttaagctgattagctttcttttctttcttttttttttttttttgagatggagtttcactgttgttgcctgggctggagtgcagtgatatgttctcggctcactgcaacctctgcctctcgggttcaagcaattttcctgcatcagcctcccgagtagctgggattacaggcacccgtcaccatgccaggctaatttttttttttaacttttagtagagacggggtttcactatgttggccaggttggtctcgaactcctgacctcaggtgatccgctcgtctcagcctcccaaaatgctgggattacaggcgtgagccacctttcccagccagctgattagctttctgagaaaattataatatttttaaaagttggggccgggcatggtggctcatgcgtgtaatcccagcactttgggaggcggaggcgggtagagcacctgaggtcaggagttcgagaccaacctggccaacatggtgaaaccctgtctgtactaaaaatacaaaaaaattatccgggtgtggtggcacacacctataatcccagctactggggaggccgaggcacgagaatcacttgaacccaggaggcggaggttgcagtgagccgaaggcttcagtgagccgagatcgtgccactgccctccagcctgggcgacagagcgagactccgtctcaaaaaaaaggaaaaaaaaaaaaaagctgatgcatggctttgtgtattagtttcctggggctgctgtgaaagtaccacctgctgggcagctcgcggcagcagaggtgtctcctctcagttccagagtccagcgctggaactcagggtgtctcagggccatgctccctctggagactccaggcagggtccttcctgcctcttccagctcctggtggctccaggcatcctttggcttgtgactttgtcactccagtttctgcctgtggtcacatgaccttctctcctccctgtgtctttttttttcctttagagatgggggtcttgctctgtcactccagctagagcacagtggtgcaatcggagctcactgactgcagcctgcaactcctgggctcaagtgattctgccgcctcagcctctcaacgtgctgcgattagaggtgtgtaccacactgcccggctgctgtttcat

SEQ ID NO: 27130 - DNA, 2300 bp, Homo sapien
ggtctcgaactcctgacctcaggtgctctacccgcctccgcctcccaaagtgctgggattacacgcatgagccaccatgcccggccccaacttttaaaaatattataattttctcagaaagctaatcagctggctgggaaaggtggctcacgcctgtaatcccagcattttgggaggctgagacgagcggatcacctgaggtcaggagttcgagaccaacctggccaacatagtgaaaccccgtctctactaaaagttaaaaaaaaaaattagcctggcatggtgacgggtgcctgtaatcccagctactcgggaggctgatgcaggaaaattgcttgaacccgagaggcagaggttgcagtgagccgagaacatatcactgcactccagcccaggcaacaacagtgaaactccatctcaaaaaaaaaaaaaaaagaaagaaaagaaagctaatcagcttaacaaggcaagaaaactatttgtgtacattttaaatctgagatactgctatggctaactctgacctgaaatggtaacttcaaaaaaaatagaacctaaataagaaggttgtaatacctgcttaaaataaaggcaacactatgctctcaaggaatatgatggaatctttctctttttttgagatggaatctggctctgtcacccaggctggagtgcaacggtgcgaccttggctcactaaaacctccacctcccacgttcaagcgattctcctgcctcagcctcccatgtagctgggactacaggcgcccaccaccacgcccagctaattgttttgttttggtttttttttttgagatggagtctcgctctgtcggccaggatggagtgcagtggcgccatctcggctcactgcaagctccgcctcccaggttcacgccattctcctgcctcagcctcctgagtagctgggactaccagcgcccgccaccacacccggctaattttttgtatttttagtagagacggggtttcaccgtgttagccaggatagtcgcgatctcctgacctcatgatgcacctgcctcggcctcccaaagtgctgggattacaggcgtgagccaccacgcctggccaggattggtgttaattcttaaaatgtttgatagaattcaacagtgaagtgatatatacaatcatatacatatatagagagagacagagatggacttttcttttgttggaagtttattgactattgattcaatttctttattgaaattgacttttctttttggaagctaaaaagtacaataactgtagtgaaagtttctgaacttttctttcattggaagttttttgactactgattctttatttgttataggtctattcagattttctgtttcttcttgagtcagtttggtctcgctctgtcacccaggctggagtgcagtggcgccatcttggctcactgcaacttctacctcccgagttcgagtgattctcccacctcagcctccccagtatctcggactacaggcgcacgccagcatacctggctaatttttgcatttttagtaggaacggggtttcaccatgttggccaggctggtctcgaactcctggcctcaagcaatctgcccgcctcggcctcccaaagtgttgggactacaggtgtgagccaccgcgcccggccttcagctactccattttttaacattttgccgcatttgtttacatcaagcaatatgatagaatccctaaccagttactttttgcttaaaagctgtactaggccaaaacaagcgaagcacccgtctgtgtgaggcagcgggtctggcttacaggcggcgcctcagggctcgctccccctccgagcgggtctcactcccagagcggggctcgcccggtgtctggcctccgaggccgtgtgcccaagtccccaccttgtgcggcacaggcccttcccacaggggacactcacggaagctgaacggaccttcccacaggagacactcacggaagctgaacggaccttcccacaggggacactcacggaagctgaacggaccttcccacaggggacactcacggaagctgaacggaccttcccacaggggacactcacggaagctgaacggaccgacggaggtggcgtggatgagcagcagccgcctgagcagtgaggaaaccccgcggacagcgcggtaaggaccccacccagattactggatttcaccaccggccgccttcgatggaggagtcctcagtctccacatccgcacggcacagacggagggggggcccatggggccccagcgatgaacctgtcaggggtcc

SEQ ID NO: 27131 - DNA, 2300 bp, Homo sapien
caatgtaagcattgtggctacacaccagagtaactgctcccctgccactgccctgcgcgggcgagtcccagccctcccgcctctacctggttctactgacggctcaggcaggagttcaaggtcacaaggatgcacccagccagaccttcaggtaggaagtgtcacagaaccaaaactgatccttcagcaaataagtagcatgaaacagagagaagaaacgcaacttcagggacatcaccacccacaagcagcacatggccctcatcccaactctgattcaagtaaagccacagtgaaaatgtgcaggccacagtcaagaacgctgagcccagcccagcatcgcgacgctgaggaagtgttgcggggtgcccggctgcgtgtgagccacacacaacgaagcaccgagggtaaaactgagatttgctttaaaacacttgagagaaaaaacagtgggaagggccgggcgcggtggctcacgcctgtaatcccagcactttgggagaccgaggcgggtggatcacaaggtcaggagatcaaaaccatcctggctaacatcgtgaaaccctgtctctattaaaaatacaaaaattagccgggcatggcagtgggcgcctgtagtcccaactactagggaggctgaggcaggagaatggcatgaacccgggaggcagagcttgcagtgagccgagatcacgccactgcactccagcctgggcaacaaagcaagactccgtctcaaaaaaaaaaaaaaaagaaaagaaaaaaagaaaggaaaaagaaaaaacagtgggagagagtgggagagatgagtaagacaagagcagagcactgggggttcccgcagccaggcgacgtggacgttctctctaattttgtgtatgtttgaaaagttccaaaataagtttttaaaaatataattaggttttaaaataataatataacttttacaaaactgggaaaatatacaatccagcggtgcaaatgcggtgagagagaatctcatctggaaacccacaggcagccccacccctcaacaggaggcccaagacctgcctctgcagggggagagaaccccaagacctgcctcctcccacccccaggcaagggtcctcatttggggttgacctcccagaggagtgcagcaagcctgggcctcaggagtctgactgtgggtgacaagccacagacacagccatgtccacatcgcaccatggccaccgcaggcaacttagaatgctcgatactcaccctacttcggaattaggaatatcagatgcaccattcacaatgctatgtgctaaattaaagttccacatgttactacctcacaaatcaaactttcctgaattttagcaatgatatttcagtagttgctacccttcattttccagggatcttactggatgcactaaaaatgctattgtgagctgatcatggtctcacatgcctggggtcccagctactcaggaagctgaggcacaaggatcgcttgagcccaggacgtcgaggctgcagtgagctgagattgcgccactacactccagcctggatgacagagcaagaccctgtctcaaaataaacaaacaaaacatgctattctgaaaaggggccacagctcaccagctgctgagaagacacaaaaggccgagagcccaagtctgagctgaaggcacaggtgcagtgggcccaggtgcagtgggcgcaggtgcagtgggcacgagtgcaagtgcagtgagtgcaatgggtgcaggtgcagtgggtgcaggtgggcaccggtgcagtgagtgcaggtgcagtgggcaaaggtgcagtgggtgcagatgggcacaggtgcaggtgggcataggtgcagtaggtgcaggtgcagtgggtacaggtgggcacaggtgcagtgagtgcaggtgcagtgggcaaaggtgcagtgggtgcaggtgggcacaggtgcaggtgagcacaggtgcagtgggtacaggtgggcataggtgcagtgagtgcaggtgggcacaggtgcagtgagtgcaggtgcaggtgggcacaggtccagtgggtgcaggtgcagtgggtgcagatgggcacaggtgcaggtgagcacaggtgcagtgggtgcaggtgggcacaggtgcagaaggtgcaggtgcagtgggtacaggtgggcataggtgcagtgagtgcaggtgggcataggtgcagtgagtgcaggtgcaggtgggcgcaggtcgagtgggtgcaggtgcagtaggtgcaggtgagcacaggtgcagtgggtacaggtgggcacaagtgcagaaggtgcaggtgca

SEQ ID NO: 27132 - DNA, 2300 bp, Homo sapien
gctgggattacaggcgtgagacaccgcgcccggccctcagcaagtttctaccaagacaggcagccctaacctggcaggtggggttggcctgggtcgtggtgagatcaaggtttggttcttatgggcaggcctcctaagcgatgactgagtgccactgtgtgttccgccaggcagctgctgctgctctccatccctgcatggacaacggacatggcaaaccatcaacactgctctccttggaggctgtctagggaggtccagacatcttgggagagactggggttctcttttgcgcaagagagcatgggcaggctctgcgggaggcccttggggcaggcatcagggctctggtcctccttgctttggctcggtgggcccgagctctcctgtctccccaggcctcctttcctccgtggggtacaactgggctctgggtgggcaggtgggggctcctgcaggcagtgctgttttctccaagggggatgcacgtgacccgccagaccctcctggaagccgcctcttctcagggtggttgtgctcagcccccacttcccgaaggtcggtgaggctggggctacagtttcagaccagagcaggcagtgccaccgagagggtgccgcgcgaggtaggccggcgacggggcttcctgggccgcagtgccatcccggcgaccttggcgaggggatgggaacggggtgtccgcacagccatttccaggcgcccgcgacggcagtaagggagtgtcccaggcgttggtcccggcagccacacctcgcttcgcctttgctcactcatggagagccctcagccgcctcccactgccgctcctgaatgcgcctcacacatccagatttgaaagcacccatagggccgccgcctcccacctcccgaggaatccgctgcgctgggcccgcagggaggcaggctggacggcccgggcgcctccccattggttggccgggccgggctcgactccctcgcgcggctgccggccacaggctcacctcccttcccgccgcgcccggggagaggaagcgaggtggcctttacccctgcgcaggccggccaggaatgcggggccgcgcttcccactctacccgcccgagggctgaggacggcggaggcgagaagcgacgcgcagagtccgggcgccgagtggtggagacgcgtcccaggccgttcggatcggggctgcacacgggctggggcgaggcccgggccgctggttcccgccccctcccggagccattcgtcccccgcagacaacacgacgggagggacccacgcgcggccgccggtgcccctagtcagccaaaagcgagccccactggcgggcacccccacgaggcctgcgcccgaggtgcgccgatctccgggtgcgccgaggcccccgagggtaggcgcgcgcggtgcccaggcccttccagaccccgcaccccgggcggccttccttgggggcgccttttccgcaccgcgagcggcccgcgttgatgcccggccgggctgggggagtcgccaagtttgcgagacgcgcgcagtgcaaccgcgcgtcaggcgcggggacggccggtgacctgggcacccgcgcgcccccgaggaacctgcgcgtgggcagcgcccggtgcgcggcccgggaagggagcgggtgccctcgccggggtcgccgctcccgtggggtgtttccaggctgctccgcgctcgcggggcaagggcgcagcgggggccagggggacccccgcgccgcgccgccccagccccccgccagcccaggggagggggcttcccacaatgcccagcgagctccagcccgcacttccgctgtccggctgcccgcgggggggagaacggacccccggcgcggccccctgcgaccccgcggcgcggcgccgggagccgagcgaggggcggggccggcggccgggccggcgtgggcggggcccggggcggtggccgcggccggggcgcggcgcgggccaatcagcggcggccgggcgcgcgccggggggcggggtcagggtccgcgggcggggcgcgcgcgcgcgggcggcgggggccgcggggttggagcgggcgcgggggcgcgcgccggcctgacggaccgacggacggacggacggaccgagcagccccggcgagcgcgcagctcggacccgcccggacgcagcgccctcccggcggcggcggcgatcaccggcgccggcccggcggccgcggcgcccgccctcgcccgcgccccatggggtcacaggtaagcggcgccggctcattgtccgcgcggccgggcgggcgcatcgcggcgg

SEQ ID NO: 27133 - DNA, 2300 bp, Homo sapien
agactgcccccaggaggacgaggctcctccaagcaggatctgctcaggggaatcaaaataaggtttagtgcgtccaacatcctgcgtggacagtcctccaggactcctgccgctgccaggatctgaactgaggtggcagggacacctcctgtcagaacttcggctctgctgctgggttcactcctgtggtctcacacaaaatgggccggtagcctttgggcccacagccccaacctgcctagagtaggcagccgctgagtttatgaaagaggctcctgggaaaggaatcatctcccaccctctgcagaagtttccatccccacccctatccaccaggctcctttccccacagggtcaggggtggacacttgagcaggaccagaaccaccaatccccaggggaagccttgcccatcccttggctgcaggggcagtaccctgtgtgtttcctcctggggcagggctcctgttgctgcccaggacccagtggaaaggatggtgtgacaggtgcaccagtggaccctgagacaccctctttgtcctcaggctttgaccaatgagcacagtagccaatcggagatcaaagctggataaccaggaaaatctggatctcaactgtgtgtgtgcctgggggtaggactgccagatttagcaaaacaaaaacaaatttaaaaacagggtatatctagaccgggtgcggtggctcctgcctgtaatcccagcactttgggaggccaaagcgggtgatccacctgaggtcaggagttagaggccagcctgaccaacgtggtgaaaccccatctctactaaaagtacaaaaagttagccgggcatggtggcgggcacctgtaatcccagctacttgggaggctgaggcaggagaattgcttgaacacccaggaggcagaggttgcagtgagctgagattgcaccattgcactccagcctgggcgacaagagtgagactccgtctcaaaaacaaacaaacaaacaaacagaaaaaacaggatatccagttaaatttgaatttcagataaacaattttaaaataatgtctcaagcagaagttggaacatacttatacccaaaaagtatttgtttatttgtaattccaatttaactggcatattattctgtattttatctggcaacctagaatgggggtaatagccccccaaatcgctccctttgttaattggtccctgtcttctgtcccccaacccctaaaggcagcagctgactcccccaactaggggcggggcctgttagggtcaggcagtgcctctaacccagacgctgagcaggagagcagagagggggtgcttcagcctgaaactaccccttccccagaaggctggggtcccaggcgggcctggcacctgggctcagaggctctggctggatttgccaaactccctgattgtagcatgtttgtttctggtctggggagctgttgagtacctggagctgccctcttccctggggctcctcctggcaggcggcttccgaccctgccctcaggtgggctggccctttccagggcaggagaaaagatacctctccagaaaagagggaggcgcagcctgggagtgggggctcgacccaggagcgagaaagaggaaccccagccaggcaggacccgccccagaaggtcactgctgttgctggcagccagtgaaaagaggatccagaaaaggagagggcttgtttctggtcagcaccgaagaaggaaggtgtggagaggaggggccgggccgagagcaaataccgcctttttggtgcagcagcagccctgtctctgaccccggccgtcctggggagatgaggtttaaaccagcagaccctgaagggaaacttgcaggacccacagcaagcctggtacaggcggaggaggccttgctgtccctttttggcccgtggggctgtccatcttaaatttaaggaagagggaggcggggtgcagggactcacacctgtaatcccaacactgtgggaggtggaggcggggtgcagggactcacacctgtaatcccaacactgtgggaggtggaggcgggaggatcgcttgagcccaggggttcaagaccagcctaggcagcatagtgagaccccatctcaatttaataaataaataaggaagaaagagggagacagtagctgctcaaatcatgggtgggaaagctgggcctgggagcgtttagctggtggggtcttggcgaaggcgggggacgggcagaaccttgggttcatcatctctgggaaccctttgtgcacccatcacctagcaacaggatgcagcct

SEQ ID NO: 27134 - DNA, 2300 bp, Homo sapien
cttcacaggggcgttctgaccgtcctcccattcttcctagctctgtcccctcctttctctcttcctcctacaaatacttttggctgcccccacccagctcctaagggaatgaaaggttaacctgacccggtttatggcaatactgtgtgatgggtgccttgatcaccacaaaaggatgatgggaacggggctgtggggtcccagggaggagcccttcacctggcctgggttacaggatggctcctgggaagacaatgccagctgtgcgctgaaagtctgtgcaagctgctcccgtgaaaaggaggacattggcatggcagggctgtgggcaggtcttagtggctggacattcccaggagttagcactggctatcattctgtagggctccctcccacctccaaactcctggcttctacaccagggcattcacagacagattgcagactcacatggtggcatgtgaggctacagatacacttgcacaggccagaggatactactgcgtgtcccctggagccaggcctgggctggactttgttcctggcttagggatgcaacacagaatgggacaaggcctctgctcacaatggtctgtaatgtcacatctctgtggtctgccctgaactgcctgaagcagggactattgtccctacatgtccctagtccccgggctggcctggttgggttgagcaagaatctctggaaagaatgaaaggcagcaaatggagaaaacattactgagagcacgagagcaggctaaggccgtggtggtaagggactcgggcctgtgcaagagtaccaggaagacacctgtgggaggaggtggccgggtgaaggaaggggcagtgggaggagcttccatgcctagggaccagtaccaccccaggctggaagcccagagtggagtcctaggacatcagatcctaaagggcttgaataccgtttaaggcttttcttccgggagcaagtaggagccaaagaagggaagttgcgggacttgttttcgtggggccagttgcctggtggttacgcgcctctcctctgaagtcaggcatcctgttccagagtatcctggttgcgcttcaacttgcggagtgacctggggcaagtgactttaacctcagcttcctcatctgtggagtggggagggcgcagcgctggtcgccctgaacaggaagtgagacaacctcggggtgcacacgcgcaggcccgagccgcagggtccacgcccgaggcgaggcggcagcggcgcctgcagggcgaggggacgaatcgcgatctttttcagagtaacccgcgtacaataaaaagtccccatgaaaaggacaaactagccaggcgtgaggggcggtggctcacgcctgtaatcccagcactttaggaggccgaggcgggtggatcacctaaggtcaggagttctagaccagcctggccaaggtggcgaaacccccgtctctactacaaatacgaaaattagccggacgtgttggcgcgcgcctgtaattccagctactcgggaggctgaggctggagaatcgcttgaacccggagggcagagattggagtgagctgagatcgcgccatggcactccagcctgggcaacaagagtgaaactccgtctcaaaaacaaacaaaaaaggaccaactaaaaaaagaatataaatacaataaataacaggacttacgggggcaggctgacccctaaagtaaggggtcgggctggaaaggatctcaaggggtcagagtttgagccgccgaggcgcgcgagccccagcactcctaggcagctgcatccgccccggaagatcccctggggccctgcgctggctttccacagcgccatgttggacggtcctcccacttcccaccttcccagtcctcccgctactctgaccgttctacctgtgattctcgctggtggagtcaacctggaatggattcccgccgaaccacgcctccctttcctggttcgcccgcagtttcggcctatcaggttgagtcgggtaaaccaggacgggccaagcggcactctcattggatatcactggtgggggcgggaagaaggcggagcacgtgcccgggcggaagtagccgtcgcatcgcggattacgaaacgccgcggagctgaggcagttccgctggctagtgtgtacgcggcgagcttctcccggcgccgcccgctcggctcccatagcgcccgcgacagcggtccggacgccgcccgaacatggactccgccggccaaggtacctgccgggcccggccccttcgccgcagatgggcccaggctgcccgttg

SEQ ID NO: 27135 - DNA, 2300 bp, Homo sapien
cagtggctcacgcctgtaatcccagcactttgggaggctgaggcgggcggatcacaaggtcaagagatcgagaccatcctgggcaacatggtgaaaccctgcctctactaaaaatacaaaaattagctgggcctggtggcgcgtgcctgtagtcccagctactcaggaggctgaggcagcagaatcgcttgaacccgggaggtcgaggttgcaatgagctgagatcgcgccactgcactccagcctggcgtcagagcaagactccgtctcaaaaaaataaagaaagaaagaaagaaagaaagaaatttagcatccctctctagagccccaaaatgcaaggcagacttttatcatcttctcaagattttaatctcctgggctcgctccacgcccctcagtggccatctcatactgctctggggagactgttctggaaacaggcctggtatgctgggtgtgcccctgactcactccaccccctctccatgaggcaacccctaagcaggctgagctccgagcagagttgctgcccaaggggagctctgctgaacgcgaagaccccttctctgctcgggagccgccctcaacacctcggactgggtccagggccagacagcgtgaacccgagggccccgcgcagggaccggggggtggcagagcaagcaagagcagggcacggggtgggcggcataagcgagacctgctgggagcgacagaacccaaactacgggagcaacggcgggcgccagggaaccacacctcggaacggtcccaggggagaccaggagggcggctggagagagcccaggaagcggtctgggccgcgggcaaaaaacacaccacgaccatcataagcttcgaggtcagtggccccgggagctgaagaggggccgcggggtgggtgaaccgagaccgagaggacagagagtcgcagacgcgaccccgggagacggagaacaacgggcagcctgggcccatctgcggcgaaggggccgggcccggcaggtaccttggccggcggagtccatgttcgggcggcgtccggaccgctgtcgcgggcgctatgggagccgagcgggcggcgccgggagaagctcgccgcgtacacactagccagcggaactgcctcagctccgcggcgtttcgtaatccgcgatgcgacggctacttccgcccgggcacgtgctccgccttcttcccgcccccaccagtgatatccaatgagagtgccgcttggcccgtcctggtttacccgactcaacctgataggccgaaactgcgggcgaaccaggaaagggaggcgtggttcggcgggaatccattccaggttgactccaccagcgagaatcacaggtagaacggtcagagtagcgggaggactgggaaggtgggaagtgggaggaccgtccaacatggcgctgtggaaagccagcgcagggccccaggggatcttccggggcggatgcagctgcctaggagtgctggggctcgcgcgcctcggcggctcaaactctgaccccttgagatcctttccagcccgaccccttactttaggggtcagcctgcccccgtaagtcctgttatttattgtatttatattctttttttagttggtccttttttgtttgtttttgagacggagtttcactcttgttgcccaggctggagtgccatggcgcgatctcagctcactccaatctctgccctccgggttcaagcgattctccagcctcagcctcccgagtagctggaattacaggcgcgcgccaacacgtccggctaattttcgtatttgtagtagagacgggggtttcgccaccttggccaggctggtctagaactcctgaccttaggtgatccacccgcctcggcctcctaaagtgctgggattacaggcgtgagccaccgcccctcacgcctggctagtttgtccttttcatggggactttttattgtacgcgggttactctgaaaaagatcgcgattcgtcccctcgccctgcaggcgccgctgccgcctcgcctcgggcgtggaccctgcggctcgggcctgcgcgtgtgcaccccgaggttgtctcacttcctgttcagggcgaccagcgctgcgccctccccactccacagatgaggaagctgaggttaaagtcacttgccccaggtcactccgcaagttgaagcgcaaccaggatactctggaacaggatgcctgacttcagaggagaggcgcgtaaccaccaggcaactggccccacgaaaacaagtcccgcaacttcccttctttggctcctacttgctcccgga

SEQ ID NO: 27136 - DNA, 2300 bp, Homo sapien
gtacatggggccagctgggggagcggggcctcaggctgacctgggacgagccagctcgctccagttggctggccgtgttcacggtgcccgtggagggtcctgtttgctggtgtgtcttgccctgcttgctcctccatttatgtttgtagtggtggtgggaactctgacgtctggagcccctggtgtatccccatcatctccccaagcagtcacaggtggtttctgaggtctgggcccattcacctcgagttagagactgaggttgagagctcactacttcctgaaagtgaaaattgggttctgggaggtttatgtcatgagtttagggctggatgaaccccggcggacccctgctaactcttgggcggaagcccctctggacagctgcccaacgcccgtgtccatgatgggcctgtcccagggcagccccggtctgtgaggcctttggtgtgccctggggcatgggtgatggggatgggaggaagggaactggattcaggtcagagtgggggtttacagcagggtcaggtcaccgtctgactccgtggtctcagatgaggcatcggccctctcaggacctcgggcgagttgagtgtttctcagttcttcagtggctccctccatgtcagagtgggcctggctgcagtgagtggcagcagctgcccttggacacacaggtttccaggttggcgtctgtgggcacggatggagcgcagagcagaaatgctcggcgccaagggtgtcccacatcctcccacggtgcgtgtgctccctcagctgacgtgatttggggaacacgggccgctctcgttctgtggagctggccaagcccagctgtcatgctgtggcacatttcacacctttgcgctgctggatggggctggttgtgctccaggtgctgtggcttctccaaacaggtgtgccttggggcataaggcgtggacagggcgtggacccaggggcctcttgggcacagccgtgaggctgagcagttgctagtcatgatcttgcgagagcctcctgttgagtcaggacttgaggagactggagacagtgctgctgtccccggtggtgtgcggactggaggagccgtcctggagggtcttcccctgctgggcctgactgagcacgagcagggggcctcccctggggctccccgaggagggctgtgagtgggtgctggcctcccttgcttacacttcgtttcctcttctctcctgctgccaccttccagggctcatccattttcacactcctttaggtaaggctgagcctggacacacctgtggaagacttttctctgaattggggcagggtggactccggcagggcccttgggcggctgtgctagtagagggcagtgaaagtgggatcaccccttccaggacagcagtgccagccaggtggttgctgcatctcagggaacaaagcagcagcgtgggatcgacgcagaggccccccggaaccccccggcccttctgtgtcccctcctcgtgcttcccttcaggctcacagaccgcctgctgccgggtctgtgaataactggcctggcgtccaggcctgagtttactcctgaaaaggagcttttttttttttttagacggagtcttgctctgtcgcccaggttggagtgccgtggcgcgatctcggctcactgcaagctccgcctcccgggttcacgccattctcctgcctcagcctctccgagtagctgggactacaggcgcccgccgccacgcccggctaattttttgtatttttagtagagacggggtttcaccgtggtctcgatctcccgacctcgtgatccgcccgcctcggcctcccaaagtgctgggattacaagcgtgagccaccgcgcccggccttttttttcttttttttgttggagtctcgctctatcaccaggctggagcacagtggtgtgatctcggctcactgcaacctccagctccctggttcaagcggttctcctgcctcaggctcctgagtagctgggattacaggcatgagccaccacgcctggctaatttttgtatttttagtagagacggggtttcaccatgttggccagcatggtctcgatctcctgacctcgtgatccacccgccttggcctcccaaagtgctgggattacaggcgtgagccactgcgccgggccctcaaaggagccttttcacgtgggagggctgtgccgactctcaccaccttcctgttcaacatctgtcctgtttccttgttttccttcagatggagttttgtcttgtttactacccgagagcccataggtgtgcctccca

SEQ ID NO: 27137 - DNA, 2300 bp, Homo sapien
ctgcaacctccacctcctgggctcaagcgatgctcctgcctcagcctcgcgagcagatgggatttacaggggcatgccaccacgcccagctaatttttgtatttttagtagagacagggttttgccatgttggccaggctggtcttgaacgcctgacctcaggtgatccgcccaccccggcctcccaaagtgctgggattacaggtgtgagccactgtgcccgggcgtaccttcctgtcttattttctccaagcaggctggaatgttcatggatagatatatgtgtgataatatactttttacatatcatgcatcgtgctcattttagtttcaggagttctttgctcctgtgtagcctttctacacattatctttctttttttcttctttttaaataagagatggggtcttgctctgtcacccaggcaggaatgcagtggcacaatcatggctcactacagccttgacttcccacccgatccagcctcctgagtagctgggactacaggggcatgcatgccactgtggccgggccaattaaaaaaatttttttttatagagatggtggtctcactatgttgtccaggcaggtctcaaactcctgggctccagtgatcttcctgccttggtctaccaaagtgctgagattccaggcgtgagccatgggtcccgttgtatacatttcagtaactatattattccatttgagtgctcacttgtgcagttgggcaggtttccattctcgctattaaaaatagtgccttcatgaatatttcagtgcatatacctttttctgtatttaggaatattttctttggaagaatgtccctaaagtggaactgctaggtctcagagggactcacttaaggctggttcattcattcttgcagctcccagcacaagtggaatatagcttcaatctgagatcggtaccaggcccatttcattctctcatccctccaattctggcctgaaatatttcattctcttggaatctatagttgtagatatgaacctggcctttctgcttcttgggttccataggccttttcttgctgcctgcttgatgttgcgcagcttaatgactgctaggaggcttcccaagctctgacacttccaggctgtgagactggaacaagcttggcaattcaagaccggcattatggcagtgagttatgagggcagaggaaggaggccagagcgtgttgagagagaatttgggtttcacgcagtgtgtcacgggaagccttggatgctactgggtttgttttaaaaagatgaccgcactgaactcaggtaaacgggcaagggtggaagcgaggaggcaggagcaccggccgcagaggtctgggagcttctaggatgggaagtggcccaggcagcctacgcggggcaggccgtcagtgagtggcggagcgcctgcagttacagggacagggaagggtggccgacgggatgggcaagggcagagggaggtggagtggacgttcgtggtcctgcctctccacgctgctgtttggagatgattccgggagggtgggagggcgctggcgacggcatttcagtggttggacaggaaggaaggaaggacgtcccatctcggcgctccagggttgagcaaatgtcagtcccaggacggtggctccgggtgggggcgggggcgacggtccgcagccgtctcccaccagctccctgttcagttctttgatgagaacgattacgttttctcagtcttacttaaagcgctgagtaaactcacctgcaagaccagcaagccctgcgcttctctttctgcgcggttccccgcagcacatggcgtgtccacccgggacccacctgcggccacctgaagactgggaggactggctccgcccccgcgcttcgtccccgcccactcatgggcggagcctccacagggcgcctcggccccgggctgtcactcgggactccgccccttcatggacggagcctccgctcggctctctgagcgcatgcgcagccggtcccacccgcggctccgacacgccggagcccacgtccttccgggagcgcgcgcgccggtgcgggtgcgtgcgtgagcgtgctcgtctccgctgccgctgccgctgccgctgccggtgccgcacccgcgccctctgccgccgccgccgccgccgcccggggtctccaggctgaggagtgcgtcggccgctgcccagcagcgccgcgaatcggggagcggagccgcggagccggcgggagggcgggcgggcgggcggacgggcaggtgagctcgctgcgggtcgggcgggcggatcggc

SEQ ID NO: 27138 - DNA, 2300 bp, Homo sapien
gcgattctcttgcctcagcctctcgagtaactgggactgcaggtgcaatacaaaaaatgcagaacttttgtattttctgtagagatggggtttcgctgtgttgtccaggctggtctcaaactcctgagctcaagtgacatgcccaccttggcctctcaaagttctgggattataggcatgagccactgcatccagccttattattattatttttttttgagatggagtcttgctctgtcgcccaggctggagtgcagtggcgcgatctcggctcactgcaacctctgcctcccggattcaagcgattttcctgcctcagcctcctgagtagctgggactacaggcatgcgccatcacaccgaggtaatttttgtattttttggcagagacagggtttcaccatgttgaccaggctggtcttgaactcctgacctcaagccatctgcccaccttggcctcccaaagttctgggattattttttaagcagttttgataggtgtgtacctagtagtgctctgtggtttaatttgcatttcccagggagtgggggcactgcctgtcttctcacgcctcagttgcttgttgctgtgacggtcgcccactcctcctgccagtgtctgtgctgctcacggtagctgcatcagcttcacgctgtccgcccttcgccacccaccgcgcctgctgctcaggaatgttccaagcaacttggtggtaacagaagctgagaacagcccagatgtccttcggtgcaagagtggatggatcagttgtggtctattcacagaatagaatgtgaccacactggagatgaatgaattgtagctacaatctgcagtgtagacgaatcttaggaacgtaggcgtttcagaagcagatcaagccaggcacgatgctgtgtgcctatagtcccagctactcagagcctgaaggtgggagatcacttcagcctgggagtttgaggccagcctgggcaacatagcaagaccctgtctcaaaggaaaaaaaaagcagattacagaaaagtaaatccagtgctaggccgtatttttaagctcaaaaaattaaaactaattagcgtttagggataaacatgaggtaattttttagaagcaagagaatagcattgaatttaaggtatatatggggaaaatgaaacttccaagttattgataattttccagtttttaaattagagacgggatcatggtgtttatgcgtcataatttatatgttccatatattttttgttgtttttttgagacggagtctcgctctgtcacccatgctggagtgcagtggcgcgatctcggctcacggcaagctctacctcccaggtttacaccattctccgcctcagcctcccgagtagctgggactacaggcgcccaccaccatgcctggctaatgtttttgtatttttgtagagacggggtttcactgtgttagccaggatggtctcgatctcctgaccttgtgacccgcccgccttggcctcccaaagtgctgggattacaggcgtgagccaccacgcccggctgatatgttccatatatttctttctgtatttcacataatacatagtaaaatatttaaaacagaacaaaaatagacttccttttaagatgttttcatatctgttcttacaaagttggccacagtttttccccaacagtagtttgagttcagcagcagctcttttataaaacgtttgctgcacacactgagattgcacctggaagtacagaaataagaacacacgtattttattttatttttttacccctgaagatctttaagtcttctgaggagcatggacctgctagactgcaagctgctgcattctgaggagcagggacctgctaaactgcaagctgccgcaggcggagatttttgcctgtttggtttattttgttaccactgagtccccagctctgagaacagagcgaggcatgtgatcgatgcatcgtaactgttgagcaaatgaatgctgagctgtgatggcaccgacgtgtccggggagaggacgcacccggctgtgtggacatgtgcccagggcccaggacagcgccacggaagaggacacacccggctgtgtggacatgtgcccagggcccgggacagcgccacggaagaggacgcacccggctgtgtgcacatgtgcccagggcccgggacagcgccacggaagaggacgcacccggctgtgtgcacatgtgcccagggcccgggacagcgccacggaagaggacgcacccggctgtgtgcacatgtgcccagggcccgggacagcgccacggaa

SEQ ID NO: 27139 - DNA, 2300 bp, Homo sapien
tgtatttgccaggcgctgtggctcacacctataaccccagcactgtgggaggctgaggcaggcggatcacctgaggtcgggagttcagcctgaggtcgggaattcaagaccagcctggccaacatggagaaaccccatctctactaaaaataccaaaattagctgggtgtggtggcacatgcctgtaatcccagctactcctgtgtgaggctgaggcaggagcattgcttgaaccggggaggcggaggttgtggtgagccgagatcgtgccattgcactccagcctgggcaacaagagcaaaactgtccccccccccaaaaaagaaagaaagaaactgtgtgttctctagatgttgggtgttctgtgaagatcaggtcatggtggttgatagtgttgttcagaacatcgatgtttttcctgatttttggtctgttctgtcgatttctgagaaagtattaaaattaaagttgggtcttgcatttttatccattctgtcagtcccttactttaattggagttttttgtccactaacattgaatttaattgttgatatgtttggatttagatcttccaactaattttctatttgtttcctgtgttgagttactttttcatttttcttgtaactttttagcttatacctctttgcattttttatgcagaggttgctgtaaggattacaatatgcatgtttattttaattaattaatttattttgtttatttatatatttgtttttaaggaacagggtccctgtctcctgggctccagtgcagtggagtgatcatagctcactgcagcctcaaactcctgggctcaagcggtcctcccgcctcagcctcccaaaatgctgggactacaggtgtgagcccctgtgccggcccacagtacacagctgcagttcttcaggatctcttggggtggccgtattctgccgtctcacacttctccatgccatggcgtctgtctgtgcacgtggcaaactccacaaggcagtgttggattcttttgctttgaacggtcttatggaataaagtccatcagctctgcccttggtactttcatctatactttgtgatactttctttttattttttcttctagaatagcctaacatggcagaccagagacagcgctcactgtctacctctggggagtcattgtaccacgtccttgggttggacaagaacgcaacctcagatgacattaaaaagtcctatcggtaagtggacaagtgtggcccccacatccccccaggaagacacacatgccccgtgtggtttagtctgcattttaccaagaaccattgcacatactttatcctggccgactcagcgttgaactggtcacagctcggtaacacctttgtatgtgtaatgtgctccttatagcttaaagttatggtattcatgttctcttgccaacaaaaaatagcacttagtagaaactgacacactgtccacagttccatagggagtcagggtctgaacctgtttgaggcctcacaggagccgcagagcgctggcatggtcctgtggtctccttgttttagcacagtgatgacagagacccctcactctgttgtggccttctgattgagcttgaagaactgcactcttgggtacagtttcattgagtaacctgtaagagacaccatcactaatccagacaattcagatagtcctcctctcgtgtgctagcatcgtgtagttcataaaacacttcttaaagtgccatcattacgccccgccgtgcttaccgttcacttggcacttgtgcagttagcggctgggacaccagggctggccttggtgccgctgaacttagatgtgccgtggcactcacagcccttggggctccctcctctgaggctgggtcagggtgaggaggtttacctgaaacaaccgcggagcttgcttttgtccctggcccctgcagccctggagagtcggacagtgaggtggcctgggtggacctgccttccactgcacccggcagtgcgtgcgggtgggatggacgcggcggcgggtgcgggtggaacaaagtccagggtagagccaggacatggttttggtttgcaggaagcttgccttgaaatatcaccccgacaagaaccccgacaacccggaggccgcggacaagtttaaggagatcaacaacgcgcacgccatcctcacggacgccacaaaaaggaacatctacgacaagtacggctcgctgggtctctacgtggccgagcagtttggggaagagaacgtgaacacctacttcgtgctgtccagctggtgggccaaggtg

SEQ ID NO: 27140 - DNA, 2300 bp, Homo sapien
ctgagggctcggccccactgaccctggacgatgagaattttgatgtttgcccgtgtgcgtgtgtctcctgggtgtagtggatgccagtcttgttgctgtgacaagtaacaaccttttttttaaattgttttttatacaaacactcgcaatccgacatttggtgctaagggtttcctggtgcagacggtgggcctgggggctgggctggaccagggcgtgggtctctggggttggggtcccttgctgctcagggaggcagtactgactgggcactgcctctgcccccagcacccaccctcccccattccccagggagaaggggccccactgggcttggcctgcagtagtagggagacaagttccaggagcactttggggactggggttgcagaacacttcctgtctctggcttcatccttgggccagaaggctccaaccctcagcagcccttgccagatgtgccagggagtgggtgtggagacccggactccccccacccacgcacacctcggcctgatgagaggatggaggctggggcagagatgggcgtgacccagcgtcagagggtcgggggaggcattccttcctgtgtcccagagcttcactggtggagctggaggagccggaggtggagggtggggtctggcagctgctgctggggcagcctcatgaggggaggggaggggaggggaggggagcaggcactgggcgggggcctaggtgcactttgtccttgccaccaatggcgggaggagggtggacctgaacacctgcagggtgtggtgcctgccccagcctctcaggtacttggcccttggggagaagagaagagggtctggtttttgctgggggtgagtttccgggacactcccaaagcccacagataatccctggtgtgggaagaggagtcctggataccttgatgtttagcactttaaccccctttgtctttaaggtaggcgtgggggctactgccagaagtggctgttgggtctgaccccctcctttctgccctccctctgccacatgctggtccgcagagccctcctcccaaggggtggggccctgggtggagctcagcagggtctgcccactccctacgctggcccacataggcctccaggagccctcagtgagagggaccagcatagctgacccccagagtgtggtgggcgccggccctgcccgaggcccagtcggggccctttctgcagatctacctctggctcagcgcacgccccctgccctgagaacaggaaagggcccggaagggctgactcaccgggccgacgctcacacgaaaatgggatgcactttatttgctggtgcaaaggcaggtgagggtgcctcctgtgtgaccgttggccctcctgcctggtggcgctgaagggaaggagccagtgagcctgaccccgggaggggccgtccccgtgtgccgcgtttggcggggccccaggcggctcccccaggcccgggtctggggccccaggctttcccctgcctcgcggccgggcgtcccgtgctttgggtttcttggtttgggttttttaatgccagttctcagtacataagtgcattttgaaagaggttccagctatcacttgtaaccatatatatatacatatatattctatctacaaagtgtttatttgcgagatgtttcaacggtgagttcgggccccgcccgccttgtgaccatctgtccccggtcctcgtccccgccccgcgccctggtcccgagtggcgtggggacgggccatcactgtatgtattaaaatgactgtatcaaataaatgtttattgatttttttccagggtttttgtgcggctcagtttgtggtgaaaaacagggggcggggccctccaggcacgtggcggaggctgccgaactacgggtcccccatgcccgccgcgcggccttgtggggcttgtagtccgcgacgcgcggccttgtggggcttgtagtccgcgacgcgcggccttgtggggcttgtagtccgcgacgcgcggccttgtggggcttgtagtccgcgacgcgcggccttgtggggcttgtagtccgcggtgggcaagagagggacccgccagctcccggcggcccatgcgcgccgcccggccaggcccgcaaagaggcctccgagcgccatggctgcgcccccggcccgcgcggacgctgatccttcgcccacgtcgccacctacggcccgagacacaccaggccggcaggctgagaaaagcgagaccgcgtgcgaggaccggtaggcgtgggcctcgcctccactccactggcgagcgggaag

SEQ ID NO: 27141 - DNA, 2300 bp, Homo sapien
gtaatcccagctactcagggggctgaggcagaattgcttgaacccaggaggcggaggttgcagtgagcagagatggcgccactgcagtccagcctgggcaacagagagagactccatctcaaaaaaaaaaaaaaaaaaatgctctatgggcacaagatgaaaacccagagtctccttgactcttccctcctgaggcctgaggccttccctgggagatgggtgctgtgaacaggtaagaatggccctcctaaggccaggggcagtggctcacgcctgtaatcccagcactttgggaggccgaggtgggcggatcacgaggtcaggagattgagaccatcctggctaacagggtgaaactccgtctctactaaaaatacaaaaaaattagccgggcgtggtggtgggcgcctgtagttccagctacttggttggctgaggcaggagaatggcatgaacccaggaggcggagcttgcagtgagccgagatcgcaccactgcactccagcctgggctacagagccagactctgtctcaaaaaaaaaaaaaaaaaaaaatgccctcctagccagaggcggtgggtcacacctgtaatgcccacactgtgggaggctgaggcaggaagatggcttaagcccaggagttcaagaccagcctagtcaacacagaaagacctcgtctctatgaatactttaaaacttagccaggtggggtggcacacacctgtagttccagctacttgggaggccgaggtgggaggattgcttgagcccaggtggtagaggctgcagtgagccaagatcacaccactgcattccagcctgaatgacagagcgagaccctatctcaagaataaaaaaagaacggagaaggagaaaggagaggaggggaagggaggggaggagaagggaggggaggggagaaaaagaaagagagagaaaggaaggaaggaaggagaaagggagggagggaagagaaggaagggaaggaaggagaaaaggaagggaggaagggaagggaaggaaggaagaaggaaggaaaggaaggaagaagggagggaggaaggtaagggaaggaagagaaggaagggaggaagggagggagggaagagaagagaaggaaggaaagagaaaaggaaggaaggaagaaggaaggaaaggaaggaagaagggagggagggagggaagggaaggaagagaagggagggaaggaagaaggaaggaaggaaggagagaaggaagtaagagagggaaggaaggaaggcaggcaggcaggcaggcaggctctcctgggggagattcttgtgggtcctgtgccagtcccgtgtggtgcctcctaccagtcctctttaggagagccaacctttctctgtctcattcattcccaagtcctgtgctgtcagtgccccgccacctccagaccactcagcccacaccggaccccagtgccccctgcctgcagaagcccaagctgtggggcagagaaggccctggcactggttcagaaccactgcccccagagctgggaaagggtgacccaatggtcagtgaccccagtaaaaccccatggccttaagccgccaggcacctccgggggtcagtcgcaaaagtggtctcagggccagttggaagaaggctgaatcctgcgctgccggtgcacggcccccagggccagaggtcagggtcccgagcccagagaccacactcgccgcgcgggccaggatgcggcggaatcaggtcgcctcaatccgtgcgcgccggactccgggcagtgcctagcgcccctatcgggcctcagtttaccccactgtccaaaaaacgtcccccgccccaggacggcagaaccggctactctggactgcgggcccggccgacgggggcggaaccgcggagcgggggaaccacaggccagcgccgggcccccgcccccgcccccgccccctccccgccccctccccgtcgcggagcggccgcgggaataacgcgagagttcgccccctcccccccgcagtaaaactgtcaaaggtgggaggggcgggagcgcgcatgtgcgcagcgcggcgcgcagcctgcgccgcccggacccagcgccccgcgccccgcgccccccgccccggcccggcccggcccggccgcagccccgctgggcgccgcaggtaagcgcccggccgcgccccggacccattctggccgcagccccggcgcccaccgcgccccggatctcgaccctgcgcgcaggccaaggagggggccgggcccggagcccccccgccccccgccgcgcccgagcccccgcgccccgcg

SEQ ID NO: 27142 - DNA, 2300 bp, Homo sapien
ccagaaggaaatggggcgggggcaccgaggcgggatgtgacctcggccccctttcggccccactgcaaaagcgggggagggttttccccgtgcgcaggaaaaggtgacccgagcgtagtgccagcctggacacaggcgccccggcttgacaccccctcaccccaagccaagggcgcgctgacccccaaggcctgaggctggctgccccctaaagcaggacaaaggctacgggaccccgttgagccgagacatccgccgaatacccccagccaccgccgctcgaagcccgccgggtcccgccccgcccccgtgcctctgggtccctgagacccccgcccgagaaatccccgctccccaatccagccccgctcaccgtccacatcccggcgctccccgaagcccgcgcgcacggccccggcgcggccacgcggggggctcagcttggacctcagctcggtgaacatggggcccgcgggtgccaggcccgcgcacacgcccctcgccgagtgcagggcggccggtgtggccggcggggaacgcgcgccgccgccccgccccgccccagccggccccgcgcccgagccggtccccgcggcccgcgagtgtgcgcgacgaggcacctgccgccgagccctgtgtgccgggcgcgctccgggagctccgaggtgtgtcggcggcgcgcgggcctgcgtgcaccaaggctgtccgccagggcgaggggcgtccgtgcgcccctgggcacggctccgcggaggagagtccccgtgaacctgccgggcgtcctctgaggtcgggcccctctgtgcgtgggggtgggctgaggggcatctcacaggggtcttctacctaccggggccaggacaaggggcaggtcaacgcctcccacacactttcctcggtctcctacgtctttactcgccttcaaataggcacccgcttccccggagaaaccagcttgactcttgcttaccgcccaccccactgtgaacatcagggtggttctcccttccctctgcagccccagaacctggctcagtgcccgggggagagggggcggtacagtgctctgtaactgaaaggggcttggcttgcctggagatggggcagaggggaactccaaggaggctgtagcaggccggagcggtgtgtttgctccaggactccagtgagaagtgctgagatggggctgggctagggaactgtggttgcctggtgcagcagcaggccaggcttgcaaccagctattcggcttgctctgcccaggagcctgggtgctctccctgggtgtatgtaggggctctggaggatgtcttacagcaggaggaccagagatgcacacagacatgtagaaatgcatgcacagagtacagtcatgcacttgcacccaaaacacgagcacacgtgacctctgtgcacacaccccactaatcacacacacagaattcacccacatgcttgacagccatgttcatgtactgacgtgttcccgacagctcagctgcggttatttatttcgtcaattagctctccaggagctaaggatgtggccctcaccagaatgtccaaggcatgttggcgggcgtgggtggggtctctagtcccactggagggacagatgcctgaatgggggttcaagaatatgagtgctaaaagcgtagggcagcagtgtgcgcacaggacgcacacagacaggtgtgcccataaccagtacacacaagctctacacaactggacagggtacagctctgctcggacagggcgcaccaggggcgagggcgggcagctgggctggttcagagggagggggccatgggttcagagggaggggaccatgggtcccactctcacagacaggtctccggactgcatcagagcactcgggaagcagcaatgccccaggctgtttttagcccccaggggccagttagggtcccagtgcaagctcgacctagcttcttccgcctctccacgaggaggcgctcccgcgcacgcgcctaccacgttcctgccccctagccgcggccggaagtcgtcgaaccaggacgtcgggacttccgcccagggaatcaaaagtgggcggggcgtgtgcggactgagcgctctgcttccggggcgcgggtgacgcgacgacggcgacactttgctacggagtgcatcggacgtcgaagcctagagtctctgcgtctttccctcttccgctgcctcattcctttccttcctagccttggtcgtcgccgccaccatgaacaagaagaagaaaccgttcctagggatgcccgcgcccctcggctacgtgccgg

SEQ ID NO: 27143 - DNA, 2300 bp, Homo sapien
ctcacttatccagcaacgcacggtggtcatctgtgttgcaggcatagaggacccaggcacgcttaaggcggggcgggcgggcgggcggggggggggagtgtcagcccgacctgaggaaggtggtcgcgtgtttccactacacgtcagattcctctactcctcactgcagaccgtatacagcattacccatcttacagaccaaaacactgggctgagagtcaatgtgtcacatctaggcggcaagcagggtgcacacacaggtatgtcctgaccccaaagcccgttgcttcctgcagggattaagccgatccaccaagcgtctttcagactgcgcggccatagacccccgcccccaaacacgccccaaagcactgcgctcctgtagccgggtccccgcccctcgcgcgccgccccaggcctcacccccggcccagccccggcacgtagccgaggggcgcgggcatccctaggaacggtttcttcttcttgttcatggtggcggcgacgaccaaggctaggaaggaaaggaatgaggcagcggaagagggaaagacgcagagactctaggcttcgacgtccgatgcactccgtagcaaagtgtcgccgtcgtcgcgtcacccgcgccccggaagcagagcgctcagtccgcacacgccccgcccacttttgattccctgggcggaagtcccgacgtcctggttcgacgacttccggccgcggctagggggcaggaacgtggtaggcgcgtgcgcgggagcgcctcctcgtggagaggcggaagaagctaggtcgagcttgcactgggaccctaactggcccctgggggctaaaaacagcctggggcattgctgcttcccgagtgctctgatgcagtccggagacctgtctgtgagagtgggacccatggtcccctccctctgaacccatggccccctccctctgaaccagcccagctgcccgccctcgcccctggtgcgccctgtccgagcagagctgtaccctgtccagttgtgtagagcttgtgtgtactggttatgggcacacctgtctgtgtgcgtcctgtgcgcacactgctgccctacgcttttagcactcatattcttgaacccccattcaggcatctgtccctccagtgggactagagaccccacccacgcccgccaacatgccttggacattctggtgagggccacatccttagctcctggagagctaattgacgaaataaataaccgcagctgagctgtcgggaacacgtcagtacatgaacatggctgtcaagcatgtgggtgaattctgtgtgtgtgattagtggggtgtgtgcacagaggtcacgtgtgctcgtgttttgggtgcaagtgcatgactgtactctgtgcatgcatttctacatgtctgtgtgcatctctggtcctcctgctgtaagacatcctccagagcccctacatacacccagggagagcacccaggctcctgggcagagcaagccgaatagctggttgcaagcctggcctgctgctgcaccaggcaaccacagttccctagcccagccccatctcagcacttctcactggagtcctggagcaaacacaccgctccggcctgctacagcctccttggagttcccctctgccccatctccaggcaagccaagcccctttcagttacagagcactgtaccgccccctctcccccgggcactgagccaggttctggggctgcagagggaagggagaaccaccctgatgttcacagtggggtgggcggtaagcaagagtcaagctggtttctccggggaagcgggtgcctatttgaaggcgagtaaagacgtaggagaccgaggaaagtgtgtgggaggcgttgacctgccccttgtcctggccccggtaggtagaagacccctgtgagatgcccctcagcccacccccacgcacagaggggcccgacctcagaggacgcccggcaggttcacggggactctcctccgcggagccgtgcccaggggcgcacggacgcccctcgccctggcggacagccttggtgcacgcaggcccgcgcgccgccgacacacctcggagctcccggagcgcgcccggcacacagggctcggcggcaggtgcctcgtcgcgcacactcgcgggccgcggggaccggctcgggcgcggggccggctggggcggggcggggcggcggcgcgcgttccccgccggccacaccggccgccctgcactcggcgaggggcgtgtgcgcgggcctggcacccgcgggccccatgttcaccgagctgaggtccaagctga

SEQ ID NO: 27144 - DNA, 2300 bp, Homo sapien
cccctccaacctcctgagctctattctattcgctgtacattccactcacactggactccctcctgttccctgggcttcctccttgcctcactttttttgaactcccacacgcagaatgtcagtttctcttctatcgtcaccgtttctacagccctaagtccagctctcttactaaacttggctccaatgctactctccattaagcactgggttctaaatctggtcctctttacgtacttatttatggtaatagcaaaccctccttagtgagcttgtgtgtgccccacagattccaatataataccaccaccaagaaaaacccagtagtgttcctcatcaaatgaatagccaaataggataataacgactgctcacttatccagcaacgcacggtggtcatctgtgttgcaggcatagaggacccaggcacgcttaaggcggggcgggcgggcgggcggggggggggagtgtcagcccgacctgaggaaggtggtcgcgtgtttccactacacgtcagattcctctactcctcactgcagaccgtatacagcattacccatcttacagaccaaaacactgggctgagagtcaatgtgtcacatctaggcggcaagcagggtgcacacacaggtatgtcctgaccccaaagcccgttgcttcctgcagggattaagccgatccaccaagcgtctttcagactgcgcggccatagacccccgcccccaaacacgccccaaagcactgcgctcctgtagccgggtccccgcccctcgcgcgccgccccaggcctcacccccggcccagccccggcacgtagccgaggggcgcgggcatccctaggaacggtttcttcttcttgttcatggtggcggcgacgaccaaggctaggaaggaaaggaatgaggcagcggaagagggaaagacgcagagactctaggcttcgacgtccgatgcactccgtagcaaagtgtcgccgtcgtcgcgtcacccgcgccccggaagcagagcgctcagtccgcacacgccccgcccacttttgattccctgggcggaagtcccgacgtcctggttcgacgacttccggccgcggctagggggcaggaacgtggtaggcgcgtgcgcgggagcgcctcctcgtggagaggcggaagaagctaggtcgagcttgcactgggaccctaactggcccctgggggctaaaaacagcctggggcattgctgcttcccgagtgctctgatgcagtccggagacctgtctgtgagagtgggacccatggtcccctccctctgaacccatggccccctccctctgaaccagcccagctgcccgccctcgcccctggtgcgccctgtccgagcagagctgtaccctgtccagttgtgtagagcttgtgtgtactggttatgggcacacctgtctgtgtgcgtcctgtgcgcacactgctgccctacgcttttagcactcatattcttgaacccccattcaggcatctgtccctccagtgggactagagaccccacccacgcccgccaacatgccttggacattctggtgagggccacatccttagctcctggagagctaattgacgaaataaataaccgcagctgagctgtcgggaacacgtcagtacatgaacatggctgtcaagcatgtgggtgaattctgtgtgtgtgattagtggggtgtgtgcacagaggtcacgtgtgctcgtgttttgggtgcaagtgcatgactgtactctgtgcatgcatttctacatgtctgtgtgcatctctggtcctcctgctgtaagacatcctccagagcccctacatacacccagggagagcacccaggctcctgggcagagcaagccgaatagctggttgcaagcctggcctgctgctgcaccaggcaaccacagttccctagcccagccccatctcagcacttctcactggagtcctggagcaaacacaccgctccggcctgctacagcctccttggagttcccctctgccccatctccaggcaagccaagcccctttcagttacagagcactgtaccgccccctctcccccgggcactgagccaggttctggggctgcagagggaagggagaaccaccctgatgttcacagtggggtgggcggtaagcaagagtcaagctggtttctccggggaagcgggtgcctatttgaaggcgagtaaagacgtaggagaccgaggaaagtgtgtgggaggcgttgacctgccccttgtcctggccccggtaggtagaagacccctgtgagatgcccctcagcccacccccac

SEQ ID NO: 27145 - DNA, 2300 bp, Homo sapien
atagcctcacagctccacaccctggaattgaggcaccctgtccgttagggtggcctgtctgctggagtattttaacgagttatttgctggctggagcctgggctcactttaggaatgggaatggagttggcctttttcttgggcctgagcctgagtgtggctttctaggacagcctgggcagcagcccctctgctcccacccgccccgctagagccaagcgttgtctgagctgtgctggaggcagtcaggctgtcctggtcctccctggaaagtgttgccagcccacgtgaaccctaactccttgtttggagaaggcagacgtgagcacttgtgtgaggcacagacatggggagcctggctcagttcctcatctgtgggctgaggctggtggggtccatgctcctcaggaggtggggctcctttgaggaacacacctgaaagagccttgccttccggtgcagggcctgtgccctctggcccgccagttggggttggtgctgccagggccaggtctgcaggggccaggcgagaagcaggcgaggtccggggagtagcgtgggaggacccctgcctgacgtgccctgtggtccccccaggagcagcaggaggaggtgaggaagcgctgtgagagtgcagagcctcggcatggggagctgtggtgcgccgtgtccaaggacatcgccaactggcagaagaagatcggggacatccttaggctggtggccggccgcatcaagaacaccttctgattgagcggttgccatggccggtctccgtggggcagggttgggccgcatgtggaagggctctgagctgtgtcctccttcattaaaagtttttatgtctcgtgtcagaacaggcagcctgctggttttctctggggcccttctctggctcctgcttctgctgccccagtctggcctgtcctggcctgtcccatgccgtcctggggtggctgtgatcgcccttgcttggacagaagcctcttgcagacagccggtgtctcacagaggaggcactgtggaggtgcccgggttccccaagactgtggagaaggtggtaggggtgcagatgttctggccaaaagccctgtgaggacagctggagacagtggggaccaagctgcatgcaggacgcaggtgctcgcaggagcctggcagccgcctgcaagggtcttggtcaggggacagctggggcctccctggggtctgagtgcaaacaggagaacccagctctgcgcagggcctctccacacagcctcccgggcccctcaggcatgtgctgagtgacagtgtcaccagtaagaggcgttctttcttttggaggtgagttcatttttttatttttgagacagtctcgctctgtcgcccaggctggagtgcagtggcacgatctcggctcactgcaacctctgcctcctgggttcaagcaattctcctgtctcagcctcccgagtagctgggactacaggcgcccgctgccaaactcctgacctcaggtgatccatctgcctcagcttcccaaagtgctgggattacaggcgtgagccaccgcacccggccgtgagtttatctttgctaatttatcattcgcagtttaaccctaaagcccttgtaatggttctcatctccaggttgaacagtgatggttctcatctctaggttgaacgttgatcacccgagagacttggcttctcttcagccttagctgtgtaaggataaaggacgtcctcaggcctgggatcatgtgtgtgcattcagttgggagccagctggttcttgtgtaggccggggctagagacatctggctggaggtcatggctggcccagagggtgtgggtggacagtcgttgaggccagcgggcggggaggagggcgctgtcatgtgggctgaggaggctgctggagagcagctgtccctggatgttccttgtgagaggggagccctggagggtcccggcctgtcttgtggtaccgatggcagggcctgtggtggtggtcagtcactgacccacagctctgcccacctgcacatgggggcctgtgctaggccttgtggtctgcctgccctgctcctgacgagtgagaatggctggggtgggagatccctgcctgcacgtggggcggtcctggtagaccagaatgtgggtgtgggtcccccttccctgtggttctggggaccttgaggacatggtcaatcccgggcaagggacctgccacccctgtatggggtcaggaactgctggttggtctctgctgggcaggcaacctggggtccagctcaaatcgttggaatgtgg

SEQ ID NO: 27146 - DNA, 2300 bp, Homo sapien
agggccaggttaattgaagtgatagggagtggagagagggagggggcagggctgggattgcgtggcctttccttccctctcctgctccctccctcagcttggaggagccaacttcaaaagcctccgcctggcctgcccctctgcagtcctccaggcagcctgtccagggaagcggttggctggtgttggacctggtgcggcagtgcacaccctgcccaaggaccccaggatcatgtgcgtggcctgctggcgggagtgagggagggcaagaccctgaaaggcccatggtgagcagctgtgggcctcctctagggagggggcttacttgggtggaggggctgggggtacacacagctcaggagacactgcttgttcccctgagccccaccaggaaatctccggttggctctggtcactgcgtccctgtgggtggcactgggtgcatgtgccctggcttctggcagttgggggaggggggctcctgggtgccgggcaaccctgttctaagctgggctgaggcttgagcctggaagtggtactaacaggccagttgggactcccagggcagccagtctgccccacctgggtgggacacagcaggtgctggacatccttgcagctccagctggcctgctcaggagtcaggctctggttctcgctatgacctctgacccagagcaggcagagggaatgacgtggcaattctgagcccaccaagttggctgtggcgtgtgtggttgggggggtcaggtttcaggaaggggccacagcaagccatctgctcttccagccattgctgctttgtgctctgagcaggagctgccaccgcccaccaggcccccagctctatgcaagggttggggtgctgcttgttcaggctcccctgacagggctaggaagccgagtcgagtcctcttatcttggttgggttcgcatgattaatttccagccctagatctgctgtctgactccatcctgggggcccaggggaagggttggggctggccccttttgggtggctgggaacctgggggccgtcagctgtctccttgatgtttgggctttatccctgcgggcgcaggccctccattttgggtcgggggaggcctgtggcacaggctgcccggagggatggcgtggggcggctggtacaggcagaggggccttttgcgactgttggttggggctggatgtggtggctccttcctcctctatagcttctgggtgtccccctagctttccccttccaatagggtgtggcttggagctctgagcccctgccccagttgggttgggggtacaaggagtccccagttcccacgtctctgtgagctaacccagagggcgccagtatgggaggtgtggagttgaatgggcatggccatgagtgagacaggctgtactgggacaacttcctactgtacccccaagagcctgcagaccagccccactagagctgtacggggctggtggggggccctgctctgtgcggtcctgagggtgctccaccccttgctggccccactcccacgtggaccacagagccaggctctcctgactctgggcctgccccctctatctcctgatgggttcttcaggactcagtgacatcgcctcccagccgacatcactcacccctttcacatctttgcagggagcatagaactgtctggtttgcagacctatctcttgtgtctcctgatttatcccgccaggcctgtgcctacagcctttcttgattggtgacacgtccatttcattcgctcagagatcccgtggggtggggcagggggtggggcttctacggaaacaaagtgcaggtgggctggctgctccctgtgctgggaacaccccccaggcctaaccccaacctgctgtctcctccaggtaccccctaagcctgcactctgggcgctcctgctggcgctgctggggaccgcgccaagccgcgcctattccccggcctgcagcgtccccgacgtgctccgccactatcgcgccatcatcttcgaggatctgcaggccgccgtgaagtggggcggggcgggggccgaaaagaccaggccaggctccagacactttcatttcatacagaaaaacctgactagacccgggagctcgggacggcggggacggcctcgggcctcctgtggcgcccagaaggtatggaggaggcgcccctacccaagctcgccggcctgctcctctctcagtttccccccacccccaccccgccttcctcccttccctccccaggagcacagtatcctcctgtccatctcgtccctgggtcggaccct

SEQ ID NO: 27147 - DNA, 2300 bp, Homo sapien
acaggacatgacagccggacacctgagtccacagcccagccaagagggtgggtcactggctggcgccaggcaaggcggctgctggtgggtgttgtgggggacgtggaggcgatgaggtcatgccggacactgcctgccactatgtttagagcagctccagtgactctgggctctcgggggtggcagaggaccaagcagggcccccagggaactgcaaatccttccccacgtgtgagggctactgcagaggaccccgaggacctctttcccaggccgcagtgaccagccactgcccaggctgagccaggccctggtgacccctgactgcaaccctaaggttgtgagtagagagagcttccgccaagtggtagccctttggggtcttcgcacggctccccaccccccctgcaccctcctgccagctgcccaggaggcccacccacactgagactcggccaagggtccagccacccatactgagattaaaggaggactagcagcatccggcagaggcctgtgagcccctccatccctgtggccacaaccctgcctgcctccccagaaaagccaggggccgcacctcctggtgccccacgggccccccattagccagcactggctcagtgtctgtgaacgaggtgctaggcccgtggggcaaactggagggacgggagatctggagaccagactgggagacccagccccgtatgctgggacgatgggcgtcgagacagactgtgatgtggggctttggggagggctggacaccgaccgcgacagccctcggtgggagtgcccctgtgggggtgctggcctcagggcaggagtgcccctggggacagttcaggaacagcctctaaggggcactgcaaggcccacgtggggcccaccccattcataacacaggctggatgtggcctagcgaggctggcagggacagagaaccaagagcttctggccacacaggctcagggtcacaagacctgtggcctctacccatggggctcccggcatagtgtggcggggggagctggggagcctccaggctatgaggagatgtgccgcgaggtggcgagattctgaccctgcctggagggctgctggggacacccaacccttctccagtagaaccatgcgtggcagtgggaggggaggacctccagagggagaccctcagctctggagcccagatcccctcctgatggagtaggaaggggacagtgaaaattcaggaagctggacgctcctccggaacccgcccccgcccaggtcagagggtccagggaggggccagtgggaaggacccaggtaggccctgcctcttgctgcagcggtggcctgggctgggcaggggagccagcaagccactgagggtcccagccccttccccaagggcccttggggggcagggaggacgccacagcctctgcgtccctgctcccccttctctttgtgggctccgtccagggcctctgctctctccctccctgtgtcagctttgccttgtgccagagttggtttgggagtgaggacagaagaccatcttgtcccataaaggcactcaaagtccctggtgctgacggttacacatgggtgtagagtttccagcatgggcgcccctggggactcagagcgcctccccaaagacggggccttttctgaaggcgctgcactccaggaaggacttaccggctgttgggaaggcagcctccccagaacttggtgtgaaaaagggccctctcctccccatggagcctcccagcggggggcggggaacggcaaccagcgggacactgccgccctcccccagttactgcccgggggtccgactccgtgggtgggtggcagctcgcctccgaaagtctggcagcaccggccctcatcagcagccctttctttcccacccggggggtctctccttctgagaggtcgcgggggaggtgggggggctgtgcgcgggggaggcctcagcggaatcccgcccggcctgagaagaaagggagcccccggggaggaggcggccccgacccgcccccgcccgcccgccccgccgccgattggccctgagccgctatatctgggcgcccgcccggcccgaggccaccgccgtccccaccgccatccgccctcccggcctggcctgcccttgcgcccggctccccagtgcccgccgcccgcccgccgcgctcccgcgctccgttccgcccaggccgcgcccagctggaatgcagagatcgccgcccggctacggcgcacaggacgacccgcccgcccgccgcgactgtgcatgggccccggga

SEQ ID NO: 27148 - DNA, 2300 bp, Homo sapien
aaaattagccaggcgtggtggcgcatgtctgtaatcctagctaccctggaggctgaggcatgagaatcgcttgaacccaggaggcagaggttgcagtgagccaagatcgcaccactgcactccagcctgggtgacagagtgagactctgtttccagacaaaagcaaaaacaaaaaacaaaaattagctgggcgtggtggcacatgcttgtaatcccaggtagtagggaggctaaggcacacgaattgcttgagcccgggaggtggaggttgcagtgagccgagatcgcaccactgcactccagcctgggcgacagaggaagactgtttcaaaaaacaaaaacgaaacaaaacaaacctaaccaaaaacaaatccacaaacaagccagaacttggggtgccaggtgtagggaggggggctgtgtcagggccacacatggcttttgcccttgggggttcatcaggtatagggaggggctgtgtcagggccacacgtggcttttgcccttgggggttcatgggaggagtcttttcacagagggaggagcatgtgccaaggccctggggcagggaagtctgctggtgtgagcagagcagggggtgcagagaggaggggatgaggctcagagggaacaaggggctgagttggctctgggagggtcttgcattttctgagtgaggtgggaccttgggaggttctgagtggagtgtgatctgcctcagctcagctgctacgtgaagacggggctgtgcggggcaggagggacgggcagtcccctgccagaaggcagggggctctgcttctgccgcggcgggagcctggccaaggtttgctctcagaccccatctggctgccccaggagtctccctggtctctctctgggaggcctgggcccctgggaggtgccgcctcagggaaccctggttttgctgccctgtgagtcaggtctctaggcttcacccatagccccgaccccacggctgcctggggcctctggggaaggggagggtggagtggccgccaggctggcgggctggcagggctgcatttctgggaattgtgtgggggaagtgcattgttagagcaagcctggagcaggccgccagggccgccactggcctctggggatgcctcttgcctcccccagcgttgcttctgtgggagggagctgggactgggccaaggctatgggctgggctggggactttccgagagacgctgccctgggcaggtggctcttcccattctacagactgggcgactgaggtccagagagccgggtgctgcagtggcatagccaggagcagtgggcccagtccccatcccctgccctcctctgctggcgcatgggacaggggagcacttgctggacctaagccccgtcgctgccctgctggtgggggcatccaagggaggcctgggtggggtccactggggtcacagctcggcagagcccccaaggtgggctggagggtctgatggaaaggggcgcagagacggctcctaggtgcttgggctgtgggagggctgcccatggggtggcagggggtgggggctcctggggctgcaggatccccagcccccgctctgtggttgcaggaagcaaggggggctccgtgtgagtttggcagcgggagccttcccaccacggcgctgcctcagccagaggggaagcatggatagcggccactggggtcatggccggctttgggcgggcagggggcaggggacacaaatagaaaaataaatggcctgagtttccgacgtttcctggactcaggatgggggaggggcaggcctttgggccaaaggtgcggctggccctgtggggtggaccaggggtttctccccagacgcctgttggggccagggctgccccctcagacctccaaggtgggtcacatctcccccttagagccctcaggacagggccccgttgcccacagagaattcctaaaggcctatccatatgtccctgtccataaagacgtcgagtgtggaggacaccctggaggaggagatggaaccctcctgtttgctggggctcggcccccggtgaggctggctgcaggtgaccacagagacctagcctggtgtcgtgcggccgctgggtccgtgaaggggagtgaggcactcctcaccctgtggcagctcctagtcaggaggcctctcccctccacctgcacgtcatgtggctgtggctcccaggaccagcgcctggagcgggtgagtgaacgtccctctcctccgtgggcactgcctccgctgtgagccacccttcaggctacgtgcatttccgcc

SEQ ID NO: 27149 - DNA, 2300 bp, Homo sapien
ccacttcacagtcctggggggcagctgtggctcttgctgggaaccacctggacctccctggggcttgggggtggggtggtggtgaagtgaggcccacccgtccgtggctcactcctgccacctagaggccactgttcctcacaggctctggggccagtcacctgcctctgcccgggggcgggaccatcccaccggattgcaggttccctgatcaccaggatgggcctacacctctccgcctgcagtagttgcttccacgcaggactagagcatgtcagggttcggggctcctgtcatagcggagtggctgcggcccgcaggtcagaggcacccgacctcttctgctaacccccttccctgcctgtcccgtccgctcctttctctccatcacctgcccctgccatgaaccaggccaccagtgaccccatccacacctgtccgaccaggctccccacgtgccctaatgcagccccgtaggctgggcccacggctgacaccccttcctgagggatccccgacctgccagccgttgtccttaagacgccacagcatcttgacctccccgtctgcagcctctgtgggcctccactgggacccactgagacatgtcaggctcctcacgagctctgtcttgtgtggccatgcccagggccccaggacgtagaagaccacctggcatctcatggaggaggaaacagggcccagagtgggacctccactcaggctcagcaagggccgagtcccagttcctggagtcctagttgaggcccctcctacacagagcacaaggtggaattcacggggtcataaaggcagccagttctaccaacacacagttatgcaaatattttcttaaagtgtgatatcaaaacccaagtgcttctttaccaatctgctgaacaagatgtgactcactgaacagcctctgcagtcccagcagcagcgagtgtgggggtgcgaggcagttcccatctgtgccgggtcagccacgggcccagctgaccagatttggttcatggcctcgttcataactgaacgaacgacacctttctgctagaggtcggtataaaggagatgatgggccgggcacggtggctcacacctgtaatcccagcactttgggaggccgaggcgggtggatcacctgaggtcaggagtttgagactagcctcaccaatatgatgtaacctcgtctctactaaaaatacaaacatattagccgggtgtggtggcgcatgcctgtaatcccagctacttgggaggctgagacaagagaattgcttgaacctgggatgcggaggttgcagtgagccaagatcgtgccactgcactccagcctgggcaacaagagtgaaactctgtctcaaaaaaaaaaaaaaaaaaaaaaggagatgatggtttcttcccaccagtttattttctgtcaggggtttggtctctgggtctctgaccccctggattgttgagacgcctcgcactgttccctcccatcttgcccgaccgccccccaccagctcccaggcccagtatgtctctgtcccaccccatcgtctctataggccctgtcctgcagtgggttctgtccctccctgcagcttggtaaggttgttgaggcttcaatacacactccagaccacatccctctccctcccaactctgggacactctctgcacctctgaaaagaaactcccagcccttcttgtgcctctcccttcctctgggcaccccttgttccttatccatcctggctggcctgtggcctgtacttctgatctgcacacaggtatcacagaggacagagaccccagggccccagcccctggtgggggcggggagtgcaagggggcagtcgtctttgttctcgaccagctcccagctccctaggtaatgctttaagagttaccgtgctaggggatctttgtggctgaaaacattcagatgaaccagatatttaaaagcatccctcatgcaaagtccctccactggttgggccggcctggggagggtcaaggctgggtctctagtctggttttccgggggcgtctgtgtgcactccttccccagaaccttgcgcttgtccatcccagggagaaatcaggtggggagcggcctcactgctggctccttgatagtgacttgctccagaggtccgtgctgataccccagaccccgccccaccaacacttcaactgggactgcggcgtatgcacaactgcacagcctcctctggcagctccttgatgcttctgggacgttgaccctctctcctttgcacctccactcttaggaacttgcagct

SEQ ID NO: 27150 - DNA, 2300 bp, Homo sapien
gatgaggctggacccttcaagtcttcatatatgcccaaaccatgggattctgaccacgaggacttgcttggatggtctaggctggaagctatgtccccagctcactgtgaggggcagaatcagtcagtatggaaaccgtgttcatctattaataataataataatataatatcgcggggcctctgtcttagaaaggctttgctcctcacaaggaattctatgctttttccctatgattgagctttttttttttgcgacgagtctcactctgttgccaggctggagtgcagtggcatgatctcggctcactgccagctccgcctcccggattcaagcgattctcctgcctcagcctcctgagtagttgggactacaggcgcatgccgccatgcccggctaatttttttttgtttttttgtattttagtagagacggggtttcaccctgttgcccaggctggtctcaaactcctgagctcaggcagtccacctcccaaagtgctaggattacaagcatgagccaccgcgcccagcctgagtctttttttttttttttttttttttggagacagtctcactctgtcacccaggctggagtgcagtggcacaatctgggctcactgcaacctccgcctcctgggttcaagtgattctcctgcctcagcctcacaagtagctgggattacaggcatgtgccaccacgcccggctaattttttttttgttgttgtttgtttttgagatggagtcttgctctgttgcccaggctggagtgcagtggcatgatcgccgctcactgcaagctccgcctcctgggttcatgccattcttctgcctcagcctgcggagtagctgggactacaggcgtccgccaccacgcccggctaattttttgtatttttagtagagatggggtttcaccgtgttagccagtatggtctcgatctcctgacctcgtgatccgtctgccttggcctcccaaagtgctgggattacaggcatgagccaccatgcccggtctaatttttgtatttctagcagagacagggtttcaccatgttggccaggctggtctggaactcctgacctcagataatccgcccacctcagcctcccaaagtggtgggattacaggggtgagctactgtgcccaaccaagatgagtctctctctctctttttttttcttttgagacggagtctcgctgttgttggccagggctggagtgcaatggtgctatcttggctcactgcaacctccgccttccgggttccagcaattctcctgccttagcctcccaagtagctgagattacaggtgcccggcaccacacctggctagtttttgtattctttgtagagacggggtttcaccatattggccaggctggtctcgaactcctgacctcaggtgatccacccgcctgggcctcccaaagcgctgggattacaggcatgagccactattgcccggctaagatgagtctcttaactgaccatattttccttttcattttggctgcggggaagctcagttatatgtgattagtgccacagacagcccaagaaatgctcagcccattccacctgccacctggcctcatagttcgttggcctgaacttgaatgactacaggctccttgatccacaccctcccccaggattgtgccctctccaggaaaccacccagcatctgcattactggggagctgccaggcagtggtggggatgctggccctgcacctgtccccgtcctcaaccctccctaggcctgggccatctctctggctgcctgcagtctggccctacctagggacctccaacaacaatgtcaatgaacactaattgtcatgctccatcccctctctgttctcaggcatgtgatgtgaatcagctgacatcatcttgacgggagccctgtgaggcggacacttaactccagtttcacaggtggggagactgagacacagtggtcaacgtgcagagcccagaatctgctccctggtagctgactttgcaggcaggggccttgcccacgcagcctcggcagaggcccccgcacttcgcgaaccccagcaatggccccttccagacgccacgtccagctaccgcgcgctcacacctgcagggccccacaagaggcctcccagtgtgcgcgggcctcttgaagaagtaactctactcagaagcccgaatgacccaaactgggctctgggaggctggggacggccttctaggccaagtggggcgcgcgcagggctcagcggggcccaagagaagggctgagggcactgggtcctgag

SEQ ID NO: 27151 - DNA, 2300 bp, Homo sapien
taggattacaagcatgagccaccgcgcccagcctgagtctttttttttttttttttttttttggagacagtctcactctgtcacccaggctggagtgcagtggcacaatctgggctcactgcaacctccgcctcctgggttcaagtgattctcctgcctcagcctcacaagtagctgggattacaggcatgtgccaccacgcccggctaattttttttttgttgttgtttgtttttgagatggagtcttgctctgttgcccaggctggagtgcagtggcatgatcgccgctcactgcaagctccgcctcctgggttcatgccattcttctgcctcagcctgcggagtagctgggactacaggcgtccgccaccacgcccggctaattttttgtatttttagtagagatggggtttcaccgtgttagccagtatggtctcgatctcctgacctcgtgatccgtctgccttggcctcccaaagtgctgggattacaggcatgagccaccatgcccggtctaatttttgtatttctagcagagacagggtttcaccatgttggccaggctggtctggaactcctgacctcagataatccgcccacctcagcctcccaaagtggtgggattacaggggtgagctactgtgcccaaccaagatgagtctctctctctctttttttttcttttgagacggagtctcgctgttgttggccagggctggagtgcaatggtgctatcttggctcactgcaacctccgccttccgggttccagcaattctcctgccttagcctcccaagtagctgagattacaggtgcccggcaccacacctggctagtttttgtattctttgtagagacggggtttcaccatattggccaggctggtctcgaactcctgacctcaggtgatccacccgcctgggcctcccaaagcgctgggattacaggcatgagccactattgcccggctaagatgagtctcttaactgaccatattttccttttcattttggctgcggggaagctcagttatatgtgattagtgccacagacagcccaagaaatgctcagcccattccacctgccacctggcctcatagttcgttggcctgaacttgaatgactacaggctccttgatccacaccctcccccaggattgtgccctctccaggaaaccacccagcatctgcattactggggagctgccaggcagtggtggggatgctggccctgcacctgtccccgtcctcaaccctccctaggcctgggccatctctctggctgcctgcagtctggccctacctagggacctccaacaacaatgtcaatgaacactaattgtcatgctccatcccctctctgttctcaggcatgtgatgtgaatcagctgacatcatcttgacgggagccctgtgaggcggacacttaactccagtttcacaggtggggagactgagacacagtggtcaacgtgcagagcccagaatctgctccctggtagctgactttgcaggcaggggccttgcccacgcagcctcggcagaggcccccgcacttcgcgaaccccagcaatggccccttccagacgccacgtccagctaccgcgcgctcacacctgcagggccccacaagaggcctcccagtgtgcgcgggcctcttgaagaagtaactctactcagaagcccgaatgacccaaactgggctctgggaggctggggacggccttctaggccaagtggggcgcgcgcagggctcagcggggcccaagagaagggctgagggcactgggtcctgagccacccaccgaaggacgccgcgggacagcaaggcccgaagcaggaggagagaagggagcagattcctgggcctcctggggcccggtcgctccgggatgtctgagctctgggaggggcgtgcccggggcgcctccctcgcggggtattgtgggatcacgagtcactggcgacggtgggtcaggactacacttcccaggaggctgtgcgcgccgcgtggcgcctgggagttgtggtccagagcgcgggcgcggcgggcgcggcaggcgggcgcgtggactacgcatcctaggatgccgcgcgcggccgcggggccgagggtttgaaccgggggtctgtcgtccgcggcggggctgcgtcggctgcggcgggtgtgggaggtggcgacggccggggccggggtcctgcccggctgcggaggcgggcgcgacgggcgcgggggtcgctgctcctgaggcgatgatgggcaaggaagaggagattgcgcggatcgcccggaggctg

SEQ ID NO: 27152 - DNA, 2300 bp, Homo sapien
acccccgttagggccggaagacgacctgaggggcaggacgagacccctccccggcagagactaaccgggacgcaggggagacccccacccgtggccgagacccctgccccgggccagccctgccgttcactcccgcaaccccggcagaggccgcgatcaggcctggaccttgtcccgggagagccacccgctctggactcagacccctccctcgcccgcagtcacaggctccgcacccttccctgtcccttaactccagacccccagcctggcccgtcgactccttccttggccctgtcccgcctctcggagcccccggggtgttcgggcctcctctgcgggccgcgccagccccttgccttcctccatcccggcctgggcatcctcacaggccgagccccgccccccaactcagccctctcccacgctccgtctcttacagcgtttgtcaccctccgtctcccatagcatttgtcgccggcaacagtttggagtctgaggttggatccccttttcttctggagcttccgtgcctcccctgcctcttcccagcccttgtcatcctccttcacaggccagccagatacctgtcttgcctgtgggcccattttcttccctgtctgtccccaccccacaagaaccaggtttctctaataaattctctcccttctttagccaggacttagcccgcagcaacttgggttgtgggtagttatgtggacaccctccgaaaagagccggtgtgcttatataagagccaggaggtcgggcaagcctcctctgggagtgtctgggcgctggagcctctggccggctctgttcactgcggcctgggcctctgttgtcttgcggccacagcgagactttggaggaggctgtgtgtgaggactttgaaggggccaggtcagtgggggtccagttccagcgtcatgaccttggcaacctctgcaccctcccacagaagcatctttagaggatgctgcctgcctcctggggggtggggaggggtctggccgcaggtcatttggagctcctggctggctcaataaacgtgacctgtgctttcccacccagactgtgaactcctggggcagggccagctgtgtgtctgccaggccagcccagggcggtgaaggtggctgagtcatgggctttgggtgatttgtgcagccaccccagggctgtgtgactgcagtgggggtttgggggaagctttttgggctgagcagggttgagtctgggttcctgtgaccagcgttctggactggggtctgccctgggaaggggtgggctcccactcattcctgctgggtgcagcacccccatcattgcgttcacacacaccccggaaaactggtcagcacaaagtaggggtctgcgaaccattcatagctgtttccagagatgacccgagaatggagttgttccccttcttaaaggagacaaaacacaaacgataaaagctgtaggtgggagaagcaaagatgggtcatggagccaggggagggctgggtggggctgggcagaactgatggggggtttctggtggaagaacagcttgagtagaagccccaggggagaatgaggaggggaggcgggcgctgtgcagtggggagtgggagccagcagagcctcctgggggtcccagtgcctgaggtcccctcggggacctgggggccaggtgtgggggtttttttgcctctggacctgagcccactgagagccacgtaagcaggtgcagggctttcaggggacagtggccttggctctggctatcacctcaaggctggactctgtacagcccaagaggcagggcctgcctgggagggctcaggaggggctgcagcgtgagcagactatgccacccggattgctggggttgtgcgggcggtaggtgggacaagcccctcccatggcctgtgggtcgtgggactctgatcaggtcaccttagggcagagggaatgatacacacgtggaaacacatgcacgtgttacagaggagatggggtgttgcagggcacagttgcagttttaaacaggagaggccttgctgagaaggtgttgttgaaataaagcccgggagggagggagggagggagggagacgttgtgggaggccgccccaggcggtggagctgcaggtgcagagggcctcggtggcggctcagcgcccttggggagcactgagttgccgggcctggtgtggaaatgtgaccggtttgtgcctggcctcgtcagtgttgaggacctggaggaaacgcagatcttgggtggggagacaaggcggagagaacgaggtg

SEQ ID NO: 27153 - DNA, 2300 bp, Homo sapien
cgccaccctccctggccaggaagctcacaacttgattctactttattttctcaatcttcatccccccgccacgcctcccctagctcgtggcctttgaatgcttgtttctggctggttggcttctcttggcctcctgggacggtgtgtgaatggccctcagaagagacagtgctggagttctgcactcttagggcccccaatacccccgaggcctgggcatgcagaggccactgccctggcccaagtctggggcaggtgcagcatcccctgggaccttggcccctcaccaccggcccagtttcctctgagactgggggtcccacgggctcctagcaagtagatgaggagaccgaaagtagccctgcagctgggctttctttcaggggtcaagtttctagggaaaggaaggggcgtggcaacctgaggtttggtagctgtacccagacggggctgtctgtggcttccccaggcagcagttcttcctcctctctgtccccacccagggtcctcccccacactctagcacccctgagactgtccccctgggctaccatctccaccccagctctgaactggaggaggggacgtgtttaggggtgcagggccggggtgctaggggctgcatttgctgcagagcagggagccagccccttctttcccagttgcaggccctggacctggtcacctgtccctggacctggcttcctgtacccttctcaggtcaactggggcaacccatgtccccaggctaccctccccccgtctctcctgggggatacagagtctcaactagggtcctcctgcttgtcaacctggcattggggacccccttccccagcctcccaggctttggcccccaagtctgggatgggataggctggataggcggcacgtctgctctctggggatagaggatcccttgggagtggctgccgctttgctccacagaaggaaaaagaacgtcccagagcctgcccagtccaaaaaaagaataagaaaatgtgacaatcccagaaaaaaatgtcataacctttgggaggggggttgaagaggggctccattctcagtccttagctcctacccagggcctttcccatctgccaccctccacatctggctggtgggcgagccctggcctggcccctccagggaaggccagctctccccacctctgaaatggtggtggtggcccacccaccacgctcctctctctgctgttagggtccagtctggagaagcctgtgttctcctccaggtgcctctttcttcagcctctgacgcccccacccctacctcaaagctccctactcaccagcgacccaaaggcggggtgggggcaggaggggccaggttgggtctgggccccaccctggctgccgaaggggcgtgcactgcagcagcagggactcaagtcagacggcaggagggactcctgcggcgctctggagggaggctagcgccaggagcccccgatcggctggggccgggggcgcagcgcctcccctacagctcgaagggctgagtggctgccagatccagcggggtgggggcgggggcggacagggtgtcccgccccggcccctcctcaccgggctgagagggggagggagacgcggaaacctgggttcttccggcccccacctttgagcaatcacttccccaggctttgagctccagaaaaaggggaacccggctgcggcgccccctcccccacgcgcggggggcgggctccacttccactgcggcccagggtccacgtggacctggcggcgggagcccttggggttcgagtcccgtgcgccggctcccgaagctcccgcccagcacggtccccgggcccgggccgggaggggcagggccgctgtccccggcgctgcgcgcgcgcactcaccagccgcgctcccgagccactcgcgccgccgccggcccgcgcgctccaaggtccggcccgacagtcggggagggggcgcgggggcgcagtgcgcaggcgcctcggcggcacttccccaaagccaggggccgggacttcctcgcgccggcggtcgccgggcccgccccgcccgccgcgccccgccccgcgctcggccggctccgcaccccacccgccccgcccgcgcgtcggcccccacagtcgcctgggggtggcccggagagtcgaggtgctcatagtggagccctggctcccgggcggacggagccgcacggtagtagatgggggtgtggccgtggcccccgactctgctcggcggggccgttcctgctttgccatccgtgtgggacttccacgacagtggaggcac

SEQ ID NO: 27154 - DNA, 2300 bp, Homo sapien
ctctgcatcagacaggcaagagggaagaggggcagagacaggcacagcagacccagcacccagagaaggccagcaagacagtgacctcagtgactgcaccagggtcaggccggcactcgggccctttgatccccatgaaaaggcgcagggggtgctggatgtgcaaaggaggctggggaatggggcctggagggacgcctgcctgtagaaagctctatgggaaggaaggcatgtggtccaaagcccaatatattgagggctgtcagggcgcagagggtcctgggttcaaatcccagctccgccatcaactgcccagctcacctggccccacccatggacttcaggatgctgtgtgccgagaggcagaagccagggcggtggagagcaggcccaaggggccagaggagacgggggaatgactggggggttgtagagtgacccgagggggcagggagggcactgaccttcaccccctgccagctgcccacagctgcattttcccacagcagagacaacaggccggctcagcggggtcagcctggttgtgtgtggcctgggccaggtgctggcccatcttcgttgagcttccctgacctcacctgtgcccaccgctcaggagtgttatgtgggctgaataagtagcagcctgcctcttgtccctgtgggcttcctggcccctgcctttccttgcctggcctgacaacatggcagtcacagggttctgggtacagcttcgagaggcagcctgtctgtcctccagggccctctgacctctgacctcccccttcgggcccccgcccccgctcagcagcgcaataccctcccctcctcagccctcccccctctcacccaggccttccctgcctgctccccacaactcactctgcgccccccagcataagatccaggctgatctatgttgctggcttctggtcctactgcctggcccacaggggcacccagatactgatacttgtccgttgaatgaggaatacaagtagaatctccagctgcctttgcacccctcagagttctgtgaaggtgtaaggtgtgcacctgacctgtgcaactggaaggcattttatgaacagatcccgacactgggaactatccgggtggagtgcttgtgctggggaggacaggagctgcacacagccgggccaggggaggggcggggggcacagatgctctgcagacacttccagagcagggtcagggccaccctgacacagggccaaagcatgctgcgatgagaagcctaacccacgtctgtaccgagtcataaaggatgagaagagtcggccaaagggacagggcgttcgtggcaaaggggacagtgtggccttaagctttaggacatcttgggacacacgggtcagcagggactctgccaggccccacaggagacattcggcatgactccggatgcaagaacccgcacccccagttctccccagccccgcagcacaggaatctcccccttccttgggaaccccccacagcacagacaggcggctcttaacccagttttacagacgcggctcacggaggcgaggggtgggccgggctggcgtacccgccgatcggtcctttgcagcagcctcctctttcccaagctgggcaagcagcatatggggcccagctctcgtgcctccactgtcgtggaagtcccacacggatggcaaagcaggaacggccccgccgagcagagtcgggggccacggccacacccccatctactaccgtgcggctccgtccgcccgggagccagggctccactatgagcacctcgactctccgggccacccccaggcgactgtgggggccgacgcgcgggcggggcgggtggggtgcggagccggccgagcgcggggcggggcgcggcgggcggggcgggcccggcgaccgccggcgcgaggaagtcccggcccctggctttggggaagtgccgccgaggcgcctgcgcactgcgcccccgcgccccctccccgactgtcgggccggaccttggagcgcgcgggccggcggcggcgcgagtggctcgggagcgcggctggtgagtgcgcgcgcgcagcgccggggacagcggccctgcccctcccggcccgggcccggggaccgtgctgggcgggagcttcgggagccggcgcacgggactcgaaccccaagggctcccgccgccaggtccacgtggaccctgggccgcagtggaagtggagcccgccccccgcgcgtgggggagggggcgccgcagccgggttcccctttttctggagctcaaagcctggggaagtgattgc

SEQ ID NO: 27155 - DNA, 2300 bp, Homo sapien
accccaggattctgtgtcttggggattgactgagtgcctagaatgagttcatctactgggagaatcacatattatttcaccatttctctgagactccatttctttatctttaaaataagggtcttggtgcagtaccccacagcagcaagtgctccaaaggggatgggtcactctgcatcagacaggcaagagggaagaggggcagagacaggcacagcagacccagcacccagagaaggccagcaagacagtgacctcagtgactgcaccagggtcaggccggcactcgggccctttgatccccatgaaaaggcgcagggggtgctggatgtgcaaaggaggctggggaatggggcctggagggacgcctgcctgtagaaagctctatgggaaggaaggcatgtggtccaaagcccaatatattgagggctgtcagggcgcagagggtcctgggttcaaatcccagctccgccatcaactgcccagctcacctggccccacccatggacttcaggatgctgtgtgccgagaggcagaagccagggcggtggagagcaggcccaaggggccagaggagacgggggaatgactggggggttgtagagtgacccgagggggcagggagggcactgaccttcaccccctgccagctgcccacagctgcattttcccacagcagagacaacaggccggctcagcggggtcagcctggttgtgtgtggcctgggccaggtgctggcccatcttcgttgagcttccctgacctcacctgtgcccaccgctcaggagtgttatgtgggctgaataagtagcagcctgcctcttgtccctgtgggcttcctggcccctgcctttccttgcctggcctgacaacatggcagtcacagggttctgggtacagcttcgagaggcagcctgtctgtcctccagggccctctgacctctgacctcccccttcgggcccccgcccccgctcagcagcgcaataccctcccctcctcagccctcccccctctcacccaggccttccctgcctgctccccacaactcactctgcgccccccagcataagatccaggctgatctatgttgctggcttctggtcctactgcctggcccacaggggcacccagatactgatacttgtccgttgaatgaggaatacaagtagaatctccagctgcctttgcacccctcagagttctgtgaaggtgtaaggtgtgcacctgacctgtgcaactggaaggcattttatgaacagatcccgacactgggaactatccgggtggagtgcttgtgctggggaggacaggagctgcacacagccgggccaggggaggggcggggggcacagatgctctgcagacacttccagagcagggtcagggccaccctgacacagggccaaagcatgctgcgatgagaagcctaacccacgtctgtaccgagtcataaaggatgagaagagtcggccaaagggacagggcgttcgtggcaaaggggacagtgtggccttaagctttaggacatcttgggacacacgggtcagcagggactctgccaggccccacaggagacattcggcatgactccggatgcaagaacccgcacccccagttctccccagccccgcagcacaggaatctcccccttccttgggaaccccccacagcacagacaggcggctcttaacccagttttacagacgcggctcacggaggcgaggggtgggccgggctggcgtacccgccgatcggtcctttgcagcagcctcctctttcccaagctgggcaagcagcatatggggcccagctctcgtgcctccactgtcgtggaagtcccacacggatggcaaagcaggaacggccccgccgagcagagtcgggggccacggccacacccccatctactaccgtgcggctccgtccgcccgggagccagggctccactatgagcacctcgactctccgggccacccccaggcgactgtgggggccgacgcgcgggcggggcgggtggggtgcggagccggccgagcgcggggcggggcgcggcgggcggggcgggcccggcgaccgccggcgcgaggaagtcccggcccctggctttggggaagtgccgccgaggcgcctgcgcactgcgcccccgcgccccctccccgactgtcgggccggaccttggagcgcgcgggccggcggcggcgcgagtggctcgggagcgcggctggtgagtgcgcgcgcgcagcgccggggacagcggccctgcccctcccggcccgggcccggggaccgtgctgggcg

SEQ ID NO: 27156 - DNA, 2300 bp, Homo sapien
ggggccgcaggggttccccttgcccagtctcttggtcctcttgggcacagctgctgcttcttcaaaggccagcttaggtcacttccgctgcccacagcactgccctctccctggccccctggtgggatgactcgcactcgagaccactgcagcctgaggctacccttacatctgggggtgacttctgctgaaacaggctctttctccgtcctccccaagactgggggcctcccatagacccacagaacgccaggttgccagtggggggcagatcgggattaggggtaggcgtgtccctgacctgttactttcacacccacccacttgcgtctccccacttttttgggagaggccccactctctgtaccctgatgtctgtgaggtgcatgggagaggcagcgtccatactccccgcttccctcggggtcctggggagtggcagcaaaaagaccagcgagccttcggagaattataactttatgtgggaggctggggcgcgtcgcacactctcagtcgccgtcaccgcgggaagatggtgccatccacgttctcctccaggatggtctccacgcgcctccgctgccggggagagaggctggggtccggcgtgtgcggaggcgggcagggcccctcccctttccccgcccctaccggggcttgtctgcacctcttggcggtccagggggtccgggatccgcgcgggcttcagctgcggcggcaggaacagctccagccggatggcggcgcgcgcggacttctgccgctggatgagcagcgcgatctcctcggcctgcggggcccgggtagctgagcgcgcgccgagccccgccccgccccgccccggccggctccgctcaacgctcccggtgcgccccctctgccctccgaccccctcgcctcacccgcatgcgggtgtagcgcagccgcagggcgcggactcgcccgcgggcctccgctgccttgaggacgccgaggagccggttctggcgctcggcgggcagctcgagcgactgcgtccacgggcgcgggtcgggcatgcggtaccccggttccaccgacccgcacgggaaggtggaggccgccgcgcccacgtcctccagcaggtcgccgaagagcagatggcggtggcgctgcgcagggagcatggccgccagtccctgcggcgtcagggcccagcccggcttggggggctctgtcgcgggcgcccccttggcacgctcctcaccctgcgccgtgcctggcgcgctcttcccgcttcgctcccgcgggcccttgcgcccgccctccttcgctggcggcggcatcctcccgccctgcggagggaggagggcgtcccgtcggtgccggggctggcaccgggccctgcccgcccctcggcagggccccaacgtgcgccccagctcccgcccgctgggctctccgcagtcggttttgagttccgcacccccagcctctgagctttgcccaggcgctctccctctcccaagcgcacgtccccagcagctctgccatcggctgatcctgctcagtcctgcagtcaactaggactttctgatcaactcagttgtaggaaatatctttcctacccgatggactgttctgtttgaattgagaaaatgctgagaccccactgggttgatctcaggccctgccacatggagagctctaggtgacgcctgggggaccttcgttgtgcccctatgtctgcggtccccgacagtcagggtctcccaccagacagctcgctcttgcccttcgaggcctagatggttgtggggagcagagcctagagggcaggtgacagaggagggagggtccaaaagcccagctggctcctcccttcccggccccagcctacagctgccaccttgtccagccagggctgggctcgctgtgccagaggcagagccacggccagccccagcggcggctaacgcccccgcccctccttagctcctgcagccgaggcccagcccccacctcttggtccctacaccccctgcttgctgccttctctggtcggaagaacctccgccgtagcccagactctttgggcttgttgacgcggttgcccagcaaccgggagtcctgcccctccctcgaccaggtggggcgggtcgtggcggggggcagggtcccctccggagggccctgggttagagtctgggcgtggacgcgcccctcataggggtcattggggcatagaggcatagagccggcttctccagcttgggtgagcgtcctttccaggcggccgcagacgcgccatcctaggggttgtgggcccaggttcctggctt

SEQ ID NO: 27157 - DNA, 2300 bp, Homo sapien
acagttgctggaccccaaacacacagagaacacctcccttcttgcagaactgcaaacgtgtggagaaacagtaggggtgaggaatgtgagccaggtaggccctgggagtacctgctgcaaattatggactagggggtgtcaaggttttccagtcctataaaaagaggttacaagccccttcttgcagaacagaagaatattcccctactccctgcgtgactcccccacaaacgccaagagccagaaagtgccccacccatgtgtccccctggcctggacccagggaagctgagaggatggcccaggtccctgtctcaaaggactcacccctatgggagcacaaaggctgcccagagaaagcggctgctgggtgagcatccctaagcagtcactgctgcttctggagaccagggaccttcctcaagccaagctggtgctgcagcccaggcaggaccccaaaggcacctgcaggaggggagggaacagcaccaggaagggccttcctggggagcagcaaaagcttgagggctggaaggatgggcctagctgtgggatggggtgccggctctgggacatagggctgaatgtcaaaatttaccctcttactgagaggccagggcagtctcccaaaaacaatgggaacacccaacagcctcctgccaaaaggccagaagctcagctaagaccctgctcctcagctgggacagccctactcccaaactcacaggttccaaactcccagcaaggtgtcccagcggcaggtctgtgaatatagagagagtacagacatctcgtggaagtaatagatacgtaacagattggactttttgcactaatttttgcctaatttaaactgtggaataagcacgtgaattaggaaattctagaacacacttatgagtgcctgaagaaattataaaatgattaagtagttaattgagaattagttacaaaacaaaggaatgcacaaatagatttccaaaatctagtatctaggacccaagatcccaagacacagtgttcagcaaaacccagctctagtcctggggacaccaggacccctgagaccccaaacttgccctagaagaggtgaggggtcctgagttctgccccattatccctttctgtgaacaccagtggctggggccagagccccctggccatcagaagggaatgggccttaaccacaaaggtctcctcatagccgagggccccacccacaaaactaaccccaaagacccctcaagccaggaacctgggcccacaacccctaggatggcgcgtctgcggccgcctggaaaggacgctcacccaagctggagaagccggctctatgcctctatgccccaatgacccctatgaggggcgcgtccacgcccagactctaacccagggccctccggaggggaccctgccccccgccacgacccgccccacctggtcgagggaggggcaggactcccggttgctgggcaaccgcgtcaacaagcccaaagagtctgggctacggcggaggttcttccgaccagagaaggcagcaagcagggggtgtagggaccaagaggtgggggctgggcctcggctgcaggagctaaggaggggcgggggcgttagccgccgctggggctggccgtggctctgcctctggcacagcgagcccagccctggctggacaaggtggcagctgtaggctggggccgggaagggaggagccagctgggcttttggaccctccctcctctgtcacctgccctctaggctctgctccccacaaccatctaggcctcgaagggcaagagcgagctgtctggtgggagaccctgactgtcggggaccgcagacataggggcacaacgaaggtcccccaggcgtcacctagagctctccatgtggcagggcctgagatcaacccagtggggtctcagcattttctcaattcaaacagaacagtccatcgggtaggaaagatatttcctacaactgagttgatcagaaagtcctagttgactgcaggactgagcaggatcagccgatggcagagctgctggggacgtgcgcttgggagagggagagcgcctgggcaaagctcagaggctgggggtgcggaactcaaaaccgactgcggagagcccagcgggcgggagctggggcgcacgttggggccctgccgaggggcgggcagggcccggtgccagccccggcaccgacgggacgccctcctccctccgcagggcgggaggatgccgccgccagcgaaggagggcgggcgcaagggcccgcgggagcgaagcgggaagagc

SEQ ID NO: 27158 - DNA, 2300 bp, Homo sapien
gggcccacccacagtgtaccctcaggctggcgacatcagggtactcagggcgactgcccaggctcctgtcctaaccaatagacttgacagagcaactctcaggaaagaaggccgaccatgagtgtgcggtgacatccttgcaaccccacaggcagcgggcacagtctcgatgggcagacacatctccccagactgaaaacacacagtgaccaggcacggtgggtcatggctataacctgagcactttgggaggctgaggtagaggctgaagctcaggagatcgagaccagcctgggcaacatggtgaaaccccgtctctacaaaaaaaaacacaaaaattagccaggcatggtggcacatgcctgtagtcccagctacttgagaggctgaggtgggaggatcacctgagcccagggaggtcagggctgcagtgagccatgatagtgccactgcaccccagcctgggtgacagggcaagaccctgtctcaaaaaagaagaaaggaaagaaaacacagaccctctgacccaacacgtctccgctgaggagcggctctgagactggcgactgctcgtgtcagctgtggcgttgcctgcaaagcaggtccagatgcggccgagctgcacacacacgggttggataagccagggtgcgtccagcaaggaagaaaagcagggagaagggaaggacttaaagaccaacccagagcagagtgtgatgctcaccacctctgcaggacggcgggagagttacgtgtcagcgtgagaacgtcttctctgcagcctttcacagcttgcctaggctgagttcctcttttagcaaaagacaaaaaaagaaggtgggttgcctatggccaacaagttctgcttccacatgagggcatacagaccccccagatgcccacactcagccaaggacatgtagacccactcagatacaacgcagagctcacccacagagacccccatacaggcagacacaggcccacacacgtacatgtcctaactggcacacacacacaggaacacaccatgtacacacacagggtggggcaggagacccaccaagacacccatgttcacagataagggtgcccaggcccacagtgactcccggacagaggcacagatgccttcagtgccctctgcccgaagacctgggcacacccagaggcccctgcatggagtcccttcctgacacacaggcgcacacgtgcctcagccgcccactgaggagtctgcctgggtaagtgaatgctgaggagaccctgggacagccgactgcaggcgctactgcagctcaggggaaggtggggcctgccttccgggctccacgtcagcaagggggatccgcctccctccctcaccagcatcagcactgacaccaggctgggaacctcgcagccggggctgaggcagccagcagggcaggtcttgaaactcctgaaacctcagctggaggtctgtcagtgaggaccacacctcgccctccatccctgcgactgcctgtactggccaaaaccaggaacacaccaaggctaccaacttctggactcgaagcactggacaggtcagtggagagaagagtagctggaccagcagggtctgcagcatctctcgggagggtgtgagggagggtgcagactccaagacccctgagggaaggaccttcagattcaagggagccagagatgagcttgggaggtgtgtttccaaagggaccgcttgattctacgcagcccgtgcatctgcgggttgctggggcagggacggatccacatctcttcccaggagggtggccagcagctgctctctgcgggaggagggaactgatctgctgaagtctcaccaggaagaggcgggaggaggcccccacacaccccaccaggctccctctggccccatgtccttgacctggcaaagtggccgcagtctctgccagagaacctggagtggctgtgccctaacagacggccggatctcaaagtctctggttgtttttctttcctagaatccagcccaaggaggcccccaaccagatacccaactccaaggcacctcccacctgcccagggcgcaaatcgtcaacggtcccagctacaatgcaggccgctgggcacccagagccccttgacagcaggggctccttctccctccccacgatgggtgccaacgtctctcaggacaatggcactggccacaatgccaccttctccgagccactgccgttcctctatgtgctcctgcccgccgtgtactccgggatctgtgctgtggggctgactggcaacacggccgtcat

SEQ ID NO: 27159 - DNA, 2300 bp, Homo sapien
cacacatacaggcatgtacatttgtacacagacatgcacacagaaatgtgcatgcataggcccacacagcagacaggcacatgcacacaggtgtgtacacagagatgcacacacacgtacacacagatgtgtacgcagagaggcacgcacattcacacacagatgtgtacacagagaggcacacgcacatacacacacagatgtgtacacagagaggcacgcgcacatgcacacacgtgtacacagagaggcacgcgcacatgcacacagatgtgtacacagagaggcacgcgcacacgtacacacagatgtgtacacagatgcacgcacacacgtacacacagatgtgtacacagaggcacgcacacgcacacacagatgtgtacacagagaggtacgcacacgtacacacagatgtgtacacagagaggcacgcacacatgcacacacagatgtgtacacagagaggcacgcacacacacacacagatgtgtacacagaggcacgcacacacgcacacagatgtgtacacagaggcacgtgcacatgcacacacatgtacacagagaggcacgcgcacatgcacacagatgtgtacacagagatgcacacatgcacacagaaatgggcatgcacatgcacacagatgtacacacatggatgttcacacacacacacatgcacgcaaacacagcccctctgcagctctgctgtctgcctcaggtgggggccatgctgggtgaaactgtcatttctccctgtctataagctcctgccttgaggctatgaagacaagaggatgtgaactgctctctggaggcagaagacgtgggttcaaatcttggctcttctctgggcctcaggtttctggtctgtagactaggatattggagttttactcacgttactggagggatgagggccctaaatcaggagctgggaactggtgcatggtaagttgtgggagtggaggactgtggagaaggacaggccttccctaggtgaggtgctactactgtggaaagtggtctagtttcccctctgcccctatgggcacccagtggaagaagctggtggtcagtgatgggcggactagtcctgaggtcctaagactggagtgtctggatgatcagtgtgacctctcagagaagaggtgcacacctaggggtctggctaagggaaggggagggtgtcagtacaggaactgcagggactaggtcaggctgggtacacagaggcaaggacagggtcgtgaggctggtgcttgatgagaaaagctcagtctagacatctgggcctaggccccaagaagagtggggatcaggccttcatgggtggtgttggagagccctgaacaggatgtgacttggtcttccctgtggagaactcaggagactagctggaccattcaggtatttaaggagcaatgtcagtgtgccaggaactctcggggagcttatatcccagtggaagagacggctcacctctttgagctttctggcaaagtcaagggtgctgagtgctgtgtcagggccatccaaaggtcctgagatgagtgggacttggaggaggtcagtcaggaccagcctcgttgtgggtgttgaaacacaggagtatctgtgtggaggaggcctggggggctcctggcagggagcggggcgcagaggagcacgaggtcctcaaggttctcagtggtggcatcaggagtgcccaggtcaacttgtcctgggcagaggatgggttcagaagagaacatcggctgtgtatcctttgtatcttccagaggtacacagccctccccagccgccctccaacctcaggacaaagtgtgggtgtgcgtttggctcctgcgttcccctgtctcctttgtccacaggatgctcttggctgccaggaggttcccactcctcatctttccaggcccgggtcagaggcactgaagtcagaaacagaggtggcaattccaacctaaaagcacaaattacagacaagtctccctcctgcaggtttccatttgcatctggcttttgtgtggcactagaagagatcagctttttgcaagcatggggctgatgaacgcatttgcacaaagggagacggcggagtagcaggagtttgcaagctgcttcattaacttggagccagtggaatgtctgggatcgtctgtgatttggaaaccggtggcagaatgttcccgcgtttctggtcctcatcagtcaggtaggttgaggggagcccaagacgagcttgtggctgcagcgagggtgcaggatgggtacacatctcggtggtccagctgg

SEQ ID NO: 27160 - DNA, 2300 bp, Homo sapien
caggcacattctgaatgctcctcctggcagcgccacagagggtctgggggcccattcccgacccccggagcgccacacctcaggaggcctgtgattgttcaaaaggggaagtgagaaatgccgaaagacttacgttttcacaaatacaatttctattacctgaaaaaactgttgtgccccacgaagcccgtgttgcgcaggttcatctctcctgctgccacctccgcttcgctgtggtttcttaggtgtgactgttgcatatctgaattaagtcgctttcatgaaaccttgggtgtcgttgggaaataaggctgattcagcaacggccctccctttgattctgtattcatcatggaacaatggcccgcaagcctgcccggagcctgcagcctgccgataagagtttaatagaatttctgaatgccgaaggtttggggtgtaagacatcctagcactcacagcatgtccagaggagacagaaacggcttttcaggagtgctctcagctgaatgtgtccttttatactaatggatataagtttatgacagaaattaaaaatggtaggcagtcattgtggaaacctcgaactgttctcatttgactaattaatatttcatcctcagtttgaccagtgcaggcttgcatttatgtccttgtgctcaatctgaacaattgctctgtgtgcattttgtgttttatttgttgaggataatgtgtgcgtataagaatctaagatacttgcctttggggtgaagcttttggtttgtatgtaacgtgtaaagcacaaactgtatgttaaaaataagccactaagattttcaaaacatgctctcttagagaaagctgtgttcagttctgcctcagtcacacttttggtggcccgagccctttagcgctaattaagttggggtattgtgctcttgcataatttaccaagaaatgatgtttactgtctgttgaaatctctgcactgaacttctgagatgtgagttttctgcttctccagctgcccttggacggcggcatctttgcaggcgtctcacattgagttttcacccttgtgtttcacagtttcatttctaacatcctgattatgataatggacaatcgtttgcctgatttatcagtacaagaaggagatttgggccgcaaacaagaatactctggctcttgagttctcttactgaagaaattcccactttatccctgaatgtgggggaaaatatcacaaactggcagatgagaaggcagacagtcaggctgcatagagagtgggtgagcacttctattgtgtgtgttatggatttttctcttcttgattttcactggatagctcctttcaggccgtttataaaagaatcaggaaaagagcagaaaacttgggcagtgtgcttcgctctggttgcaataaacttagtctttttgtgggggggttcccatgcccaggaatccctgagttctctttgggaaggtttttattattgtaaaaattaaagtgaaaagggaaagtgtgagaacagaaaaatgtcttttcctgatctattctttgtgtgcatgactctattttttggtctgtggctatagttaccttttatgccgttaaaaaatacatatccatttaagtcaggggtacttgaatatgcagatgagccgatatgtaatattcctggttcatttgagtaataaattctgcagcccgctctttatgatggtagatcatattcctcaccaccaataaatattgtaaagtactttcgctgtagccatgctaacccggggcatctgtcattccggttgctgctattaggaattattggactgaaccactggcagagaaagcagaggggggtgaatgtggtggttgtgatgctctctgcccttttgtgtgttttgctttttaaaaaaactcaatcatgctgcacattgagtatgaatcagtgtggacaaacataggcaccttctgttggccgaggctcagagcaggacacaggactccaccggactgggacacctctcacccccaattcagcagatccatctttctgatgctatactgtaaatttatttcacctcagagagtaaacagatatattggagccccaagggttcatgggtagcgtatttacaaaggagcctcctccgccagcccgtgccaccgctgctaatgagagcagtcattaagtaaatgagacgtcgcctttagctggcttaggagttcgcacactaaggggagaagatatttaattgaaacccgcacgcaggcttccccacatgtgaccgctgtacgggaggcagctgcc

SEQ ID NO: 27161 - DNA, 2300 bp, Homo sapien
gtgaacactgtgtgcgtaggagagaggcaggacagacagagacacggggctggtgtgtgtgtgtgcagttgtagtgtgttttggcaggtgtgtctgcatgtatatgagagagacagacaaggctgtgtctctgtgtgtctgtaagtggggaagggaggatcttagactggccctctgttctgcctggccctctgggagacctgcctgggggcatgggtgagaggtctgcgttcccctgaggtactcacaggcagatgctgaggaaacacctcaggttgagcttcaggtgattgaggaccagatggagcctctgaagacggggtgcccggggaggccaagaggggaaggaggaaagcagacgagtcccccacttccttgtggggtctaccaggactgccatgttggagctcctagcccttggcaaaagtgcatgaagcaggtgctttggcccctgggtcccggagggaggggtctgtgcccctgagagccctggcagatctgtagagacctggggtcagatgaggcccaaggtccactccccccaccatccccaccactcacccagcactccccaagcttctgcagtggggaagggtctgagatggatttcagaagcaaagccagagagggtcctcaaccccagctcccttggggggctctggagtgagtgcgctgtcccgtggaatcaacatagtcctagatcccaggtagaaaagacacacattttcctgctttcttatcaagaagggcgtctggggttcagctgtcaacctgggcttggactttcccctccgaagtaggtggatggcagggcccattcctaccactgtgggacgtgctggcccaggtgtccttgctgacaaccctacggggcctgcatgtggtgagcacctaccatatcttagtttcgttttgtttttgttttgagagagtctcactctgttgcccaggctggagtgcaggggcacgatcttgatttactgcaatctcctcctccttggttcaaggaatagctgggactacaggtgtgcaccaccacgcccagctcatttttgtatttttagtagagacagggtttcgccatgttgaccaggctggtcttgaactcgtgacctcaggtgatccgcccgcctcggcctcccaaagtcctgggattacaggcatgagccaccgagcccattcttatttactgattttcaattatgaaacaattattattatttttttaaaatctgacttgctgcttaagctccattgtatacaatgcaggtttatctgatttgggaaagtaaacgtgatgggagaggaacattaagaaaaagtatcaaagtaattcttagtttaaaaaatacatcagtggcccatgacctgcctcctaaaatatattcaccgtgatttctggattcaggcagaagggttgacagaaaggtccataccaaatccccacttctggagtttcatgtttccccttggctcccgtataaagagtgagtggtaggtcaggtggaggggtggtgggtgtgttggggactggagacctggagtcttcccacgtgctctctggcccccacgttgattttgattttgtgcaggaaggagccccgtcaagtcccattttggatccaaccccatcggcagcgccactgcctcctccaagggcagctacagcagctaccagggaatcatcgcaacttctctcctgaacttgggtcaaattgctgaagagaccctggtggaagaggacttgggccaggcggccaagccaggtcctggcattgtgcacctgcttcaggaggctgcagagggagctgccagcgaggagggtgaaaagggcctcttcatccagccagaggatgccgaggaggtcgtcgaagtcaccaccgagcgctcccaggacctgtgtccccagtccctggaggatgcagccagtgaggagtccagcaagcagaaaggcatcctgagtcacgaagaggaggacgaggaggaggaggaggaggaagaggaggaggaggaggatgaagaagaggaagaggaagaggaggaggaagaggaagaggaggaggaggaagaggaagaggaggaggaagaggaagaggaagaggaggaggaggaggcagctcctgatgtgatctttcaggaagacacctctcacacctctgcccagaaggcccctgagctccggggcccagaatcacccagtcccaagcctgagtactctgttattgtggaggtccgctcggatgatgacaaggacgaggacacccactcccggaagtcaacagtcactgacgagtcggaga

SEQ ID NO: 27162 - DNA, 2300 bp, Homo sapien
tacagctgtcccagcacggactgagtagccaggttaaacattaaaagctgattgagccaatgcccttatacaaaggttggaatgtaacaaagagcccaccaagagttttgcctaggctcttcctgggccttgaagcatgacaagataacgaaggaactcttaacaggaccctttttaggattaaacaagttgtattagggatctgaagaaactccccaggcctccacaaacaagtttatgggggtctaaaggaattccccatatcattatgatttagcaggagacaagataagggtaatcaccccagcacctagacccatttagattaagtaaacttactgaggctccagaagagggtcttcaggactcaaccttagtcatagattaaaagaagttaatcacttatgtctgtagatgaatgcacacttacatgtagacatacagcttagaaggtatacgagctttggaaaactttgtaattttgagttggtatggtgataatttccaggccttctccttgtaaccggttacagaaataaaacctctcttactctccagctcatttgcatcttgttattgggccaggagaagtagtagcccgaccctcagttgggtccaggaacaaagggagtgtctgaagacagcagtgatgtgatcacctgttttaggaggaccactcgccagagcccaggggaatggtgggaggggtggggagaggtgaggggagctgggacagggcaaggagggatgtatggaggacgtgtcccctggcagtaggaagagagtcaaggatgactccagggcttctgtaatttgaaacagtcacaaataaccacaagctctcaggtggaaggacactgagagccccatgaaggtcatgaggtggtgggccacctcaggtccgtggatccaggaccatggatcaacaagagaagtgaggtctccctgggaccacataacgtggtgaaggcaccggcctttggttttcaaactctgctcctaagtggagctccagggtctggggaggaatgccgagttaggagggaggcgggaaccggagacccaggcccactcgtccgccccagcgacgctggcacttgcacatatgaggcggcttgcatggctgtgcttgaagaaagggttctgcagctacagcctatctgcaaagccccacgcgaagtttgggcaatgggctgtgtgaacccagaaaatgggagacaggtctcagttaatttacaaagtttattttgccaagggtgaggacgcgcccgtgacacagcctcaggaagtcctgacatgtgcccaaggtggtcggggcacagcttggttttatacatttagggagacaggatacatccatcgatacatgtaagaagcacatcggttcggtctggaaagacgggacaacttgaagcaaaggcaggaagactccaagcggggagggagcgtccaggccacagataggtgagacaccaacggttaaattcttttgagtttctcatttgccttttcaaaggaggcaaatcagatatgtatctatctaagtgagcagaggagtgactttgaatggaatgggaagcaggcctgccctaagcagtttcctgctggagttttccttagtgatcttgggggcccaggatatcttcctttcacagctgatttcacaaagccggctgggtaggagggccccagggccgggtggccgtccgcgtggcagggcgggggtcccagggcggctgtgcttggtgctgggaggccgcccgagggcagcgccggccccgagtcagcagccgcagggcaccctggagatgcggaacgcccccagccgtgggtcagcaaaggcgtctcaggtgacccttagggagggcttctgaggcagcccgtgcggggtccgtcctggctgagcactgcgcggacggcgcgcccgcgagactcggacccggcctagggctcagcgagctctcagcggggcgggcggacgcaggcagcccaggggagtggggcccgccctgcgccgccatcacccctttaagtgccaggcccgcggcgcatgcgcagtcaggccgttgtgcgcaggcgcagaggcggcggcggcggcggcggcggcggatgtttacggcggccgaggttggagcggcgctgctcggccgcggacacacgagggacgcgcccgaggagctgcaggtggcagcccaggcggtccgaacccgtcggccggccgagcctggaggtagagccgccgccgccgccgccgcccctcggtccggcctgcggcgagcgggtggtgtgtcccctcggcc

SEQ ID NO: 27163 - DNA, 2300 bp, Homo sapien
cctcacaaactggctatgtgatcatgaacaaattaaccggccagctccaatttgcttcttaatgttgtgaagtgtaaatgaggccatgactggcaggtggtacctggaaaaaggtgcttgtttttactaaaaagctgtctgaactttcaaattaaggcagagttcaaaataagtgatagttacttagtggaaaatgaaacctatccaacatacagtttgaggttaccttctagagatgtggcattgagacaatgttggaacattatatacaggcttctgggtgaagaggtggctttgactgaggacggtatgcgattttccagctcttttcctaaatagacccttaagcatccaaacacatgattccgcttttaaccactgacccaaattttaagatgactgtggtaggctagggtgcagcctcagaactgagtggcttatccaggattaaagttgacctcattaggacttaattccatctaagtctaagtcagctggctgtggaccgtaatctaacaagggctccgaaacaattcaaaaaattcaaaaagggtgtgaaaatttaatgactggaccatcctattgatttgcaaaacctaatattcagctctaaaatcttgagtgtgaagattgagtgttccaccataaaaatagaagagaatttgtgttaagctatacccttcacactttttgttcacttgtaagaaactatgtgattattttcattcctgggaaaacctcccaccgctgtctccagttgtgtacgtgggtgtgtatgaaatccgccccaggccccttgtcaccccacagtatttctttacgatcctcattctactgttagaaatccagaggaatgtgaggaggaaagcaagtataaacttcatcataattataacaagttgttaaaaaggttgtgttcatttcagaaaatgtcttcatgaggtctggtggtctttttccctgacaatttgtatctggtgttttgtaaagcattaccattttatatgaagttaaagcagttactttgaaaaagttacatggggtaagtataaaattggaaaggatatttttgtagttttaagaagagtaagacttctccgcgtgaaaaagtgttttcttgtgaattagctgaagctaccctgtattttaatagttaggctcagaggtgacacatgctgtgctttttcttcttgaaggcaggttgggagaaggtaagacaagtagttgttatttttaaagagctgggaaagctgcgtatcatgcaattgaggaggggctgtaggaagttctggtagcagcccctcctacacttaaactttagccaggaagctgattttgcatttgttagaaaaaggtatttgtcacagtacgttcaatttgggaagagtgttttcttgctgtttttgtctaaaatttgaacatcaaaatatccaaatcaacaggtcagatggattgcttgacttgggtgggtacttttgtgtatgttggggatatagaattcccagatgtaatataggacaccacctaaagttttttttcttttctcttttttttttttttttttttgagacagagtcttgctctgttccgcaagctggagtgcagtggtacgagctctgatcactgcaacctctgcctcccgggttcaagtgattcttctccctcagcctcgccagtagctgggattacaggcatccaccagcatgcctggctaatttttgtattttttagtagagacggggtttcaccatgttggccaggctgttcttgaactcctgacctcaggtgatccaactgcctcggcctcccaaagtgctgggattacagtcatgacccaccgcacccggcctaaatttgaatttcaaataaacgtcaaataacttttagtattgttgtttaccttaatttccaattgaactgggattttttttccttctaaatctggcatctctgggtggggcaggggatgaggtgggtgttgacaaaagataatctattattttcagaattcagaatttcaaattggtatctgtttagaacttctattgttctgctcttacctttaacataaatcgctctttttaaacatttttaattatagtattgcctaagtgtaatcttgaacatgggcggtgctgtgagtgctggtgaagacaatgatgagctgatagataatttgaaagaagcacagtatatccggactgagctggtagagcaggctttcagagctatcgatcgtgcagactattatcttgaagaatttaaagaaaatgcttataaagacttggcatggaagcatg

SEQ ID NO: 27164 - DNA, 2300 bp, Homo sapien
gttcgtctggccgatgaagaatcatgacaatgtggtgggcagtttggatgcttgttttgaggagatggctttgaagagagtgttagatgatcaacagtaatgtgatgcttttagagtttctgaagtgacccattgagttacttgcaacttttcttttcctgggccagtttcctatactagtaaattcatgttggtaaagacagtggagtagaaaactctgtgagtgtagacatacgtgatatggggtcatgtgagtgtagatgcgtggtgtggggtgtgtaagtttagacctgcacaatatggggtcaaagtgagtgtagacgtgtgtggtgtggggtcgtgagagtgcggacatgcgcaatgtggggtcatgtgtggacatttgcagtgtggggtaatgtgtgtgtgggtgtgcgcggtgtggggtcatgtgaatgtgggcacgcgtggtgtggggtcatgggtgctggcgtgtggggggtgtgggcgtgcatcgtgtggggtcgtgtgagtgcgggcatgcatggtgtgtggtgtgagtgtggtcctgcacggtgtggggtcccgtgagtgagggcgtgcacggtgtggggtcctgtgagtgcgggtgtgcacggtgtggggtcgtaagttcaggcgtgcacggtatggggttgtgtgagtgcatggcgtggggtcttgtgagtgcgggcgtgcacggtgtggggtcttgagttcaggcgtgcacggtatggggtcgtgtgagtgcatggtgtggggtcgtcagtgcgggcatgcacgttgtggggtcgtgtgggtgtgcacggtgtggggtcgtgagtgcgggcgtgcgtggtgcggggtcatgtgagtgcacggtgtggggtcgtgtgagtgtgggcacgtgtgatgtggggtcatgtgagtgcggatgtgcacagtgtgggatcgtgtgagtgcacagtgggttgtgtggacgtgcacggtgtggcgtcgtgagttcaggcatgcagggtgtggggtcgtgtgaatgcgggcctgcacggtgtggggtgagtgtgggcacacgtgatgtgtcatgtgactgcggatgtgcacagtgtgaggtcgtgtgaatgcgggcgtgcatggtgtgcagtcgtgagttccggcgtgcacgatgtggggtcttgtgagtgcgggcgtgcatggtgtgggatcgtgtgagtgaagatatgtgtggtgtggggtggacgggttagctttcagattgaatggaagcaggaacaagtggaaagctgttgaaattttccaggcgagagataaagataaaaactaagacactggctgctacagtggagaagattcagtgatacataaaatggtacagtccttctgaggaagggcacgtgaggtgttcgttgtgatacgtacaatggtacagtccttctgaggaagggcacgtgaggtgttcgttgtgatacgtacaatggtacagtccttctgaggaagggcacgtgaggtgttcgttgtgatacgtacaatggtacagtccttctgaggaagggcatgtgaggtgttcgttgtgatacgtacaatggtacagtccttctgaggaagggcacgtgaggtgttcgttgtgatacgtacaatggtacagtccttctgaggaagggcatgtgaggtgttcgttgtgatacgtacaatggtacagtccttctgaggaagggcatgtgaggtgttcgttgtgatacgtacaatggtacagtccttctgaggaagggcatgtgaggtgttcgttgtgatacgtacaatggtacagtccttctgaggaagggcatgtgaggtgttcgttgtgatacgtacaatggtacagtccttctgaggaagggcatgtgaggtgttcgttgtgatacgtacaatggtacagtccttctgaggaagggcatgtgaggtgttcgttgtgagacgtacaatggtacagtccttctgaggaagggcatgtgaggtgttcgttgtgagacgtacaatggtacagtccttctgaggaagggcatgtgaggtgttcgttgtgagacgtacaatggtacagtccttctgaggaagggcatgtgaggtgttcgttgtgagacgtacaatggtacagtccttctgaggaagggcatgtgaggtgttcgttgtctgtggtagacctgggtctgtgggaggctcaggattctggtccggactggagtagaacctggggagctattggctggcctctgttatttaaagccacagaatggatgtaaaaccaaggactagcagtcatactgagacggtgaaatggtggaaattggaac

SEQ ID NO: 27165 - DNA, 2300 bp, Homo sapien
aggagtggaatggaatgcaatggaatggaattgaatggtgtggagtggagtggagtggggtggggtggtgtggagtggaatggaatggaatggtatggaatggacacgaatggaatggactggaatggaatagaatcaaatgaaatggaatcaaattgaattaattgaatagaatggattcgaaaggaatggaatcgaatggcatcgaatggaattgaatggaatgtggagaagtggagtggagtggaatggagtggaatggaatttggtggaatgcaattgaatggagtggattggagtggggtggaatggagtggtatggaatggaatgggaatgaatggaattgattggagtggagtggagtggattggagtggaatgcaaaggaatggaatggagtggagtggagtggagtaaactgtagtggagtggagtagaaaggaatggaataaaatggactagaatgaaatggacacgaatagaatggacttaagtggaatgtaatcgaatggaatggaatagaaaggaatggaaattaatggaatggatttgaaaggaatgggaacgaatggaatctaatggaattaaatggaatgcagtgaagtggcatagagtggctgcaatgtcatggaatggaatggaatggaatgggaatgaattgaattgaatggagtggagtggaatgtagtggaatggaatggggtggaatggaattgaattgaatgtagtggagtggaatgcaatggaatggaatggaaggacatggattggattggagtgtagtggattgtagtggagtggagtggagaagaatggagtggagttgagtggagtggaatggaatggtgtcgagtggaatggaatggaaaagattggagtggaatggagtggaatggattggaatgaaattttttggaatgcaattgaatcgagtggattgcagtgcagtcgaatggagtggaatggaatggaatgggaatgaatggaattgaatgtagtggagtggagtggaatgcaaaggaatggaatgtagtggagtggagtggagaggagtaaactgtagtgcagtggtgaggaatggagaggaatggaatgaaatggaatggaatggaatggaatggaatggaatggaatggaatggaatggagagcaattgaatcaaatgcaatgtgatggaaagcaatgcagtggagtggagaggagtggagtggagtgcagtagaatggagtggagtggaatagaatggaatggaatagaatggaatggaatggaagagagtggaatggaatggacttgaattgattggactcaaatggatttgaatggaatggaatggaatcgaatcgaatgggatggaattgaaaggtatggaatcgaatggaattgagttggaatggaatggaattgaaaggcatcaaatgtaatcgaatggaatggaatcgaatggcctcgaatggaagcaaatggaatgtgatgaagtggagtggagagttgtggaatggagtgtgatggaatgggttagaatggaattgaatatactggaatggagtgtagtggaatggagtgggatggaatggaatgggaaggaatggaattgaacggagtgcagtggagtgcagtggagtggagttgaaggcaatgaaatggaatagaatggggtagagtggagtagagcagagtggactggcgtggaatggagtgaagtggagtagcgtggagtggaattgagtggagaggagtcgagtggagtggaatggaattgaatgaaatggaattgagtggaatggaatggaatataatggaatggaatgcaatggaatgggaaggaatggaattgaacggaatggagtggagtggaatggaatggaatggatggaatggaattcaatggagtggagtggagtgaagtgcattggagtgcaattgaatgcaatggattgtagtggagtacagttgagaggagtgtattggaatgcccaggactggaatataatggagtggagtggagtggagtggaatggagtcgagtatagagtcgtggagtggagtgtaatggaatggagtggagtgggatggaaatgactcaagtggagtggagtggagtggaatggagtggaatcgaatggaatggaaaggaggggcgtggaatagagtggagtggagtggagtagaatggaatagagtggaatggaatggaatggaggggagtggagtggaggggaatgtagtggagtggagtggtgtggagttgagtggagtggagaagaatggagttgaatggagcagaatggaatggaatg

SEQ ID NO: 27166 - DNA, 2300 bp, Homo sapien
aatagaatgaactggaatggaatggaatggatttgaatggaatggaatggactcgaatggaaaggaatgctgtcgaatggaatggaatggaatggaatcaactggagtgcaatggaatatgaaacggaatgtaatggactcgagtggaatgggctggaaagggatggactcgaatggaatggaatggaatggacttgaaaggaatggaatggaattgaatggaatggaaaggaatggaatggaatagactaaaatggaatggaaatgaatgcaatggaatagactaaaatggaatggaatggaatggactcaaatggaatggaatggaaaggaatggaatggaaggcaatggaagtgaatggaatggaaaagactcgaatggaatggaacagacaggacccgaatgaaatggaatggactgtaatggaatggaatggacttgaatggaacagaatggaatggaatggaatggactcaaatggaatggaattgaatgtactcgtatggaatggaatggactcaaatggaatggaatggagtttaatgaaatggattctaatggaatggagtccaatggaatggaatggaaaggaatggaatcgaatggaatagaatggaatgtactcgactggactggaatgcaatggaatgcactcaaatggaatggaatggaatggtctcgaatggaatggaatggaattgaatggtctcgaaagggatggaatggaatgcaatggagtggaatcgaatggaatggaatggatttgactcgaatagaattgaagggtgtggacccaaatggaatggaatggaatggaatgtactcgagtagtacggaatgaaaaggtatggactcgaaaggaatggaattgaatggaatggactcaaatggaatggaatggaagggaatggaatggaatggattcaaatggaatgtattggtttggaatagacacgaatgaaatggaatggaatggacccaaatggaatagaatggaatggatggaatggactataatggaatggattggactcgaatggaatgcaattgaaagggatggacttgaagggaatataatgaaatggaatggactcgaatggaatggaaatgcgtggactcaaatggaatagcatgcagtggacacgaatggaatgcagtggaatggaatggactcgtatggaatagagtggcatggactgaatggaatggaatttaattgaatggactcaaaaggaatggaatggagggacttgaatggaatgtaacagaatgaaaagggctccaatgtaatataatggaaaggaatggactcgatggagaagaatagagtggaatggaatgcaatcgaatggaatgaaatggaattgaatcgaatggaatagaaagtaatggacacgaatagaaaggaatgaaatggaagggacttgaatgcaatgcagtggagtggactcgaaaggaatggaaaggaatttaatgtacttgaatcgaatggaatataatgttatggaatggactcgtatgtaatggaatgccatggacctgaatggaatagaatggaatggaaaggaatggactagaatggaatagaatgaatggactcgaatagaaaggaatgaaatcgaatggactcgaatgcaatggagtggagtggactagaatggaatggaaaggaatttaatgtactcgaatcgaatggtatgtaatgttatggaatgtactcgtatgtaatggaaagaaatggacctgaatggaatggaatggaatggaaaggcatggactcgaatggaatagaatgaagtggagccgaatggcatggaatggaatggaatgcactcgaatggaataaaagggaatggacacgaatggaatggtatggaatgcaatggaatgcaatgcaatgaaatgatatggattggaatggacaataatagaatagaatgggatggaatggaatcacttcaaaaagaatggaatggaatagactccaacggaatggaaaggccaggaattgaatggaatggaatggaacggactcgaatgtaacagaatggaacttaaagtaatggactccaatggactgcaatggaatgatctcgaatggaatagaatggaatggaatggactcaaattgaatggaatggaatggactctaatggtatgaaatgcacacgaatggaatgaaatggaatggaattaactggaatggaatacaatggaattttaatggaaaggaaactaatggaatggaatggaatggaattgaatggaatagactcgaatggaatggaatgtaatggaa

SEQ ID NO: 27167 - DNA, 2300 bp, Homo sapien
tggaaaggaatttaatgtactcgaatcgaatggtatgtaatgttatggaatgtactcgtatgtaatggaaagaaatggacctgaatggaatggaatggaatggaaaggcatggactcgaatggaatagaatgaagtggagccgaatggcatggaatggaatggaatgcactcgaatggaataaaagggaatggacacgaatggaatggtatggaatgcaatggaatgcaatgcaatgaaatgatatggattggaatggacaataatagaatagaatgggatggaatggaatcacttcaaaaagaatggaatggaatagactccaacggaatggaaaggccaggaattgaatggaatggaatggaacggactcgaatgtaacagaatggaacttaaagtaatggactccaatggactgcaatggaatgatctcgaatggaatagaatggaatggaatggactcaaattgaatggaatggaatggactctaatggtatgaaatgcacacgaatggaatgaaatggaatggaattaactggaatggaatacaatggaattttaatggaaaggaaactaatggaatggaatggaatggaattgaatggaatagactcgaatggaatggaatgtaatggaacagacttgaatggaatagaatggaatggactcgaattgaatggaatggaattgaatggactcgaaaggattcggctgtaatacaatggaatgcaatccaatggaatggaatggaatggaatggaacggactcaaatggaatagaatggaatggactcgaattgaatggaatggaattgaatggactcgaaaggattcggatgtaatacaatggaatgcaatccagtggaatggaatggaatggactcgaatggaaaggattgcaatggaatggactcgaaggaatggaatggaattgattcgaatgggtttgaagggaatggacccgaatggaatggaatggactggaattcaatgcaatggaatggattgggctcaaatggaatggaatggaaaagaatggaatggaatagaatggactggagtggaatgggtttgtatggaatggaatggaacagaatggactcaaacagaataccatggaatggaatggactcaaatacaatggaatggaatggactcgaaaggaatggaatggactcgaacggaatggagtggaatggactcatatggaatgtaatggccctcaatggacttgaatggaattaaatgttatggaatggaatgaactcgaatggaatgtaacgtaaaggaatgaaatgtgctccaatggaaaggaatggactctaaaggaatggagtggaattgaaagggttggaatagaatggaatggaatggaatggaatggaatggaatggaatggaatggaatgcagtggaatggacacgaatggaatgcagttgaattgaatggacccaaaagtaatggaatggaatgttatggaatgcagtggtctcgaatggaatggaatagaatgaacttgaatggaatggaacggactcgaatgcaattgagtggaatggactggactctaatggaatggcatggaatgcacgtgaatggaatggaatgttatggaaaataaaggactcgaatggaacggaaagaatggaatggaccaaaatggagtgcaatggaatgcaatggactctaatggaatggaatggaatggacccgagtggaatggaatggaatggactgaaatggaatagcatggaatggaatggagtcaaatgaaatggaatggaagagactcaagtagaatggcttagaatggaatggactcgactggaatgaaatggaatggaccagaaatgaatggaatggaatggaatgcaatgaaatggaatggaatggaatggaatggaatggaatggaatggaatgcaatggaatggaatggaatggaatggaatgcaatggaatggaatggaatgcaatggaatggaatggaatggaatgcaatggaatggaatggaatggaatggaatgcaatggaatggaatggaatgcaatggaatggaatggaatggaatgcaacggaatggaatggaatggaatggaatggaatggaatggaatggaatgcaatggaatggaatggaatggaatggaatggaatggaatggaatgcaatggaatggaatggaatggaatggaatggaatggaatgcaatggaatggaatggaatggaatggaatggaatggactccagtggaatggactggaatggaatggaatggaacggaatggacccaaaaggaat

SEQ ID NO: 27168 - DNA, 2300 bp, Homo sapien
tggaatggaatggaatggactcgaattgaagggagtgccctcgaatggaatgaatggaatggaatcaattcgagtggaatggaatacggaatgtaacggaatggactcgggtggaatggactggaatagaatggactggaatggaatggactcaaatggaaaggaacggatggaatgcaatggactcgaatggaatggaatggaatggagggactagagttgaatagaatacaatggattcgcatggaacggaatgccctcgaatggaatggaatggaatggagtcaactcgagtgcaatggaatatgtaatagaatggaatggacactagtggaatgggctggaatggaatggaatagaatggaatggaatgcactcgaatagaatgtaatggaatggactcgaatggaatggaatggacacgaatggaatgcaatggaatagactagaatggaatggaatagaattgactcgactggaatggaatggagtctaatagaatgtaatggaatggaatggaatggaatggactcgaatggaatgcaatggaatggccccgaatggattgcaatggaattgactcgaatggaatggaatggaaaggaatggtatgtagtctaatggagtggaatggaatggactggaatggattcaaatgcaatgtaatggaatttaatggacacgaatggaatggaatggactcgaatggaatggacgcgaatggaatggaatagaatggattcaaaaggaatagaatggattgtaatggtctcgaatggaatggaatggaatggaatggaatggactcgaataaaatagaatggaatagaatggaatggaatggattcgcatggaatgaaatggaatggagtcaaatggaatggagtctaaaggattcgaatgaaatggaatggaattttttttcttttttttattttgttttattttttattatactttaagttttagggtacatgtgctcattgtgcaggttagttacatatgtatacatgtgccatgctggtgcactgcacccagtaactcatcatctagcattaagtatatatcccgatgctattcctcccccctccccccaccccacaacagtccccagagtgtgatattccccttcctgtgtccatgtgatctcattgttcaattcccacctatgagtgagaatatgcggtgtttggttttctgttcttgcgatagtttactgagaatgatgatttccaatttcatccacgtccctacaaaggacatgaactcatcattttttatggctgcatagtattccatggtgtatatgtgccacattttcttgatccagtctatcactgttggacatttgggttggttccaagtctttgctattgtgaataatgccgcaataaacatacgtgtgcatgtgtctttatagcagcatgatttatagtcctttgggtatatacccagtaatgggatggctgggtcaaatggtatttctagttctagatccctgaggaatcgccacactgacttccacaatggttgaactagtttacagtcccaccaacaatgaattgaatggactcgaatggaatggaatgtagccgatttgaatggactcgaatggaaaggaatgtactggaatgatatggactcgaattgaatggaatggattggaatggaatgaaatggactcgaaaggaatggaatggaatggcatgaaatggaatgcaatggaatggaatgaaacggaatgcaatggaatggagtgaaattgaatggactcgaatggaatgcaattgaattgaatggattcaaaaggaatggaatggaatggaatggaatgtactcgaatggaatggaatggaatcaactcgagtgaaatatggaaaggaatggaatggactcgagtggaatgggctggaatggaatggacccgaaaagaatggagtagaatggaatggactcgaatgcaacggacacgaatgcaatgcaatggactcgaatggaatggaaaggaatggatcctaatggaatggaatggaatggacttgaaaggaatggaaatgaatggacccgaatgaaatggaatggaatgtattggaatgtactggaatggaatggaatgaaatggagtggaatggacttgcctggaatagaaaggaatggaacagaacggactcgaagggaatggaaggaaatggactcgaatggaatagaattgaatggaatcgaaaggaattgagtggaatggaatgggctcgaatggaatggaatgtaaggtacaagaatagaatggaatggactagaat

SEQ ID NO: 27169 - DNA, 2300 bp, Homo sapien
cagatgaaatggaatcgaatggaatagaatggaatagaatgtactcgaatggaatggacggactcaaacgcaaatatcactgaggctttccttggagtagctcctgtaattagaatcattggtactctgccctcctgtcagtggtggaacgttctatcggcatatgtggaagcctgttagaaggacgagtttctttgaacacaataaaattttaagttaggaataacttatttgaaagcaattcattgaaagttattgctaagaatttagaagcaaagtcttctggcagtcatttcttcgagacgtacggcagtgtgggagggatatataaagtgaaataggaacttgggctagttaaatggaatagcctccaatgttaatctgtttacctcttaactgaatgaaaaatcctatagttgtaagaaaagaaaatatatacaatcctcacacattaccttctcatcagcataattaatctacattgaagatgagtgtggcaaagcagagactctatatacagagaaaaacatagggaaatgcaaagacactgggagaaaaaaagtgaaggacagtagagcaactggaagcttctgacaccaacagcttgatgaacggggtcactcaacccttgatggacacagagtcacttctcttagggaaactccagtattctcaggtgaaaatatacaaacatgatgaatgtacacttgctacgtctccaattgtgtactgttttcgttacttctgtttggagaaggaagtcatatactcaggtctagtatccatgtagggggtgctccccatttgcaagatactagaaaaaatggcaagttagaggcccactgttgtacaaatcaactagttctgtgtgtgtgtgtgtgtgtgtgtgtgtgtgtgtgtgttattgaaaaagaagacatggagtgggcattgatccacaagtatatatgcctacaggtattcttagatgtaatattcaattgcagaagaccaaacaagatagagcatcccccaaaacccttcaaaatttttgtgctcactatgtgtccactaattaaatgcatcctgagctccagggaagggctccctgatggtttcttagagttcactgggtcttctaaggtcaatgttttcaaaagattgtgtcagtaacatatggtgtcactgaaggagcattttaaactagggcatgacctcttcctatagccctagaaacactgagagataaatcctctgtgagcccagatggaaacctccatgcagagcagagacagtgctgcagagggcgcccaggacccacccagaacaggctccagccccagagctggtgcacatgaggctgcagcggggatttctctgagaactgagtgttgttttattgaaaaccaaaaaattataacatgttaaaattagaattttgcaaagactatttctattatctctatacatttagaaataaataaatcaacaattcagtgagaaccacatttaaaaggcaaaattgttagcggtttgaggtattttcctagtaaaaaatgaagaacagggatggttttattaaatcaaaaggtacacatttcagaagacacatagatcccaagagtaagactgcagacagcaaaaccccgaaagggtggaggctgtccatgtgccatgtcctgtgtgagtcaccttcttagtggagaagttctcccttcacaaagttctgggcatataaagggaaacacgactttaaataagaatgaggacttgtacctcagcatcccacagttgtgtggttcatgtgagatctattttctctttctcatgctggatcaagtgtaaggctatgaagtagtagttctcgtgaatatgcaaatcacctgagatgaacactacagatatgtctgtgccctgagagcattacccaataaccagccatgtcctctagagaagcccctgagagcacagctccttaccatggactggaattggaggatcctgtttttggtggtcatagctgcgggtaggataattctcagtccccaggactaaggtgactgggtccagtaaaagagggttttatccactcctgtgtcctctccacaggtgcccagtcccaggtacagctggtgcagtctggggctgaggtgaagaagcctggggcctcagtgaaggtctcctgcaaggcttctggatacaccatcaccagctactgtatgcactgggtgcaccaggtccatgcacaagggcttgagtggatgggattggtgtgccctagtgatggcagcacaagctatgcacagaagttccaggccaga

SEQ ID NO: 27170 - DNA, 2300 bp, Homo sapien
tttcccaattcagttattagaaagccatatttgaatggctatttaaatagactattacttaatgatatttcttagctgtattccttaatactgtgtcttgtgacttctcctagatataagtgtgtcagtcagcttttcagctagctgaagcctccctaggtcctgccttcctttagcacaaaagttgatggtggttcatcattggtaaatcaacacctactgacagggacctgacatattgaaggtgctgagcagcctcatattgaacttctctgggaggaatttactaccacacttaagatctgatgataatacttttgaactcgtaacacagtcctatggcatggaccctgaggatactgcaacagtgggtctcaagaacaaatggatttttaaaataaccaaagtaagaagagtaaggcaaggaacaatggtggttcaaggattttttgctttctataaattaagtttatgacaaccagcaaaagacttgccattacaccttatacatagacattgaagattaggctgtttctatgggtttctattatattcatacctgttattttcaataaaagatgtgtgcaaccagaagtaaaatgagcaattgtcatagtatgtaggaagattctaaaaagaaaaaaaaatttcaaagtaaaactgataccaagaactaatcattccaaagaaattgaagttcctttctttattcttttttatatttatcaaacaattataaccattaaatatgtggcactctgcaatctataacaatacactcaagacacaaaggaggaggctttaagaaaatgctactgcattctcttgctgtttctatcaaaattttcaaggaatagtatttttcccatgataggtatttaatttaaatgctgctatttgaatctggtttagatagtgccaaacagactctactaaggacctatgtctatatatacccaactacattgtagtgaattcttgtaatttttttgttgcctcagcatcccttttaattataaattggattttctgatatcagaagcggggttcagtcacccgcagcagtttcccgttcacctcctcccagtttctccatgtgactgatcctgatatctgccttacacaaccttctcatgatgaccacttcactatgggacagctaaatataacctacttgactcaccccacagacccccatactctgcagggaccatgtggatatatcagtgaccacctctcagtcacagcagagactcatagctgcttgcattaaaccaaattagacctccccgcaggaaacctgctcaggtagcaccttacatcccaataaaggcttccactctcaggtccctccctctctctcgctattgctcccacccatcagtcgagcacaggtctcctggatggctcccccttctagttggccctgcgaagtgtgctgccctcctctctctggaattaataaaaaactgcttcggttatttcatgtgttgtattgtgctgccttctctgtttcacccaactgagtcacccaaacctaactctctttccagtcagtgctcccagctactcgggaggctgaggtgggaggattgcttgagcccaggaggttgaagctacagttagctatgatcacgtcactgcactccagcctgggtgacacagtgagaccctgtctcaatttcttaattttttaaaaaagatgcaaaacaaaatgtaatcaatgctatgcagtaaaacatacctttggggttttttttttttagcatcttgactttgtgtgtgtgtttattttgtattttttgtatttgagaatacatgtaaatttagaaaaatttagaaaatttacaatttagaaaaaaacaaatgaacaaaaattatttaaattacatacgctcttttaaaaaaatttgttatagatctgatttattgttttcttccccctacccctcccttgttgggaattgtagtaaagcaaatcttacatgaaatcattagaccagacaagaacaatggcagaggctactttgtgattactcaccgaatagaaaaactgcactttcacatcatcatacagaggtagaccgtcgaatacatcaattaatattttgtctgttgtaatgttatcaagtacctatgaatgaacacatggaattgagaactataaacctagataatgataacaatgaagttccttttcacttatcatgacttcctgtatttatcaagtacttttggtctcacagcccaatcactacatacataaataattattaataatctcttctagttgcaatact

SEQ ID NO: 27171 - DNA, 2300 bp, Homo sapien
cagtagctgggattacaggctcctgccacagtgcccagctgatttttttgtttttttagaggagacggggtttcaccatgttggccaggctggtcttgaactcctgaccttgtgatccacccgcctcggcttcccaaagtgctgggattacaggtgtgagccaccgcgcccaacctgttgtctatattctaaaatttggataatttggatatggtatagtttatgtggccattttcttttggtgaacatgtaggttgtttctagcttttcgctattggaaacagtgctgcatccttgtgtatgctttctgcatgagtgatatttctctaggatacatactgtaattatatgcttgtctatttttttgtgttttaatttatttaatgtctgtgcttcctgtgaaaatacaagctccatgaggggaggaatccaatttgttttgtgccgcactctttaattattatctagccaagtgcttgggagaaaggagaggtcaataaatatatactgagtgaatcaggctgaaagattggctgggaccatggtgtggttttgtatcctaagagagggagcctgacttattttggaaaagtaaaattttttttggagaatttcacacaaagcagtagcaggatggttattggtggaatttaggaaaacgtattctggactagaaagaaggcaggtacaggaggtgcgattatgagattattacacaggctagaaggaaacaaagaaacatgggtggtgagaatagaagggaaagggtacatacatttcagagagatcagaaggataggatttgtgagatttactaagtagctataaggggtgaagtaaagaaagcatagaaggaaagttgatttctagcgtagaacattttaattttacaaacatttattccctctcccagctccatggaaaaagtactcactaattgctgttggtatattaatttgtattacattttcttccccactttctcttttttttttgagacagggtctgtggcccaggctggagtgcggtgatgccatcttggctcactgcagccttgacctccccgggatcaagagatccttccacctcagcctcctgagtagctgggaccatgtgtgccagccaccatgcccagctaattattatttttttttttgagacggagtctcactctgtcccccaggctggagtgcagtggcgcaatctcagctcactgcagcctccgctccctgattcatgccattctcctgcctcaacctcccaagtagctaggactacaggcacctgccaccacgcccggctaattttttttgtatttttagtagagagaaggtttcactgtgttagccaggatggtctggaactcctgacctcgtgatccgcccgcctcggcctccaaaatgctgggattacaggcgtgagccaccgtgcccagccctatgcccagctaatttttatatttttcgtagagacagggtttcgctgtattgcccaggctggtcttgaactctcgggtttaggtgagcgccttggcccccgaaagtgctgggattataggcatgagccactgtgcctggtttccctttcaaaagagattttgggtgtttcgtgtcactgtatccacgccgcgtgcggtctcttgtgcgtggcttcttttcctgagcacgcacagctgccttctaacccgcgagcaatggcgttaaggtttttgtttgtaattcgggggtgacccaggggttcgggccgcgggcccctcccctcgcccaggcacaccttgcagaggagggggcggcggggacaggacccgggtctgtgcctgcgcacaccctcgcgggccaaccccctccccccccgccccgccgggtacctgtcacggctactgccgcggcgcgcgcccgccacgttaagccggatggcgggaggaggggtgcggggagggtggcacggcgcgcgcgtgcgcgggagtcgccgagcaagaactggtagtgcgcgcgctcgccgctcgctcgcgtcccggaggcggagtctgcggcggcgggcggaacgggggcgcgcctatgctagtcacgtgggcgctggggcggggccgggcggccgttcaaggcagggggcggggcgtctccgagcggcggggccaagggagggcacaacagctgctacctgaacagtttctgacccaacagttacccagcgccggactcgctgcgccccggcggctctagggacccccggcgcctacacttagctccgcgcccgaggtgagcccaggccctaagtcctccgggcgggggtaggggtgg

SEQ ID NO: 27172 - DNA, 2300 bp, Homo sapien
ttttcccccatgacattggttgatggctctgccagtccttgaagtgagttaagtagtgtgatgcattttgaagagaaaaaaaattactttgaaaaagtattaactcaaaagttaaaatacttcattgaccggagatgacagttcttcttcatattctatatttaatattctggaatatggctgtttaatttagactcatgaacgattttaaggaattctagattatactttattttctttcatgactggaagaactatttttttaacctccctacctccccctgatatcatccaagatattgaagtataaatatgcctcatttgacagtttgataatatagaccaccagtttttacttaatttttttctgggtcagcatttcatgttggagaagataaattgagagactactgtagtcttgatttttaatcactgacttaatttttcaaaaatcttttataccaatttaataacaaaacaaactcggctgggcgcagtggctcatgcctgtaatcccagcactttgagaggctgagggggcagatcacttgaggtcaggagttcgaggccaacctggccaacatggtgaaaccccgtctctactaaaaatacaaagaaatttagccacgcgtggtgtcatgtgcctgtaatcccagctgctagggaagctgaggcaggagaattgtttgaacccaggagacggaggttgcagtgagccaagatcgcaccatcgcactccagcctgcgcaaagaagcgagactctgtctcaaaaacaaacaaaaaacccaaaaaactaacctgaccccatccgtccgttgtgcaaagaacctgatgcacttctctaaagggatctcaaggagagcagggtaagagaagacaggagtggcagtttgaaactgggagctggctgtatttattacatccaaagggagaaaagccattcctcccattccttttgttcatgtgtatctattttatgtttacagtatcaccataaatttttgacttggaaaccattctgctaaatagggaataagttcatttcaaactatgataagggacatcagttgaagatatgacatattatttaacttatggtgagggaaacacctaagtattttcctgagcatctggataattttaaatatacataattcaactacttaggtaggtgccaggttttttcaaggagtaattaattagtacaaacaagggtgagggggcagggaacaccatactctggtacttaatgtctgaaattatcagggaatttaacacattttcccataggtttatttcttgtgtaagaagtcagataaattatttccatttcaagtatttattattcagattatttaaagcaaagctttcacaaagccttttgtcagctttcctgtaatcctcaaataatttttcctggctggatgctttggcttactcccgtaatcctggcactttgggaggcagaagcaggaggatcacttgagcccaagagttctaggctgcagtgagctgtgatcacaccactgcagtccaacctgagagacagatcaagttcttgtctcaaaaataaaagtaataacaataataataaattttcctctaaatacaacggtgaatgaggtagaaatgttgagttcataagagaactgttgaatagtgaaggaaactgacttaattctaatgacaggaagaatactgtcacacactagcaaaaatgaactttcatgctgatgtagcagtacagaatatgcttccaacccagggacgctggagccaggcttgctagctaagtgaccttggacaagttacttaaccattttattcctcagcacactcatctcaaatgaggataataaaacctactatatgggatggatgagagtaaaaaatacttagattagtacatagtaagtactcaatagatgttagctattactgtaatcaccgtgagaccagttaatgagagagtttttccttatccttactctatattgaatacaatttgttgcacttcgaaatatctggatcaggctacagttgttgtcgtcaccgagaatgtaggagtgggaaagagaaaaatcatgcaaagtcttgctgatagcgttcacagtgacaggcctaaagtatgattctaaggttgtaagcattttatatttagatttttaagttgtggagtatacttttaaagataaaaataataagccaggtcttttaatacttatctaaagaagtgtttgtataacatttaataaaatgttttatctcagtggcatttggatttaaaaattattttggg

SEQ ID NO: 27173 - DNA, 2300 bp, Homo sapien
caatagatgcagataaaaacattcaataaaattcatcatccttgccaggtgcagtggctcacacctgtaatcccagcactttggaaggcagaggtggggcaatcaacagaggtcgggaccagcctgaccaacatggagaaaccccatttagaactaaaaatgcaaaattagctgggcgtcgtggcgcatgcctgtaatcccaactactcagaaggctgaggcaaaagaatggcttgaacccgggaggtggaggtggcagtgagccaagatcacaccactgcactccagcctgggcaacggagcgagactccatctcaaaaaaccaaaccaaactaaaccaaaacaaaaaaaaccctgaaatcatatcaattattttttctgaccggaatggaagagtattaaaaaatcagtaacaggaggaatttttttcccgaccgtctttggctccctctctcgccaccctttttcttcctccatctaccccaaaactttttccccaccattttttccccattgtctttttgcaaagccttctatactataccgctcacttccgttttccccacccatctaccccaaaacttgtccccaccgtgttttctccctctctctggccacccttttttccgcctcccgctctcatcatcctcttttgctccttcatctccccaaaaacatttccctcatcttttcccaaagccttctccccactcctgctgctcgccaccctctctttccccttccgtctacccaaaaactgtttccctatcgtcttttttcccttcctccttgccaccctttcccttctccatctacccaaaaacattttcctgccgtctttttgcaaagcctcttctctactcctgctcaccacgctcttttaacccatctacctccccaatttttccctgccatcttttcacaaagccttcccctcttcccgctcgccctcttctttcctctatcctgcttgccaccctctttttgccctccatctaccccaaactattttccccatcgcctttttcccagtcctctttccccacttcctctggccacactttctattctcctcccacttgccaccctcttttccccctccgtctacccaaacactttttagccactgtcttttctttctacactttcttttctgcctatcgtcttttagcaaaaccttttctctttccggctcgccactctctttacccttctcccactggccaccctctttcccccctccatctacccaaaagcttctctcctcactgtcttttcacaaaaccttctctccctcctgctcgccactctctcttccccctccctctctgcaccctcttttctcctcccacttgtcacccttttcccccctccatcactcaaaatctttttacccacagtcttctttccctttcttctctccccaccatatttttgcaaaccttctctccttcctgctcatccccgttcccccctcacgaccctctcttacccccttccatctacccaaaaactttttccccaccatctttctgtgaaaccttctctccctcctgtttaccaccctgtttttccccctccatctaccccccaattttttttcccaacatcttttcctcaccgtctttatgcaatgacttctccggctcgccatccttttttccttttggcactaaccaccctctttacccttccatctatcccaaaactattttccccttcctacctttccagccacactacagtgtctgtcgccaccaactgcagggaggccagccacggtgcagcaggctacagcctccagtctgtcctggtcctctaagccgggctcggagcagctcggtgagcagacacagaagaacctggaacagcctgactcttcttcagccccatttatgtactgaagttatgcatatgcggttcgtggactacactttccaggattggataagagaaagcccggaggcctactctgattggactttgttatcatgttctgattggatgaaagtcttaggacaaccaattagagtatgaaaataaagtccaatcagagaaggcctagagattttctctcacccaatcagaacatgtagtccagaaaccatgcgcgtaaccccatgtgcatgccgagcaggcctcacgccagtttagggtctctggtatctcccgctgagctgctctgttcccggcttagaggaccaggagaagggggagttggaggctggagcctgtaacaccgtggctcgtctcgctctggatggtggtggcaacagagatggcagcgcagctggagtgtt

SEQ ID NO: 27174 - DNA, 2300 bp, Homo sapien
ccaatgatatcacagcagaaatgagcatatctaacactcaagtcttcaattcgtgggtttttgttcatgatccgggatccaggagttgggccctggggctgggcattgtgtagcctccgggatggtgctgagcatccattcccaccctcctgcagctggggacccatcccttgacttgggacccctggaggcaagaacatggtcacccactttaatcacatggtccctatcacataatcagagggcgctgtgggttttaactcttcaagctagatgtgtaaacaattcgacatagataagatatagtgactagaagtcttttatttattttgagagagagtctctgttgcccaggcttggagtgcagtggcacaaacaatcaaacaataaccaaaatccagaagaatgaaaaggtcaaatgctgtcaaggatggggagcaacaggacctctcattccttgtttgtggcacaatcagtttactgtacccacgaactcccaggcccaagtgatcatgccacaatcaatctcccaagtagctggggccacaggcatgcaccaccatgcctggctgattggttttatttttatagagataaagtttccctgtgttgtctaagctggtctcaaactcctgggatcaagtgatcctcctatctcggtctcccaaagtgctgtaagtacaggcatgaggtcctgcacccagcctggaagtctttatagataagttcaatttaactgtttctccatctgatccactcagccgagtttccctctcagtccaagggtgagaactgcagctcagccccatccaggatggctgcagatgacccagcgccactgccatactccagatgctggtcaacgaggaagggatcctgaggcctggcagcgggcgctctcaggaaccttgaagccctctaaacgggacccgccatccgtgcctgtcagaactggtgccgctacctgcacttggcacacaggcaaatatggccaagcaaccccaaactcccctcttcccctctgggcccaggcggcgctgaacctgctgctcagccgcatcctggcgactgcacagtgcccagagcctgcaaaccagcgctcagggcgcgagccaaggaagagcagggcctagagtgggagggcgtgtgccacacggctaccctaaggccgtcgggcccagccctgcagcctctaccgtgggctcagctgcagctggcatttgaaggtggcagcagcggtggcaaccccagaacctgtccgcgccaccagcaggcgaaccccagggtcggacaccgccactgcgcctaagtcaggcagtgggacctcagttgcaggatcgtgggaacctgctgcaaagcctcgtcgccgcagctgtacagggcccagtggtcgcaagcctgcgctgccagcgcgagccgaggaagagcagagccccgggtggaagggcgatgtactcggcgatgctcagcggtctgggcccagccctgtagcctctaccatgggctcagctgcagctgccacctgaacatggcacgtggcagaagaggctgcaaccctgaccctgccagcgccaccagccgcgcggatacttgggccagaagcctccagggagcctaagtcaggggttgggtccctggctgcaggaggccgggaaccgacgctcagcgccaccctggaggctgcacgatgcccagcgccagggcccagctcctggatctcaggttgaggaggggccaggagcggctctgtcaagcaggccatgtggcagggagccccccacgttccgctgtaaggagccctgccagcccgatagcgcctcagtagcaggtgccacctgcacgccgtgctgggcgaagcgcagccagggcggtttcctgcctcgcgtgcctcccaggtctgctgagttgcgcatgcgctgttgcctaacggttctgctcagctgcctaacggttctgctcagctgcctaacggttttgcgcagccattttctccctggagaggctggagtgtccaaaagcttggccgactgagattgctagtcgtgtcagggcgggtgcgggactgaagaagggcgagggcgagcggcggggactggggaagggcgagcagcgggaggcacgggctctctctagcaggtggctgcagccatggagaggctctgtgccgccgctgtcaagggccagacgggcccagagcgcccaagccccttcagtcagctggtctacaccaacaacgactcttacgtgattcaccatggggatctcaggaagatccacaaagctgcctcccgggccaagcc

SEQ ID NO: 27175 - DNA, 2300 bp, Homo sapien
tgtgaccactgaaggtagaaatatgtagagaagtaggtgacatttgaaaatgtattttggtgtatcaagtgagggtaaagttcagtttcattatacatacacacagacttgcgttatctgaagttgtgtatgaaatatgataaaatttgttatttgagggcatttgttttaatataaaatgtttttccttttttttatctttgatttccacattgagcatgtacaatgctgttagaaaaagtttattattaatgaaataatttttgggaagagcaggaatataattttgcaccaataaaaataatttctcactttccatattttaattattattttttgtggattagtatattctgtgaacttttagcatcttcaaaagacaatctttttacctgtgcttgttgatttacatatacatcttattaggcacatatttttattgtatatagatttcttacacatatgtcaataattatagattagtgtagttttattattaagaaaataaaatagaaaatataagtgctttatttatagcagtttttttaaggtattgaacttctcaactgtatttatccttttaatcaatttatcacatgtaagctgaatgcctattatgtagaagatacattaactctcaagatcctttcatccttaaaaatttcacatttacctgctcagccttagcaaagtgagagatttaaagttggagtactaggaatgaatctcaattgaagcttttcctctcatctttaaaacaaaaacacttctgaagtaagaaactagtaaaagataactaccaaccacgattttggaaatttataacagctttaaatagtaatattaatcattggaaatacctaatttacatgcattctataaatttaaatatgaatttatatacattctgtaaatctaaacatggaataaaatgagccatacctacttgaatcccaagttttctttggcttgaagttttaaaaatattaaagaagtactttgttttaacagtttgtttttatttcaactctccttttgtatagcactcttaaaagctaaaatttctttaagtgttaatcctatgactaggactgccatcgtcctgttgtatataccatattccacttcgtggaaggcacggtgaatggtgtgatgcctccttatttatgtaccaataaaagatcgtttaaatttctgcaaaatatacttgtaacaaataatgacttataagtggcatttcaatgtcagagatgttaaaatatgagaaatagagtatcttagaattattaaaatagttttatctctaacctttaaaacataccacaaagtaggcataattttaccattttacttaaaatgttttctttgttaagtagtagaaataattacaatatctatcaatcactgagctgttacatgtgctaggaattcttcgaaatacattgcacagattctcatgaggcatcacagtgatgtcctgtgagataactgctgtattcatcttcactttattgatgagaaaattgaggcacagaaaggttaagtgatagctagaaggtgaaagactttaaagtaatattcaagcccaagttgaactgaatccaaaggccaagctctttctattcaaataggccactctttcattaatatagtgagtaataacagtgaatgaatgttgtagtttcttcaggagaatattaaatatttgttttgaaggcagagaaagagcatggtatttaatgttgacaattacataaatcattctatgttttgagacagtggactaaactttccttaaaaggcctctcactctcgtaggactgctctacactgggcctgtgccaatggccatgcagaagtagtaacacttctggtagatagaaagtgccagcttgacgtccttgatggcgaaaacaggacaactctgatgaaggtaaatggtagccagttctttcagcaggagatggatttggtttaaatacatagaataaaaatgaatttatctcattgaaatataactagtttgtgaaacctgtggaatatttatttatatttcctataatttataatttacttcttgctttaatactgacaggctctgcaatgccagagggaggcttgtgcaaatattctcatagattctggtgctgatccaaatattgtagatgtgtatggcaacacagctgtccattatgctgttaacagtgagaatttgtcagtggtggcaaaattgctgtcctgtggtacagacattaaagtgaagaacaaggtagacattaaccaatgttattttcaaaata

SEQ ID NO: 27176 - DNA, 2300 bp, Homo sapien
cacatgtcctacaaaaaaacagctacaaaagcaagtacaaatggtaagatgcttgagtgaactttgtagagtttattggcactctgggttgcctaatggaaatagtgtggtatgggagtagttgggaatggcttgaatgtctagataacgcaagcttaggcaacacattttaatagtgtagaaatgagtagatcttattctgtaggccctggaaaaattcccaaaatagttctggctgtaaataatagatgaactaactaacaattgctaaaaccatagaaaccaaagttgttttggtggtacagggatgttataggatctcactcacccccccattattagttgtgctattggcagtgttttgttcatgtctcctttcttggttggctaattagcaacagctccaatcatcatgctatctcaagacaatatctgaaggctgggagggctgcttttgttcacatttttttttaatgggagaaaacttggaagctttcagtaatcttcctgtaacattttattggctggattataccacatgcttatttctataccaatcactaggaaagcaaatgtaattactgtgattagcttacaataatgatttttcttttaagatgggatgggtgtaatggaataataaatatctaaatgagcatgtgtttctgcagcaataaagaataaataatgactatgcataggaagccagcaatgttttctgcaggaattcagtggaaaagtttgagcaggggagtcacaagattagatttgagtatcagggcattctggtcatggtataaagcagagattggcaaagttttcctgtaaagtgccagatagcgaatatgttgggccatgtggtctctattacagctattcaactctgccattgtagagtgaaaggagtcatagataatgtatgggcaaagaggcatgattgtactccaataaaagtttgtataaaaaaccatttagaaagctgaatttggcctgtggcctatagtttttggcccttcatatagtagatagatggaggataatcacgtaaaaagattgaaagattaagcttttgtagtagttcatgtgatagtcttttttttttgtaaacaatctgtggcctagtatcaatctattatgaaagtttgatccatcaagggtaaaatgaataaagttcagaagctcaatttacacatttaaacatgtaggtccttctttggcattattttattttgattaatttttttaacttaaaaaataagaacagtaatttgtagggtttctttttccctgtgaaagccatcagttaaggggccacgtttaacaaggaaatataaatataaaataaataagtttgtatttccagtggcactggaaagataaagcaaaggcagaaaagaggtgcagttaatatggtttagtgataattgagtttaaaaagctaggggacagataaaatctcaggtcattcataagttttcagattgtgcacaagcatttacaatgctcatggggaaggagtaggaatttgtcaggttaacagggaagtgcaaacagtcatgggacagaccaacagttttctttacatattgagttcaatgaaacatttgtgagggatactttcagtaggtaattggattatatgcatttctagctggagatagaactctggttgaagatgcaggcttagaatacctttattataattattaggcaaagccatagatctcaatgagcttatccatgaggcagaagatgtagaataaaaggaaagccattgacaaaaccctgggaatatcaacatttcacaagagtcaaaggacttggtaaaggagactgagcagtggttaaacaaatgtaggagaggagtctgagaaagtgatgttgcaaatttcttttaaatgtgagaatttcaagcagtaaaattactcaaaaggctactggatttaacttacaagttcttcagtggtaatctgttcaaaagaattattttagttgttaggtatactgttgatgtggttgataattctggtatccaagaagaaatctcccaagatcctacctaactttttgtaactaaagcggcatacatacacaggtagtgggaaaatgtctagactggtgagtacacataccaacatttttccagaattttctgcctccttattataccacttgagtaaggggtttagaaattttaggctctacttgggaatttgtctatttcttttgcagttctatcaatttttgtatcatgtattttgaagcatttatgttattatatacataaatatttaggactg

SEQ ID NO: 27177 - DNA, 2300 bp, Homo sapien
caggtgcagtggctcaaacctgtaatcccagcactttggaaggcagaggtgggccaatcaacagaggtcaggaccagcctgaccaacatggagaaaccccatttagaactaaaaatgcaaaattagctgggcgtcgtggtgcatgcctgtaatcccagctactcaggaggctgagtcaaaagaatggcttgaaccggggaggtggaggtggcagtttgccaagatcacaccactgcactccagcctgggcaacagagcaagactccgtctcaaaaaaccaaaccaaaccaaaccaaaacaaaaaaaccctgaaatcatatcagttattttttctgagcagagtggaagagtattaaaaaatcagtaacaggaatattttccctgaccatctttggctccctctctcaccaccctttttcttcctccatctacctcaaaactttttccccaccatttttccccactgcctttttgcaaagccttctatactttaccgcttacttccgttttccccacccatctaccccaaaacttttccccaccgtcttttctccctcaccctggccagccttttttccatctcccgctctcatcatcctcttttgctccttcatctccccaaaaacatttccctcatcttttcccaaagccttctccccactcctgctgctcgccaccctctctttccccttccatctacccaaaaactgtttccctatcgtctttttctcccgtcctccttgccaccctttcccttctccatctaccaaaaacattttcccaccgtctttttgcaaagcctcttctctactcctgctcaccatgctcttttaacccatctacctccccaatttttccctgccaccttttcacaaagccttccccgcttcccgctcaccctcttctttcctctgtcctgcttgccaccctctttttgccttccatctaccccgaactattttccccattgcctttttcccagtcctctttccccactccctctggccacactttctattctcctcccacttgccaccctcttttctccctccatctacccaaacactttttacccactgtcttttctttctacactttcttttctgcctatcgtcttttcgcaaaaccttttcactttcctcctcgccaccctctttatccttctcccactggccaccctcttttccctctccatctacctaaaagcttctctcctcactgtcttttcacaaaaccttctctccctcctgctcgccactctctcttccccctccctctctgcaccctcttttctccttccacttgtcacccttttcccccctccatctactcaaaatctttttacttacagtcttctttccctttcttctctccccaccgtatttttgcaaaccttctctccttcctgctcatccccgttccccactcacgaccctctcttacccccttccatctacccaaaaactttttccctaccatctttctgtgaaaccttctgtccctcctgttcactacactgtttttccccctccatctacccccaattttttttttcccaacatcttttcctcaccgtctttatgcaatgccttctccagctcgccatccttttttccttttggcactaaccaccctctttaccctttcatctatcccaaaactattttccccttcctaccgctccagccacactacagtctctgtcaccaccaactgcagggaggccagccatggtgccacaggctacagcctccagtctgtcctggtcctctaagccgggctcggagcagctcggtgagcagatacagaagaacctggaatagcctgactcttcttcagcaccatttatgtactgaggttatgaatatgcctttcctggactacacgttccaggattggataagagaaagcccggaggcctactctgattggactttgttatcatgttctgattggatgaaagaaagtcttaggacaaccaatcagagtatgaaaataaagtccaatcagagaaggcctagaggttttctcccacccaatcagaacatgtagtacagaaaccatgtgtgtaaccccatgtgcatgctgaggaggcctcatgccagtttaggctctccagtatctccagccaagctactctgttcctggcttagaggaccaggagaagggggagctggaggctggagcctgtaacactgtggctcgtctcactctggatggtggtggcaacagagatggcagtgtggctggagtgttaggagggtggcctgagcggtaggagggcggcctgagcggtagga

SEQ ID NO: 27178 - DNA, 2300 bp, Homo sapien
aattttaaagactcctgaaggagaaatctccaggacaaaatggttttactaaagaattttatgtactgcttaaagaattgacaccaatacacacaatcttttctgaaaatagagaatctttcccaattcattttatgaagctaacattactctgatatcaaaatagtacaaaaaagtaaactatagcctggtaattctcttgaacatggatacaccagttcttaacaacattagcagtagcactcagcgatgtacacaaagaattacacatcatgtcccagtgacgtttactccagtgactgcacacctagacattcatcccactgaaataaaaactttttttttgcacttgtaattggcttcccctctgcttttgttggcaagagcaggtcggtgtcccaggcttagaatccatttttctctctttctctccatctgtctctctgtctccgtctctgtctttgtctctccctctctctctctttttttgacagagccttgctttgtcgcccaggttgcagtgatgcgatctcggctcactgcaagctccgcctcccgggttcacgccattctcctgcctcccgagtagctgggactacaggcgcccaccaccatgcccgctagtattttgtatttttagtagagatgaggtttcaccgtgttagccaggatggtctttatctcctgaccttatgatccgcccgcctcagcctcccaaagtgctgggattacaggcgtgagccacagtgcccggccagaatgcatttttcctcccacaccaaagcacctgcagtatgggtgaagcagcctggagcctggctgcataagcctgcacagcaggagggtcccagcaggagggtcgaggtgccactgcctgggtccagctcacaggctaccagggaggctccgatctggctccctggtgctggcagtgtactgttcccaggatctgcatgtgggggtgccttcctgcatctccccatcagtggtaggtgctcctcccagccgcctctttcaggcctggagacagcggcctgcacctcaaccctactgcatgccagtgaagcgaagcaccccgggccagaagccccacagctgttggccctggtttggacaccaggcagggggcaccacagcaggagctagcagcccagccccgattctgtggccccgagtgccccgttgctgatggccctgtgttctgggcacggaccaaggaggagcaggtgtggaaggcgcctcacgcaggccctgggctccgtgggcgtcttgtgctcggagattttgaggccatttgcatccagcttcgccaaccagagctctaagctgcagcggcggccacccgcaacagcaccaccactagtgtcttgggggctttcttcagaggaggctgtcagcatcctcgagttccaggcgctctagccccagtcctgcttcaagaggctttttcccaccacaggcttctcctcagtggccagaaagctgggtcaactcccatgaactttgccagtaacgcaaggctgtcactgacatttgtggcgccaagacttgcgcacgcggattgcacacatcggccacttcctgcaccacgtgcaatgacgcgcgcacgcctcacgcgcacgccgcataacgtctgaggcgcgcacgcctcacgcgcgccccgcacgcgcgcccgcctcacgcgcgccccgcacgcacatgacggcttggcttacctgtaatgggtgcgcttcgctttgcgttcctcgcttggccttgcgttcctagcttggcttggcgttagtcgctttgcctggtgtttcttgcttggattggcgttttctccctcgcattcctttgctgggcctgaatttttctctgctgggtttggcattcccttgactgggctgggtgtttccttcggagggggggcttggcctttcctggggtgggcctggggtccccctggtgggcgtgggctttccccgggtgggtgtgggttttccctgggtggggtgggctgggctcccttgctggggttggcaagttttggctgggattgacctttctcttcaaacagattggaaacccaaggtttcctgctagttggtgaaactggttggtagacgcgatctgttcgctactaccggcctcccctggctgttaaaagcagatggtggctgaggtttgttcaatgcccactgcctctactgtgaagaagccatttgatctcaggagcaagatgggcaagtggtgccaccaccgcttcccctgctgcagggggagcggcaagagcaacatgggcacttctggagaccacg

SEQ ID NO: 27179 - DNA, 2300 bp, Homo sapien
tcctggctctgttgctaccaattaagccacttaactccatctgagcctcaggttgcccatctgcataataagcagtaacagcagctgtcctgcaggactactgtgagaattacaactcaggtaatgatcatgatatttcttggcagaggtgttcactacctaggtagtgttattattattatgtctaaagtcacaaagggagtttttgagaaagctggaatgaaaacttgttcctctcaacactgagcttattagagcacaccgttttgcttgaataaagcagccctggagtctctcaggggagggtgtttgtaacatctgctcaggcacggtttcatttgctatatacccagagactagcactgtacaagttgttgggagatactcatgtgagttggcagacttttggtcaaatattttccctaaatccaggtctctatggcattctacagaacactctgcatccttctaagggacactggaagagcaaatggattgtacagtgagttacaaataaaatggctaatctcagcatgaaaggctgagggtgttacctgaatgaggatgcagaccctccatctacatacaagcaaacctaagtgaccatgagcctgccggaaagaaatcacatgctatgtaaaggcttagtaacagtgatgaatatttgaacctgaactccagctccagagcagttcagttgcatctcttccaggaacagaagccaaagcagctcaggattcttgaaggctctgaaaggtcaatgagaatcctggtatatgtcaagactatcccaccaaagaagggctccatgtgtagagacttagaaaggattcccaaccttggcccctccaaaaccagaaacaaaggtgggggacagcccaattaagtggccctagagatttgcccaggagctggagccctccggagaagtccagttttcctatgcagggagaggactgggagttctctggtcacaagccttctccctttgttttcatgaagctatgtctcttacctggtaagaaaaatggaactgcaggcagctgctgaaaactttaaccaaaaacccattgatgctggcacaaagaaaggaggcctgaagaaaacaagtggaaaagggcttggagtaactgaggtcagctggattccttaaacactgcccagagcccttgaagccaactaagggcacacttctcaggcctgctccgaacgacactcaactgggaatcttttaaggacagctgctctgttaggcttgcctgagatggtgcagttttaccccgcggcggcagaggcacagacagttaagaatgcaggagcggggcctcacaatgccttggactagggcaaaggaagacccccgcctctcccctcccggggctaaaacatgggaggacccggacccgtggatccattgactccggtaccagaggatccccgctctccagcgccctagactgaggcaggagaagacctcagacccactccgccctgaactagagcacagtgggacccgcgacctgccgtggcctcaggcactggaggacacctgcaacgccgtgcgctagactgtgctactgaaggacctctcccgcggctcagccctggactaaggcacgggaggatccccgccctgtcccgccccgcggtgtcctggactgtgccactgcagaacccccacccctccacaccctggactctggctcccgaggacctgggccccggctcgccctgaactactcctgcccctcagcgccctggactgtggttccagagtacctggtcctgcggcaacttgggctaccacgtggactccaggaccccagtcctaccaggccctagactgagacacgggagaacctctgactcgccgccccctggactagggcaccagaggacccacaccttgcggtgccctggactacagcacagaaggacccccgatccgccaggcactgggctcctgcacagagggacgcccgccatggaggtctggactacccctgccccaccgcaccctggattactgcacgccaagaccctcacctgaacgcgccctacactctggcatgggggaacccggccccgcagagccctggactctgacattggaggactcctcggctacgtcctggactcctgcacaagaggactcctgccctgccacaccctggacacctgcactagagaaccctgccccgtcgccccctagactatggcacgggaggacccttgccaccgacttcggcacggtaagacccctgacccgccttgcactggattccagcactggaggaccc

SEQ ID NO: 27180 - DNA, 2300 bp, Homo sapien
gcctgtcagcgggaatctagttagtgaggcctggtgatgggggtctagtcagtgagggtgtggtcagggaggatctgatatgctggatctggtcagcagggacctgttcagtgggggctgctgagcactgcagggagatgtcaggagaaatgcatgttatcgaggaccctgtggacagctgggatggcccagtggtgttcaatggcccagtcaaaagtggacaaagcaggtgtttggatggacctgggagatcttgctcagggattctgacaggacaaaagtaaaggaagtaccagagtggccagagagatggtcacagtctatgggctgcacaggatggaggaggccagggaacaggcagggtgggcagctgagtttcagggagagacatgtgcatgctgggaggtcagacccagtgagggctgttggggcatcaggtggactgggctccaggtgcaccgtcagtgcactgggcaggtcttggcccaggctccctggaccctggctgggtgatgtggtcatttgctgggggactattgtcaggctctggctacccaacctgggtagcactgtcccatctcaggactgcacttcctcagatcctgcagagggcacagcctccagcccaggaggggcagccccatggtgcagactgagctctccatgggcctggagaatcccctgccagccctgcactccctcttctcccaggtcccgcttttccagggtcagccagtggggaggccccatcctcccttccctatgtgtctcctgggctgaaacttgcagtgcactgggacagggatgaggcttccctaaggcctatttagggaggggactggcttccagcctggcacaggtcctcagctctgccttggttgccttagagtgagatggatcagtcagtgccctgaaggtaaaggtaggagactgtccctgctgttgggaggctggtctagggatggaggacttaagaggtcttcccagtctgtcaggcctgggcagtgttttcctgtctgaggactcagaaaatccagtcctgggatgggacagtgctgcccagggtgcgtggccagggtctgacagtagtcccccagggagtgaccacatcacccagccggggtccaggaagcctggcctgagacctgcccattgcactgagggtgtacctgaagcccactccacctgatgcccccacagccctcacagggcctgacctcccagcatgcacctgcctctccctgcaccctagctgtccacgctgcctgttccctcacttcctccatcctgtccagcaggatgggatgggcaggaggacagcctttgtgcacatttcatggcaagtaggagtgacacaccatccctgggaggtgccttggttcctcccaaacccggccccagaactctgtccctggggtggttttaccataccccaaacccagaactgtggttgtggctcaggggtcagcacccactagtgccgggacactactgggaggctgggatctgaccaaagcccgtggtgcctgtggcctgaggacagggtgtcttggggccataaggacaggccacaagttcccattgggtcataggggctcagccccagtgtttgttcttccctggctccctcccatcagtgccctggagcccaagaccaagcatccaaggttccctccaggaatcctggtggctcagcttactttgtcgtgtttcatctgagagcaaaaatgtcagatcggatgcacagaaaaatggctcaacatgcttaatgactagaagaagtctagaagcagcaagaaggtaatgtggagaggggaggacctccatgggacttccatgaccggtatctgcagagccaggggtacaggcacccagtgctgtggactggcaccacctctcagagggtgggtagcacactgtccttacctgggggacagcaggcctggtcaccagcttttgtacctgtctctgcaagcattgcattgctggaagagaatctcatgccagagcttgaccatgccttgctcaggggttaggggttgtctcttggtgacctaaatgaaaaaaatatctccagatcatagttcccacagagcccaaggctggaaacctccagaatcctctggccccagatcctccccagggacccctgtggcttatctcaccagagcattcttccatctgtagatttcttggctgctccacaagggagtcccacttcaggtgtggtgctgggcatggtcactcctgctggatgtttagaaggtggaaaccaaggacctagggaaataccaggtaca

SEQ ID NO: 27181 - DNA, 2300 bp, Homo sapien
tgaaattcagcattccttcatgttataaatcctcaaaaaaccaagtacagaagaaacataactgcaacataataaaaaccacaagagagagactcacagctagaatcatatggaatgggggaaaatggaaagcttttcctctaagatctggaacatgataaggatgcccactgtcaccactgttacttaacatagtattggaaatcctagctaaagcaatcagtgcagcccctgatatggtccccaaccaaccccgccccctgccaccagcagtgtagcccccccaccccatagcgcacccaacacacccaaacttccccctcttcctgcaccgtgggcattgcagcaccccatagtgcctaaacccaaaccccccccacccgcacccccgagcagtgcagccctggatagcacccttaacccacctcactgctgccggcaatacagtctgggatagtgcccccaactagcaggcctagcggttttctctcatccaatcagaacatgaagtccaggaacctggcttgcataacctcagtatataaagcatgctaagggggagttgcgccattgcaggctgttgtgcctcagcgttcccaacccctccgttcgcaccttaaagaaggcgaaagcggagtcccccgccacacgctggggctggaggctggatcctgtggcaccagggcttgcctctgcatagtgtgtggcggtgatggagacaggcggctggcagcgagagctgctccttgcctggatacaggaagggaaagaggaggcacctaccacaggctggaggctagagtctgtgggactgcggctggcctcgctggctcgcctcgctgctgtgggtggcagcagcggacactgcagccggccagagcgtagaaaggcgattgggtaggtgcgctatccggggctacattgcccgcggccgggggccggtaggggtgttattccgggcgtcactactttaggtgtgctatcccgggctgcgctgcctgcagcagcgggggggggggggggcaggttgggggcactatcctgggctgtactgccagcagcagtagggctggttgggggccctattgggtgctacactgcccgcgacagggggcgggttagggccgctactgtggttacactgccggcggcgccggggtggggggactggtcggggtgctgactggtctggcttcattgcccatagtggggtgggggggtggtttgggggctgcaccgcccgcggcgggggacttgttgggggcgctatctggggctgcaatgccccccgcaggggataggttaggggcagtatccggtggtacactgcaggtggggggggggcgggaaaggggggtacagggaggtgattggagggggtggtttcaggccctatcgcgggccagactactcatgatagaggggggcgttgggtgcgctattgggggctacactgccagcggcaaggggcagtttgggggcgataccccaccggtggcaggtggggaggtgtggtgggttgtgtgcatcattagggggctgtactgtggtcagtgggagcgagttaggggagctatcagctgctgcactgcctgtggcgggagtcaggtttggtgcgctatcgggaccatattctcggtagtggcatacgggttaggggagctgtcgggggctaagctgtccacggggcggggggtgcgggttgggtgcgctatccagggcatcataccccgcggctgggggatggttgggagtgctatccgctatctgggagggcactgcccatcgtggggagcgggttgggggccttaaggatccgtggctgcactattcacggcggggatcaggttgcagcgctttctggggcgtcactgccagcggcgagggagttggttgggggtccaatccgtggctgcatggcccacggcagggggcaggttgggggagttatctggtgctgcaacgtctgaggcggggacgggttcgggacgctattgggtttctacactgcagcggcgaggggagggtgttaggggcgccatcccgggtccaatagctggcggcgggttaggggcgctatcagggggtgccctgcaggtggcggcagaggtttcagcaacaccagtggcctacaaagaaggagccttcctcctctccccagactccagactctagagggcgacctcctcctgctcctgctcctggagcgcagccagcgcacagcgtttccgcaggaatcttgagaatggcaaggcccgcacacccgcggtggttcccaggcccgccccctctcgcagctg

SEQ ID NO: 27182 - DNA, 2300 bp, Homo sapien
tgcataggcttcagagtcaggcagagttgatcctgagtcccagcccagctgagttagaagctgtgggacagttatataaacctcatctgcaaaaaaaggccatactaaaattgattgaaaacaacagcaaatttttaaaatttcttcttgtgttcatgccttgacaatggattttatagtggttcccattaagagacagaatttgttttccacatcttgaatctttatggccttatttgcacaggccaaagctgtgcatatgacagtgtgctagtttggggcctaggctcaaaaagtctcaaatgcttccgttttctttttcagaacccttccatctccatgagaacaagcccattttggcctgctgggcaaaagccaaaatgtccccattgacagctcacttacagaagcagagccacttaattcaccagccgttcaccactcaacgtctgaaggagccattctgagccctgaagaatagcccagctgagcccagcctaaatttctaaccagctcaatcatgagcgtttgggattgtttattatgcttactaatatatacaaccattaaagacaggatgccaggatgccaggacagattgattacaaataacctgcaaatgcttggcaccctgtaagtactgattttatttgccctttatttagagttagatttgttgttagatggtattgagttatatggaagtgcaggtagatgtggatgcatatgactggtgcttaaacgcacgcagtgccccacaccacaggagaaaaacacacagttacagacagacaattaggtccaaagccaaatagcaaaataaggagtttgacttttatctattccctccacatctgaactctggaggtcaaggctgtaaagagatctgaagacatggtgttctcccctcctggggccccatcattttttgtttactgtttgatatttgaaaggaagagaaactcccatcaaacagcaactgggagacagtggtctctacgtgacactctctgcttgcagcccctgatctctctaggggcactgaccctcccacccttgagcctgaggagaaaagttagtagagagaggccagtagttggtagggagagagcccacttccagcagaaaagaggtgttcaggccttcacctccctgagatcggagcatcagagccctcatggctgctggtttgaagtaaaatgtgctgcaaacataaaatacacagcgagtttaaaagatttagatccaaaatatttataattatttgttgaccacacatgaaaaataatattttgggtataatggcttaaacagtattacaaacaatttcacttgtttctttttattattactattatttttgagatggagtcttgctctgtcacccaggctgcagtgcagtggcacaaactcagctcactgcaacctccacctcctgggttcaagcgattctcctgcctcagcctcccaagcagctgggattacaggtgcccaccaccatgcccggctaatttttgtatttttagtagacagggattcattatgttggccagagtggtctcgaacttctgacctctgtcctctcagagtgctgggattacaggcgtgagccaccatgtccggagtctttttattactatttttgatctggctaataaaacatttaaaattcacaatagctaacgttttattttttagaggattgcttctctcttaaaatcttaggtgtcccactccaaagaccggcggccagaaaggttatgaaatctgaaatattaaataattgtcattatattgcttccatttgtgaacaacgtgtgtgtgtgttttataaacgaacataaccttcataacgttatacaccacaatgctaaaaaatgacccctggttagagccaggcgcagcacagacagaaagccctgcctgaaagtgactggagccaagagcctgacactctcggctcattccgtacagtgtatggtagcatcttctgacacgcaaggcctgagggcgcggtgcctgcactactatccaatcagggcgctggggtgggaactgtccaatcaggcgcgcagccagggaggaaggggcggcttccggaatctggcgcggcctttgtctcacttcagccagagagcggggttagggcttcattgccttgtgtcctctgctccgggagacttcggtgattctgccactccctccgtcgctctgtgacctgctggcattgaatgatttatagctaagactccaggacacccctgaagccgagaaatggtgagtgtggggggcagggcgtc

SEQ ID NO: 27183 - DNA, 2300 bp, Homo sapien
tgtcacccaggctggagtacagtgtgaagttcatggctcactacagcctcgacctcctaggttcaagaaatcctctggcttcagcttgcagggtagctggggctgcaggcacacaccaccacgcctggctaattttgtaatttttggagagacagcgtttcactatgttacccaggctggtctccaactcttgggctcaagtgatctgcccttctcagcctcccaaagtgctgggattacaggcatgagccactgagccagccaggaaatatttttgtaaacgaccagatagtaaatattttacgttttgtgggccatacagtctcttttgcacctactcagctttgttaccaaagcaagaaagcagcagtagataatgcataaacaagtaaatgtgcatgtgcacgtgcacgaatacaactttatttatggacactcacatttgaatttgttgtaactttcatgtcaccaaatattataattttgattttttcccaaccatttaaacatgtaaaaaacattcttagcttgccaaccagacttgaccacaggacatagtttcccactcctgtgtgctttggaagagatgttaaaggtagaataattcagctttctcatttcacagttgaggaaagtgaaaaacagaataaaatgaagttatttttgtaaagtcacagaacttgtagtatgtgataaaaatgcgaattcttatccataggctggaggtgaagcccaagattagcaattttactaagcactcaggtgatgcctacgggtacgcagaccaccttggagtaataagggtataggaagttacagaaccttagaagcctgtttgtagggcagtaatctttccagaacccatgggattctgagctgagtgcctcaacaaaatcattatttttctctaaattgtgtcagtatttttctgatatgatccacgattaatttttcttgacttactaaaatcagatgccctcaaggaattttaatttattgtaccaaaatctctttaaacaaggatcatgtgaaagaaaatgaaatttggaactaaaagacccagattcatgtcctggtggcatgtcatcttgtgccaagtcacttaaccctctacatgcagttaatagctgtaatactatctcactctattgtgaagctcaaagaaggtaacataaatgttgatttggtcacgtagaaagcaatataaattaggttagaataatccactgtgtttttttccgtgttcattttctctttaattcttttagataatttccagatgtaaaacttctccgtgtgtgcttcatgaactaccatatgagaattctctgggttacccacttaaaaaaatgcagatatatctaccaaatcagaatctctggggttggccccaggaaattacattctgaaaattctgatgtacccagtcatttttttttacatccatttttaagatcattcttgggaattcctggtataaagacttgttagacacctactttattttgcttgtgtagtcagattcattttcagcagctttcctaacatttgcataaatgagttgctgactatcttgttttttcattaaaaaattaattgacatagttgtgcctattatttctagagtacatagtaatattttgatagatataatgcatagtgatcatatcaaagtaattagtgtattgatatctcaaacagttaccatttctttatgttgggaacactcaatatcctcctagctatttgaaactatgtattattgttaactatagtcattctacgctgatgtagaacactagaacttatttctcctatctagctataattttgtattctttctaaatgtgtgttttgattgcttcacaactacataattaaagctatatttgccttttattttgctttctgccactagcattcagggattttaacattttacctacagtgttgtgtcttaactggctctgtggccatagaagccactgtcttcgtagcataaagtgggtcaattgtttcgtacttggaattctgctggcccaaaagggtcttccttcttattatacatgaataaacaaagagctagtgaacttctgatagggtcttatttatgttgctcaaatgtttacataataacttgtgccaaaaatatagtgctcatgcttttcagttctcacccagaaatgtcctgtggcttctagttgtgtgcctgagatcaggtaatctcttttaacttcactttcttcatatataaaatgaagaaaagaagaggaaatataaaacaacactgggcttgccat

SEQ ID NO: 27184 - DNA, 2300 bp, Homo sapien
tatacatatattttcatttattatatgttcattcagctagggacatcagacatcctgatataaatgaagaaaggctagctctttatagagtgttacatgtatttaacccattaaaacctgatatatgactaatggtacagtaaatactgaaagtgaagtgaattatttttaacctactactagatttattaccatgcatgcattcaatatgagttaagaaacagaacatgcttacattagaaaaatgatatattgagatcatattctgaaaaaattgctaactacagaagctgactttcagagtttataatattaactaagtattctagaattataagcactataaacttatgtacggccagaagaggatattataacaccaaaattatgcacatttgtagacaaagaaggatgcaaatttcaatagaacaatataatatgaacattaattacaagtgtagttaaaggtttgtagcatacgcactcatatacatgcaatggtttaaactgaaacctgaagatacagcttgcatataagaagtgtctgaggggaattcaaggaggaaatatgttgctttgatgagatttatgaagtaaatgaatacaaataaatcaagaggtctacacataacagagacttgcaagtatccattcatttgatcaacatatatttatttgcctacaatatgagtgtttccttaactccttcttactgtaccgcaactctactgatgatagaggaaagaaaaaggaaaaaaaaaaatggagacaggacttatatcagttgaaggtaactactgaagttactagcatttatattatatttgtgagggtagaaaggctgtctctcccaaagtataagctttaggaggtcagacttttatatttccctttgttttccaagaattaagcattcagaaaatacctattaaatgaagtaactatatttagtccaatccattccttaagaaacagaatccgaattccaaagagaaattacttgttcaaagtaataaaactatgtaatgtcagagatcaattagaaattaggatttcctaaaatgtgtaccttttcattagaaaagatgactttttttggtccatcaaccagataaaagcatgcttcctcaattcaaaatgaaattttatcacgatgccaaactaaaggtcaaataatgttctgatcacctatatgatattcatgagatgatctcaaggtcctatgtagacgtatggtagcttcagaaaggaagccaagttaacagttgacagctgatttatcaaagtattgagattctaagttttctttctcctttcttgtaattttattgttcataagacttttattaaaaacaaaaattatccccaagaaagaactaagcctttagcctggtacaccatatacaaagtatagccctgaaacaaagtacagccgttggatcctgacacaaaccctagctgccatcctcaaaaattctggcttagacacaaaactggctcactctcaccagtatatcccttggtatttgctttctcaagttccttttggagtccacttaaaacctctgcgaccagtttcaaaaactcatctagggagcactttctaggaaaataaactttaattctagttttctgttgtatccacatccatgcaaacatcgattctttcaaaaattatttatagtttaatatcttcatgatttgttcatttattctttggacccaaagaaatgtatctccccgcatttgcctgggagcttctgcaatgaagttaccacaatttaaatcatctctacagtgactttatttaaaatgttgattgaataaatccaaaatcaattaatgtgccagaaaaaaaggaagccaccccactagctaaagagtaaagccctttctgcattcatctttcttactctcacccactctcccaccgcccagccctacgccaggcgagggagcagtgcggtgggcggtaccccaagtccgctgggggcgtggccctggagccatgcctcgcccccagcgcgcgctcccggcgccggccccgccccctcacccaggcggcgccgtaaagccggagaaggggcggggtctcagctcctacttcattctacggccgagaccggaggatgttccctgctcaggaggaggccgacaggaccgtgtttgttgggaatttagaggcccgagttcgggaagagattctgtacgagctgttccttcaggtaccgtctctgggaaggggcggcggaggggcggagcacgtcgggccggaaacatagcgcgcacctggaccaccc

SEQ ID NO: 27185 - DNA, 2300 bp, Homo sapien
gagattctcctctctctgccatagtgacaggtatatgcccaactaactgtggaaaacagttctttctttcaaccttactcatcaccctcacggtctgtttatgaggctctcctccaccagccagaaaggatgacgtgccatacctgcaaaacttatacagcatcaacagaatgaatctttccaacaagccgaaacattgagtattgtggcacagaatatgccccacccattactcaatctagatatccttttattccaccgtctcatgattttctttttcctggaaaacaaaagtatttctttcatagcccagctagcacgataaatcagcgagtcagaattctagctttgttgtaaggttttgcgaatatctgatcctcttattttgtacttttctatttcctaggcaaatctgagtatttcacccagttttccttaactaggcattgaaaactcagtttttttcttacaaaccttcatgtcttcctgctcatttgcacagtcttatcttgcacctcctataaaatggagaaacttgacattaaaacgtaatttttattacattttgagggattcccagagaatttttccccaatctccttaggtagggacttctttactatagttcccacacacatctatcaccctcccctacttctagacaattttgggaggcattcctcccttctcccaccaatcaaggagccaggtatctctaccgagctgagtaactgtagaaatctttctgcttccagtttctagcaccagcattacctgaggggactgattcctagaggtcaaagacaaatgctgggtttggtgcctgcgttgtttttaggcttctttttcttcctggcttcctcctccctgcacaggttcaaagttgtttctttcctcataactgtatctgaaaaagcaaggcccattctactagaagaccttgtattttccgtggagaatccacagagtgagtagtttgaaagtgcggataggaggagggctcttcaggctgtggctgctgagtgagagcgaggtgttcccaaattggtgcacacatttgtggaaatgagacaaagtttctaagtcctgagctgcacccttaattcttcacacacatgttgatttttaaagttaaacctacaacttcctccttgcatagggccaaacaagcatggtattaagagaggaagacgaatagtgttctaaacatttcccaggacttcagttccataaggtatcatctggtcgaattcttatgtagaagttgtctggttcctcagtttcacccattctatggccagcccagacttccccaggtaggatttatgccccttcttccagaaagcaggacttctcctgtcctaaatccttcattctctccatctagcagtcaaataaatcccaggaaatacacggagtgttccttgtcctgaagtataatacccatccttgtaatatactacatggccttatctttatccttacatttaggaatttctaatatttctccctcttttgttgcttcaggtgccaaataaaacaaaatgcttcatcaaaccaatgacatacatcatgtgtcaagtatctgcctcaaagcaacttgttgcatactctttacttctatatacacgctcgcagtttcttaatatttactagaaatcagaatgcaattctttaatttttatgttcccctttgtacatcatgtgtcacctttaattctttgttcatcttagttaccatgaagtttttcatttacttacttgcttcgtagttactttgaagagtaaaacgtagatgagatgcagtatactgttaaggttttctaataccacggggagcgtttcatttgtttttaaagtttaggccattgcaagaaatttgctccttaaaattctactgacacttattcttaatttttttaagagacagctgtaacattgtttacaaacgtataaataccatcccagcgagaaactagctttgtgcttctgtcataaaagagacacaggtttctaacaggaaatggaaaagggagaactactgagtcaagtgcaaactcccagccaggcagagagcagctgactctgtagaaccgtcccttcccgtctccctccacaccttgcctcctccaggcccaaccccattccaccagcaccccgccccaggcgcactggctaggactggaaggcaaggactaaggtgaaagctgactgcccgcaccgccccaggcgcactgggtaggactgaaaggcagggactaaggtgacagctgactctgccggggcggagtgcgtgtcct

SEQ ID NO: 27186 - DNA, 2300 bp, Homo sapien
aactcgtgaatagttaccttacatggcaaaacggactttgcagatatgataagtttacagggtttgaaatggagattacgttgagttgtccagataggtccaatgtaaacacatgacatctaaaatttggaagagcgatgcaaaaaaatgtcctctgtaaaggacctgacccgctgttgctggctttgaagatggagaaagagggtctctgagctaagatatgtgtatggcctcagaaactggaaacagctctcaggttacagccagcaagaaaatgaagacctgaaccctacaactgcaagaaaatgaattctgccaataactcaaattagcaggaaactgattctcccctagaacatccagaaaggaatgcagctttgctaataacttgcttttagttaagtgagacccataccaaatttctgatataccgaactgtaaaaataatagatttgagttggtttaagacactaaatttgtggtaatttgttaaggcagaaatagaaaatgaatacaacctatttagttcaatcttaattctaaaggccttctactctgagatcacataatctttacctgcttcttgaacaaatcaggatcttgttagcaaggagaaaggagtgagtggcagggagaatcccaatgaccagtgcttgtcacagacggctaatcttaatctggtttaagtctctagttctgtctctcagaattctacctcatgctttatgatccaccactttctaatctatggaatagatgatctcttgcttctgtgctcttggtaattgagttccgtctgcctggaacacctccagcccactgcccattacaagtaatacttaagaactaagtgcttgaattcttcactccttataagaatcttattgaacagcactcactatagacacacactttttatatttcgcattatgaaatacttaaaaatgcgcaaaagtagagagaacattacaatggatccctatcaaccagaattcagcttccataatcaaaattcacattgataagtcagaaataaccagcaatgtattcccacagcaggctgacgtgttgtcaacagggatggtttgatttatatctaagctgagaaaatggattcaattctccaggatcttagttatcgtgaactctaacagcaaaaatgacaaaaccactctcagaggagtcattaagtgctaccagtgaccaagatgcgagaaaaatcctacttcagactagaacctgaacagcatgtcacaagcgtcctaaaatggctgtcacgttacaggacttgcccataaggtcaattttggccacttaagacttacttgaagagagagctaagggttttctttttaatttcgtttttgtttttgtttttaatggcccacgtcagtgctagcaatagagaaaatgtgtccctgatcccttggataaatcgaattgactgaagaatgcttgaattcatttatcccaaaacaaaggcagacggctgagggtcactggagtttcagggctgctcccagcgttggagcacggacgccagagccgacttccctcaggccccgcactgcggcagggacccttctacggaggatggctggggctccgggaggctataggaacgccatctagaagctagatctcaggcaaacgaacgcgctttaaaaggaattaaaacgaaagaacacaaactcgaatcctggacctgattaggggcacgaccaaagaaagaaataactaacggttctcaccctccctttcattccctcccgcggaaagagaaaggctggaactccgcttcccagaatgcaaagcgcggggcggggctaaagagatagcctgttttccctcaagtaggatcgcgggaccacaggtttgattataaacgccagtctctcgccacggcgctcctccccctcagtctcactggtcctgccggccgttgcgtggaagggggactcagtcgtcactggcagcggttgaatggaggctctttgccccgcgccctcacggtagatgaagtccttgctttggtcagagcgatagcttctccgattgcctcagagcaagcggactacatttcccagggggctgcgggactgccgggaggagtgggggcggtgcctcacgtctggtacagtcatcacaagcctgttcggcgggactgtgatggccagagagatgacgatcttaggtgggttcccgggggtccttgttgctcttgcgggcgtagaggcgatctgaggatgccagagtgggcaggggtggttgactcacctcctggatctagctggagcagc

SEQ ID NO: 27187 - DNA, 2300 bp, Homo sapien
ctcataaatgtgactgttctctattctttagcactgtattatagaaacattggagaaatgtaacctatagcaagcaccacctcaaactgaaacttcatgcctttttagagttcacaaacattttttgacataaaacattactgaaatgatgaatcatctaataagtatgtcctttattggtatttcattttactatcaacaaaactctaccatgtactaagtgcaagcattatcattgccattttattactgattgaactccataattaaatttttattcatagatgaagaaaagagggtgtcgagggtgcaaatggttcacttaaaaacgtatttttatgactttcaatttcttaagagatgaagcaaaagatctgcctagccaactttcttaacccaagcccaaactgaaagtctaaaagatgtatttctggggaattaccccacctcaacattctcaggttttccagtgttctctgtctgtgtcagtattttgaaaacactaactcaataattctcaaaaatcaaagtctgcttttattatctggtaataaaataataggcatattaaccataatcatgaaaagtatattctttcaattctgttatagaacaaaaacaggttgtttttagctagtcaagaggtttgaaatattgtcaaattgcacataatagacaatcaatttaatatttattaaataaattagtgaaatttgaatctcatttgttaaatgaattagtaaaatttgggccttggggtggagcttagaagtgtgagggaagtttgagaaatagagtcagttgatttgtcacgtggaaaagctgctgattaagaatatggcactacacttttcaattcagaggatttataaacagaaatctaggtttattttcttaatctgggttgctcaaatggaaccagagtttcatatattttgcaaatctccctttggtaaatccccatttaacaataaagcttgaactttttgcttttacttctgggtattttgcttttttcattatcataaacatttttaaaccatggggaaactcttaataagtcatattagctctaccaggactattaaatagaggttctgggtgttttatttgaagaaaccgttgatccattggctcatcaccagggcagcaattatcagtatatggcatcgtttgtagcacaaagacatatggttaattgggggttctgtttaattgatctctttgttaaccagaactttacaacatcttaatacattagaaaagtaacatatgataaacatttacttttagtcatgttcccatttatatttagaatgggtctaatccatattttaaaatatatgcatacatgctttaagtaggattagtattgtttaagttctaacttattttatcttctaacattgtttatttattttatcttctaactgtgtttatttagaaatataccatgcctgtaatcctagcattttgggaggctgaggtgggcggatcacgagatcaggagatcgagaccatcttggctaacatggtgaaaccccatctctactaaaaatacaaaaaattagccaggcatggtggcacacacctgtaatttcagctacttgggaggctgaggcaggagagtcgcttgaacccgggaggtggaggttgcagtgagccgagatcatgccactgcactctagcctgggtgacagagtgagattccgtatcaaaaaaagaaaaaatatatacaaaattgactaccttgagtattcttttttttttttttaaataatagaaaaccaacatctcaagttttatttcagttattggctccgattttttcttttttctacccatggaatgcattgtaaatttttacttttatataaaccaagaaaatgagttttgttttgaaatccttatggctctcataactgcaggcatgtctaaatatgagatttggaacatacctcatagaaaatagcaagacaataaagagttaccaaagaattactgtaagaaaaaaaaattacccatgtaaatgttgaagtcatatcctgactgaaggaggaagtggcaggtccctgggctcaaccttatctgatgctgtgcattagacagcacactgctgactgttttcagttgtttctgtaacagcagaaagtgcactcactaggagtagtcagaattcaaaatgctcaagagaaagccatccaatgtttcagagaaggagaaacatcaaaaaccaaaggtaaggtgatttcatacatagttaaataaaatcaaactatttaatagaaaataaacacata

SEQ ID NO: 27188 - DNA, 2300 bp, Homo sapien
ttgggggaaaatcatttatacaaagttccatttccctggtatataatacctttctccacattaagtgaaagcctttttcacaaagggagaagagaagacgatttttgttgccagtgtttcagtggagcaattaagctttggctgtaacaagaagttgccataagaatagaagcacaacaaagaaaaaatggttgtgcaatgtcatcttattatttctgaaagggtctaaagagtagaaaatggcctttcctgagttgtaaagggtctataaaatcaagtaactcagaaagcactaaaagaaacactgagaaataatacaaaaaaataaacagcaatagaaattgtgttgagcagagcatggcctttggaaagagagggaagattttgtgcttctaagcatatctcatcacagtcctttctgaaagattaaaatgatttcaatattttcccacttatttaatgcaaaaaggtagggttcctctgacaaaaacgtcacatttcctacgtaagtgctattttgcagagacagatcaacaagtttatactggttgtgcaaagtcattcttaaagaacaaagataacagctgagtataaagattggaaatgttgcatgtcagatatcctttacttccaaacatttatttgggcttatagtctccttaaaaggattggaaagcattattataaatatgtctcattcaaacattaatgaggaagcaaatattcacctcttgaaaactgcagtgtctttgtagatgctatttatcagctgttcaatggaaagaatgagacaaaagcaggtggagaaatatttctgagtctagaactttctggatgaaaaagtattcctatatgtattacatcacatctagtgaattcaacagaacacaatgatttttatcaattcctataaaacttagcacacaaagagttaatttccaaagtattttgaaatccttaagaggaactatacttaagataataagtaaaagctgtataaatacaaattcaacagtaaactagtgggaaacattcctgaatcttttaaagaaaacaagagtcattaatgcaatgttaattatattttgtccatattttgtcataataaacaagtgacacatattctaaaacatgatgtggtatgctgtggctatcttttgtttcacttagtgcatatcttctagaaagcaagaggctatttttttaaaagtatgttatttgaaaaattttcatacttgaaacaaatgttgtttgtccacaaatttccaaaaagaaaatgaagactatttaaattctgctttatctaatattagcaggtagactttgtatactatcagtctattccaatactagcaaatagcaactttgaacctcttgttccatctatattacactgcaaagatcttgtttttttccgctgtttcacagtgggcaggagtgagtcatttatagatatttctgaattcaatccattttgctgtattttgaagtaaaaaaaaaaaatggtaaaaccactctgctttagtatgcctggccagttgtaacatattttataattttgaacccaaaaagtatggtgtgctttcaagttagtgcttaaattgactcaggcttcaggttttaaggtcacattattaatttttccacatttatgatctcaacatattttatatttaatcttttgtgaggaataatttgtctttaccttgagctgtgtttgtgctaggccataaaatcaggcagtgaccctgtggaatcaatggggacattaaagcgactacagaaactggtttggactaagaaagccagagtgcagaatctggatgaggtgaaaccgacattaataaacctccgtaagtaagaactcaataagctgttaaaactcctttgagggagaactaaggaagcatacgttaatgaagcccattttgataaagtcttaagataatcattaaacattgaggatttttttttattgccaagttattttaaaacagacatccccatctgttcctgaattttaccccgtatttatgcaccgccccgtttctccttgccttcaagaccgggctccgagacacagtgagagagagcaatggaggaagctcagcagtgtccactgtcgccattccttggccatagaaaacaatgtatttgaattttgatgtaagcataacaaattggtatgtccatggcatgcaactttgattttcatttatttatttataatagcatgccttaagtaatcgaactcttttaaaaatacccattaaacgtttggatttaaagggattccatga

SEQ ID NO: 27189 - DNA, 2300 bp, Homo sapien
ttaatcctctttttcttcccagtctctggtatgtccttatcagcagtgtgaaaatggactgatacaaatatagaaaaaatgaaactttgattgttggaataatacaaacagtgcagcacagactggcttagggtcatgtttcccaagctggaacaaatggcagtgggatatgggttattgaaaccacaggatgagcctacagcttattcctcttgtgccagtttacatgtggactgggaataaaagattagaaattccaaatgcctttatgctatcttaacagggtcacgttatgacatagaatataaaatgatttttgttatggtctgacatttatgtccaaatatgttgaaatcctcacccccaaggtgattgtattagaaggtggggcctttgggaaatgattaggtcttgggggaggaaccctcacaaatgggattagagttcttccagaagatgccagagagagatttcttaccccatccaccgtgtgactgcatagcaagatgtcattgatgagccagaaagtgggcctacactagacaacaaatctgtcagtgccttgatcttggatttcccagccttcagaactatgagaaataaatttctgttgctcataagctaccccatttatgacattttgttatagcagcccatacagactaagacaacttttaaaagatgagccttcaagacattttgaatatgtaaaggtctgctatagcttgactcctctagggatattagttaaataaatgcttcaacagccaaactatgagatttcttgtcttggcagagtggttgattgatgtgacctctgataagtcagttaatttttcatgcattagtcaaattggtcatagcttttaactcaattgaggaattattagaaaattagaattatagagttgaatactgtattactttaaatgatttgtaaagtataaatgtataaacatcactgtaagtgtgttcgttcaaagttttagaatctacctcagaggaaaagaagagaggggttggaggcagaaatatcatgacctactgcaaaaacataactgtgatttatatgtgcttacatagctttgtcctttaccataccttagttctcagggttatccttcaaaacagggaagaaatgcatttttattactgggtgatttaaccagtggtcaagaatatgacttataaccttgaattttaagactgtctatgggcagaatttgaagatgaaatttaatagggttcctctagagtcctaaaagaagaagtcaataagggaagaggtcttttatctagtagtggtttataaaacagttcctgggcatgacatcacagtgcaatgtacttggttcagattactcctcattatctatcagtacaactacaccgaacaaaagatgcccttcgatattataatgggtctctgatgggcattaaaggaaatgtgtaaaaataaaacccctaatattctttctttttaaaaatactatattactccccttttctccccattcatgtttcttttgctcttactcgaatgagaatgagaagtgaaaatgaatgtatgtaatcaggcattcatcaaacatagttatctgttgtattttccttgtttggttattatattttgaaaaactttgacagaaaaatgttaagagaaaaatgcatgaaaagtagatcagtcagttgtaaggtactcacttttaattaaaatatatctgatcttttttcaagtgtgggcctttcatatctaattacacaaagacttattggcagagaagaggtagttgattttctttctcttatattccctcctcactcacagtatattttccagtattttgtgttggatgcctcttttaaaaaacctatactcaaacaattatctgcagaaaagcaactttaagattattgtaaggtgattatactaatggatctaattttccatgcctcatgcctttctatttcatgccctttggtagtgacctccccattcttattctaagttggctacatgacgagaacaatgggattttagtggaactgatgcaagcagaagcctgaaatgtgtttctgcatttctgctttcttttgtagactcctgcccctgccacgagaacacaccctttccagtttgctggagaaatataagagaagtccagtgaaagagagctgagtttccccaatgatgccatcaagatgaactaactacagttaaccagccagctgatagcagatgcatgagtgagcccagctgagagcaggtgagcatggcccagagcagcagagctgctgag

SEQ ID NO: 27190 - DNA, 2300 bp, Homo sapien
ccattaaatggttgttaaatgtcttaactagttgagaattaattgtatattagcagttgttatttttgttttgtttgttttgagatagagtgtcattctgtcacccaggctggagtgcagtggcacgatctcggctcactgcaacctctgcctaccaggttcaagcaattcttctgcctcagcctcctgagtagctgggactacaggcgcatgccaccatacccggctaatttttgtatttttactagagatggggtttcaccattttggtcaggttggtctcaaactcctgacctcaggcgatccacccacctcggcctcctaaattgctgggattacaggtgtgagccaccgtacctggccatattaagttttttgagagaattagaaaactgggtttcctcaactccaagatgttatcagttgtaaaatgtacccgtatgttttataccactaagaaagaaaaataagcctccaattaagcaacatgccatcaattgtaaaatataaccagaggggggagaaaagtagtgtttagctgggatacctccctactccctgaaaaacaagtcagggttttattagtaaatgaaaatgggagaatggatatttggtggcagtcatgataaccatttcatttctatatcattattaacctcttaaaatatccatcttaagtacattatggcaaagcttcttaaaatggtggcattggaatctcaagaaagtctcttctcatcctactccttacacagttgaaattaattgttgctgcctcctttctgtatctttttctttggctatcatttcttatccttttaatcaataaattcaacaatttgatacaatcagataattatttcctaaagtttgacttagagttaagcattgtacttaaaaagctacagggtagtctttcaattaaaatttatcttttaaattccatagggaccaaggtatttgttgatagcttcaggtctgataacttaaacaaaatgttctggcatcttgaaaaacaaactgcatggaatttattccagcttctcttccaaaggtgtcatggccccccttccttaggtcaattttgacacttacctatcaagttttcagaaatgcaatgagttcttgcttcttctgttgtgtatgtgttagtgataggaaattttttggtctcttcttagataataaatatcattggaatatttttcaaactgtgactaaaatgtctttggcattctccattgtactttttatatatgtttatgccctccctgtcttctgtatctgtaaggaatggacctgacattaagacttctccatagagcacatgagtaaggatttactaacgaactacattaaacccttgatagccctgaacaagcatctaaagaatcactcctctctgtctttaataagtcatggtaaaaagtatgggtaggtaagtttatgactgtattttaatgtttatgaatatgattaagatggtcacactttgaacagactcacaaaataatcttcaacttgttagtggtttcatttttttgaaaacggaaattctaaaaattacttatggaatgtctggtgtttgggggatgatgtcagaaatgaatctgttctgttggcctcaaccccacatcagactcatcagagtctgcatctcttttcctttttctgcacatctacttttgtttcttcctaagtgcccagtaatgtaaggaagcaagttctagttcccctgtagagctataaagctataaaggagactgaacattcacattactttgcagaaaggtgcttatgaaaattcagagacttggcggctttggaagatggctatgtaacattaaagtatgttctcttctctaatgatttgatcattttaacagtatgcattaacccacaggatttccagtagacattttcaattgaataggaacggcaataaaacaaattactaaagtgactataatccatttatatgtctattatttatatgtaatatatatatacatttacagatgctatattattttgcttgtaggtatcataacgtgattctagttctgcctccttaactattcttatttttattttttttagaacactgatatttgcatttaatggggaacaaaagatgaagaaggaaaaggaatatattcactaaggattctatctgcttactgctacagacctatgtgttaaggaattcttctcctcctccttgcgtagaagttgatcagcactgtggtcagactgcatttatcttgtcattgccagaagaaatcttggacagaatgtaa

SEQ ID NO: 27191 - DNA, 2300 bp, Homo sapien
tttgaagggagtatcgaggacattagagagaaggctactgcaatattcaactgtggatcgtgtaaaccttggtcttcatgtggaccggtctctttgtgatgccatcatcaaataaacacaacttttgcccctgaaaatgtttaaatgcaacataagcctttattagaatttcaggaatagtattagatcatcgttcttcactcacctttctatttctatcaaaccctagcactacactgaaaacttttttccaccctcagttcaggtgtaaactttttttaaaaaactcatctccttgtttcctggatgtgttccttctccccactaccttttttctctttcttggccctatttctagttatttctgattttcaattcttttaaaccattatcactatgggcacagcagatggttcttaagtgaatcctgcaaaggggagaaggacacataacaaatactcatgcagaagtcatttttatctttgttaaacaggaaaaaggtgattagagccaattttcacgtagtagtcataaggatgaagaagaaggcatggatgtgaaagtaatattggaagcagaatggcagacattgggccttagatgtggaatggcagaaattggatatagaggaaaaaaatgaaggttgtctagaaatatctgccaggtttgtggctcagaaaagaggataattgggggtactactgattaagtaagacactactacaggaagagaagagttaggggaaatacataatgcatcctaccttataaaaactgattttgaagtgttttagattatccaagtggagctttccagagacagagggataaataaaactagaccttagaagaggaatgaacttaatgttcatcattgtaaaggtgttagttgaaccagagaataaggtttagaggtgtcaggacagaatgccaggtaaagaataaaatagaaggcaaggcacttccaaaagtctgaaaaaattagaacagagaagtgggaagaaagtaaggaagtggaagaggaagatacttcgtgcagcaatgcctaatattacagagaagttgagaaacacgtgaactgagcctggaagtagccagaaatatttccaagaatagtccattacatttgaccctattaagagttatttcaatagaaatagggactgaaagctgatggctgataaggactggaatgtagactgctctttccataatcttgtctatgaaggaaagaaattgagctgaaatggggatctagaagtactaataggctgaccttaggttgcagataaaaggagttgtgagaatgagcaaccttgtttgatgaggacaaaataggaagtctcatctcttaaggaggaatcacgttaaagaggtgactatatagagggagagctgggtgaagtgcttgaatgaacagaggaatttatttacagggaaataaggtttccagagagtcgctatggaaagaatttaatgtaattatccagccatatatgataaccaactctgtgcccggagctatggggtaatggggaaagaagacattattcttgcctccaaggagctaatggtccaatagagatgcttatctcattaagaaacatttagtaagaacatactgtgtgctggaagatactgttctaggcactgaggatacagctgtggttacagaactatctaggcccttagagggatttgattctagtggcagcagacatgcaaagaaattctttaaccatttatatcatagctgctacctctcacaaattggcaatcgtctccatttttacaccctatatggaatgcaaaaatagaggggattgtcagttctatgaggtgctgcagctagggggaggcaggtgatggttcttctttgcagaggtgattgtgatgagtcttgaaaggacagtgggttttcaccaggtggagcatgtagtcagggcaggcagatggaacaatgagagcaaaagccaggaggttggccgggaaattgagtaggaatggaaggatgagtcataggagaggaaactgagtagcatgaggatgaggatgtaagagaccagatgacgatggcagtgtgcattttgggtggaggccaatgatggcaggaatgaaaagttctgtaggattaagtggctccaaagttctgaaagactctgcttagagtggtgctcactctggccaaagaaaatcactgatgaacgctacagtctacagcccagcccagtcagcaggcttggtcaggcttccagaataaatgcctgggcaaagtagtctgtggctctgttgggctaggc

SEQ ID NO: 27192 - DNA, 2300 bp, Homo sapien
tttacctgaatgtcaacaacatagagtaatgtagcagtttagaagttattaaataatatcttgaggatatataattccgacacacatgcatattaaagctgactcatacaacacaattgtcacggcgcaaatttaaaaaatgagttaggaaatcccagcgatgggttttgtgtgccaatttatctcaattgctcaaatttctctaattattcatcccaattgtaagccttctaaaaaggaatgcctatgaggaaacttgaaattttcttctcaatgttcttcagtacaacagttaaaaatatttaaagaaatgctgagtaagtaggaaaccctcagaagtaagctgaaaatgaacagtctcagtgggcaaataggtctaccatataaaagctctatttgatgattatctattgtaagatcatctttttttttctgtatggaagtaacaaatttaactcagagaaaagttgtattgccaaattcttgaaattaaaccttagtatctggcaacatttttcctcccatggtactagattactagatttttatgttaaatttaattttcttgaattcaaatgtatgagcttgatttctaaaaaacaaacaaacaaaccaaaaaaccaaaaccctcatatggagaaacatgaagttagcatataaacaagaaaagaagaaactttgatctataaatgaagaaaaatgggttttgataagctctctttgacaggtcaccctccttgggcttcagagttataaaaaaatcgatacgtgagattagagatgtgacagtatttctaaatttctgtttccaaccgtttcatgacttttcatttcctctagaaaagacataggatattaatataataagatttgcaatttgttaaatatcaaatgagtcaacaaatatgaagcttcaaggaaaaggtgacaacaggtggtaccagacatctgagctgcagaacaaagatggttgtaaagtgcacagaactgttacaaagccttaagagctactataatccatgattattaaataacaccacatactatttcaattagcatttgccaagcttgctttccttgtcattggattaaaaattatacccggattttcaagtgtattctatttgtgacaatatgcattgataatttctctcctcacactgctgcactctcacctccgttcccagattagctcctggaactcgagatatttttgtggctagagattgctttcttaatgttagattttccttacaattccatatatagtcaagcattccatgcatggtagttaattgtttgcttaatttggcaactgggatattagaattatgtatcattaggcagtgatatttttgtaaggttgtttgctagatagatcctatttcatttatattaagtcttgggaagataaactttatttttccagagcctagcagtgactgacacatattcgaatgaatgaaggtagatagaaaatgtctatattcatttacgtaatgattagttaaggagaaaagtacttcccagcataaagatttctggcaaccctttgcttatttgacttttcccttcaggcaagttcaaggcttgtgaaattcctagaaaggcgaggggagagaacgcgtgacacagaaaggggccggagttcgggaccctacgcagttttgggacgttatgggcatggagggaaatgtttgctttggaggctttgggtaagctagggatccgacaagccctgggcgcagggaggaacgctgccctccggcctccagtcgcgctccccgaagcccagcgccagcgtcgcgcaacctgccgcaggggcggctcccgggccaggcagccaggcgcgccctcgccccacccgggaacgccaggcccgcgcagggaggggcggggctccatggcggccccgccccgccgcccggagggtcacaatgtagggttagggcggccggcgggcggggctctgcgggggaggagccgccgggcgggggcggggatggcgcgtgggggaggggagggaggaggactcgcggagggaggaggacaacgccattccgggcggccgctccctccgtcccctctctcccttccccaaagcagcccgcggaccggcagcaaaggaacgtgcgaacgcgtgacgccgcccgactggctcgcgctctcccgtgccccggcgtcctccgcccgctcatggcccgggccgccgcggacgagcggcgctgaggcgggccgcgtggagacgtgaggcggccgccgtggccctcacagtcggcgtttcgccgcctgcccgcggt

SEQ ID NO: 27193 - DNA, 2300 bp, Homo sapien
ctgtcccatcccctaggcatctcattcagtgccttaatttcctgctgtcaataagccagcaattctatctttattccagaatgttaatcttagttacagattcatattcaactgtcttctcaaattgaaatctcatggatcataatgaaccagtgatttccactgctacctcaaaactaaagaaaaaaaaaatcctgtgttcttacttaagtggtgccattttcagtccataatctgccaggcatgatggttcatgcctgtaatcccagcactttgggaggctgaggcaggtggatcacttgaggtcaggagttcgagaccagcctggccaacatggtgaaaccccacctctactgaaaatacaaaaattagtcgggtgtggtggtgggcgcctgtaatcccagctactagagacgctgaggcaagagaattgctggaactcaggaggcggagtttgcagtgagccgagatcacaccactgagctccagactgggtgacagagcgagactctgtctcaataaaaaataaaatgtcatcatcatcatcatctagttgttcaaaaaaaaaaaaatagtaatcattatcatcatctagttgttcatgccagaattctgttattcttgatattttccttcttacctatctcttatcctgctcagtcaagtcctgttggtgcccttccttgcatatatgtataaatgtatatgtatgtaattttatctcttttctgtatttttacttttaacaaccttcatccatgctacctttatttctggatagattctgcaatagtcttttaacagatgaccacccacttcacacagggactttaaaggtgtttcagagacataaacctgagcctgttattcttagatttaaccattcagtgactgtattagtccatttacatgctgctgataaagacatacccgagaccgggcaatttgcaaaagaaagaggtttaatggactcacagttttacatggctggggaggcctaacaatcatgggctggggaggcctaacatggcagaaggtgaagggcatgtctcacttggtggcagacaagagaagagaacaagagccaagccaaaggggaaaccccttataaaaccatcacatctcatgaggcatattcactaccacgagaacggtatgggggaaaccgcccccatgattgaattatctcctgctgaatccctcccacaatacaggagaattatgggagctacaatttaagatgagatttgagtggggacacagccaaaccgtatcagtgactttgcattatacccagaatgtggtggggaaaaaaattcttaataggaccacaagaccttgtagattttaactcactgcctgacttttcattgtaatctctcccttggttccccaagctacactaacctcctgttagttcctaaacatatcaacttctttactgccttaaagtcttcatcatgctgttccatggccaagaatactctatagtcccccagcactctggcatggctaactcccactcattattcaagtctgagcttaaatgtcctttgccatggaggtcttccctgctctccccaccacctccaagactaagctcccatttttatacctctcacataattctgtctcatcacaactttctttttataacaattgtaatataattatttgtaattatttgtttataaatatatgtgaagttaatgggtataatgttttttaaatgaggctgagaattttctcagctcagggaccatatctctcttgttcactgctgtatatattcccagtgttcagtacagtatcttgcccttagaaaatgcttcttgcgagaaaaaatatacatacatatgtgtgtatataattacatatatgtggatgtgtaatatctatggctgggtataaatgtacatttgcacatgtgtataaaccaacaggaaaattaacactaacacttctcaggaatgaaatcagtcagtgttacaattttcaggttcaggtgagaatccttacgtactcttaattttagtagccagaaggccatattgagtattattaattttctcccttcttataggtaaaaaatttgaaaacactgaaatgtttggtcagtacccacttcaggtcaatgggttcaaagatctgcatgagtgcctagaagctgcaatgattgaaggagaaattgagtctttacattcagagaattcaggaaaatcaggccaagaggtgagtttaacattttcattgtcccctttcttccctaggtctttcttacaatgctatagcacaatgta

SEQ ID NO: 27194 - DNA, 2300 bp, Homo sapien
aacaaattagaatttccccaagttttatatttggacaggtatggtttgatatactgcatgacttagtttgaaacagtttagtaagggagaaaatattgtttagaggaaaattctgcataattttcttagaattaatttctacttttgcataatatacctaataccatttgtcaaggtagatgaaatttactttgtattagaaaagtatagtttttgggaataatgttataaggaaatttaaaaaagatgaattttgtaatcttaaaattcagaattttaaaaaataccattttgtattatctaccttacatcttatacaattttgaatgaattgatgctttgtggtgatgtctgtacttaatattgtatctatctatctttctgtctttctttctgtctctctgtcttcctgtctttctgtcttcctgttttcctgtctttctttcttttgtttttttctgtctgtctttctgtctatctttctgtctttccttcttttttgttttgagacagagtcttgctctgtcgcccaggctggagtgcagtggtgcgatcttggctcactgcaaacaccatctcctgggttcaaatgattctcctgtctcagcttcccgagtagctgggattacagacacccaccatcgtggctggctaatttttgtattttagtagagacgagatttcaccatgttggccaggctggtcttgaactcctgacctcaggtgatcctcccgccttggcgtcccagagtggtaggccgggtacgctggcatctggccatattgcatctactttcatgatattcggaaatgctaatgattacctttttctgatagatacatgcacagaaacagagaaataacaagaattaagagggaagagatcaagagactgaaagattacctcacggtattacaacaaaggctagaaaggtattttaacttttatgaaattaggagataattatcagaaaccatgtatttggtgactagatttttaatttcaaatttgctttgagtgatttataattttaggagtagttaatattgtgtgaatagttttgagttttgcttgaaactaaaaatctatagtagactttaaaaaattattctagtgtttaaaattaaatatctcattgtcaacaggtaatgttcctactgctgaaaatagatacaaagttaaatgaatatagttttgaccttcctttttgcatgaaactaaagattactcttgagattttcattaaaatgaatggtatctgagtttttctccttaaaacaggatacaaactcagctgcctaccaagtcttctcagcagcttcgtaaaggaggaaattgtgtcaggtgtaagatggtatgtgccgggagcctagagagcaatctgtgtgtacagggaatgaatgccattccataccagtggatggtaccatgtatgagtatggcctcactgttgtctattgatttggatcatttctaaaagacgtcagaatctggactgagaaatgttctacaggccagacagaaatctaaaggctgaaatgtcacaagtcatttcagtttgcaaaccccaatctgctctgcattcccctattttaggaattttcaaattagtagtctaaaacttcttacatcaaatagtatattgtattttaatgatttttattcttaaaaagtatgaataatcatattgaaacatgattagtggtaaaagataggaggatagtacacatcactgtcttgatcatgagaccagatgccagatctaaaaataaaaacagtctcaggagatgtcagttttcatcttcctattgagttacaatttagaacagcatttacagattataacagtatatactcacattcagtcccaatcggccttggtttcctgtctttggggaacttttaatgtttttcttaagtgtatattcagttttaccatcttcgttttaaagcaaatgaattttattgctgaggaagttttattgaagtatcgtatcacgttttataataataataaaggcccaaatatgctgtatatagaaataaaagcatttgtacattttatgattaacagatatttaagctatggttccggtcccaaacgattccccttggtagatgttcttcagtatgcattggaatttgcctcaagtaaacctgtttgcacttctcctgttgacgatattgacgctagttccccacctagtggttccataccatcacagacattaccaaggtaaaaagtaatcctgatgcaagagacagttgttacctttattacacaataatgtaactgctg

SEQ ID NO: 27195 - DNA, 2300 bp, Homo sapien
ttagatattcttatttctattttttttttacatttttctcagtaactaaaactgtctgcacatagaaaagaacctgtctaagttgtcattgaacaaaccaaatgatgtttgtgatcatttacttcatataaatgtgacattgcgttaaacaattagattgttggctttcacattagctccaattttgagtttaaatggaagacatcaggaaaataaataccaaggaaaacagaactatctgactttatcagttattgcctcttttcccagattttttcttaatttatagctcttctttttttacttttaagataactatctctgggtttcagatgttgctgttgctaaaaaggcgctctcaagcatacactgcgtcagatgatattttttattataatgtagattatcaaaacttaagcatatacttaaaatgtttcataattatagctgactttgtttctacaaaggtgaaatactaatgttatatgtttctttttaattttcaagttatatagattccttgctgttcctcatctgtgcttatcagaataacaaagaactcttgtctaaaggcttatacagaggacatgatgaagaattgatatcacattatagaagagaatgtttgctagtaagttgaatgcatatagtatgatcttatcattttgtctgacattgggcaagttttccagactcatatataagtgattgactccataaactctgaggggataagaacatgatgatgtctataaactggttctagtcccttcagatggaaaagtacactcagtactttattcttttctctttatgaatcccaagtactataggtgataaatgagaaatgttcttaaaatagcatcagtttgtttacatttctgtatttagatttcgtcatcacactaccactcctttttttggtgggagaggaagggatgcatagataagccttaaaaaatgttttatgtaagtctataagaatatgcaggctggcgcagcagctcatgcctgtaatcctagcactttggaaggctgaggctggtggatcacaaagtcaggagatcgagaccatcctggccaacgtggtgaaaccccatctcgactaaaatacacaaacacaaaaattagctggatatggtggtgtgcgcctgtagtctcaactactcaggaggctgaggcaggggaatcgcatgaacctgggaagtggaggttgccttgagccaagatcgcgccactgcattccatcctggcaaccaggtgacagagcaagactctgtctcaaaaaaacaagaatatacatagaatgtattagagtaatttgtttaacttaaaaaattgaattttcaggtacaagaatagtatagctgactttaaacatacatagaaccaaaacctgatggttcctctgaaaccttcaaaaaatggtataatgtttctcatcattttttgtagtaacccagccacatttggttatttgttttacataggaattgaaatgaaacctcgtcaagattactttagtgttcctttcagattttttcacgttgtatatttacaaagtgtcaggttctgagggatacaaacatgagtaagatgtacttcctgtcctcagaaaactcagtctggtaggagacataattgtttgttctggaataagtgccattatgagaaatatgcacaatgatatgcctgaaatatttgggaagaaccttaagagacaaggtaaacctcgtctggatcttgatggataaatagaagttttattcatgatagagaagggagaatattccagtacacaacagaaaatcaagataaattcactgtggctatccaggttatgaggaagtggggtaaggtggaagtgatgaagctgacaatacttgtcgatgtcagatgatgaagaaacttagatgacattcaaatgagtttgcaccagtgtaagtttgattaggtttggcataatgaggtttgttttcagaaaataattctggtaataataatagcattctagaggatgaacaggaaagaagtagattgaagtcaagaaccttagaggggaaagtcaagggacggagagtgaggacctcaactcatgtagtacggtaggtatgatggtgaaggaaatgaaatcggcatgtcatagctgttgggtgagtgggaagaaggaaatggaagagtcaaagctgccaaacttactagtttttcgtttaatattagggagtctaataggaggaacaaggttggctttgaacatgttttatttaagagatttccaggacattctttgattcagtgaa

SEQ ID NO: 27196 - DNA, 2300 bp, Homo sapien
catcctggcaaccaggtgacagagcaagactctgtctcaaaaaaacaagaatatacatagaatgtattagagtaatttgtttaacttaaaaaattgaattttcaggtacaagaatagtatagctgactttaaacatacatagaaccaaaacctgatggttcctctgaaaccttcaaaaaatggtataatgtttctcatcattttttgtagtaacccagccacatttggttatttgttttacataggaattgaaatgaaacctcgtcaagattactttagtgttcctttcagattttttcacgttgtatatttacaaagtgtcaggttctgagggatacaaacatgagtaagatgtacttcctgtcctcagaaaactcagtctggtaggagacataattgtttgttctggaataagtgccattatgagaaatatgcacaatgatatgcctgaaatatttgggaagaaccttaagagacaaggtaaacctcgtctggatcttgatggataaatagaagttttattcatgatagagaagggagaatattccagtacacaacagaaaatcaagataaattcactgtggctatccaggttatgaggaagtggggtaaggtggaagtgatgaagctgacaatacttgtcgatgtcagatgatgaagaaacttagatgacattcaaatgagtttgcaccagtgtaagtttgattaggtttggcataatgaggtttgttttcagaaaataattctggtaataataatagcattctagaggatgaacaggaaagaagtagattgaagtcaagaaccttagaggggaaagtcaagggacggagagtgaggacctcaactcatgtagtacggtaggtatgatggtgaaggaaatgaaatcggcatgtcatagctgttgggtgagtgggaagaaggaaatggaagagtcaaagctgccaaacttactagtttttcgtttaatattagggagtctaataggaggaacaaggttggctttgaacatgttttatttaagagatttccaggacattctttgattcagtgaacttaacattaaacttgtcattaaattttatatatcatttaatgcatacttccaaaaattgtagtaaatacttgaagatttatctcattttattctcttaacccctatggttggaagataaaataccctattattaatataaagaaagtgaagctaacagatttagctaatctgttcacgattggtgtattagtccgttctcacactgctataaagatactacacaagactgggtaatttataaaggaaagaggtttaactgactcacagttccacatggttggggaggcctcaggaaacttaaaatgatggcggaaggtgaaggggaagcaaggaccttcatcacatggtggcaggagagagaagtgcaagcagaggaaatgccagatgcttatgaaaccatcagatctcatgagactcactccctgtcacaagaacagcactggggaaactgtccctatgatctgatcacctcccaccaggtctcttcctcaacacctgggggttacaattcaagataagatttgggtggagacacaaagcctaaccatatcaattgggtaattgattcatggccaagttggacttaatagcacaaccatctttccaaaatcaaaataaattgcataagaattatgtggtgtaaatctaaatatataactttttttatttgaaattcagcttaaaagtcatgtttatcatgctgtaaacataagattttaaataagaacccttaaatattataggtcttatacctgtatttatctcttatgtttcttattgcatggatttctctgttctactagatcagtgatcagcacactatggcttgtgctccacctaccacttgtttttatagataagttttattgaaacatagccatgcacattcatttatatattgggtattattgtctttgtactacaatggcagagttgaatagttgcaacagaaacttcatggccttcaaagcctataatagtcctcgtctggcccttcacagaaaaagtttgccaatccttgtaccaaattgtaagctccatgagagttttctgtattaatcacttgagtgcccctgcatctgcagaaatttctggcacgtggtgttgactctgtaggaagtttttgaagggaaaagtgaattgattacctttatatttctgtatcaaggaatacaatagtatatattcagttgccattaatggagatgagtttttcaaaaattaatatggattctgaatttct

SEQ ID NO: 27197 - DNA, 2300 bp, Homo sapien
tcagttcaaagaattgggatgagtgggtagaaaagtcacacattcttatgaaataaaaaggacagccacagttttatacatatgtgtatttacatatatgacatatatgtatatgtgtatgtacatatgtatatatatatgtgtgtgtgaaagtgagggggagagaggaatgaggtctacataatttaattttattactagtacatttttatggttaattcaaatatttaggcaaatttgcctttaataggaaaatcatcaaaaaggcaaggcaagtagttgcataagctttgcttttttctgaaattacctgcattcacttagagaaaaaaggattttacattatctatcaagcaactaatttacatatatgatttcaggtatttcaatttcaatgtgtgtagcagttcaggaataaaaatgcagtattttcttatattatttgtgttttttatgattgagccgtacgatcttttggtttagttaggaatttggcttccccatccctcctattaaaacttgatttttggaaagtatagatagaagagctgtgcttttcttttaaaatgcttataaaattcaaaagcaactggaatacattttatgataccaattttacatatatttaaaaaccaggactacaaaatataaatttataaaaaattataaaaaatgattgggattctttctctttggaatgattatatgttataaacatacagcaccgtgagtataaataggttactgtttctcctaatgtgcctactttaatgatgaattgcattcctgattacagaatcatgagctatcaaaatacaccaataaatacaggcaaacattggtaaaattccgacttagaaaataatcaaagcttaaagcttagcattctgatttggagcaagaaatatgtaaattgtgaaataatgagcagcttctgagcacatcccctttattttacctgcaaggacctgagtcagaagtctgcatttcaaaatgcttctttttttttacagtgtggatgaatggccacgaataatacaaattggctttactttccaagtttattatacttaaacatttgttggcaggttagcgacatcatttattatataatgaggtaaaccccaaatggaacccccaaacatcttctcttcctggtcatcataggctgccattcttcccctagaaattaatacatctgtatgcgggatcgtgccttctcatcccctgctgcagaatcctcggtcataacagcttttgtgttcatgaatatgtaaatgtaacatgcataaaataaaataaaaaagcagacagtttctaccacagactgcctaactctgttgaactaatacacaaaaagcgaagatttaatttttcaagcattttgagtcagtgtttcaaggcatgacataattatgtaatataaaaatacataaattaggcatatgcagatgtgcatgacagttagactcaaaataaatcggcatgtagtcatggctatagtgattcatgcagattcacttactccttcactctgatgcctagtaatacggggtaaatgccttaggtatttaatgaccttgtatttactgactagattctactcctatacttcaccccaataaatgactaggaaaatgtttaattaatatgtattatttgtatatgtatgtatatatatgtattatacacacacatatgcttttttcttttgaaggggaaaagcgatggctatcttccactgaagtattctggaggaagctgtgggaagaaaattggtggattttattattgaaataagcaggcatgttcatgcatatttttacggcatgcatggctatgcgccactctgtgcaaacagtgctattgcagcttgtgcgcggtaattaggttgatgtaattatggtgaaataaaggcagtcgcactgataatttcacagtgaatattaaagacatatgtgccttccagtgtacaatgaatgaacctgaactgctgtcagggtctaggaggacagtgtggccaatgcacctattgtgtccctgctgcagaaaggagcctgccgattggccactgtctgcagcacatagcactggctggttataaaggacttgtctaggggagagcctgtaggtactccattgtctggtaaagttcatatgactgcattctttttgcaaggggggtggagggagagcggggaaggagggggtgtcagctcaactgtaaaagctgcacagattttttttctttctctctctctgcctctccatagattgtttctgtttcatgccctgtctca

SEQ ID NO: 27198 - DNA, 2300 bp, Homo sapien
tggactgtgaactcaccaaggccctttcaagtgctgatgtatgttttatgttttatgtaggttattagtgaccttttttgcacttttatcagaaagtcctttgttttgtgcatgtagctctgtcagaatagaggccagatcttcaggtgtttaattgcagacttctaatgcataagacctgctggccttgttgacttttagaagttatttgttagtctcaaatgaaagaaacaagaaaaaaaaaagcttgctctttttataacagagtaagatgaaacatgcaatgatagggtggtgctgagttgtagaaatttctaaaaactaggtattcctcaaacagtaattagaatttttgattttctacatatctattggctaaagagccaaaaatggttttcaataatgcctgttttcaatatataaaacgtccataacagaatcactaaaagacatcaaattattattatttaaaatttattgagaggcaatgtcaatctgttttttcaaacctatcagtgactctctattgtatattggagaaagtagaaactcttaatttctgccctaacccccacccataactgattttaacactcctattaccacattatttgttactgcagtttttaaaattgactctatccatcagacagtattatttggccgctgtttttttacacctgtcttatttattcttgattttttttttttggtttgtctgttttatttatgtcactgtccactttgcagacaatttagttggccaggtatccatgaggaatattgccattcctgcactgtgctgagtcagacatgccttgtggcatcatcaagtaacaaggttgagaaaacgtgggtgtggcaaatccatttctgagtaacagcctttttggagggaagagattggctaatccaatcagtatcaaagcctgtgcttcttaattgggttgtattattcaaaagcatggatttaatttgaaataaaattgcctgatgtttctgtatcattgatttattgatggtggcggctactattttttagtgttttcaaggaatatgaaaacttacagtatgaaatttacacaaatctgtagttttaaaatattaccttttcctttagtgtttctcctattttccgttagtttgagttctcattttaaaaaaatgttaaagagaaaaaacatttgtctgacatagagctcaaaaggaaattctcattaaaacaactatgagaatgagagaaatcatgatactaagatagtatgtaatctttagagtttaaaatagttgttcctagcccctaaagtgatattattttgacttccttaagcatagagaactttgtttacagtagttctactctgcagttaggtgtaataaaccagcattctttacaaaactcaaatgagaccttggaacctgagctatatgagtaacacatatatgatcctgtgatctatatgatatattatttgtcatttctctattcccagcttgaaatttaatataaaaaaaagtttcactgcttcattctaaatcctgtttgatccaacatggaaaacattgttttagatttcttaatgtaaaaaaaaaaaaaatatatttgactggattagatagtagttactgcaaaaagttactgcaaaaaaaaaaaaaaaaactcggagtttacctttagtcacatcttcagtacattttctattaaagtatttctagattttagtgtctgcttggttttggttatctaagctgtaataagtagccttgggacccctgaaggcacgccccacacacttatgctgtgtgacctaaggtcacaagtaatggctgcaagctaattgattgagaaagggttgtctggcggggcctctttgcgtcctccctttacattcctaagttctgtgaaagaggcactagtagctcaggctagcaaggaaggaaaaaagaggaagtttctctctgcgttctgattacactctgaattcccttgtagtgagcttacttctctccacccacttcttaccaagaactccttaacttgagggtgaacaacttaaagcttgatcctacagttacctgaaaagtgatttgagtattcattgaactgaaagaacaaatcgcctacttcaggcggtggcaagcgtatggaaattatattagaacttcagcaaagtgcacagctgcataatagagaagccggcactcagattgacaggcaaataagccagcttgtggaaggggcctctgggtggcagctctgggcttttgggtgttggacaaccataggcaaaactgaaatg

SEQ ID NO: 27199 - DNA, 2300 bp, Homo sapien
agtaaaactggtaacagcagccaaacttttcaatagtcgtctctctcctagagcaatgctctgtggaagggagagaaaactatgttgcctccctaatgataatgtgctgattctgtttgtttaactaaagctgcaccagattagcagaccataattacagctaaaatccttgtctctgatacagttgacagaatgtctgtttcactgagctgaactcccaggaaaggctttactcaaggttaagccaggctgcctgaaagcaatagtgctgtttcagtgctacactggatactttatctgagcagcgggatttcctacacttgggtttcacatggtttactttgatttcttggggcgataaggacgtttgctcctctttgaaaggttgtgttagtggccataccattgtaaaaccttaagaactttcttttgtgtctggatatgaagatatctgcctttttcttgatatacaactttactaggacttcttttagggaaatcccccctccatcccccagttctttccttgcctttcagctttgcagaacgcaatgaagtctgtcattaataatctttccttgaccaggcgcagtggctcacaactgtaatcccagcactttgggaggccaagacgtgtggatcacctgaggtcaggagtttgagaccagcctggccaacatggcgaaaccccttctcaactacaaaaacaaaaattagcccggcgtggtggcgggtagctggaatcccagctacccaggaggctgaggcagaagaatcgcttgaacccgggaggcgaagattgcagtgagccgagatccggccactgcactccaccctagatgacaagggtgaaactccatctcaaaataatagtaataataaatctttcctttatctagtcaactttgaatgttatgcttaattccttgagacctagaaatggaattcactgtgtttgtttgatcactggtggttttctatagtggatcgaggaatgttctcacctcttgccagaatcttttaaatagtcctgctctcttctctgtcaggtcgcttctctattcactctcatctactttgtgaatcataaggcaaattgtcaatgaatttgactaaaatttcaagaaataaatcaaggtgagaaaagtaagctgacaacagagttgagaataaaaggggaagtatttgactgggtctgttttgcttccccgcccaaaaccatcccagacgttccttaaatagagcccacagtttgtgggctttctaatgaatagtggccaagaggcagcctcacatttgaggcatgctattaccattttttcttcattccctctccttaattagggtctttaaagggaggctgccctcagattctgacaaacagtattagcttcctcataatgcaatgcctgatcctggagctatttttcaggatggtttgcactgagtctgtgacattgtctatatttctagaatgcaggaggaatacctcaacagagaattagctgtggaggttctaaaaagcctattcctgaaggcctgaagaactgattttaataacccataataatacgggagggagatagagttgactaattttcagtttcacagtttggctaatgcctacagtaagatgtattttacctgtaccaaacacacacacaccaaaaaattcatgaaacaatatttatcccttttccatgcaattccttctattttccattctaatttatttcagtttctaaatgcaaacctccacccactgaattgattctctcacactaaagagtggcaacccactgtttgaaaagcactcaatgggatgccctttatttttctaaccctgtaattcaatatagagagactctgaattgaggacaagcctgatgagtttgaggtatggaataaaggaatctgatcggctccgggtttgttgtgtttttaaatcttcctgtgtgttcattctcttcaccacagagaggactctattatctttgctcaaagagcagacagtgctctagctgttttcccctgcttagctttgatccctgcagccatgctcagcccttcccccaagccctcccttccagatggattgaggctgttgagactccaggggtgttcggggctgggagcctgctgagtgttccctgttcccacctccaatctgctccatcctccagctgcatttcattccggatctaccaggttaatgggattatcgttcttctctgttattctgttatttcatatagggtgaatcagtttgttcctgggacaatttttagatggttgctgag

SEQ ID NO: 27200 - DNA, 2300 bp, Homo sapien
gagccgagatggggtcactgaactccagcctgggcgacagagcgagtatagaaaagttctcgtagaacactgttaaacagatgaacaacttcaatacttgctcttctctgcttgatttcatttagtgtggtgagtaaaaatttaaattccaaatattatttacacgcaattatatccagtagaattcctgtttgctcaaatgggaagtccctagccgttactcatgttgtcttacgtctgtattgaactcttattagtttgtaaaagctttggcagaactttacaatcagatggtatgattttgcaaagccacttcctcttactaccactggtcatctgtcatttattgggctgccgtaaagcaggattccccttaaatcaaattaaattggaatcacttgagtaaggctcaggtactagtatatatatacatatatagatagatagatagatagatatattttttttttttttgagacggagtctcgctgtgtcgcccaggctggagtgcagtggcgcaatctcggctcactgcaagctccccctcccggggttcacgccattctcctgcctcagcctcccgagtcgctgggactacaggcgcctgcaaccacgcctggctaattttttgtatttttagtagagacagggtttcaccgtgttagccaggatggtctcgatctcctgacctcatgatccgcccgcctgggcccccaaagtgctgggattacaggcgtgagtcaccgcgcccagccaggcactagtatttttaaaacattctccaagtaattttcatgtgcagccagaattgcaactcaccaggctaaactgcagttgcgcaattctggtcttcttgatacctgatttctttgccccttctcttttctggttcaatgcataataagaattttccaatattagttttattagcttccacttactgaattctgcttacgggggttcctgcttagtctagatagtaagcaggaacttacaaactatgtaagcttatagactacataagcaggaaccctgtaagcaagaactcagtaagtggaagctaattaaaactacgtgccaggcagggtgccaagcattttttgtgcattatctcatttaactttcatagcaaccccgaagtaggtgccatttctatgaaacctgcccagttactgccccactccgcggaataagctcttacccaccgctcctcttcttcaattcatttctgttatggaactgtcgcggcactacaaagtctctatgtagttataaataaacgttatctggaagagcagccgacaacaactttcaagatctccaattccccgaccccacactccaactgacgccttcaaccacaactactgagccccactttcaaagctcactcactaatattggataatagttgtctgcctacctcagcctccggagtagctgggactatagcgtcttactagccagcttcagggctagaatagcctttctgtgcaagtggaaaaaacctcaggtatttcccaaatcggtagctgcagaggggctctatccctaccagagatggagaaaagccctctcgcgctttttatgtcagccagagcggctcgttaagagagcgaaggccaggggctgcacaggtcgcatcccgtgagcatgaggtcagagaacctgcccctggggcaaaccgcgaggggtgggacgggtgggtgcaggcggggcggagggtaggagccgccctagtggcggcccctgggagtgtcccgtgcctcgccttaaaggagggcgccaacgcaatttcagtatgtgggagacgggctgccccacccccgcgcgcaaaaccctggtttagcttaagggatggaggcggggacccctgcgcaggcttgcggcgtgggaggcggccgcccgcgacctacgacgccgcgcgccgggaggctgagagttcggcgccgggagggtcccggggacagaagagcgcctcgcccggttgccaaggcaaccccacgcggctggagaagccggcgctcgcagcccggcccgggccgctgccggaagtgacgcgagttcacctgccgagcgggggctgggaggaggggcggagggtgcagaggtgccgccgccgccgcgagccagtcgggagcgcgcgaggcgcggggagcctgggaccaggagcgagagccgcctacctgcagccgccgcccacggcacggcagccaccatggcgctcctgctgtgcttcgtgctcctgtgcggagtagtgggtgagtaggggccatggggtcctcagcacccgcccagcc

SEQ ID NO: 27201 - DNA, 2300 bp, Homo sapien
tgtgtatttcatttatttatggcccaccagtctcccccaaattagtacagaaatatccatgacaaaattacttacgtatgtttgtacttggttttacagctcctttgaaaactctgtgtttggaatatctctaaaaacatagaaaacactacagtggtttagaaattactaattttacttctaagtcattcataaaccttgtctatgaaatgacttcttaaatatttagttgatagactgctacaggtaatagggacttagcaagctcttttatatgctaaaggagcatctatcagattaagttagaacatttgctgtcagccacatattgagatgacactaggtgcaatagcagggatagattttgttggtgagtagtctcatgccttgagatctgtggtggtcttcaaaatggtggccagccagatcaaggatgtagtatctcatagttcccaggtgatatttttcttattagaaaaatattataactcatttgttgtttgacacttatagattgaaatttcctaatttattctaaattttaagtggttctttggttccagtgctttatgttgttgttgtttttggatggtgttacatattatatgttctagaaacatgtaatcctaaatttaccctcttgaatataatccctggatgatattttttatcataaatgcagaataatcaaatacattttaagcaagttaagtgtcctccatcaattctgtattccagacttgggaggatgtacagttgctgttgtgtgatcaaacatgtctctgtgtagttccagcaaatcaagctgagctttgaaaaagtttgtcttagttttgtgaaggtgatttattcttaaaaaaaaaaaagaaagaaaaagaaaaaaagataagaaggaggagtaaagggactactcctccttgccaaatgtgctaaatatcattttaggagaagaaagtgggtttattgtatttcccttaagattgtgagggagtgtggatacagtagaatgagccaacagtttctttataataaatacggtctgcaataaattatttcactagctctaaaacctttccctagattttagtagggagttggtttctgttaatatctttgggtgctgtggtggtaaatgctatattatgaacggtggcatgtatttacagttagagtattgtgtgtacactttttaatggtaaacttaagctgaatgtgtaatggatttgtgtatagttttacatatttggaagcattttaaaaacaggttttaaccttatgtaaaattacttttatactcgtgttaacattttcatctgtgccttttggtaatttaatttctattatgaatttctggtgcctatgagctagctatcacctacctgaaaggtgcttagaggtgaaggtactgtttctaaaaacacatcactgtgatacctttctatcctcacattttcaagcttgcctcttttctgttctttgtggatataacttaagcaattgtgttattcataaaggtttagaaatttcaatattcccaacactctatgtttctgattttataacagtagccatttttgaaagtcagatgtttggcctgttttatatgaataaagtttatttataaaatattataaaaaataagtaaataaacagaacattaataataaagttttggttcttcctattcctgactttcatataatgaaaattatcctattgatctaagtagaagttatcatagaaagtggacacgtataagactttccttcctttttttttttaataacatatgaggaacaagacttctcttcccatatacttcatattttagaggacattgttttaaaggcttatgtctcactgtaaaattctgtcagccaaatagtaccaatacgttttcaagtagttctcactgataatttagttgaaccagagatcaaatatttgctcccgaattactactggtaatcaagtagttgaacaaaaaattactaaagcatttccgttagatcagtcaaggacagtactgcatctttttttttttttttttttttaagacggagtctcggtctgtcacccaggctggagtgcagtggcgggatctcggctcactgcaagctccgcctcccaggttcacgccattctcctgcctcagcctcccgagcagctgggactacaggctcccatcaccacgctcggctaagtttttgtaattttagtagagacagggtttcaccgtgttagccaggatggtctcgatctcctgacctcgtgatctgcctgcctcggcctcccaaagt

SEQ ID NO: 27202 - DNA, 2300 bp, Homo sapien
catacgaatattgcgagggacacaaacatttagtttatagcagctctcctctttcagtcccataaagaggagggctctgccttgccataccaattcatttgtgattttgtgattccaactcacaaggaaagagagctggggcaaagcatctgaagcacacaagagtagggcaagttttgaaagagacataaaaacaaatactgtgtgtgcaagggaagtggatgagagaaaaagtgtttaagagacattgtttgctatgtgtctatttcacagtgttcagctatgagaatttttttttctttttttagacagagtcttgctctgtcacccaggctggagtgccatgatgttatcatagctcactgcagcctcaatttcctgggctcaggtgatcctctcaccccagccttcagagtatctgagactacagctgcatgcaaccacacctggctaatttgtgtattttttgtagagattgggtttcatgatgttggccaggttggtcttgaactcctggagtcaaatgatcctctctccttgacctcccaaagtactggattacaggcatgagctacagtgcccagcctgagaattttttaaaagtcattttgaaattgggtttcaggttcttgcctgtattttttgaatatggtactgctctaagactggaaaatgtggaccacagatttataaatactacacaaaatactaatcctaaactatagaaatttctggacaaattttgagtaatgtgggtggttacctagctattttatgaaactgcagaattaaaggcctttatctgtaaaaataacctcatcagattgttatgattttaaaataaaaacaccttcacacctcctagaagactccaaggtgtaaatatcctctttaaatgtaccagtaagtagactaagtcctagaagagtataattttttttttttacaaataaagtttattgtactgtttgggggatggtatatttattactgctaaaaaaattaccattttgaattgctaattggctataacaaagatcagtaatacaaatttaaaacattcataaaactgagctgaaaacatgctcccaagcctagtgggcagtaaggaatctggccaatatactgtacaacttgaacattcagttcttaagtagtttacaacatggtttagccctcttttaataataataataaaaaggtaggaatatcttgtattcctcccgctagttggatgtattaaagtgctttcacaaaactaagaccatggtgttaactcaatataaaaggttgaaaagatgttccttcttttcttcagaaagttaatgttccctctccatatttgtatttgctcaaagatgaagctttgcatctgggaagtccttgagtagagtgtctcagaaatagaaagcctggactctcaaggcttcattcctttggccaacatctttggagcctctcctttatgcaaaacacagtggccggtgccagggcagcacacaagcgtccacaggaggcaggccctgctgtgaggggccagggaagggcccaactaggagtgccaacaaccgcctaaaatacagcagggcggctgcacggttaacgtgcgtgtaattgactacagcaagaaggatgaggatctgtccataaatgccaagttccccttcccgtcgagtccgtgtcccccatgaagccccgggtctagagagctgggtctagaactcgccattccgccctgagggtgtcaagtgcagcgtggagagacctgagggggaaacaaaaaggccgagacagccgaaaggaccaagcccgcgcgacccccgaaggcgctgacgcacgtagggcggccgggcgggggtcccacaggccttcagcgccgctttttgccggggagggaagcccgcggttctgcggaccgcgccgtcgcggtcgagggtctgcgccaggctcagggtagggcgagggtgtgtcgcctcccgtgcggctaggcccggggctcgggggtggcctcgcggcgaagccccgcccccggcaccgcccctcaggcgcgcgagccgatcccgcgcgcgccaaccctttcccgggtcatcgcccctcccctcttccgggccgcgagccccctgcgcgccgctttggggctgcgctcactcgtgtgcgcgctcgtccgcccgccagtcctctcaacgcgcgcttggccgcccgacgacgcgggagccgcacgcgccggacgaggctcgctgcgctccctgttgcccagcgcgggcccgttgaggcggagccctcagttcccggccaggaca

SEQ ID NO: 27203 - DNA, 2300 bp, Homo sapien
tcgctccccatttgccttctgccatgagtaaaagctccctgaggcctccccagaagcagatgccagcatcatgcttcctgtacagcctgtggaaccatgagccaattaaacctcttttctttataaattgggccaattaaaccttttttctttataaattacccagtcttaggcatttcttcatagcaatgtgagaactggctaacacagaatgtgtgtgtgtgtgtgtgtgtgtgtgtgtgtgtgtgtgtgtggtgtgtacttgctttctttttttttttgaggcagagtttcactcttgttgcccaggctggagtgcaatggagcaatctcggctcactgcaacctccatctcccaggttcaagcgattctcctgcctcagcctccctagtagctgggattacaggcatgtgccaccacgcccagctaattttgtatttttagtagagacagggtttctccatgttggtcaggctggtctcgaactcccagcctcaggtgatccacccgcctcggcctcccgaagtgctgggattacaggcatgagccaccgcgcctggcggtgtgtacttgctttctaaaaaacattttacttttttactgaggtaaaatttgtgtaaaaaaaattatcattttttaagggcaggggaaggaccttaaaaaaataaatagaataaataaaaattaccattttaaagtgaagaattcagtggaatttagtactataaatcaaaagtaaaattctaagcgcctccaaccatctgaatggaccctcctctaggccaaggacattccaaagttaaactgaaaagctagttcaaggcatgatgggaaggaggagttggacatgcctcattaccattaacatcaacacagaccttaaggctgatagaccagacttatttaaaatgtataatccagggatcatggcagatggaagccaggactagattgcagcacccactcagacagacagagcagcatgtggaggcttgcatcacgaacttttgctccagaatgactgcaggaatacattaggaaagccaagagaaccagcagaccctctgaaggaagtggattgctcctgcaggacttaggagataccccaaatactatgagtgcccaaactgtggaagcgagaaaggaagatcatgcaccccagaacacatacccctgcacaagagaacctgaaggcttagattatgggagaagattctgaccttacctggagctgagtcaatttagagagccgagtgaaatacaggggtagaggaagcagcaggaaaagtcctgtgggcttgttgggttccctagcaagccatttctgccctgcctcacaggggcccttgggaagagtggccagaggcactgggaaaaggccacagggagaagaaaatctccagctgaaatttgctaacaatatgaactgattgagaagccccctggccagaactcaggggaggacatgaatccagtgtgcggactccacaggcaggtgaagaataaaagccctaattgctttcacagctggaaagtgggtagcctggggcaagttctcagtcctgttcacccactgcctggaaacacacttggtgctgttactgggggcacggtgggagtgagactggccctttgggttgtgtgggagctgggtgaggcctatgactgctggcttttccccacttccctgacaagttgcatgacccagtagaggcagccattatcctcctaggaacataactgttgatctgggaatctcaacctcatcccccacagcagctgcagcaagaccgctcaaggagagtctgaggtcagacacgcctgccactgcctctacctgatggtccttccctacctaccctggtaactgaagacaaagggcatatactcttgggagttcaagggggtggtggtgccccccaccacctgttcctccccattctactaccgctgatgctcttgaaatcaccaccttccgcaggaggacaaccaacccaaaaatagtgcattaagcaaccaaagccaaggaccctcacagagcccattttactcccccaccacctccaccagagcagatgctggtatcaatggcagaaagactcacagatggttcacatcagaggattctgtgcagacaacctccagtaccagcccagagcctggtagacttgctgggttgctagatccagaagagagataacaatctttacagcttggctctcaggaagccacatccctaggaaaagggggagagtactacatcaagggaacactccatgggacaaaacaatttgaacaa

SEQ ID NO: 27204 - DNA, 2300 bp, Homo sapien
ctacaatttaggtggcaaggacacagatcgctcctgcgaggcacaaatgccataactggagtgctaatttggcccagaagtttccaagatctagacagtccattcctaaccatcagttcaagaatgcctacatgtagattgacaggctagccctctttctatgtgagtgcaaccagaacacatacatatgatgctgtagaaaataacattgatcttaggtcagtagccttcggttcaagtcccagcctttttctaaccaactgtgataacctgggtcaattactcgtaggctgcaacatgagagaacagttcctgtttctcctctgtaggttactgtgaggactacaatggaaaatgtaagtgaaagtactgcaagaaccataccctaaaaaaaacagaatagcttaaacaaaagtcaagcaaagaatttgagaaccaagcaggacctaaaaataagaggtggggcttcgggatttttcccgtgggcgttgagggatgtaccatattgggggcaggggcgccccacaacaaataatgtatttgaaaagattctgtatttgaaattatgcctctatcatgacacctgaatatgaacttttccttcgttagatacttcaactggcacttaactataagttcagtgacagtattctgcttctttctcctgaagtcaaagtgccacccacgcacctctcccgttctgccatccacccgcggctttcctacccccgccgcctgcggcccccgccccggggcagtagtttgcactaggctgaagggagaggtggaacggattcgtctatctacgcacctcgaggaggggtgtgtgaggagctacgttccagagaacggtaagaaactccggccaggaaacacgggatcacaggagaactcgaggcgaaggtgcggcgtcggtgcaggagcggaggggcggacccacagcagcccggcgagcgcgcaggtgtgcccgcggccgcgccaccctccccgcagcctttacgggatggagccggcgggagagggcggggccaggcgcgcggcggccgcctctgctgcggccggaaacaatagtggaggaacccgagccgcacggaacggcggtggtggcccgcggagccggacggtaaagaccccgcagccctgctcccatcccacctgagccccgacccccagtcccatcgttccgcctccttcgagttccgagccccgtggcccctcgcgctgctgcgcgccaggcgccccgacggacagaccgacggaaagacggacttgggtccgcgactccctgggggcggccgcgcgcccccaacgccgaaggccgggccaggacccggctccccgagacgctgaggctgggcggaccggccgccgtggccctcggacgctttcttccctctgggaggaatcccggagcgatgggacgaggctctcccgcccgccgggctccaggatgccgcggctctcccagctccggcttgggcccctccggcggtgcccggccggtaccgtgaagccgccgctcggccttcggtgtagttgccccggacacggcgggacgccctccccgggtattcggtacccacgtgcattttgctgccgccgatctccgttcgatgcgaagcttcgcaactccgagttcgcgaggcgcatctgaggttcccccaatgaagttagcaaagcagtgtcccgtgcaggtcgtttttcctgtttctcacagcgttaactaggttgacagaacctggtagctgaaaaggcctcgctgctaagccctctgattattcgaggttgggggacgaaggaggaggactagaatgccggcaaatctctttccttcaggtgccactaacccaatcaactataggacaaaaaagacacggacatagtgtcacctatggcctggctttaagttttactagctttgtgtctttccacaggaaaagtgcaatgttggagtgcaagtatggcgatgcttgtttgatggagcttttgctttaaatgagctgaacagcatccttatttcctagaagttcccagtaaagggaactaccccaaaggcaggttcatgaaattgtgtaactttccttttctgtttcttaataggggcactatgaacgaagaggagcagtttgtaaacattgatttgaatgatgacaacatttgcagtgtttgtaaactgggaacagacaaagaaacactctccttctgccacatttgttttgagctaaatattgagggtaaggacacagtatagttttgatcttatggaatgaatttaacacagctgctttgtactgattgta

SEQ ID NO: 27205 - DNA, 2300 bp, Homo sapien
taaaataaaataaaaaataaaaaataaataaagagagagcaagcttggaatttcctcccctctctctcttgctcactctcaggccacatgatctctgcacatactggctctcctttgcctcctatcatgaatggaatcagcctgaggccatcaccagaaacagatgctggcaccatgcttcttgtacagcctccagaaccatgagccaaataaacctgttttctatataaattatccagccttgggtattcctttataggaacacaaactgactaagacgagcagtgaaaagaaaccactgttacaaaataccatcgtgaatctcaaaaacatgctgcatgacaatagccaatcacaaatgaacacacactgcttaattctatgtatatgaattcctataacagacaaaactaaaacacttcgtcatataaattagatcccatgttgaaggagcttgaccagaaaggaacagaaagaaatgtcggggctgtggaaatgttctgtatcctcactggggtggtggttactcaagtgtatgtatttgccaaaactcatcaaataatgcttttaaaatggaagcattttatttctgtaaattattccttgattttttttaaaaagccaacaacaagagagaagagttttaagaatagcaagtaaacaatgtgaaatgccataggaaggaagacaattctgagaagtgaaaataacttgtttcaatttttaaattttagtgattttagaacacttttattgaatcactttaaaagagtcctttttaaaagaatgctttttattgaaaagatgggtagaatccaacatgcaaggtatcttagtcgtagttacctagaatgagaaattcgaagagaaaaagcacaggcttttcatttcaattagtgcatctcaaacttcgatgaacataggaatctcctggcggtcttgttaaagtgcaagtattgatttaggaaatctcgagtggggcctgagattctacatttctaacaggaaaccaagtaatgtcaatgttgtttgttcatctactacaatttaggtggcaaggacacagatcgctcctgcgaggcacaaatgccataactggagtgctaatttggcccagaagtttccaagatctagacagtccattcctaaccatcagttcaagaatgcctacatgtagattgacaggctagccctctttctatgtgagtgcaaccagaacacatacatatgatgctgtagaaaataacattgatcttaggtcagtagccttcggttcaagtcccagcctttttctaaccaactgtgataacctgggtcaattactcgtaggctgcaacatgagagaacagttcctgtttctcctctgtaggttactgtgaggactacaatggaaaatgtaagtgaaagtactgcaagaaccataccctaaaaaaaacagaatagcttaaacaaaagtcaagcaaagaatttgagaaccaagcaggacctaaaaataagaggtggggcttcgggatttttcccgtgggcgttgagggatgtaccatattgggggcaggggcgccccacaacaaataatgtatttgaaaagattctgtatttgaaattatgcctctatcatgacacctgaatatgaacttttccttcgttagatacttcaactggcacttaactataagttcagtgacagtattctgcttctttctcctgaagtcaaagtgccacccacgcacctctcccgttctgccatccacccgcggctttcctacccccgccgcctgcggcccccgccccggggcagtagtttgcactaggctgaagggagaggtggaacggattcgtctatctacgcacctcgaggaggggtgtgtgaggagctacgttccagagaacggtaagaaactccggccaggaaacacgggatcacaggagaactcgaggcgaaggtgcggcgtcggtgcaggagcggaggggcggacccacagcagcccggcgagcgcgcaggtgtgcccgcggccgcgccaccctccccgcagcctttacgggatggagccggcgggagagggcggggccaggcgcgcggcggccgcctctgctgcggccggaaacaatagtggaggaacccgagccgcacggaacggcggtggtggcccgcggagccggacggtaaagaccccgcagccctgctcccatcccacctgagccccgacccccagtcccatcgttccgcctccttcgagttccgagccccgtggcccctcgcgctgctgcgcgccaggcgccccgacggacagaccgacgga

SEQ ID NO: 27206 - DNA, 2300 bp, Homo sapien
ggtttctgctgagaaatctgctgttaatctgataggttttcctttataggttacctggtgcttctgtctcacagctcttaagattctttcctttgtcttaactttagataacccgatgacaatgggcctaggtggtgatctttttgtgatgaagttcccaagtgttctttgtgcttcttgtatttcgatgtctagatctctagcaaggctggggaagttttccctgattattctgcaaaatatgttttctaaacttttagatttcttgtcttccttaggaacagcaactattcttaggtttagttgtttaacataatcccaaacttcctggaggctttgttcatattttcttattctttgttcgttggatttggttaattcaaagaccttattttcgagctctgaagttcagagcattttgcatttctataagtgtatccaatgttttctgaattttttattgttttttctttatgctatctagttccttggatatgtctcccttcacttcgttcactcgcgtctgtgtgaagagaccaccaaacaggctttgtgtgagcaacaaggctgtttattgcacctgggtgcaggcaggctgagtctgaaaagagagtcagcgaagggagataggggtagggccattttataagatttgggtagataaaggaaaattacagtcaaaggggggttgttctctggcgggcaggagtgggggtcacaaggtgctcagtgggggagcttttgagtcagatgagccaggagaaggaatttcacaagataatgccatcagttaaggcaggaacaggccattttcacttcttttgtggtggaatgtcatcagttaaggcaggaaccggccatctggatgtgtacgtgcaggtcaaaggggatatgatggcttagcttgggctcagaggcctgacaacttcttttatcagtttttggatttccttgcattggtctttccctttctctggtgcctccctgattagcttaataactgatctcctgaattctttttcatgtaaatcagggatttcttcttggttgggatccattgctggtaaactaatgtgattttttaggggtgttaaagagccttgttttgtcatattaccagagttgattttctggtttcttctcttttgggtagcctctgtcagagggaagatctagggctgaaggctgttgttcagattcttttgtcccacaaggtgttccctcgatgtagtactctccgccttttcctatgcatgtggcttcctgtgagccaatctgcaatgattgctgtctttcttttgtgtctagccagccagtgagtctacagggctccagtctggtacagggggttgtctgcacagagtcctgcgatgtgaactgtttatgggtctctcagccgtggatcccagcacctgtttccagtggaggtggcaggggtgtgaaatggactctgtgagggttcttagccttggtggtttaatggtctatttttgtgctggttggcctcctgccaggaggtggcgctttccagagagcatcagctgtggtagtgtggagaggaaccggcagtgggtgcggccccagaactcccaagattatatctcctttgtcttctgctaccagggtgggtagggaagggccatcaggttggggtggggctagggggtgtctgagttcagactctctttgtgtgggtcttgctgcagctgctgtgggggatgggcatgacattcccaagtcaatggggttgtgtacctaggaggattatggctgcctctgctgagtcatgcaggttgtcagggaagtcggggaaagctggcagtcacaggcctcacccacctcccatgcaaactgaagggtcagtctcactcccaccattgccccccaaacagccttgagtctgtttccaggtggtgggtaagctgagcttgagaacttgccccaggctacccacctcccagctgggaacgaaaagggcttggttcttcccccacctgtgggagtgtgcgcacgggattcatgccctccccccagttctggccaggaggcttctcacatggttccaattgttaaaaaattcagctggagatttccttctccctgtggtgtttttcccccgctcctctggctgccttcctgatggatctctgtggtcccaggcaggaatggcctgcttggggacccagcgagctcccaaggcctttcctgctgcttcctctatccctgtgttttgcttggctctctaaattgactcagctccaggtaaggttggaaacttctcccacaaacagaccttcagt

SEQ ID NO: 27207 - DNA, 2300 bp, Homo sapien
taattctagcctaaagataagaaactgtatgttaggaagtctgtgcaaacatattgaggatacagttattattatagtttgggcttcctgaattactaataccatgaagatccttcctgacaaaaaatgccttcattcttgctagctttgtaggcatgagagacatttgggcctactgatatataggaatatctatctagtgcttatgttgtaatttactggtattctttcccaaagaaggacctgtttacagtagctctgggcatgagtaactgagagtagggtggcatgaaaggggaaaggagatccccttcagaaccctagttctacaggtatttggagaagccatgggtatcaccaccatcaaccttgactgctgctaaagaattcctgcaaatatgcctccaaatgaatttcttatctatgctagccatgacacttgattcatccttccattacagcatttatacacagagttattattttatttctttctctacactggactctgagcccctggaggacagctctcctaccatggctatgcccagtgatgctctttgacatggtttccggggctgagctatagctctgttgcctggaggcgtatcagttttccatttttcattcagaatcccagcagtgtctgtttctcgtgaataattagctagtgtgaaagtcacagaatccatagcctctacaaggtgcaaatttattaactgcccatgattctgcaatgaattagtgtttttaaagggaatataagaaaaaggaagtgatagaatagacattattgtagttattttagaattctattttttttttttttgagacaggattttgcatgtccccaaaactggaatgcagtggctggattgtagctcactgcagcgtcaaactcctacctcagcctctggaatagctgggactccagacggagctagaattctactgtcacgagtagggtgcatttaataatctttaaggtctttccaagtgctaaaatttctgattctggaagatttgtccttattgtatcagtatttacttcctttttccaataaaacagtccaacagatgcttacagtgtacccgtggcttatgaaaccaaagacaggaggaagttagaggaaagtgtacttcctataagacaagtaatgttatttaacaaattctcatgcatttaaagcaacataatgagaaaataccaattctactgaagctcattatgagaacattttcagagttcatactatggacttgatatacattaaattcttaagaacttctctccagtattcctggaaactaggtatcacagtccttgggtagactgttttaataaagagagcaggtcaggttatgaaaaatgcaggttttccaatgagctttacttctaatgtatatcgtagatcactgatagatgattgcaaagaaatacatacatttcattttacctccaggaaattcccaagaattcagaatgcctactttgtgttgacggttttctctggagttgcaaacactgagagtgaaatcagtttcgaaaaccatgcttcaaatattcctttcaatttgctcttgtggcagttttcgtcaaacaacctgcttggagataatctatttgcagaacctaggtggggacaaacctgccacattatataattcactgagcaggttttggctctcacttcaccaatccatcttaaatagtggctagtgccctgcatctagcaatacatatgattaagcaatttagcacagaaagagaaaggccacacaacttggcaaccccgtagacatttatctttgagaaaactaaacggatccaactttttgccagagtttaatagcaaagctgtcacattttacacaaagagtatccagtccgctagcgaatggaaagaggggacagggaggaggggaccagaggaggcgggctgctgactggactgttttcaaaggggctcccgtgtttaggggaggtgctgggatgctccacatggctggagagacgaagtagttaaaaattattactagggagggggccggaacctcgggacgtgggtatataagacggtgcctgagcgcagagcggctgctgctgctgtgatccaggaccagggcgcaccggctcagcctctcacttgtcagaggccggggaagagaagcaaagcgcaacggtgtggtccaagccggggcttctgcttcgcctctaggacatacacgggaccccctaacttcagtcccccaaacgcgcaccctcgaagtcttgaactccagccccgcacatccacgcg

SEQ ID NO: 27208 - DNA, 2300 bp, Homo sapien
atccacctggaatttatgtctcttcacggtgtgagatgaagatctgaagttcttcatgtgaagatggagaacaaatcaatgcggcgctatgtattgaagagccactcttttctaacctattattaatgccctacgtttttcatatatgaagtttccatatgcaaatcacacttatgggcacttaattccgctgagacagttttctttgctgggactgatacaacactctctttatatcacagctttgtaacgagttttgttacctgatagggcaagtcctgttttattttaataacttttcaaaaaatttcaagatatgtgatttgatttttcacattcatctgtttgtttaatttcagtctgtcctccataaattattgccttctttaaaaaagctattctttcactcatttgcttgatactaaatataattatttaaaacattatttgaggagaatttgtgatcgaaagtgaaagttttgtttctgaaactaaatgcattattttgggctttcaatctaatattttatccattaatccatgctatgcttgaagcagacatgtgaactcactgtcttctgctttccttctataaagtcaaaagaaatgtaacttaaagcgctatatgatattctaaaaagggtttgcttctgcactagccatacaaagaaaacagtcattgtgctttcactttggctttccaaattcaagaggcgctttttgtaggttccaattttatcagagggtctggcctattgtaattgtcccctagaatataaataaaataaacttctcccaagtccataagtggtgtctctgatttcatatatatatttcatatatatatttaagtcaattagctaaaaatataaatattttcaatgaaatacatttgtttactcataattctatttttatcagcaaaaattcttgagtttgggggcaacaggcaattctcttctttcatgggtaaagaagaagaaaagcagctactgttcatcttagcccattataatatgccacaatttcagtgtgttaggggtttccaatctaaaactttcttacctcctgccagttttatttaccagaataaaagtcacattggtttacttcagaatagattcggttttatttagttttaatttttgtgttttaaagttcctgaactcatcattattcatggtgtgaataatcccaatgctaaaccgtaatttaattatcagaaaatgactttgatttttccataaagcatatatctacaactataactatgattatcttaacctgttctcttgttctaattggcatatttaaagagataaagtccagggcaagtgagcaatgtcttccccacccagactattttcttagaatagaaacacatattttattcctcttatgacaggtactaccattcattaataactgcacaaggccataaagagtagccatagaacgccttgtttaagtgtactttcccttatgtaatactgccttacattgcataacttcacctgggtgacataacaaagtttgcaacacttttgattgtttccataaggaatacatgtatatgtatatgtacacagagagagtatatatatgttaggctttatatacatctgcacctaaaagttatttttagaaggtctatatcaacatataagagaagtgtcttaagaatcatctgagtcagagggtagaaggttgatctgttaggaactctctctatgaatatcagatgcatgtgcctagtgactaatttgtctgtcatgaatttcacatttttcttaatagttctcaaaatgataaaatgtcttttgtttacaacatgaatttaatttgattcaccttggcaaatggcctgttcaggtagttaacatttacaactctaggcatctttactcatttatatcttcttaaagattaactacccttttaatgatacttaatgtatagagacataattttgccaaagagacatacacaactcacttacactgactggtatgcatgtagacaggtggttgttgctttacacatctttaaaaatttgagagatttttctcttcagttggtagaattatttatattctctttcagttcttaaattagcaagccttcaaaaccaaaaatggggtcgaaaagaggcatatcttctaggcatcattctctcagctcctatgaaatcatgtttgcagctctctttgccatattggtagtgctctgtgctggattaattgcagtatcctgcctgacaatcaaggaatcccaacgaggtaagtcacatggagttggct

SEQ ID NO: 27209 - DNA, 2300 bp, Homo sapien
atgacatgctatctatttatggtccttgattctgctaattttctaagcagaatagactccgaatagcagatattttagcaagagtatcattcccatttctggagacctgtatgaaaatgcaaggaatctaaagtttggttgggttataaaatttcaggtggcccagcctatgaaataggaaacagaatagtgtgcaatgttggataagtttgttcttctttaagatgtttcctattttcccaatagctgcatagggtttatccctcaaagacataaagtttttcatagatttaaagaaaaatacaactaaaatttccatgcacttttataccacataaaatacattcctctaagcagctttctgccaaaaggaatgcatttcgttccttagtgataaatttctactccactgccttcagctaacattagggatgctctttctaaattggatacagggcttagctatcagaatccccagatgtaccaaatccttgaaaaatgatgagaacttgggaagaagtggcaggacctaactctttctttactggttaattactctggcttctaaattcccgaaaatgccaaacttcttacattctgctaatttaacttttctccacaatcattctccagcaatttgccatgtttttagatatttgtgtatgtctttgttttctaggagttattagtattgtttctaataatcatatagtttattttattttggccattcatattttcagcttataatagtcagtgagcacaccaagaagaggattaaaacatagctaaacaacttattaccttccatatctgctgaatgatgccaaatattgatcccaaagtatttctataactttggtgaaagtaagtcttcataagctgggcaaaagtatgtttgtttggaatattgtgtccacaaaaattctctatctgcttgcatttttccaaacatgagtaagtataaataggttcaaactcaaataaattattatatcaatatatatagtgacttccttagtttcgcctttctataatttcttccctacgtgtacttcagacaatggcccctaaaatcagaataggaggtcattaataattgttgaactaaacagaaaagtttttgtttttttggctattttctttttaaatattttatgcctaatgtatgtttatctgttgtctctacctgaaacaaaatttataatttccatactttttatgactgttcataattttgactatcttttcttcgtcttgctggactacctgttgcatttgctttgtccacccccatgtattacacaagtcttggaaaattctttcttgacttccttgacactacactgtcttggatctgcccatacccctgcatcaatcaagatcttggaagagacacatatccccttccaatgggatcatctggaaacttgctcattccatcagctggggccaataagaacaaccaccaaccaaatgtaacaagtcaaaaaggatgccacagaaacaaattttctgacttccttctccttcctccatctgatctctagtggctgaagccaaagagaaaccagagagtcctggtttggatagccatataatctacagttaaaataaggactatttttataataagaaagtgtgtcattcataattaaactgggacagcaggcataaacttgtcaccagactttgatcctgaagcatggggcagtgtggagttgggtggaaagaggatctaaaggatcagatagaaaatattcagttcaaattcccatttatcttttatttccccatgagtttcttttaatatatatatttataaaacttcgatatttccaaaaatctattcctgaccaacattttaccacactctatatctctcctagaataatttagccatttcatagacattatgatattttgctatgatcttcggactcatagacatctgattaaaaatgttgtgtttgataatctcacaggtttacagatgcttcatcacttccatgtaaatcctagccttcttttataaggtataaatctgttttgattcacagggagaaagcatttatggtgaggagaaaagcagctggtatcacactctacccaagtcccaaaagcaggttcacataactcctgtcttcattatctgatatccggtgagtcactgaattccttcatctaggtaatcaatcagtcaatcatcaattgatttgattttgccacttaaatatttctaaaatgtgttttgtcctttctctttctgctacccaagtggtttttcatgcgtcattgct

SEQ ID NO: 27210 - DNA, 2300 bp, Homo sapien
gtgcagtgttgggattattactcactgcagccttgaatttctgggctcaagcaatcctcccacctcagcctccagaatagctaggactacaggcaagtgacaccatactcagctaatttaaaaaaaaatttgtagcgctgggatctcactgagttacccatgctgatctcaaactctggccttaagtgatcttccttcttgggcctcccacagtgctgagattacaggcatgagccactaagcctgttgatgacatttttaatttgagagtagaaatataagaagagtcactggttttaagagagagatgatgttgaggagtttacttttgttatttaactttttttgataattaagttttcaattgaattattatttgcaatctttagatagtcatttcacaattaatataaccagggcaattttgttaccttaacaaaagaacctcatttctaaagtactgatattttgaaagaggacacttttagaattttctttcaaaaatatcaacaagtgaatttgtatattacttctctcctactgttataacagacttcaactttgctatgcaaaatctttagcatttcttatttcctctacaagaaagcctaagtgagtaaggctaataaacattttttttttaattttttcatttggggttctaaatttgtatcactttcaacataatgatgtccgtaataagatatggtcttccgggagttattgtaaaattgcacatagctgaaatttagcagtctcagaataagaaaaggtctacataaaattacatttaagtttgcatattatatttaattattttaataacttgtcttgacttttatttctaagaactataatcttacacattctgtggtcaaatacacacacacacggataataaaataaaaaaactagtgctatatattttaaataatacaagatatttcatttatttaacagtgagaaaaacgtgatgatactttgttagtctgaaaattataaatgatattgaagctaggatgtaagattgctaatgctaaaaatatcatctattttattctgagtaacatttgcatttaaccctcttcattttcaaatccttttctctttttgcactcctatcatatgggttgaatattccttatttgaaatgtttgggaccagaaatgtttggaatttgggaagatttacatatacaggatgagatatcttaagaatgaaacccaagtctaaacacaaaattcatttatatttcatatatattgatacatatagcttaaaggtaattttatataatgtcttcaataactttgtgcaaatgaagcttcgactgctttttcactgtgcctagtcacatgaggttatgagagacaggactagctggctttcataggccgactaagaatccttaagcctagctgggaaggtgaccgcatccacttttaaacacggcacttgcaacttagctcacatctaaccagttagacagctcactaaaatgctaattaggcaaaaacaggaggtaaagaaatagccaatcatctattgcctgagagcacagcatgagggacaaggatcaggatataaacccaggcattcaagcctgcaacggcaaccccctttgggtctcctccctttgtatgggagctctgttttcactctatttcactctattaaatcttgcaactgcactcttctggtccatgtttgttacagctcgagctgagctttcactcaccgtccaccactgctgtttgctgccgtcgcagacctgccgctgactcccatccctccggatccggcagggtgtccactgtgcttctgatccagcgaggcgcccattgctgctcctgattgggctaaaggcttgccgttgttcctgcacggctaagtgcccgggttcgtcctaatcaagctaaacagtagtcactgggttccacggttctcttccgtgacccacggcttctgacagagctataacactcaccacatggcccaagattccattccttggaatctgtgaggccaagaaccccaggttagagaacctgaggcttgccaccatcttagaagcggcttgccaccatcttggaagtggctcgccaccattttggcaaccaggaagggacctccaaagcggtgagtaatactggaccactttcacttgctcttctgtcctatccttccttagaattgaaggaaaataccgggcacttgtcagccagttaaaaatgattagcgtggccgccagagttaagacccaggtgtgaggctatctggggaagggctttctaacaacc

SEQ ID NO: 27211 - DNA, 2300 bp, Homo sapien
ctgagttagagtcttgtaaagattgtgtgactggccttgatcaaatgatcacttctcaagctagtctcaattttattcttcaatcagattaaacaattagaatgctgagaagtgattggccatttggaaaattgtctttcactgaggaaaagtgatataaaatagtaaacagcacccacttgagtgttttgaaggaacacccttggggacaaatatctctacatcattaggtgctccctggagatatttctcccaggtattagtcttaggaaaacaagcaagcaagcacacaagcaatcaaatgacaaacttggtttcccctgagccagtggtttctcttcagtttagataaattaaaatctcaaaatcaagcatgccaagaaaataaagagctgcattgcagcccctagctctttatctttgaacaatgacaataaaatgctactggctataattttacctcttctttcataggccttttttttctataccccaataccctcatgtaaagaatctaaactcatgtgctatatctatttttgctagtacttgtgagttcagggaacataggtgcctgagtttcccaaattataaattgagaaaatgtgcatagatgagttaaaaatctttgaatttttaaatttctatttatctaggttttttctttcagttaatttgatgctagtaagttgtgacatatactcattgatactgatatttcaaaaaaatgccacagtatctctagacttaaaaatatcatcagttgaagaatactctttgaaataaaaatattagtagtacttatccgaacttgcctttaataaatgtgatttaaaaatattcagttagaaatatcatcggtatgcatatattttattagtgtaggtttttccttgctatttcaccataatgtacttatttttctaaatatagtgatgttttataaaagataataattacaatgtgacatgttctgatttttctaatgggacacttttaaagaattatttaggcccgggcaatttaattttcttaatcatgttcagatatcagtgatgcatataatacttatctgtctcttataaagttaaaggaaaatgtgttctagaatatgttccatgtggataaaatataatgaccctgaaataaaacacagacaaacaaagccaaatgcaagagattttttcataaaaaatatacttcaaaagagtatgtaacagattatcttctacatcgttattctttgatatctcatgaaactcaattcgcatgtaaatatcaagcttcatacaatagtgaaatacatttgactactgtttaaatgtaaaaatttaaatagagtatttctaatctattcaggctttaaatgataggactgagcaaaagaattagaaagaactagtggtttatgtaacacacattctcatgcttttgaagggatgctttttttctcttagaccaaagcaggagcagtgattagtttaggttcagggaaatcggaccatctgcaacatccctattacacagatattcccccttgtctgtggctaaaactctcaggcaagctttggcatgagaatctatttcattttgctataaccatattttctttttttaatttgctaattagtctactacctaaatttccacttaattatcatgaaaataatgtggaataacttgtagaatattttgtataggcttctcatagtcttctcaatttcaactattttaagattttaattattctgattttaaaataatttgcagttatttgtgtgattacttgtgtaatttttaaaagttacttacaccagaaaaatataagcactgttgttattttgatgtttttctaatattaatatgcatatatcataggaagtatttaaatgaattttaatttcccttttcaatcatctcccattgaaagctgaatcatgaggataccatctccaagcaggtggagtatttgatccctttagcaaggcagtgattttgaaattcgggtttagacaaaaagatatttcaagctcctgaagaacaagtttgaaggattcagagcagagaattgcaccctggcatgatgcctatgccagctggactgtgtgatttttgttctttagtagaaggataacatgacatagcaggaataatactgccttttctttctggcatggatcaagagaaaagaaaatacaagaaaacagacagaaggtaagtggccaaaatttttatttctgctcttggtttggtgtttgataattcgagctgaggaagaaagcagagtggttttgactata

SEQ ID NO: 27212 - DNA, 2300 bp, Homo sapien
aagtcccttatataaaatagcataaatttgcatataacctcctgcatattacatcatctctggattaggtgtaatacattatataatgcaaatgctttgtaaatagtcactttgctgtatttttttatttacgttattttgattgtatcattgtttcattttttttaaagttatttttcatccatggttggtagaatctgaggatgtagaactgtggacgcagaaggcctactgtgtagcatttatcaatgcccaagagaaatgaagaattggagtaaataaatgagtcacggtctttcacatctataaatgtgctacttccaccctttcctgcaaagagctgaccatgagtttacttaagtgtggttagtgcattccagaaccagtaaagggtgtgagaagggtaccgtggcaaaataactttctaaatatattgtctgctataagatcaagaggaaataagaggttctctagctgtgaggtgctgagagggccattgcttaaggcagttcagcgatggtgagttgagggccgcctttcccctcctctcttcctgataaccccatcccaggatgccaagtggacgaatcatctgtataaagcgctctgcctggggaggacaaatcgcagacggtatctcccctatgcatgttagcctgtgtctactcttgccccctgccctccctgaaggcaatgcactgcccttttcagcgtgaaatccccaggctggggctggattctgagctctacatttctacctcccccctctccaacccccgctatttctatgtcctcactgataaggaaggagctagggtccttgtggaggccggggcgaggcagttgagttttctaaggagccagagagaaagtgcagatgaaaggacccatcgtcagcgtttgcaggtcgcggtaaccccaggccagattgacatgggctccgcacccgggccggtgattctgcctcttaaccgctcttgcaggagaggtgacgttaatctcacaaacgttttcctacccttctaggagaaataacgataagccccaatcttaaggagcagagagttagttccgggcgtttgccacggctccctcacttcaatttacactcgcacacgcgggtacgtgggtgttcggggtagggcactgatctggggaaggtctcccccccgcgacccaactcatctttgcacatttgcagtcctccctcggtgcactcctggcggggatctggccagtgcagcgcactgggaccgagggcagagcccgcggagtgaggccaggagagacttcaggcctctaaggacacagctgaggctaaggctgagttgaacgcagcccctcccgcggctcgtcccctctccagtgtctctcccgtaaggtgccgctcccaacagcaatgggtcgagatgtagaggaaacactctgtacgttatttttccgcccaccctttagcgcctgaggagacagacagtgtagactttagggtacaattgcttcccctctgtcgcggcggggtggggagcgtgggaaggggacagccgcgcaaggggccagcctgctccaggtttgagcgagagagggagaaggaggtccacggagagacaagaatctccctcctcccacgcccaaaaggaataagctgcggggcacaccgcccgcctccagatcccccattcacgttgagccggggcgcgctcggggcggtcgcctgcagtatcagtatcagcatcagcatcagcatcagcatctgcatgagcatcagctcagctcagctcagctcagcatcagctcagctgtcctgaggcagccggcggctgtgaaggagctccaggctgcccccatccccacgcccttctcggctcagggcgtgcatgaacctgcggatggccggcgggcgagtggcgccttcgcgatcgcggccgcccctctaggcggaggcaccggggaccgaacccgtgacttcgagctccactgcggacgaatcccgggaccgcgcgcctcgcggaagagcggccgccgtgcagcgcggagggatacgcctcggccgcacctcccctcgccgcgcccccgcccccgccgccctccccgcccggctctgctgccgccgcggcggccgctgctgctgctgcttctgccgccgctgccgccgccgctgcctggatatagtgcggcaagagcggagcttgcagtcactttgcgaggaggagcgcgcgggctgcgggcggctggggcaccgcgggagcggcggcggcggctctagcagaggcggccggggcagcgaaaggttctctctccag

SEQ ID NO: 27213 - DNA, 2300 bp, Homo sapien
actgtgcaccttaacttcagataacattaaacagcaagaggaaaaaaggatgtggcttaaaactgagaggatagggtaacaatttaaaatgacctctaagaatagaaagacacacaggacaagatgcattaaagataagatgaaggaaatataactagagaggaaaataattttaaaatgcaaaaatacaatatgtgcaagtgtgacagaaacacagctatgtgtcatagtaaataacaagctagccatgatcagtgatgcagctctggagaaagcaaatacagtgcaaaattctaagtaggaaccgtacactcagagacaatatgattctcaaattatattctcagtgcttctgacattttttaaaagattttgtttttggaacagttttaggttcacatcaaaattgagaggaaagtacggagttcctatatttcccctgtctcagcacatgcataatctctaccatgatcaatatcccccactagagtggtatatttgtttcaactgatgaacctacattgacacaccattgtcacccagaatttgcattgtgttcattcttggtgttagacattttatagggttggacaaagatataatgacatgaacccattattatgtatcagatagaggatttttagtgccctaaaaatcttctgtgctctgcctggtcatctctctttcctctctcccagtccaaaccctagtgactactgatccttttagtgtctttatgtttttgacttttccaggatgtcacgtggttggaatcatatagtgtggagccttttcaggttatcttccttaactttgttatgtgctcttaagattactctatgtcttttcatggctttatagctcatttccttttagtgctgaagaatattccattgttaggatgcaccacagtttgtttattcatatgcctactgaaggacatcttggttgcttcaaccaagtagtggggattatgaacaaagctataattatcagcatgtaggcttttgtgcagacaaaagctttcagctcctctaggtacagaccaaatagcatgattgctggcttgtatgttaacagtatgcttagttttataagaaactgtcagattgtctcccaaagtgacaattattttgcattctcaccagcaataaatgagttctctctctctctctctttctaggtgcacagaggaaaggccatgtggggacacggtgagaaggtaaatgtctgaaagccaagaagagagtcctcatgagacatcaaccctgttgaaaccttgatcttcaacttctggcctaaagaaatgtgagaaaacaatttctgtttttaagctatccagtccatggtattttgttatggcagccctatcagactaacacaggtggttagattactgttctttatacatacgttttatcaatcagatcattaggttttgagttctcttggctgtgttttaataatgtctcctataaatagattgtaacattattaatacataagtatatttaaaaaggggaaaagattagtgaaatcaatgcccttagtagagttatattaaaatttcatcacaacaatgagagtgtagaaattagacacaaacttgaagttgggaaatttaatataaggataatctatgttccaattttctaaatgatggcaatataaacaatagagaaaattaatggaaacctaagtaataaaaatactattgtgtaaatatattctttaaattattatattgtttctggaatttataatttttagggactgtgtgtatgtgtccctcctccatccccaaagttcatgtgcgaaagtcctaaaatgcagtgtggctgcattttgagtaagaaagtaattgatgttaaatacggtcaaaataagttgttaaatatggcttggctccgtgtctccacccaaatctcaccttgcattgtaataattcccacatgcctaaggagggaccttgtgggaggtaactgaatcatgatcctgggtttttgccatgctgttctcatgatagtgaataagtctcaccggatctagtggttttataaagtggagctcccctgcaaatgccctcttgcctgccgccatgtaagatgtcccttattcgtctgtcatcttccgccatgattgtgaggcttccctagccatgtggaactgtgagtccattaaaccacttcactgtataaattacccagtctcgggtatgtctttattagcagcatgagaacggcctaatacaggtgggcttttgagacaatggaattagtgtccttataagatgaaacagc

SEQ ID NO: 27214 - DNA, 2300 bp, Homo sapien
cccagagggaagtaattgaatcatggggggttggtctttcccatcctattctcatgatagtgaatacgtctcatgagacctgctcagtttatcaggggtttctgcttttgctcttcattttctcttgctgccaccatgtaacaagtgcctttcgcctcgtgccattattctgaggcctcctcagccacgtggaactgtaagtccagttaaaactcttttccttcccagtcttggatatgtctttatcagcagtgtgaagatggactaataccgtaaactggaaccagtagagtggggcattgatgaaaagatacccaaaaatgtggaagtgactttggaactaggtaacaggcaggaattggagtagcttgaagggctcagaagaagacaggaaaatgtgggaaagtttggaatttcctagagacttgttgaatggcttcacccaaaatgctgaaagtgatatggacaataaaatccaggctgagatgatctcagatgaagatgaggaacttgggaactggagcaaagagagtggtgacattttgccccttccctagagacttgtggaattttgaacttgagagagatgatttagggtatgtggtggaagaaatttctaagtagcaaagcattcaagaggtgacttgggtgctgttaaaggcattcagtttaaaaaggaaagcagagcatgaaagtttggaaaatttgcagcctgactatgtgatagaaaagaagaaacccattttcgggggagaaattcaagccaactgcagaaatgttcataggtagcaagaagcctaatgttaatctccatgaccttggagaaaatgtccccaagaccacagggaaaatgttctccatgtcagagaccttcgcagcagcccctcccatcactagccctgaggcccaggagaaaaaagcagttttgtgggccgggcccagggtcctcgtgctatgtgcagcctaggaacttggtgccctaggaacttgtgttccaggaacttggaacacagcctaggaacttgtgtcccagttgttccagccatagctgtaagggaccaacatacagctcatgctgtggcttcagacagtggaagccccaagccttggcagcttccacgtggtgttgagcctgtgggtgcacagaagtcaagaattgaggtttgggaacctccccctagacttcagaagatgtatggaaacacctggatgtgcaggcaaattttgcttcaggggcagggctgtcatgaagaacctctgctagggcagtgcagaagggaaatgtggggttggagcccccacacggagtccctactggggcactgcctagtggagctgtgagaagagggccatcatcctccagagcccataatggtagatccactgatagcttgcttcaggtgcctgggaaagccacagacactcaacaccaccacatgaaagcagtcaggagggaggctgtacctttcaaagccacagaggctgagctgcccaagaccatgggaacccacctcttgcatcagcgtgacctggatttgagacatggagtcaaaggagatcattttggaactttaaaatttgactgccctgctggattttggacttccatgggcccgtaaacactttgttttgaccaatttctaccatttggaatggctgtatttactcaatacctgtacccccattgtatctaggaggtaactagcttgcttttgattttacaggctcataagcagaagggacttgccttgtctcaggtgaaactctggactgtggacttttgggtttatgctaaaatgagttaagactttgcgggactgttgggatggcatgattggttttcaaatgtgagaacatgagatttggaggggcctgggtggaacaatatggtttggctgtgtccctactgaaatctcaaattgaattgtgtctcccagaattaccatgtgttgtgggagggacccagggtaagtaattgaatcatgggggctggtcttccctgtgctattctcgtgatagtgaataagtctcacgagatctaatgggtttatcagtggtttccacttttacttcttcctcattttctcttgccaccaccatgtaagaagtgcctttcatatcctgccatgattctgaggcctccccagacatgtggaactgtaagtccaattaaaactcttttcctggccgggtgcagtggctcatgtctgtaatcccagcactttgggaggccgaggtgggcagatgagttgaggtcagcagtttcaagacaagcctggccaacatggcgaaaacccatc

SEQ ID NO: 27215 - DNA, 2300 bp, Homo sapien
tataaaagttacctgtataacaaatgtttccatcaaaggagaagctctaccagcacacttgaaatatgatctataaaagtgaaatatacaatacatagttattatattagcactcataggaattagcacttataggaagcaaatatactacaaattagagtaaatgaaataaatgtcatccagcaagtaacatcataaacactggtctgaatgatttcatatgtctggttaaagtttgttttctttgtgttggttttaactataaatcccaaaataaatttgcctattactcactgattttatggaaattgtaagttgcttatttaaggacattaaaaatactctttagcagtacccccctttattttttactgtgaagctgtgttaatttcagagaagttaacattaccaaaaaaacaactattttaattaatataaacattattatagatatgctatatatctatatatgtggttgcataatgtgtgttttatgtacatacagatgtgtatatatttatatactatatatatatatatataaaatgctaactctagccttataaacccttttaaatttcaaataaaaatcataaggtatgcctgatgtcactttacattttaattcagaaaaaaattataaaatgaaaagaaatccctaaaagagaaggaatatcaagaaggactcaattgctaaagtaggtcaaggacaattaaattgctttcttaatatgtctgcttataatttgattatttctgtaaattatatttttacaaagttcctttgaaaatattgttcttttgttttgataagcttttaagacacattcacacattttatttcctgtcagccattttctttcatcataaaagtcattttgttagggtcttgatttaattatagactctattcattagggcaactgaccaactcaagaatccctactgctttattcaatagaagtagttcctggagttttgtgtttaatgcactccattttccctagttcataaagtgtgaaaacttatattttattcagtatttttcttggctctctgattgaatcagtttccaaggaatgagacatatgtgtgagttatatctcctttacaaatattctttcttgcaaggaattactttttcattgccaatatggggattggctaggctaagtactcatatatgcctattgtgaaaacatgttttattgaatggccttaaatctttatgtttcttgttataaaaatccgtaagaaaagaatattgcaaaagatttaaaaatttttttaaatgtgtatatttgtaaggttaatttacatattaattgttgtcagtaaaattaattgttgtcagtaaaataatcttgacacctaaaggactttttaataaacacattgacagagttgtttcttctgctatgcagcctgtcttctgcaccatattgattttaaggtccttacgtgtggaatttgttttggacaatattggatagaaggccctcgaagagtataataggggtatgtggtgggggaaaattagtatttcacttttcttaatagccattgttgaaccatgcacccaagcactacaacaatggttctgtatccacagcccacaatgggattcaacctatgaactttgtaggggaacaaaaaagttaaatctttatgttcactaatatatctaactgaaatttagtacatcttagatatatgcaaacaatacaaagtagtattagagtgcctggcctatcttgttgccaattaaaattttgtatattttcatatcacattaccttgctgcagatatactgaaatatgttgactggagaataattctctgggtgaccttagaccaacccgtttctccccattttctcacttagagttctcaagaatgattgcagaatgtgttgtgaatgcaatgtcctgagataagaaagaactatctggaacagcctggtctctttcccagtccttccctagaaacagaatgtccttcaatgctttaacccagtgatccatggaactctgtggttataaaacccattatgtgctggtttccagggcctcttagccatggtgcaattaaggtatgcacagataagactctgtctaccctgggcagctttcctgatccatggcagtctggcttacaagcaatactaggcttctattgtctctttctgtatatttgtaagtaataaatctacttcatataactcattatgtataggtgttctatctcatcaaacaaaagcaagttgggaaccagtgcagagtgaacctgcttcacattt

SEQ ID NO: 27216 - DNA, 2300 bp, Homo sapien
tatattcaaagggcttccaatttgagtcaccattatcattaataatagtactatagggatgtggagataattaccatcagtctcccttatatggaaagttattgcttgtatctgagatggaacatataaacttccctctcaatttgtgcctttttcagaagcaggaaagaatcagtagtcaatgtgctttatagggtacaggaatattataagtcttggtttattcaaaaactcagccgcaaaaattcaattctagtaagataatcagatcatttatctccatatctggcacttactgtctataagataaaatcttattctcctttaaatgttagttaactagattttcataatttttatgtaaatctggaaattatgaagaaaatactaggagttgtagataatttttgaggaaggagagagagggttttcttgctgattattcccaaatctttttcaaacatgtacacatggcagtctcaactaaattcaggtaagtgttgggtaggaacattatttattattttattttcctttcaaaatgctaggctgtgcagagatactttcataaactgaggaattgtatgatgattcatctcagaagattaaaaattaataaacttgttctgaaagaatcagtatgaaggggcaaatcaggcttgtccaatattcctctagtgtagggatttgtaacccttttcacaccaaagactgggaaaatccagtgaagcttacaggcttgttctcagtatatgatttttactgaagtaaaacatacatatcatacaattttccacttttaagggtatagtttagcagtgttaagatctccaaaatgtttttatcatgcagaattgaaactctgtatggattaaacaacaaagttcctttccccctgttcccagcccctggtaacaactattatgctttctatatctacactgtaaatagtgttgctatgaacatgcatatgcaaagatctctttgagaacctcactttttggggggtaaatacccagaagtgtgatcgctgattatcgtatgatattggtatttgtaattttttgaaggaagtcagtattgttctccataaaggttgcaccattttacaatccaaccaacaatgcacaagggtttcaacttgtccatatccctgctaacacatttgttactttctggttttgtttgttttttatggtttctatcccaatggatgtgtggtgatatctcacagaaaaatgaatttctctgatgattagtgatactgagcatcttttcatgtttgctggactttgcatatcatctttggagaaatgtttattcaagtttttaacctacttttaattgggttacttgaacttttgttcttgaattgtaggagttctttatatatgctagatattaacctcttatcagctatgtgatttacaaatattttctcccatttcatgggctctctttttactctgttcgtgatatcctttgacaaatgaaaacttttaagtttgatgaggcctcattggcctatttttgcctttgtttcctgtgtgctcactgtaatttttatacatttataaaataaaatacttaggattacaaataaatttaattattttgaaacatattagtcaaactatagagattataaaattcagttatgtatgtgatcatactgacacatcaaatgatgaagtcttaaggctggactaataagtagcaaaatattgtggtagctttgattttaaatgtgaagcaggttcactctgcactggttcccaacttgcttttgtttgatgagatagaacacctatacataatgagttatatgaagtagatttattacttacaaatatacagaaagagacaatagaagcctagtattgcttgtaagccagactgccatggatcaggaaagctgcccagggtagacagagtcttatctgtgcataccttaattgcaccatggctaagaggccctggaaaccagcacataatgggttttataaccacagagttccatggatcactgggttaaagcattgaaggacattctgtttctagggaaggactgggaaagagaccaggctgttccagatagttctttcttatctcaggacattgcattcacaacacattctgcaatcattcttgagaactctaagtgagaaaatggggagaaacgggttggtctaaggtcacccagagaattattctccagtcaacatatttcagtatatctgcagcaaggtaatgtgatatgaaaatatacaaaattttaattggcaacaagataggccagg

SEQ ID NO: 27217 - DNA, 2300 bp, Homo sapien
cttctgatgccatcttctatatttctgtgatcaaacatggtccatgttgctcctatcacttaatgattatcaagaagtttttcactacattcagccagtagtctaatcagccatcagacttgttcttgccttgaattaatcatcttaatttctctttggatcatctccattgaaaagcacattttgttttagattaacatgattttcttgtctagaagcaatagatcaattcatttccaataatttcctagaaaaatgatgctttatagctttttatccattccagtaagggaacaaagcaatggatgatccgattagtcaataaaactcctcagaaaaattagttctgaaacagaaccttcccaatattccatttgggtcaggatgatatcacaatgattttgatttaatggataatgtagagtgttctgtaatattatacatgttaattccgagaccaaacatgtttcttcctctggcaaactcttcagcccatattgtccatcacattcaatgtatgaagaaaactggactcttctgtacttgagaaatgaaaagtttatttatttctaaaggcatcaacatgaaagttggatctgagattaggattgctaaaatgaattcaaacactaaagttctgttcttgcagatccagagatgtatgcacatgaagcctccttataactgagaggaaaaagatctagtctggtaaagaatcaaattacaaacaaacaaaagtagacaacattagctatgtttcgacaataaaataaagatgtatactcatgttatggtttcctgattcacgaagctgaaaaacttgccgtctgtattttatcccatcctaaattattcatatgaaagtactttatgctactacatgttttcaaatattttcgaagctgataaaggacagatgttctcatttgagtgtaggtagaaaacccagaatatttcctggtcatagcctccccttttaccatctgatcattgaggatattccctaaggagttacttgggagttaggaggaatcccagaacaactatttgaaagtcaggtatctcactgatagagaaggattaaaaaataaaaatgattaaaggagtcgtcctaagatgtttcctaaaacaagacaatccatattcttcagtagaataaaaactgataaaaaataaaaattaataatacttacaagatgaatatttttctttatttcaatttctcttttatttagacccataaaatagtttttgtttacgttaaatagactaatcttttgctgaagattccattgtttttgattgtggaagtgtttaccatgtttcttcataggcaaaattttaagtatcttgatatactaacctgggattaaaaaaaaaaatccttctcaaaatggtgcagaagttaaatgtggaacgtgaagtaatttgttcatattttaagagaaattgaattatgtttaataaatattttgctgcgtacaccttttatgtctcatctaagtagcaattgcctaactaaagatgtaaacacttactgctacatgtcttgtaaaagatttagtgttttcacccttagatttaattctttgaaatattgagagttaaatttatatatgatttgagataggattacaactttattcttttccatgtgatacccagttttcacagcacaattttttgaaaagatactttttttccctaccaaaatgctttgatacccttgttaaaaattaactgaccttaaatggaaggttttatatcattacacattaagtgtaattaatattaagtgttaacttgtttggattgaaggatgcaaaatattgtttctgggtgttgccagaagggattaacatttgagtcagtggactcggagaggaaaacccacactcagaaagacgcattcacaatgtgggtgggcaccatccaataggccaccagctggctagaaaaagcaggcagaaggtggaagaagcagagtggggggtcttcctgcttttgtgtttctcctgtgctggatgcttcctgcctttaaacatcagaccccaggttctttgtcctttgcactctttgaacttacaccagcggtttgcaaggggctcttgggcctttggccacagactgaaggctgcactgaccattttcctacttttgaggttttgggacttggactgagccgctactggcttccttgctcttcaacttgcagacagcctgtagtgggacttcaccttgtgatcatgtgagtcaattctccttaataaaatccctttcacatatacatatttcctatt

SEQ ID NO: 27218 - DNA, 2300 bp, Homo sapien
tgtattttcttatctaaacccccaaaatcatagaaggttgtttgatcgttttgataagaaataaataccagccaaatgtgtgggaatgttagtaagaacaatgtgagtgtagatttgcaaagagaattgataagaatcactgtcatacttttataaccagacctatttctctaggcctatgcttggtgtatgtgtgagtgtgtgtgtttgtgtttgtatgtgtgtgcacttatggttggtaaatagcaagtcatgtttaatgaggccattttcctgcacttgtttaatgtgttcagaggtaatgtgttatcaaaaagtgaagccaaggacacaaaaacccttactgcttatcttccatggtcaggaaggaatgctggtcagttgtttaaaacaaaattttaaactcactgtctccttcaacaatgctctagccattcatattaatggcctttagtctcagtgaaaatattaacaatataatcaagcatagtgtgaaatttgtcactgagaatttattgagtttgcattgttaatatgtatttatctcttctgtatctaggccaaccccaaaataaaactaaaccaaaaaaacaagtaaaacaagcaaaacacacactcacacagacatagtaaaaaataaaataaaataccagaaatagttctcatgatcacttaaatattatttgtaacaatagagactggactttgaaagacaatgtcctcgaggaagagtatgtttactgggaagaagatagtttaatctatttggcacaaatatgtggtttttaacagatgctgcaataacagcagtggggaatgtctgaaagcattcttgacagtcaccactgggagcatggggatgctactagaatctagtaggtagaggccagggatacttctaaccatcctacaatgctcaggacagcctcccagaagaaaaactcaatgtcaacattgagtgttaagaaactttattttagaagagtaaaagtaaatggaaatgtgggagggtgattccatttgttattttcatgccatttctacaacgggtaagttgctttcttctattgagttcccttattcatgaaacataaagggaaattcaaccttagggatggaattaaaaagtacctgtttgtcaaatcctgtgtgctataaatagaacaaggaaagtaaatgattcttccagaataagacttttctccttagtaaagtcttttaaacaagtctcacaaaatctacaaaaagtgtgggaaatatgcctaatgaaatacagactagaaatctaaagtaaaaaaaaaaatgattggtggatttaaaaggtgttcttgtctagaagaaagtgtgatttacaggctaaggcatttcagggaatgtgacaatcaaatgaggaggtagctcctacagccttctctaccttctcccagccaagaataataattatgcatgtacagaagtctcagtcaccagtggcttgatattaatgatgatcatgtgagtttattcatcaggcttagctattacagtgtgagttcccttcctcattctaatcatcgacttccaaaatgcattaagcctaatggggaaaagacaaatcgccaagtcttattttaacaatttaaggattttgcatttctggcattctattaagtcagtgaatgctgcttagagatactccacagaaggattcttgtctttttttttgttattatagtgggtgctttcactgacattacacatgacttatgatcaggaccagtgtaagtatacccagtgagcttccaaaatggcaaaaattccaaaatgacagaaattgtatataactgacaaaaagagaacaaaataatatatatgtatatgttccaaataagtcttcaaatatgaaccttttcaattatttattaaaaatcaatatattatgggaagcaagatgatttttaataaataattgaaaaggttcatatttgaagactcatttggaacaacccaaaaaagatttaagtgttcacatgaggtaatcagaggaagacttactctaaactcaacattccaaatacattacaagttagaacgtagaaacaattagctcaggacttttgaggccatttctcatggaaaatcaggaaaagagaatgaaacattaattttcatgttgagttattacagacatcagcagtatggaccaagcacccatgagataacgagtcctgaactgggcaccaagagaggtgggaaatgtattaatacctacaactccctgatctctggaaactcctatcaatagttttagaaataggtac

SEQ ID NO: 27219 - DNA, 2300 bp, Homo sapien
ttcaagatcttgatcccatttggtttaaaatttccactgaaagctcttctctggtctgccgctgatctcggtgcaattattttggcacctatcaagtagaaaatgttctcaacttcaatttttcagtcagaattatggaagctgaacaagttgagatatgtatgttgttggctattgtttctgttattggtcttctgtctgcttcaattagggcagaaacaggattaatttttttccttgcaaattggtgtggatgttctgccactgcaagcttcatcttcaacattatctcatcccttcttaaagttagctatctgttgtaaactgctgatttattgggggcattgtttctataaagttttctctttttttcttccacagaatagaaaatatgggaaaatttcccactcactttatgagacttttataactttggaattaactttatggggacattacaattcaggagaattacaagccaattttattaatgaatgcaagtaaaatcctacataaaatatgaagacatcaaatgtaccaatttatgaaagggaaactgtgatggacattacccataaactttttataaggtattaatcatgtgatcattcttccacttaatgattaccataaatttgatgtttgttctttcttcaattttcacagatttcatgttgctctgatagggcttttgtcaaaccagtgtcctctccttggtgcctcaaactagatcatatttagacaagttaggaaaagttgcaacaggctgggtgtggtggctcatgcctgtaatcccagcactttgggaggccgaggcgggcagatggtcagagctcaggagtttgagaccagcttgggcaacacgctgaaactccgtctctactaaaatacaaaaaattagctgggcgtggtggcaggcgcctgtaatcctagctacttgggaggctgaggcaggacaattccttgaacctgggaggcggaggttgcagtgagccgagatcaccccactgcactccattcagggcgacagagtgagactccacgccgtctcaaaaaaaaaaaaaaaaaaaaaaaaaaaaaagaaaagagaagaaaagttgcaacaagttaatataagtttattttggtacaaaaaatgtttaaaattgatacataagttttatgataacaattttttatgaacatcttgaagacccttagtttgagaagaaaaaaagaagtactacatggaaacattcactcagttcaaaaataatgactattaagcaacggttctatgagaaaggtactattaatttgtaatgagaaagagcctatggatcatcttatatttttaaaattgaggggacaacaagaatgtttactatagggctattatagcacattcgtgaaaaagggagtcagaatttaaaagaacaacattggcaaagattacttattacacttcatgtttgtgaccaagatttatcaatagaaaagtactcttattttacctaaaacttttaatccttaaagatctttactatgttatattgcaattttcataaagatggccaagtaaaaaaattatagggaaacaatgtactctggtttcaactaaagtcagaaatactatacttcagtaaagcacactttaattaaaatttaaagaattatttaacactcccaatatttgatcgattaaagttggcaaaagtcagaaagtatttggcatgtaaaatttccctttaatggttagatgtaatgaggcatttttttaagtgttttagaataacccctgggaataccatcactagaaatactaactggaatatttagtgagtaaagcaaatgccacattcttgggtacctacaaaaaaaatctcactttcagagaggcacaaattatgcatcttattaatgtgcagaactagatctacaaatgggcaatcagaaaaaactgaaaactctcaaaaagctaagttcttaggagaaatgtgtatatttgggacaatagtaaataaccccttaaaagaagtaaatccagtcctcaaagcaaaagggcgagtctgagagcaagagccccagagaaagacgccggaaggaagtcgtagatgtaggaagtgactgtaggtttagatgaatggaaaatgaacttgccagttcacagctatgtccttcccaatttaggaggttaagggcaggaaaaacatgagaaactcttttgagaagctgcacaagctgacatggaggatcaaggatttcaaaagctttgaatataaagaggtgagaatttttattttatttttttactattattc

SEQ ID NO: 27220 - DNA, 2300 bp, Homo sapien
gaatctatttcttttaaaagggcaaatatacagacacagaataaaacagtggtaaccagggattgaatggagaaggaaagtggaggatgtatgtcaaaggatacaaagttgcagatacataggatgaagaaggctagagatcaacatgaagatgtgaaaaagactatagttaataatattgtagttttcgggatctttgctaaatgaatagattttagccgttcttagcacacaaaaaaataaatagctatgtgagatgatagatattttaatttgctttattatactgaccattttactatgtgtatctcacatcgtgttgcatacaccttaaatatccacaacacgatttacttaacaaataaaataaaccaatgtttattcaaaaaccaaaaaagaaaatagacatgaaaactccattttatgtatttaacagcagattagacacaggtgaagagaaaattaatcagtagaaagataggtcaaaagtaaacattcaggtagaagcataagcaattaaaagaaggaaaacgggccaagcgtggtgacttatgcttgtaattccaatgctttgggaaggctaagacgggcagattgcctgaggcccagagtttgagacaagcctggccaacactgtgaaacccctcctctactaaaaacacacacaaaaattttgctcagcatgagtcccaagtagctgggagtacaggcatgtgccaccatgcccagctattttttcttgtgaagcacgagaatttcttgattctgggaggcggaagttgcactgagtcgaaatggtgcccctgcactccagactcggggacagatggagaccatgtctcaaaaataaataaataaagtaaataacaaaagaaggaaaatgttgactagagggtaagaacgcatgtaacatggtgaaagtttctaacatatatttaattagaggaaaagagttgagaattattaggaatcaattatcaaataggtcatgtctgagaactggcaaagcctggaagtgacattatgccacagacataaaaataataaaatcttaagtgggggaaactaaaaaataccagaccacaaaacatcaaaaagtataaaagaattgttgaaaaccaaagatgcagagaaaaacttaaaaacagtcagaagtcaagatgagagtagagatagtgtgtcccgaattggtgggttcttggtctcggtgacttcatgaatgaagccgcggaccctcgcagtgttaacagttcttaaagatggtcaggagtttgttccttcagatgttcagatgtgtccggagttttttccttccgtagtttgtggtctcgctgacttcaagagtgaagccgcagaccttcgcggtgagtgttacagctcttaaaggtggcgcatctggagttgtccgttccttctggtgggttcatggtctccctggccacaggagtgaagctgcagaccttcggggtgagtgttacagctcataaagggggcatggacccaaaaagtcaacagcagcaagatttattgcaaacagcaaaagaagaaagctaccacagcatggaaggtgacccgaggggattgtgctgctgcctcggtggcctgcttttattcccttatatggccccacccgcatcctgctgattggtctattttacagagagctgatcggtccattttgacagagtgctgattagtgcgtttacaaacctttagctagacacagagtgccaactggtgcgtttagtaacctttagccagacagcaaagttctccaggttcccacccaacccagaagcccagccggcttcacctctcaatagcgctcgcccaggattttactgcggcacctagtccaggcactctggcagcccagagggagctcgtcccccaatcaagcccagcaggcgccagcctgccgcgccgagtgcagggcccgctgagcctgggcccacccggaacccgcgccggcctgcaagcgcctcgcgcagccatggatcctgcccgcgcctctccccacacacctccccgccagcagagggagccggctcaggcctcggccagccccagagaggggcccccacagcacagcgacgggtcgaagggctcctggaacgcggccagagcggacgcagaggccaaggaggcgccgagagcccagagcgagcaagggctgctagcacgttttcacctctcaataggaggaagtaaaggaaattttacctacaaaatagcaatactaagctttacagctgacattacaacagcaacaagaaaaggtaaattataatggaaagtat

SEQ ID NO: 27221 - DNA, 2300 bp, Homo sapien
atttcttatctgcactgtagcaaggctggcattttgaatttcaagcctcatcgtatcattactctttaaaaatattgaattgtttgtcattttattgagtaaagttcaaaaattattgtcccagaaaatctacggtaaagttttaatttctggaccctaatttctacgccccatttcacatctagcttctcctcatttagctacacaggtcttttgtgttctccttggtccaatcatatgctttctggccatacaatctgttctgtttacttgcccctctccctcccacccctcattctcaggacactattctctttcagagaatttaccataattgggatttattcatataatcctttgattattgtctgtgtccacctgtcagatcagaaatgccaagaagtcttaaagggcttgtgtttctcttttccttcactattgcatctctgttgtagtaaagtgctggcacataacagaaactcaacaaatgaaggcattgtctcaaccaatgctcacatcaaccctacctcagaagtattttcattcctcaatttccatgtgcagccagagaggttgatttgattcatcagcatgcccaagactgcacaatcagtagaaggaagaacttggaactgaaagcaggtcatgctgtttttactcttccacactacattttagacctccctgtttcttaagcttgggggtggataacaggaaccatgtgactatcctactccactccgtccttttttgttattaaattgtactggaaatttgggctttcagtgattgtatttttttctgaacatgcattttttttttagaaaaatgaactgactagttttttttaaatgaaatatgattaagagaaaataatctctgatgggcccataaccagcaactttggatatttttcattaagtggaagaaaaatatagactttggcaattgagacgatcttcattaataaataaaaggattgttccagatgtgctataaaataaatacattgagaagatgtgaaaagcaagagggtttaatacacagccaaaattttagtgtctctattggtaataatcagaataacttgtttgattataccattgtgatttagttggatcacataatatgttggtatttggccatttggggccatgaaacaacattttcttatggttcaatccccaataatgggagatttttctctccctcctctgtgtcccaggaaatgcttcatttcccatgagcccattgaaaagaggctgacttaggttgaatttgctgacaagtgtgttggttcttctttcttccccatttctatatgtttgtccatcttccatgtggaagctgtggactagttagaggtaatctgctacttgatcaaaaaggataaagaagttcatgaaacttcaatgacctctgtacttacaagtctcttttagagaaaatggcctgaagcagcatcttcctgcaaccttttatatgacatttactcacattgagtgaaaaaaatgggttcaatggattggaccagaaatcaggaggtaaagtgtactagtgagaaggagatgagaaatcatgtgaattaagagagatgatctcagtttctgattttccagttcccaatatatttataagaggtctgggtgtattttatttttcacttttgaatgtctatgaagttgtcctttatagtcttccagcaaaaatgtttttatttgccctcatttgggaaaacttttttcatcactgaataatccctgaccagcacaaaaattaaatgggggtaatgtcatgtatataatataaactcttaaagataatgaaatacatctacttaaaaagaaaaatgttctttctcttgtggaacttaggtttcagaatggaagtgtattttatattggccaattggactggctgtgaaagaccagtaaccaagcaagagaagtagatgttgctttaatgaggtataaactatatcttgttaaataggtcttatcttagacaagtagtataaatgcacacccaaacatcattcatttgcaatacagaggcatttagaagtgattcacatggattttttccttttatttttggaaaggattaatctaagcttctgctgtgtatggacctgtggctacattacaaaattcagttgtgaagctataaaatcaattagtctagacctcaaatcttatttcctatgaaaagcctcaaacttgtagctgtatgaacaagtgtttttggaatttttttttttttgctagaatggagagaacacactggagatcacaaatgca

SEQ ID NO: 27222 - DNA, 2300 bp, Homo sapien
caacatataaagttgaagagaacatgattcagtctatagtaatccctgatgggagacatcattattgtcatttacaggaagctgagacataaaaagtttaacgttcagattccacagctagaattagtgtaaaatgcaggtgtatttgactcctaaaacccatttatccatccactattctgggtgtctcaaactgggacctaaaatgcggaggtttgcacatgacctgaaattacttccaccactgggagaagggaggattgagcaatttcctgtttctattaaagtgcattatacaaacttgtcattctggggatgaaaggtcaccctagaattgcctatgggcaatttcttatagttcaacctagaatgagaaatgggaaattcagaaaggcattgtaggcatctgtaaccagcagagggacgtgccccacctgggtggggaccatgcatccttgccacatgccccactgcacaacttccccagctcctcaacgtcacatggatctggaaagcagggagactggactacggagccagccctccagggttggaactgagtttgaatctcagcttgactacttactaggatctaaggtaacatgtttaatctctctgtgctcagtttcctcatctggaaatagagattataatgctcctccctcatatgatcatagtgaggactgaaagagttaatgcatataaggagtgttaggacaggatctggcacatggtaaatgctttataagtgttagttgttatcatcatgattattcttgtttgaattataagagaaaaagcatgtatcttaagaatagagggttttaaaatgctcccaagttccttaaccaacctgagccatctgtaaattaagtactatgggatttccagctctgacatgtattctgacatgtaactggcatcagtttaatacaaactattctaaaatgtcttgtgcccttgacagggaggtccaagtactggatacttgcaatgcaatccagcagtggccccgtctttcttacaaaaaggccccagtcacatgttgatgaggctagatctattcctgtcctccttctcttccccatatttccttattcttcttcaagtctaaacgtttattgaactgagacccatgaatgagttactcgactaggcttgtaggataaacttgccaggctttagatctatttgttcctttccatcccccaaaatcaaatggctgctccaggaaaatgttccccttgtggcagggtccgggagaaaagagagaagcgacaaaaccaaaaattaaaacgaccgaagtcccatatgctccaggaatatgtcctggagatgggagtggagggcagggggagaatgttgttgaggtcaaaatttttgaagttttaagtcctatatcttgacatcccgagtataaatgcgggtaccagacacagtacaaacgttctcaaagcccagttacgtattccaaaccaaacgcgggctcttgaagggtgatgaggtagggatgaaatccaggatcgcctgaagaccatttcttcctctcttagggacctgctggtctccagctgattcggtccaggaggaaaaacctcccacttgctcctctcgggctccctgcaaggagagagtagagacactcctgccacccagttgcaagaagtcgccacttccccctccagccgactgaaagttcgggcgacgtctgggccgtcatttgaaggcgtttccttttctttaagaacaaaggttggagcccaagccttgcggcgcggtgcaggaaagtacacggcgtgtgttgagagaaaaaaaatacacacacgcaatgacccacgagaaagggaaaggggaaaacaccaactacccgggcgctgggctttttcgacttttcctttaaaaagaaaaaagtttttcaagctgtaggttccaagaacaggcaggaggggggagaagggggggggggttgcagaaaaggcgcctggtcggttatgagtcacaagtgagttataaaagggtcgcacgttcgcaggcgcgggcttcctgtgcgcggccgagcccgggcccagcgccgcctgcagcctcgggaagggagcggatagcggagccccgagccgcccgcagagcaagcgcggggaaccaaggagacgctcctggcactgcaggtacgccgacttcagtctcgcgctcccgcccgcctttcctctcttgaacgtggcagggacgccgggggacttcggtgcgagggtcaccgccgggttaactggcgaggcaaggcgggggcagcgcgcacgtggccg

SEQ ID NO: 27223 - DNA, 2300 bp, Homo sapien
acgatcccttcctgtaccaatggttacattggtagatgcagaatggtgattttccctattctattattcctatgacttttattatctggcattcttttgtacagaaaactctcttcactctttctacactgatttattcttgagtgtcattacggattcatgaatttttaatatacatgtcataatatttcagcattattctttttgttatgcaaactctcccaaatttggacagcgggaggaccttcgagcttggtccgccgtcctttttaacatgtttctgtttgtctgtattttatagttagttgtaggctttctggcacagtaatgatccaggcttatcttagatatttactgttacagacttgatactttttatttggcagagacattgacagagtgagactaagatttggggagctggttgataaagaaggcaagataaagaagattcagagtaagaaaatatttggggggaattcttggccaaagatttacctcgggtatgtctctcaagctcttaaaacctgaatttcttttcctggaatatgaagattattatgccaattgctcaggtaggttgtgaaaattaataaaccaagccctatgattggcacatagtattttttggccattatcactagtgacaacctttcaactaggttaatttctcataccggtgaactccaattacctgcctccaatgggtttgtgatcaaacttgcttaagtttatgttcagaggctttgcttaaatgtggctctaagatgttctaagggcactagagtgtttctaggtaaggttaaatgggtacaggctctaaaaggccgatgaaacagacagctttcatgggaactgtatgcaaatttgaggaagcaaaagatacacccgccctccaacactatatgtatatatgtacatttcgtggtttgaattaggatcttaaatgaaatgtagcctggtaaaatgtagactggatgtaaatccaagctccgtcacttacatttcccattttaaaaagtgaagatacttacactttcctggcgcagtggttgtgagtgtaacatttgggccaaggagacggtcgatctatcgtggcgcagggtcatatttgtaccttaggcggcacttccacctggtggcggcgcattccaattgcaaggcaaaggacagagtgggggaaaggctgaattcgacacccttaagtaaagccacagaattaaactactgtaaatgaaaatatttccatcctgtacctacagagtgcttacttcaaataacactcacgtcctggtaggacagaaaaattagacaatgagctgaagtttgcctgcaagggcattcattcattcattcattcaagaaacatctgttgagcgctgactgcgctgtgctctgttctgggcgcttgggatacatcagtgaactagagacaaaaattctgccccgggatgccttctcctatacatcctatactatataaactaaactagaaaatttgtaaagagctcttaggaattacaacgtcctctccaaagtcaaggggacgtgttccgaggcctctattaccacagctaaggggagaaccggggtgcagacccactccagccgaactaagaacctacccggcacaattgaaagttaagccacgcgctagaggatgtcatcgctgacaaaatagaagacgccttccccattcccccccacccccgcccccgccaagaaaaccatatattcttttagggaagcaagcgcttcacctgggtggccgggatcgaacccgcggagggctgaaggcggagggcaacgacgcctgtggaactctgtttccctgcagagcctacgtggtgggcggcaggccgaccgccctgggggccctgcacctctgggtaggtgaccgcgcccaggtatcgagcacaggtaacgcgccccggctccgagtctcggggtctcagccactgaatccccagcgaggcctgacgccccccggtggaggcgagcagtctgagtgctgggtccggaacagacctgtcctgcggaactccgagtgcgcgttcggtttccgggggaggagggcggagaaggacttgcgcgcgacggttctcaccgctgctatggaggcgctggccatgggttcccgggcgctgcggctctggctggtcgcacccggtggcgggatcaaatggagtgagtttcagaggccgtagggacagggagcgaggcctagatagtggtgtctgtctagattgggtctgaggcggggccggggaggtcccgcggggcagaggaaggaggagggt

SEQ ID NO: 27224 - DNA, 2300 bp, Homo sapien
aggtcagaagttcgagaccagcctggcaaacatggcgaaaccccatctctacaaaaaatacaaaaattagcctgcatggtggcacatgcctgtagtcccatctactggactgaggaggctgaggcaggagaatcacttgaacctgggaggcggaggttgcagtgagctgagattgcaccactgtactccagcctgtgtgacaaagtgagactctgtctcaaattaaaaacaaaacaaaaaaaatgtatatagccacttagatctataggctaccatattggacaccacagttctaaaatatgagtcttttcttatctcattgctttcaaaaagctcattagctgtaggatgaggtctagacagtagcgtgaatgctcttcgtactctaacctccccttcagtttctaccaccaccaccacctacctcactatcccgatcccacatacactttagtactgtagaaccttgctttttctaaataaaccataatttttcaatctcctagctctggatcctgctgtttcctctatgtagaatgcctctcctttatgtccttcccttcagaatttgacccatttttcaaggtttaataaagaaagccctggccccactcccaacaaaaggaacagccccttatcatggaccttggacaagccatttagtgtctctccgcccagttttctcatctgcaaagtgggaatgataacatttcctcttttatggagttgttgggggattagatattgcgttattcagactccatcactgagaaagcatgcaataaaaatagctgttattattttctgtcctcctgtaacatttaccatgtggtatcaggcatctttcctgataagactctgtctcccctcaagactgtgagcttgttagcaagaaagcctctatcttgttcatggttgtccttcagcatccagcacattgttgccatttgtcaaatgccttggctgggtggcaaataaataacttagtcagttactcacataggattgcatagaatttttttaagtatgacatttttgtgtatatttttagggaggagtaaaagacatatagctgtagcaagaattagaaaaaagaagatgccaacaacttttctttttaagcatcaaatccttctcattactgcccagaaaaactggcataagctgttgttaaatctgtgccccttctcctcggttgactggagtacgagttttaacattttgccattttgactttcctttctgggtcccctgggtcctctcctcccaccccctccctgggtactaagttttcatcactgtcaccacggcaacagcaaggatgcctcattcctcacagttctgcacagctaaactctggtcgcctttgtccactgagctagctgaattctttttaaatacaccactaaatcaactatctgctgtacagaacttcatccattattcaacctttaaaaaaaaacaaaaacaaaaacaaacaaaaaaacaaaagaaaaaaactgatgtatactaatttcttctcctgggaatggcctttttccagacctgccaatactcttgaatacaccatacatttttggtccctaggaacaaatataaaaattgccagtgtacgtgcgtccaatgtaagtgtggtgcaattttaaagcacgcaacagagcattcataatgggtttcccttttaaaagcacagtagaccaaaaataaacctgacaaagggcagctgtagagttttaacacgtggaaaactccacaagcagcagttatgtaacttgaaagaaacatgataaatatttcacaccattagatgaacttccaactctgacactgaaaaaaaagcaaagaacaagaacgcgagacaaatgcacctcaaatctccaaggagcaaaaagcttaaactgagaagggaccaaggctgtactaaaatctgagacctgacttccagcacgagtcttgattgcttttttttttctcgagttcgaggcggagcccgcgaaccccatctcctcagagcgccaccccctcagcttcgcccgttgggcagaattttccaaatatctccacccctaggctgaaaagccagaaagaagttttgagccaacgaggggaagaaaggagttggggcaaaacaggaggcgtttccctacccgcatacatccccgtccccgagacacccaatccccccacccccagcctgcccgcgcctcccgcccccagctcctcgccctggggacagctggcagccccgcgcggaccagacacaaagccgatcaatcccggaggcgtgggggcggagggac

SEQ ID NO: 27225 - DNA, 2300 bp, Homo sapien
gaccccatctctacagaaaaaaaaaaaatagccaagtgcggtggtgggtgcctgtagtcccaggtacttgggaggctgaggctggaggatcacttgagcttgggaggtagaagctgcagtgagctgtgattgcaccactgcattccagcctgtgttacagagtgaaaccctgtctcaaaaaaaaaaaaaaagaaagaaagaaatcctacaatcaggccgggcgtgatggctcacgcctgtaatcccagcactttgttgtaatcccagcactttgggaggccaaggtgggtggatcacctgaggtagggattcaagatcagcctgaccaacatggagaaaccccgtctctaccaaaaatacaaaattagccgggagtggtggcacatgcctgtaatcccagctactcaggaggctgaggcaggagattccttgaacccaggaggcggaggttgcggtgagccgagatcgcgccactgcactcctccaccctgggcaacaagagtgaaactctgtctcaaaaaaaaaaaaaaaaaaaaaaaaaaagaaatcctactatcaatgcaatcaacaaaatatgcttcacctgacagaatgaaagcaaactgtttgaagaaattaaagaattcataacatatcacttttataccccatcagggaaaaatacttgagaaaaggctacaagcaaacaacaaatgacctcacaaggtcatgtgccacttattatcattcctatgtttaaacacacagaaactgaggattagaagtatctggtcaaagtggtcgggcgcggtggctcacgcttgtaatcccagcactttgggaggccgaggcgggcagatcacgaggtcaggagatcgagaccatcctggctaacacggtgaaacccggtctctactgaaaaatacaaaaaattagccaggcgtggtggcgggcacctgtagtcccagctactccggaggctgaggcagaagggcgtaaacctggaaagtggagcttggagtgagcagagatcgtgccactgcaatccagcctgggcgacagagcgagactctgtctcaaaaaaaaagtatctggtcaaagttacacagcaaaatctaacttaacacatatatgcaaaaaaaaaaattgtgcaattcaatgccactttcccttctggcaaactaaggacatgcttaacattcagcaataggttcacccgacatttgcttagccctagatactgtgcaaagtacttccatatatatcctttccttgtacccttacagcaatactctcaaagagttaaagtgttcttatccctgctttacagatgataaaactgtatctaagaaagattaagctgcacgtattctcacagttaatttgctctaagtctgactgcatagatgttactccttctgcaacacgggtaaaatccactttcattgtttcaattatccaccatgtaagtgcctatgattccccaatcgcatttctaattttagtattcatcctgagccccaaatctatccacagcattcaacagttctcatctcccttataagtcctacgaactcatccaaaaaacgaacacataatcccatatcaaaacttgttccttctcctttaatccctttcattttttttcactgattagtgaatgcatattgtccactaaaacgcagaagatagtcattacacaaatagctgtgaaataccacctgacataaattctctattccagtaccatcgggtgccacgagagcatatgatagcgtctgacatgatcagaaagactggggaaggcaacagtaagaaaacactagtctgagcagaggccttgttctgggtgggagcatggttctatttatagtgatgactgaccggccaaaggttagtaggttcgctgcctcttcagtgcatattcctatgaacaatccataaagtcgcctaatgaagtgttagcaccatcgtttttaggtgggatgcaaactttcaatattatgactaattttttccctcttaatggtacacgttctgcctaagtagcctagacgctcccgtgcgcccggggcgggtaggcctggccgaaaatctctcccgcgcgcctgaccttgggttgccccagccaggctgcgggcccgagacccccgggcctccctgccccccgcgccgccccgatttgccctcagagagggtatcgatcttatttctgggtctacggcaaactccaaggtctacaaacgtagaggtcagctgtgaccccgggccaggccgtgaaggtccccaggacacagagctgctctctcctcctagtaaag

SEQ ID NO: 27226 - DNA, 2300 bp, Homo sapien
ctttgggaggccgaggcgggcagatcacgaggtcaggagatcgagaccatcctggctaacacggtgaaacccggtctctactgaaaaatacaaaaaattagccaggcgtggtggcgggcacctgtagtcccagctactccggaggctgaggcagaagggcgtaaacctggaaagtggagcttggagtgagcagagatcgtgccactgcaatccagcctgggcgacagagcgagactctgtctcaaaaaaaaagtatctggtcaaagttacacagcaaaatctaacttaacacatatatgcaaaaaaaaaaattgtgcaattcaatgccactttcccttctggcaaactaaggacatgcttaacattcagcaataggttcacccgacatttgcttagccctagatactgtgcaaagtacttccatatatatcctttccttgtacccttacagcaatactctcaaagagttaaagtgttcttatccctgctttacagatgataaaactgtatctaagaaagattaagctgcacgtattctcacagttaatttgctctaagtctgactgcatagatgttactccttctgcaacacgggtaaaatccactttcattgtttcaattatccaccatgtaagtgcctatgattccccaatcgcatttctaattttagtattcatcctgagccccaaatctatccacagcattcaacagttctcatctcccttataagtcctacgaactcatccaaaaaacgaacacataatcccatatcaaaacttgttccttctcctttaatccctttcattttttttcactgattagtgaatgcatattgtccactaaaacgcagaagatagtcattacacaaatagctgtgaaataccacctgacataaattctctattccagtaccatcgggtgccacgagagcatatgatagcgtctgacatgatcagaaagactggggaaggcaacagtaagaaaacactagtctgagcagaggccttgttctgggtgggagcatggttctatttatagtgatgactgaccggccaaaggttagtaggttcgctgcctcttcagtgcatattcctatgaacaatccataaagtcgcctaatgaagtgttagcaccatcgtttttaggtgggatgcaaactttcaatattatgactaattttttccctcttaatggtacacgttctgcctaagtagcctagacgctcccgtgcgcccggggcgggtaggcctggccgaaaatctctcccgcgcgcctgaccttgggttgccccagccaggctgcgggcccgagacccccgggcctccctgccccccgcgccgccccgatttgccctcagagagggtatcgatcttatttctgggtctacggcaaactccaaggtctacaaacgtagaggtcagctgtgaccccgggccaggccgtgaaggtccccaggacacagagctgctctctcctcctagtaaaggtgagaggcagcccaggcctcgtgaaaaaacccagaactggagtcccaaaaggccacgctgatctagctaccctcccagtcaccttgcactcagtcccgagctgccaaagcctccgccgccaccacctccgctctacttccggccctggctccgcccccacacgcctacccgccatcgcaatgcattatgggccgccgtttcagtcggtcgacgctcaccggacaggaagcgtctcggagacagtctgcgaccggacgggtctaggtgagacagaagccaaacaggaggaggaagtggagggtaagtgcttccgggtcccctggcacagcctccgccatcttttcttcgcctaatttgacccgttctttttcccctccttgaaaccttgctctgtacgcatgcgctctttgagtggcctttcccctagttcaagctcccctccgagtcagcgtcctgttcgttagggttatcgaagtgtataaaggtgcagggaaagtgagactgtgtaaaacaaagcggattggggcgttgtgcttccttgtacctcgtgagcctccgttgccttgggcggtcgttttgcgcaccctgccgggagttgtagtcctggacccgaaggtgcctgggaggcgggaggggggttggggcttctcagcgccgattccgcgggaagggccctgggacctcacacttctagtcgcgggagctgcaggtcttacccggagagacgctgcacgtggagccctcgccgctgccgttctcagccggctctggagtgcgggcgggggcgacagggccgattccggagtgggtgag

SEQ ID NO: 27227 - DNA, 2300 bp, Homo sapien
agataggtgtaacattcccttttgaaactacagataaatttgagaattgtccttcattggagagcattattacagagcttagaacattttgttcccaatatattataagtggagtgtgggggtacctgcgagattaactgcacattttcctaagttatcaaatgcttttctgtgtctgaggaaattaaaagacatttttattttcaaaaataaaggtagcagttaagaaaaagcaaagcatacatatctatgtaatataaaaagagaaagcacatacagtgaaagattaacagttgggaccctcaggtgaagggtatctgcgtgttcactgcatgattttttccccaattcttctgtaggtttggagttttatatataaagagttgagggaaggctaaagtcaacagttttaatttagtactcggtctgatgatttgcttcaacctaacatctagctcatgatttaattacttcattactatacatgcctcatgacagatgctcttgtatacacaattcaggtaaaattgacttgaagtccactcagcgtcactgtatgtctaaaaataaagaagcttggaaagcctggatggaaccctgagagacaggctagtccctcaagcagttgctaaagagttgagcggtttcttctgaagttcaagataacactaccgaagaatgttatcaccgcctcgttctacaattcgctcaagtgaatcctgctaaatctttgctcttctcacgagtcagacctactgctattagtggaaactacttatgaaatgaattttatttctaaatttctaatcatcttgcaatgcaatattaggcattgtcctctcggtccgctaacctgatcaaactggggtccctaaatccaaacacgcacatacagcgtgtcttctagtacacaaaaaaatttccaagtagacaacccattgttatctccttggtttacttccttgcttaaaaacaaaaaaacaaacccagatggctaccatatacgctgataaatgattctggtgtgtgttgttctataaagagagcggatttgaaatgagtgaatcgctgagtcccgcgatgagacagggtctgcattttgctcttaaaatctcgggggcgtcaggaccacatcccagctgagcaggctgagactgctgaggagtgcggacgggcgaggaggggacgcggaaaggagggagcggcgacaggcgacccgtccggcacgggtcccggcggtgcccggtccccccgggctccaggccgctcgccccccgcccctccccttcgctccccgcacagctctcccgcccctccccacccggctccctcaagtctccacgaacggaaatgggagtcacagcgccggggaccagcggaaacaaaacacagaggcggccgcgggggggcccttgtgggggaaaaggccccggaacgaggccggcccgcgagggcccgcgctcccctcctccccggcggccgcactcacccactccggaatcggccctgtcgcccccgcccgcactccagagccggctgagaacggcagcggcgagggctccacgtgcagcgtctctccgggtaagacctgcagctcccgcgactagaagtgtgaggtcccagggcccttcccgcggaatcggcgctgagaagccccaacccccctcccgcctcccaggcaccttcgggtccaggactacaactcccggcagggtgcgcaaaacgaccgcccaaggcaacggaggctcacgaggtacaaggaagcacaacgccccaatccgctttgttttacacagtctcactttccctgcacctttatacacttcgataaccctaacgaacaggacgctgactcggaggggagcttgaactaggggaaaggccactcaaagagcgcatgcgtacagagcaaggtttcaaggaggggaaaaagaacgggtcaaattaggcgaagaaaagatggcggaggctgtgccaggggacccggaagcacttaccctccacttcctcctcctgtttggcttctgtctcacctagacccgtccggtcgcagactgtctccgagacgcttcctgtccggtgagcgtcgaccgactgaaacggcggcccataatgcattgcgatggcgggtaggcgtgtgggggcggagccagggccggaagtagagcggaggtggtggcggcggaggctttggcagctcgggactgagtgcaaggtgactgggagggtagctagatcagcgtggccttttgggactccagttctgggttttttcacgaggcctgggctgcctctcacct

SEQ ID NO: 27228 - DNA, 2300 bp, Homo sapien
aagaggtccactcccatctccacaaccaatttttttaaaattagaaaacataaattttctggaaactttggcaagatagaaaaaaaagcattatgatgtagccagaggctgagaagtggccctaatggcgtatcagcagggacacctggggctcccctaacataaacactaaaataggaagttgctacaaagaaatttatcctatgatctttcaaaaaatttatagaccaatccctagaaagtgccaaatagagaaaaaacaaaacaaaacaaaaacccatgcccttttggagaaaaaaaaaattactcagtttcttaaatgatctgtcaaaaaatattactcagtctcttaaatctttctttctctcctggttctctatgcttagtccagagaagcaaaacagagatttgagaaatagtccaaatctttcatatcagtttttgagtgagtcttatctctttttctgaaaccaattcctcaggcttctatgtcaatacttaggaaaactgagagaaaattacttgcagtttctccgtctaagggctgcccccgccagaactgcacagaacaatttcatatactttgacactctggttctgctggattaaatccaacctggggttcggaatgtttcacaagatgggatacaaactaaacttgaatttaacgaaaaattctgggaacggctagtgtcttttaaaatacagataggtgtaacattcccttttgaaactacagataaatttgagaattgtccttcattggagagcattattacagagcttagaacattttgttcccaatatattataagtggagtgtgggggtacctgcgagattaactgcacattttcctaagttatcaaatgcttttctgtgtctgaggaaattaaaagacatttttattttcaaaaataaaggtagcagttaagaaaaagcaaagcatacatatctatgtaatataaaaagagaaagcacatacagtgaaagattaacagttgggaccctcaggtgaagggtatctgcgtgttcactgcatgattttttccccaattcttctgtaggtttggagttttatatataaagagttgagggaaggctaaagtcaacagttttaatttagtactcggtctgatgatttgcttcaacctaacatctagctcatgatttaattacttcattactatacatgcctcatgacagatgctcttgtatacacaattcaggtaaaattgacttgaagtccactcagcgtcactgtatgtctaaaaataaagaagcttggaaagcctggatggaaccctgagagacaggctagtccctcaagcagttgctaaagagttgagcggtttcttctgaagttcaagataacactaccgaagaatgttatcaccgcctcgttctacaattcgctcaagtgaatcctgctaaatctttgctcttctcacgagtcagacctactgctattagtggaaactacttatgaaatgaattttatttctaaatttctaatcatcttgcaatgcaatattaggcattgtcctctcggtccgctaacctgatcaaactggggtccctaaatccaaacacgcacatacagcgtgtcttctagtacacaaaaaaatttccaagtagacaacccattgttatctccttggtttacttccttgcttaaaaacaaaaaaacaaacccagatggctaccatatacgctgataaatgattctggtgtgtgttgttctataaagagagcggatttgaaatgagtgaatcgctgagtcccgcgatgagacagggtctgcattttgctcttaaaatctcgggggcgtcaggaccacatcccagctgagcaggctgagactgctgaggagtgcggacgggcgaggaggggacgcggaaaggagggagcggcgacaggcgacccgtccggcacgggtcccggcggtgcccggtccccccgggctccaggccgctcgccccccgcccctccccttcgctccccgcacagctctcccgcccctccccacccggctccctcaagtctccacgaacggaaatgggagtcacagcgccggggaccagcggaaacaaaacacagaggcggccgcgggggggcccttgtgggggaaaaggccccggaacgaggccggcccgcgagggcccgcgctcccctcctccccggcggccgcactcacccactccggaatcggccctgtcgcccccgcccgcactccagagccggctgagaacggcagcggcgagggctccacgtgcagcgtctctccgggtaagacctgcag

SEQ ID NO: 27229 - DNA, 2300 bp, Homo sapien
atttgttttattgtggtgttctgaaatttccaaggtatgcctgtacctccctaaaaaattctttcaatttagcctcaaggtagtcaaatgactgatttttctaagctgaaactaacatactagcaatctggaaaggcaatataaaatatagcaaatgaagcaacttctaaaagtgttttactcgtggtttataacaaaatgagaaattgttcataattattccctttactaaacaaatatgctagctcaacatttttatgaaaagcaaatcattaattagctaatatactagtgtgaggtaatcaggaataaatacaagtctggacatatgcctgtgcctttaagaaaatactgtaattttgtaatattcattgcactaattataatacattatcttaactagtccagtagagggagctgattctcctaattgctgccgctgccattagtcactgtcgcattataggcgttagtgtaattgtggggatgggcttatatgacacaggccccaggccccgacaaatgcaaatctgtacattaatcgtcagctttctaccccaccaactcttcaactctttagtggttccccagtttttattaacctcttcagcaacagcctcatcaagagaaaccctgatcttataacaactgatactagattatcttgccaatgaaaaccatgcttcaaaaagctaaatgtctttctacaaaaaaagaactatgggagttaagaatgcaaatccaaatcccaagtcagttttttatttgctacaattatttggagtcaagtaaggcataaataataatttggaggtgtttcttttagagattaatactaggatttatcaactttatgaatattgaaaagacattttctgcttggaaaaaagtaacactcacacacacacacacacaaaacaaaacaaaagaagtgcctgagataactttaagtattattgctatggaaattttcttaccatttttctgtccaccactgaatgtgataaaattgtcgtcttcattaatttaaccctcttactgcacctactgataagatggaaccctaacataatccacgatttgatttatctccatttctaagcttttggtaaaggattttatataactactagagctgaccacaaaggagatgtggctttttgatttactccaattctaacattaggggggaaaagtgatttcatctgaaaaggaagctgctgtcttctttgcacaaaccttttgatgaataacactatcgggaacatcatggggtcctgctcactccatgatcttactcttgcaagagaagttaaatcatgggaggtaggggagggaatgaaaagaaagagctgggggagaaatgaatgggtaaaggaagacagttccggatgtgaatttaagccacataaagtgttctgtaaaaccaagcagtgtatgcatgtgtttgatccttcaaataaacctattgtaaacctattttcccagaaaacacagtggaagtcaaagtggctgctatattgaaattaattccactttaagtcccgagtcatgcacgaactttgctgccttgtagtctgaaagaactatacatacagcctctttcttttcttttttttttttgggatggagtctcgctctgtcgcctaggcacgatctcagctcactgcaacctccacctcctgggttcaagcaagtctcctgcgtcagcctccccagcagctgggactacaggtgtttgccaccacacccagctaatcttttttgtatttttagtagagatggggtttcaccatattggccaggctggtctcgaatttctgacctcgtgatccacccgccttggcctcccaaagtgctgggattacaggcttgagccactgcgctcagcctagcctatttattttcttcatgttttcatggtaatcctataggcaagcattgtatttttatcttttccttaatttgatttctagcacaggatgaaccagagttaataggtcatttggcaagacaaacagtagtggaaagaggtaaattattttacgtaccaatttttgatgatgaacttcatatcctgagtcatgtcggaattctgcatccatcttcacttcagagatctcctccgtcttgatatttgtcaacccagaacctgtattacatcataattaaagtatgcaggacaaccaattagttttactcataaataataacactgtaagacaaagcctacccaaaacttctttctaggcctgaagttagaagaaaattgataaatgactcttaaagaaaaatgatac

SEQ ID NO: 27230 - DNA, 2300 bp, Homo sapien
aatacagctcggggtggcttgtgtgggtgcgtatggccatgtatgcaggtgtgcgtgcattggaatatacaattccgtattgaacccagtttaaacttcatcagttctggtgattgctggagtgtcacatatggcaagacgtcaccttgccctctaactacaccagaaaaccaggccagcaccattgactatctagatacagtgggccgtttatattattattgtttcatatttttagattatttggtaaacaatttacagaactaagaataaaggaatagtgagaaataactattagcaattttaataagagttaacatagtaaatattttaattttacgaagaatttaaatatggtaaacccacatgtttattctgtattttcccagttttgaaggtatggatttctgaaatgagcattatcctttggaatgcagctagctgctaatcacctgccatgcacgaacctgaaatatatccgtcttacaaatactggttctacatttcaaatacatctctattaggttcatcatatttcttggtcttttttttttatacttgcaatttcatttaattattgtaaaaatttaagatatttaaaacattgacagctcataattttattgaagagagaatatagccatcttccctcaggaataaaatgttttcaagtttggatttgtaaacagctattaaaatgatcaagccagtctttttttccccctttttttctgcattatctcttctaatcaccttagagagattcctgccttgggcatttgtccacttcctaatggtatcaaataaatgtgttgcacagacataaaatgtgttgcataagcatcataaaatggcaaggaatactgtcacatcattttagcaatgatggttaatgtttttgtcacataatattgagtgatgatatccttcctgttgaatgactaagtggatgagaataccatatttcctttttattcttagaaatacattgctcagccgggcgcagtagctcacgcctgtaatcccagcactttgggaggccgaggtgggccgatcgcctgaggttgggagttcgagaccagcctgaccaacatggagaaagcccatccctactaaaaatacaaaattagctaggcgtggtggcgcatgcctgtaatcccagctactcgggaggctgaggcaggagaatcaattgaaccagggaggcagaggttgcagtgagccaagattgcaccatcacactccagcctgggcaataagagcgaaactccacctcaaaaaagaaagaaagaaagaaagaaatacattgctcacttgtcaattcttgagcttgagaaaattcatctaggatatcatgtgaaggctcatagcctaaggttttacttacgtgatcaatttcattcttcttctggtttatctaattggtaaaatgcctccttctgtcagttgttcctatttgccaatatgtggaagatgatttttgactatattcagtgagtctccagacttctttttatcatgctttttaaagagatgggacctcactctgttgcccagacttgagcgcagtggctattcactggtgtgagtatggtgcattacagctgcaaactcctgggctcaagtgatcctcatgcctcaacatcccaagtagctgggactatgcagactttttttaaaccatcttgaaagatgatgcagtactttgggaacacagcaataaaaatgtgataatttccctattgcatcacctttctaggcaattatatcattctttcatgctcatattattttgtcttctttagcacagtttttaaatagttgatggctaatgatgaaataattcttcggatgataaatattttgtaacataggaacacaatataggaaaaagatcgaggttcataccatatctcagactcatggttaagtacaagctagaatgagttttagtcgattaaatttctttttctctatgaatggataaagtgagaatatcagcccacaagtagttagaagtgctcagaactcaaaggtaaaattgtgtccaagacctgatggtattctaaaggttaacagcctatcctacttaccaagaatttacatttattatgaggcctgtacaacctgatgcaggaaaatacttggcataattttctataagttaggtagttaggtgctcaacaagtatttgagttgaatcacattggcattcacatcaaacacatacacctacgtcatcatgttaacttaaggttaatagtgtcaccaaaactaactggtctttaaaaaagaaaaac

SEQ ID NO: 27231 - DNA, 2300 bp, Homo sapien
ccgtcgccaaagaggtaccagcccataaattctttcttattgcaaagtgaagatttcctggggacgtgcttaatggcattttaggggtattttgaggcaacagctatgttgataagttatttaagaaaaaaacccagtgctactatccgtaacccagattttagtttttagagtgattttaggttcacagcaaaatcgaacagaaaatagagttcccgtgtaccccctgtccccacacatgcgcagcctccccatccatgaatatttttaaaaagtcaaaaatagggccagttgaactagattcattatgtgcctgtgccgtgtttcgcaacttaaaaatataagttgtctgtgccatgccttataacttaaaaatataatctctaatagttataactttaaagtttacccttcagattatttttatgcacctgttgttttcttttgtcatatacaattttttaataatttagccttttcccctgttatctattagtgaatacagtggtagaacagtgaagtagcttttttataccagcctgaaagctccagttagaattcagtttctcagttataccatccagttttatattcagcaggccatgcctaccatcttgatttttccacagggtgagtctgaccgagcacttggttaacctctgcttttggctaagccaataaaagatgtaagatacttagcatgaaaaggtcactgtgtggtaagaccaccttcacagctgctgtgtccccttgataggtttcctaataaatttatataggtttatttgtggcaagatcagtcttaggctaactagaattaggctcctttatctagctcatagtgcttcacttgagtcaattttgatcccctgtccctcaccggaacatgtctggagacattttttgttattacagcttgagggagtggtgttactggcatctgatagtgcccagaggccagagattctgctaaacatcctacagtcaacaggataaccacccgccacccccaagaattaggcagtccaaaacatcaatagtgctggggttgagaaatctgatctagcttagcttaaccattgtatcatagctttatagctgttagacagaaaataccactgaagatttagtattattttatgcctcttataaaatagtatatttggatccactgtagaataaaatgttttttatgtaaaaatgtgttttggaggtttaagagcttgctgagtttaagaaaacaaaccaaataatttgaagtccagctacctatttgataacctcattttttattccttctgtgttttcaaaagaaaaatcctttgtctctaagaaacggaaatgactcccataaggtcaaaatacagtctgtaatattttcattgtctacctttatgtcttgaattattcatccttcatttatcactagtggatgctctcagaactttatgctaatctagatttgtgcaaatttagcaaatcccagaaaagcaaaaagacattcaaggagaaatctctaatgactgtaagttctgattcttagtggctgcaggggataatttcttctcttcccaggattgttactctgaaagtgaaccaagagagtcagaatttctaggataaggcaggtccatgtgagataaacttccatctgtaagggaggtaggagtgagctggggatctacctggaatgcgcacaatttctggatacacgaattaagccagaaggcattaattctctggtatctgttcaccagtggagactgctacatcttatttcccaattagtttccattccagttgttcgtataaacctctattatataacatcgtggtcttattaaataaataataaacaagaataaaaagagtaccaaagtgtaacccatgctaaaaaaaatcctgttgtaaattcactcaaaaagcaaataatcttttcctttgtgaaattggttcctaatatattgggtctgcatgttgattattttatgtggagttttcttacaatgaaacacatctactctaccactcactgttttctccttacactttgtagacatgcagtgagaagagtaccaacttgcatgactacggcatgttgctgccctgcggaattgacaagttccgaggggtagagtttgtgtgttgcccactggctgaagaaagtgacaatgtggattctgctgatgcggaggaggatgactcggatgtctggtggggcggagcagacacagactatgcagatgggaggtaaggtggcctttgtgttcagcctcagagatgctgaaacatcttgtatg

SEQ ID NO: 27232 - DNA, 2300 bp, Homo sapien
ggcctcttccctggcagctctggggactctggtttagttcccctgggggcacaggatgctggggagggtccgaagggtcttttttttagggtgcagataaaaggatcgaattgagtgaagattaagacggagaagatggcgcctctgcagtgcagcaaagaaaagctgtgtggaggctgcagcctagtgaaatccacccaccactaggtgtataacaagtcttccccattcatccaactctcgaacattcagctaacgcctgtgcacaatgactgtttttctttacatctgaagatgcttagaagttgtttgcatgacagttgggccagaggaggctgtatttcacttcggacttcggttgggttcctgtttggcatcttaacatttgcaaccttccttacccgtttttcccctcttttcccccagcctcctagtaattttccaaaagaaaaaaagcaatttccgggcagatgttttcctgtaattccactgaggctgtacagactatcacaccattagttttttagtttctaatttgcaaggtcattgaacttttttctcttctgatttttacccacaagtggctcaggaatcaccttagggctagttaagacaggttgttttaagagttaaagaatttcgttttccatgttttaaaaaaatgcacttaactaagagaattctgatttctctcatgacttacttacatttatttgtagaattattccagttttcccgaatggtcttactacagattaaaaaccatacatttaaggaattaaaagcatatgataaccgtatttttgaagcttttgtcaaaacttaaatatgtaactttgttgagcaatatttctttctgtataaaaagaggaagcatgtaggcagattcgaatttagtttttggtctgtttaattgcattaatatgctctttctgccatcttttgggaccttttcagtagctattgttaactcctttaaagggtggaggtgagattcacattatgccattttgcgaagtgttggtagaagggtaggtaattcagtctactgaggtttgagggtggtttatctggttctctctgtgtccactgaaaagatgtaattacgagttgactgtcttttatagagcttagaaaataggtctgctgcaggtggctgtagaaaagaaatgaataagggcaatgataatggggccttggctatcgggggaaacatggttattatctgggttgatgattttggctggtatgttgatagaggtgtgagtttaacaaaccctaatctatatgatgtttcactaccctaatatttatttatttatttatttttaaatctagcttcctcttaagttttatttccctctgttgagggtttaacctagtcacaatcatcttacctttgtggtagtgctaatttatagtttatggaaacctgctgctactgactagtacctcgctaaaggtagaagccgacacacagaatagtaaagctcaggtttgatggtgatctgtaaggagtcacggttcttgctaatcgatgagaaaccatgataactggcagactgcagaagcttttctcttgtcaccggaaccagcagaggctcctgaacgacatttgcaaggctattagtactgcggagaagttactagatggaataatactggtcctgactgaggaaatgaaaaggaacatgcaagttcacgaggttaaatgaggaatggctgattcaaaaaaattaaaaagaaataacgtgatcaacaatattggtttgaaggaatgggagaggttgtctttatgttaagtcttgttgctagaggatctctattttatgttactgttttttgcatactagagtcttctacagatatttgtatgaatgttgtcagtcattctggaaataagcatagctattacttgcatttcacgtggccactaaactatcagtgagaagtgcattaaattcagtagaaatgtacattgtttctgcaaattgtattaccttgagaatcttacaaagcatctttcattaatacatttcttttaaaatctctatcaattacaaatgtaaagataaacctgtacagatgcattttaaatttaaagcttccagaatgtaaggtttagttcgactgcatacctcattacctccccttccctcctccctccccttactcccaggaagtttgcagggtaaataaaacatgcacatgataataaaacaaagtggaatgtactaaaataccaaaaggaaaatacagattaggtatactgagtaaatatgttacagagaaaacttcct

SEQ ID NO: 27233 - DNA, 2300 bp, Homo sapien
atgggcatgcaaccctggagagtctcacaggccctgcggtgggaggagccccatgcttggtttaacgctctgccattgccatcttaaaattcttaatttaattttttttcttttttttgaggtggagtctcgctctgtcgcccaggctggagtgcaatggcacaatcttggctcactgcaacctccgcctcccaggttcaagcgattctcctgcctcagcctctggagtagctgggattacaggcaggagtaaccacgctcggctaatttttgcatttttagtagagatgggggtttcaccatgttggccaggctggtctagaactcctgacctcaggtgatctgcccacctgggcctcctaaagtgctgggattacaggcatgagccaccaggcccggccttaaaattcttaataatgtaacaaagggtctcacgtttgcattttgcagtggactctgcaagatttgtagctttggaccacgtttctctttgcattcagataccttcttttttgccttatttgctcatgcagacccggaacaaatacggaattgcggtgggtaaatgtggtgcagaaagtgaacaactgggtttgtcctgtcactttaggcttttccctgctgtcccagcttcatgtcacttacttgctattagatttgggagttcattagcttcattttcctgatgtataaataggaataatagtaacagcctctttggcttttgtaggaagtaaatgacatgaagcgtataaacaaatactgcatgacaataaatatttgtccttatttgttgaggacatccaaaggacattcaggggcaaaagtaatccaagagtcaagactgaatgcctagtgcgggaaaagacacacaagacaacatttaggggagctggtacagaaatgacttcccaggaaggaagtctgtaccccgctggctgagccatccttcccgggcctaggcacccttgtcagcgcaatgagcaagggagagaaggcaggctgcagtgcagccctcagaagggccagagcactccctggcttcagtccttcgctccaagccctgtgtggagtgggctgtggcttggtaactaaatgctacttcaggtcaagagcaggggatatatctgggcagttctagagcattctaaactatctggacactaactggacagtggacggtttgtgtttaatccaggagaaagtggcatggcagaaggttcatttctataattcaggacagacacaatgaagaacaagggcagcgtttgaggtcagaagtcctcatttacgggggtcgaatacgaatgatctctcctaatttttccttcttccccaactcagatggatgttacatccctgcttaacaacaaaaaaagaccccccgccccgcaaaatccacactgaccaccccctttaacaaaacaaaaccaaaaacaaacaaaaatataagaaagaaacaaaacccaagcccagaaccctgctttcaagaagaagtaaatgggttggccgcttctttgccaggtcctgcgccttgctcctttggttcgttctaaagatagaaattccaggttgctcgtgcctgcttttgacgttgggggttaaaaaatgaggttttgctgtctcaacaagcaaagaaaatcctatttcctttaagcttcactcgttctcattctcttccagaaacgcctgccccacctctccaaaccgagagaaaaaacgaaatgcggataaaaacgcaccctagcagcagtcctttatacgacacccccgggaggcctgcggggtcggatgattcaagctcacggggacgagcaggagcgctctcgacttttctagagcctcagcgtcctaggactcacctttccctgatcctgcaccgtccctctcctggccccagactctccctcccactgttcacgaagcccaggtgggccgtcggccggggagcggagggggcgcgtggggtgcaggcggcgccaagggcgcgtgcacctgtgggcgcggggcgcgagggcccctcccggcgcgagcgggcgcagttccccggcggcgccgctaggggtctctctcgggtgccgagcggggtgggccggatcagctgactcgcctggctctgagccccgccgccgcgctcgggctccgtcagtttcctcggcagcggtaggcgagagcacgcggaggagcgtgcgcgggggccccgggagacggcggcggtggcggcgcgggcagagcaaggacgcggcggatcccactcgcacagcagcgcactcggtgccccgcgcagggtcgcgatgctg

SEQ ID NO: 27234 - DNA, 2300 bp, Homo sapien
gattacaggtgtgagccactgtgtttagcctagacttacctttaatagcttttgataagttattttttaatgtaattttgataaaataattgtacctaaaatgtactaatgtgttggtattgtctactatccaatctacgaacaaattttactgattcattcgtaactgaccccagagttggtttgtttgaatcactgtaactgagcctctattataaagatcatacgatgtttgttttacctactttccctttccccttgtccttttcttgctctatgcgtgcttgcttgcatgtcattatttcagtagagggtagtcactaataattgattaacttcatatcctaacctacaggggtgcctggcagattgatgaacttgtttttcttttaaagaaccatgatccttaggttatgcagacctccttgatggtgtccagaaatttgggtagagggatgccaacagctttgatcactgggggagtttcatctcccatatacccaccttactcatacaagtccccagttaaattcaaaggcagggcagatttgagagactgtctctcctgccctcttgctttggtcaaattgaataaacctttctctgttcctgagtgctgatgtgtcagtgtttggcttaccatgcatcaggtgcacagacctaaatttggagattctgtaacatcaagacccatatgacgttcacatactggattaggctgatgactcatatatctctcttttaatgtgtgaccatttacatctctttctctctctcctcccttttttttttttttttggcaatttctttgttattaatggtcttgttttaaagtgaagtattgtcatttaagtttatatatcaatgttatcattatttgtttatttacaacaaagttttatgccaaggcagtcatgccattacccacctgacctgcttttccaccatcagttttacctgtgtgtgtccctggatcatcaggaagcattgattgagaatctttttctcttaatctgccttactattttctaatgtagttactgatcaaacttagcagtaacccactcattttgtgtgtaggcaaaagcaactatgaataaacagaagaagtctcccacagtgggtaaatgtgtggacctgggtttgaaacctgatgaaacttgctggctgtgaccccttgggccagggattaactgctgtcactcttagttccctcaaccctcaggtgcatgtgattatattcactgcctgatatggtttggctctgtgtccccacccaactctcatcttgtagctcccataattcccacgtgttgtgggagggacccggtgggaggtgatggaatcatgggggtgggtctttcctgtgctgttcttgtgatagtgaatgtgtctcatgagatctgatggttttaaaaacgggagtcctcctgcacaagttctctctttgcctgctgccatccacataagatgtaacttcctcctcctttccttctgctgtgattgtgtatcctccccagccacatggaactgtaagttcaataaacttctttcttttgtaaattgcccagtctcaggtatatctttatcagcagcatgagaacagatcaatacagtaatttggtagcaggtagtggggtgctactctaaagatacctgaaaatgtggaagtgattttggaactgggtaacaggcagaggttggaacagtttggagggctcagaagacaggaaaatgtggaaagtttgaaactccctagagagttgttgaatgactttgaccaaaatggtgataatgatatggacaatgaaatccaggctgaggtggtctcagatggggatgaggaactttttgggaagtagagcaaaggttatgtcttgttatgtgttagcaaagagactggtgggattttgcccctgacctagagatttgtggaaccttgagcttgagagagatcatttagggtatctggcagaagaaatttctaagcagcaaagcattcaagaggtaacttgggtgctgttaaaggcatttagttttataagggaagcagggcatgaaagtttggaaaatttgcagcctgacaatgcaatagaaaagaaaatcccatattctgaggagaaaatcaagctggctgcagaaatttgcatatgtaacaaggagttaaatgttaatccccaagacaatggggaaaatgtctccagggcatgccagaggtcttcacagcagcccctcccatcacaggcctgcaggcctaggaggaaaaagtgatctcttgggccaggcccagggtccccatg

SEQ ID NO: 27235 - DNA, 2300 bp, Homo sapien
gggcatcatccccagggtttctgacttagtaggtgagggacgaagaccaagaatctgcatttctaagaagtccacaggtgatgcagatgatgcttgtctggggccatactttgacgatctctgctgtagtgaatgcttgctacattcttactcgtccattaagactcccctctgtatcatctttccctgtcagaattaggcctctctcaacctatacctcttaactcacaaattatcctacctcgatgaaggcaggctagcaagctcagacagctaatgcagccaggaagtttgcagatgtatgcatctggtgagacatcagacatcgaaaatgatccatgatcttcccaatggatcataaacatgctcacagagtagacaccctgttgagacagggctacatggtgaccaggcttgggacaagacagagataaggccacactgctaacagaaaaaaggctaaagatccctccttccgtttgctcctttgcccgcgacaactcaaacctcaatttcaccttcctgcctccctcctagataaaaattagtaagctaatcagtcacaaaaagaaaccccaccttttgacggcctccaatccaggcctgtttccagctttcttaaaccctcctacacagatgcatatccttgtaggaagcgcctcccgacttccttgagaggacctgtatttcctctgctgtgtgtttctcctgggctgcagcaggttcaagaacataaactctttcgccccaagctctgttcctgctgctctctgctcactgggctgtgcagacagacagtagggatgatgtgcccctcctgaaggaattcaaagtaaacacaaatttaacattgtgcaggacaggccacagggactatgagcatgttgggtaggcagaacattaccagcttgcaggccttgctgaaaggctcaagacctcaaggccttgccgaaagaaccctattctaaaatctctgacttctccaactctcatcagtttttctctctcttctccgacaccctgagagttgggtatgaagaaagcagcaaacatgtgcattgttccttaagatgtacaatgcatgtttacaacccttgcctcgtttaattttcatatctgtaagctaggtatagtagatccagtttaaagatgaggaaactgatcctcagagacataggtgttagaacaacctcacatcaataaagtgaccaacttcatacagtaattaagtaaagaaatcagggtctgaactgagtttcctgtgctctttttgctagaccacgatacctaaacctcctgggagcaggcaactgagcaaaaagatgctctcctatgctctcgggtgttttattttccttcccatctagacaataccatcctcagttagagaccacgttatgtatttctctggcatcctgcctagctggatctagtggaatgctgagcacatagcaggccctcagcaaggagtcactgactgattgaaactcataaacctttctcacaaggagacagaggggagaggctgttttaaaacagaggaacttttctatctttgttccagcattgcaatactagaggctgttgttactttaattcttcagggtgctcggtattaaagcatttttcacacttagaaatgtttattttcctgttatggtttctgcattgaaaaaggttgggaagttcaaacttcagttccacgtacgtttttctgaagtttcatgaatatttagaaaatgcatgtagaacatgtggcagacactgtgctgtgtggtccatatcccccctttaaggaaagacttgttgtcccagctgttgtgagtgttgttggcaccagccttcagccatcagcttctcaggcactgcctgagctacagtgagctgccttgcccaagggtgcacccatttctggagtggtccagatccagggactgctcagtgaagatataaaatcctggccatcctggcccaactcaggacaacactgaaggggcaggacttcagagctagtcctggagttggttgaagctgtcgttgagtcagcatcatgactcagcatttttctgctacatcctgctccctttttctccctcccttaggtgtcgaacccaagggctcttctcagcagagtgtctgcatgccacactctgctttagagtctgttccctggggaacacaaccagagactgaaataattggtgggcagtggggagcacaaagggctgtttttgtttcatgtgaagacgatgagcatgctatgaaccccgaagagctgttgtataagcaagtagaatgtg

SEQ ID NO: 27236 - DNA, 2300 bp, Homo sapien
tccttcaagactcaaagggcttgtatgcctgggattttctctaggttccaaccattgtcccagttatttagaaattgtgcttcccagtggaatgttttgatcaggctacaagaatgacaggacctagtgaacaagttcttgaacaccctggattaaatgtttgaattttaacctaagggcaacaggatgctactgagtgagtgaacatgatgaaatctgtagtttaagaagaaatattccagcttcagtctggcaaacatctctgaaggcagggaggctgaatataatcaagactataaaagtctagattaggacagaaatagatgataatttaaaatgcgtttgggtggtgttcaggtggacagattaggtgaacttggtgatagattggccagcgaggatgagaaaaaaggtggaactgatcagccttctttagaacatggtggatggttgggccttcaccaacgtgtaaaacacagtaaagagcttagcttatgtttattttgggggtgatgtttcctcccactctcgtattcccttgcagcactgcatttacaggaaaaaattcctggaagagaactgactaaattaagtacatgtgtatttgaattttcgtacatataaccacaccgtttcccttaagagttcatttggttttgtatttggttggtttgatacatgaaaagtgatgtctcactgtcaattttatttctatatttatatttatttgttttgtatgaagtgtctattaatatccttcctcagttatctcttggttgtttttcctattgatttttttaagctcagtataataatgagattaggactttgcattgcaaatatttttgccagttaaatgtctgccaactggaagtattaattcttatttagtcaagttggtcaatattttgttttatggtttctgagttttttataatgcttagaaaaggcttccctattccacaattatttgaatgttatcctcttattttttaatctaatattttcatagttgtatcttaaatatgtaattcatatagaactgattttgatgtaaaaagataaggctccacagatggctatttacggcctcaacacttttcactgagtaactcatcatttcccctactactttacattgatatttctttaaaccataaattaaattgctgtacatactcatgtctacttttgggttaccttttctctttcactaagcctatctattccaatgttaatctaaactgttttaattattgtgatattatatgtaatatcccattcattattcccattcattactcttgttttaaatagatattcttacatatttattttccatataaactttagaatcagattggtttgaaaaaaatcatgttattttaaaaattgggatcaattttatttccaaatgtatataataatttggggaatcttgttgtctttatcctactaaattttcttagtgaaaaaagtatctctttacttattcgtatcattttttttccttcatgcataacattgagaactttctgatttttgtttgcaggaaagaaaactattggtttgctaaacaagagctttatagttgattaactttgattttccatgtatacacgtatttcatttgctaatgacaatttagctttcatttttcataaatctttttctttctcttgtttaattgcataggccagtaactccaaaacgtcaaaatcataacgacagtgtgcactgttgtgttttttttttctgaatttacaggaaaaaataataaacattttatcagctttcagcagagatgccatacactttctgtacttcccaatcctgagttttcttcactgtcactctttgtcgaataccttcaaccctgaaaattccttccctttgtttaaagataaaaagcaaagttgttcatccattgcttagaaaggaaaaattgtagtggaggcaaggttaaaaaggagcaggctgaactccatagcaatcgccaaagcaaggggttaggaaaagtttcttggtcccctagtcactctttagaaggaagaacccgggcttggggaggagtcggggccacccccgccccctgcccgcagtcgttgccacccgcggagatgaaatgtgagcctgggtggccaaggacgccggagtggccgccttccccgcgcctgagcgcagtggggcgagacaaagagacctgggcccccagcgcagcccgtctcgggccacgggcgccccagctccgcggagtcccgcagtcgctggcccgggacgcgcccggcccgggctccctt

SEQ ID NO: 27237 - DNA, 2300 bp, Homo sapien
tgtgcgtgcatcctgcgctcacgggagggcggatgtggagagggcagaggagcaatggtgacctgggaaggtaccctgagcggctacgctaggatctctgttctgcagacttctgtcccctttcccccttataaggctgacccaggcgggctgaaggcggtggggccccttcgcagaacctgcttgggaggtctttcccgggtttgccccgcctcccagtttgcactccctctcgcggccataattctgctctcaagcactgttgaaagtcactgccggtccttcctgctacggccttctctctgtgcagtgcttattctccagttctttttgtttcatcactttggtgcctttttccttctttaactctctcgcgtgtcattttttaaagaattctccccttttcccctgctcctctgctcctgggagcaaagtggtcgcagcccagtttaggactttctgcaggggttgggtctcagtccggagtggaaggctctgttccaaataatcaatcatgcctggaagctggaacttatttcgctggggcagtgggagtggggccagaggctgctgggcagagtgggtggtccttgtgcccggaattggcaagagcggagcaccccagggacccctggaatgagacagcagagctgtgcagtctgagattccttaaggcccggccccttggcagcagcccaggccctacccgaggccttccacgtggagcctgatgatctcattcaggatttgagccctcgcctgtgaaagagtgactcagggcctctgcctgccgctcttgctccaagattttactacaattgggtaggattatgtgcgaaattgccttgttcagactgtgggatttcaaagagaacagaagaaatcctgctcacacacagaaagatcctgaccatgcaaaggagcgcgtggtctttttatttaaaggagaggagagaactttaaaaataacacttggagtgaagatatgcaaatatttttgttattgttgttctgggtatatttttgctttgtttgctttgactggttaggctttcctaatatatgctaggaaggtaactattcttggacagcctgaccataagcaaacttttttttttctttacaggaactggaagcataagaaagaagcgatttgtgtccagtcaccgctatgtggaaaccatgcttgtggcagaccagtcgatggcagaattccacggcagtggtctaaagcattaccttctcacgttgttttcggtggcagccagattgtacaaacaccccagcattcgtaattcagttagcctggtggtggtgaagatcttggtcatccacgatgaacagaaggggccggaagtgacctccaatgctgccctcactctgcggaacttttgcaactggcagaagcagcacaacccacccagtgaccgggatgcagagcactatgacacagcaattcttttcaccagacaggtaagaggaagatggtaccagctgtgagactgtcctcttaggagtctacgttgtaccaaaaagatatatacaaggcatttcaccagtgtttttgcagttaaccttttttaattggctagcatggtttatcttactcatttctactgtaatttaaatatctcaagtttcacagttctattttaaaagcattagaaaaaagcttgattaaagtcacatgaagtcttcttatgtcaacaataatgaatgtagatgctccaaagcatatgtgaaggcacaccctgccaaaaaagttagatcccaagggtcatgctccccttattaataagtatttacctttgctttttgtaggacttgtgtgggtcccagacatgtgatactcttgggatggctgatgttggaactgtgtgtgatccgagcagaagctgctccgtcatagaagatgatggtttacaagctgccttcaccacagcccatgaattaggtaagtctgcttcaaagtagaagttaagctcaattcagaaatgtaaactggtaaaacaatataagaaggagagtctgtaggttatattgctattttaggtcctagtgcatcttagaaactatagaaaatattttgtcactatttcaaacatggtcatttttattaaagtaaaaaataagatagtagtagctctggacatttggaaatgtgtatgtttgtttacaccctgtgaaaagtagacatggtctgcaaaagagccaatctcctaaatatatttctttctctagaaatgttattttgggacaaatgaatgaatccctgttgggaaaaaagaacctgctgcata

SEQ ID NO: 27238 - DNA, 2300 bp, Homo sapien
ttggggaagagggaactgagggaggagggaaggagacccagggcagctccaggatagggaaatgttgaagaagggactgcgttctccaaccgaaccctccctcctgggaaccgcagcccagcgcggtaactgagttaccgcaaccgggcggtggggaggaagggtggtccaggaaaccggcgagggagaaaagcggtggaagggagagtcttctccctggagcggccccagcagtacaaagtgctggtcacagcgccccttccgcccctagattgacgagcagtggcgtggagccagcgcggaggctgccccctccccctcccgagcccgcagcgcggagcgcggtttagcaccaacggagccgggggcggcgtctttgggatggaaaagggccaaaggggaggagtggggtgggggtgggggtttcactggtccactataaaaggaccgctcggctgcccggttcttgcactcgctggaaagcggctccgagccaggggctattgcaaagccagggtgcgctaccggacggagaggggagagccctgagcagagtgagcaacatcgcagccaaggcggaggccgaagaggggcgccaggcaccaatctccgcgttgcctcagccccggaggcgccccagagcgcttcttgtcccagcagagccactctgcctgcgcctgcctctcagtgtctccaactttgcgctggaagaaaaacttcccgcgcgccggcagaactgcagcgcctccttttagtgactccgggagcttcggctgtagccggctctgcgcgcccttccaacgaataatagaaattgttaattttaacaatccagagcaggccaacgaggctttgctctcccgacccgaactaaaggtccctcgctccgtgcgctgctacgagcggtgtctcctggggctccaatgcagcgagctgtgcccgaggggttcggaaggcgcaagctgggcagcgacatggggaacgcggagcgggctccggggtctcggagctttgggccagtacccacgctgctgctgctcgccgcggcgctactggccgtgtcggacgcactcgggcgcccctccgaggaggacgaggagctagtggtgccggagctggagcgcgccccgggacacgggaccacgcgcctccgcctgcacgcctttgaccagcagctggatctggagctgcggcccgacagcagctttttggcgcccggcttcacgctccagaacgtggggcgcaaatccgggtccgagacgccgcttccggaaaccgacctggcgcactgcttctactccggcaccgtgaatggcgatcccagctcggctgccgccctcagcctctgcgagggcgtgcgcggcgccttctacctgctgggggaggcgtatttcatccagccgctgcccgccgccagcgagcgcctcgccaccgccgccccaggggagaagccgccggcaccactacagttccacctcctgcggcggaatcggcagggcgacgtcggcggcacgtgcggggtcgtggacgacgagccccggccgactgggaaagcggagaccgaagacgaggacgaagggactgagggcgaggacgaaggggctcagtggtcgccgcaggacccggcactgcaaggcgtaggacagcccacaggtagaagaattgctctcgtttgtctgtccattcatcctcctctcctcactttatctatcccacgcgacttcagggtagactcctgctggcaggcaggatcataagtccgcggacagaacggaggcctggagtggaggaatgtggtttgaggtttggattggtgaactcagctagaaaacatacttgcatttgcccgaataatgaataaccaagaaaaaaactgacaaacgattttctgcaaactaaagcaaagcatttaggccggggagggagagtttgtaacctgactccttccacctttagcgagttggagcttgtgcgagttctttccactctgtgtatttctttttaatgattttgtgtgcgccttttgtgcgggttgcaacgttgcgctgagttttgtaaccgctgcctgtgcgtgcatcctgcgctcacgggagggcggatgtggagagggcagaggagcaatggtgacctgggaaggtaccctgagcggctacgctaggatctctgttctgcagacttctgtcccctttcccccttataaggctgacccaggcgggctgaaggcggtggggccccttcgcagaacctgcttgggaggtctttcccgggtttgccccgcctcccagtttgcactccctctc

SEQ ID NO: 27239 - DNA, 2300 bp, Homo sapien
tgccttttttctagctagaaagaaccagtaaaatgaaatgaaatcatagaaaatggaccgtcaaaaaattactgtaatagaagataacaatgttaaaaaaaaaagtctgaaaaccaaactgggaagtaggaatgatcagatgtttgggaaaagacgcttgggaaacagagaaacaggaaggaataatcctcgtagttcgaagtcgaagagaaggaggtaggctggacaatgcttgacaatgcagaaaggaatcacacactcaggtgtgcggatgtcaatgttgagtttgaaggagaaatgcaacggcgggagggggggagagacagcgagggctgcaaaggagagactcagtgaaaagaggtaggcagaaacactatcagaatgttaatcgagcgctgtcaaaatatatctaaggccttggttgattattcaacgttcaacgatgagggtgattttaggaaaccaaaattaaatctacgaaaccacccactcctaaatgtgtagggactagaggtcgttactaagcccttcagaagtaagctgagttgcttctctctgccattcttgctcatttgatttttcctgatgagtggaaagcaatgtttttgtttttgtttttcaagtaagcaatctcgctaggaaaaaagaagttggaaagcatccggaaaagaaagcttgtaagagggacgtgtgggagaactagaagggacgcttctggctggggccaactgaagtggggaagatctggggaggagcgaggaaaggacccagatctacttggagccaaccaagagaccggacgggagtggggcggaaaggcggagaccagttcgagcactaacgcgggggcgcgcgagtgtgagggttgcgggtccgcccggggctagggcggtcgctctcgccattgtccccgcggctttccgcctgtgaaacacgtccttcctctgggtccttgagcccctcccactttttggagagaagagccactcagttttttttcctaaggacctgttggtggacctctcctcgctttcgtaacgcggatatagccttttcccttcctggtaggaagaggaaggaggggtccgggaaggaagccgatttccttctttccccctctgcacgcttgctagccccagcgatcgctgctggcccccgggtaggaaagtggggttcctggccgtttctgcgacgctggcctagggcttgcagctgctgttgagtgaaagcacgcagactggcgggagccgatcatttctcgaatgaagaagaaaaagcgcaattccctccttatgctctagggaattgagccgcgtcccagatcacccattccagaaatgtgaaaccgggccctcacaaagtcgtctctggtgaagaggtggcgtgcggggtgggggttggtggagggtgaaggcataagcaaacatattttaaaatccagatcgtaggaagtgtcacctggcccctcacccaggcatgctttctgggggaagcgcagggccaagctttccctagaaaagctggggcgaagagagagcaggcggcggctaaggagctcctggcaggctgggaaggtggagaagtggggtgaggtatttttctagaaagtgtagccctagctcatctcctagattggggaagagggaactgagggaggagggaaggagacccagggcagctccaggatagggaaatgttgaagaagggactgcgttctccaaccgaaccctccctcctgggaaccgcagcccagcgcggtaactgagttaccgcaaccgggcggtggggaggaagggtggtccaggaaaccggcgagggagaaaagcggtggaagggagagtcttctccctggagcggccccagcagtacaaagtgctggtcacagcgccccttccgcccctagattgacgagcagtggcgtggagccagcgcggaggctgccccctccccctcccgagcccgcagcgcggagcgcggtttagcaccaacggagccgggggcggcgtctttgggatggaaaagggccaaaggggaggagtggggtgggggtgggggtttcactggtccactataaaaggaccgctcggctgcccggttcttgcactcgctggaaagcggctccgagccaggggctattgcaaagccagggtgcgctaccggacggagaggggagagccctgagcagagtgagcaacatcgcagccaaggcggaggccgaagaggggcgccaggcaccaatctccgcgttgcctcagccccggaggcgccccagagcgcttcttgtcccagcagagccactc

SEQ ID NO: 27240 - DNA, 2300 bp, Homo sapien
tgccgggcaattctgaaattccttccagaggattattgccactctaagaacctccatcaagctctggaccctcatggttccctcccagagaaagcgatcagcttggggccccattaaggcacccgccctgctatccccagcgtagccaaagttaaacgtagaaaaagatggaaatgtacaaattacaccacattcatttttcactggtgcattagttaattagcctgaagaataatttgggcatggagggagctcttacccctacagtagaaggtagaccttctaaccataagtcgtcgggttttccttctcccttcttagaatgataattagaggaaacaaagaggtcagaggaaacgagtagcagtgataatgtcacccgcgtactaataagcaccaatcttccttccgccaaaagtattctttttcttctaaaaggaatttctgagaatgaaggtaggtcaaggcctatggcgataagtggttgctttagaagagacaaaaacagatataggaatttattattaaagtatcatttaagcaaaaaataaaagtatgagcgcaaaattttaaaatctttcagggaaaaaaaatgagcggaattccctctaagagttaactctttctcgctctgcctttttagagcaaaggaagttccagtgggctgggagtaagggacagattgtggaccctgacgaaaggcgtgctggagaaagctgggagcccgccgttcgcacacaaagctgcggagttcccaagcggcgggcgttctcgccccggggtaccgcagcgcgccaggaagcgccctgggctctctggctgtccagccgctctgctggtggccgggagaagttagtcacccggagcccgaatccggcgagcgtcaaagcatcaagaggctggagaatggggagggaggaaaccgggtgccgggacggaggggaggaagcgaagggaacgcggtggttaggggacgcacgggaagctgaaaagctctggctggtggatggagttgcacggtctgcgaggccagagcgcacgggtgtgcaaaggggaaaaacttgcggcaggaacttcccaccgagggcgagaaaagcaggcaagaaggaggcagggagagacttgaaacgtctcaataactttaaccaaaacacccgttcaggagatgaggtaagccaaggttagccaaccccaattggttgtgaaatatcagacagacccggagccgctgtggctttaaaagtggccaaggaaatctgtttttcttgccccattactttttattttcccctctcccctcctaccacctcgccgggtcccagtcccttcctcctacttcgtctccctttcctcgatcaccctcctcttttgccctcccccatctgattaggcgcggactgggaagggtgggagtggtgggggaagctctccctttaagaggcagcgtgcagtgacgaactgttgaaattgccattgcaggatggcatgccgctataaattcattgttccacctcctcgcatcttcacagcgctcgcgctgctctcggcgctcgcagctgccgactggggatgacggcgggcaggaggagaccgcagccgaagggacacagacacgccgcttcaccagctcgcctcaggctgcccccctgcatttttgttttaatttttacggctttttcccctctctttcttcccttcctcctggtcccagcagagccaaggaaacccacaaaataagaaaggaagtgggccccggagcttggaacctccacagccggcttgtccagcgcagcgcgggggcgggaggctgcgcgcaccagttgccagcccggtgcgcggtacctttccttacttttcttgaaacagcgatcgtgcctgcatttggtggttttttggtttttgtttttttccttttcccgtatttgctgaatctccactatccgactttttttttttaatcttttctttccccccccccccaccccacctctttctggagcacgaatccaaacattttcccaagcaacaaagaaaagttcgcacgctggcaccgcagcccggacaggctggcgctgctgccgggcccccctccctccgacacttgactcaatcctgcaagcaagtgtgtgtgtgtccccatcccccgccccgttaacttcatagcaaataacaaatacccataaagtcccagtcgcgcagcccctccccgcgggcagcgcactatgctgctcgggtgggcgtccctgctgctgtgcgcgttccgcctgcccctggccgcggtcggccccgccgcgacacct

SEQ ID NO: 27241 - DNA, 2300 bp, Homo sapien
tcaagaccatcaaagaaaagagaatctgttggaatttcctgaaatcctaaataacaaaatctatctgtgaatgaaaataattgtaattaacaaattttaaccactgtcacctaaaatgcctattaaaatgattctttggcatgaacaatgacaaaattgttaaatttattgaatcaaggttgtattagaaatggtgtttagtgccaaatattggactccttttcactgtaactggttaaaaagataaaagtttgctatttgtaggtgcaaagcaaggaccacaaaagagaacggctaatgcaaggctcaaaggccttggtgggatagagaaaatggctggaacctcctattctgacccatccagctgttagcattggcctgggtcaactggccactgagaggctgaggcattgtggaattataaagcaatggccttcagcaatagtaacttcctccctggtcctgatgtatttcagaatctatcaggggctgttgggtgtccctaaggccccagtgatttctttatttataagttaaaacaagatgatacatctgcccctcacaagactccagagggtgttcccaggcacacggcaatgggtattgttgccgggcaattctgaaattccttccagaggattattgccactctaagaacctccatcaagctctggaccctcatggttccctcccagagaaagcgatcagcttggggccccattaaggcacccgccctgctatccccagcgtagccaaagttaaacgtagaaaaagatggaaatgtacaaattacaccacattcatttttcactggtgcattagttaattagcctgaagaataatttgggcatggagggagctcttacccctacagtagaaggtagaccttctaaccataagtcgtcgggttttccttctcccttcttagaatgataattagaggaaacaaagaggtcagaggaaacgagtagcagtgataatgtcacccgcgtactaataagcaccaatcttccttccgccaaaagtattctttttcttctaaaaggaatttctgagaatgaaggtaggtcaaggcctatggcgataagtggttgctttagaagagacaaaaacagatataggaatttattattaaagtatcatttaagcaaaaaataaaagtatgagcgcaaaattttaaaatctttcagggaaaaaaaatgagcggaattccctctaagagttaactctttctcgctctgcctttttagagcaaaggaagttccagtgggctgggagtaagggacagattgtggaccctgacgaaaggcgtgctggagaaagctgggagcccgccgttcgcacacaaagctgcggagttcccaagcggcgggcgttctcgccccggggtaccgcagcgcgccaggaagcgccctgggctctctggctgtccagccgctctgctggtggccgggagaagttagtcacccggagcccgaatccggcgagcgtcaaagcatcaagaggctggagaatggggagggaggaaaccgggtgccgggacggaggggaggaagcgaagggaacgcggtggttaggggacgcacgggaagctgaaaagctctggctggtggatggagttgcacggtctgcgaggccagagcgcacgggtgtgcaaaggggaaaaacttgcggcaggaacttcccaccgagggcgagaaaagcaggcaagaaggaggcagggagagacttgaaacgtctcaataactttaaccaaaacacccgttcaggagatgaggtaagccaaggttagccaaccccaattggttgtgaaatatcagacagacccggagccgctgtggctttaaaagtggccaaggaaatctgtttttcttgccccattactttttattttcccctctcccctcctaccacctcgccgggtcccagtcccttcctcctacttcgtctccctttcctcgatcaccctcctcttttgccctcccccatctgattaggcgcggactgggaagggtgggagtggtgggggaagctctccctttaagaggcagcgtgcagtgacgaactgttgaaattgccattgcaggatggcatgccgctataaattcattgttccacctcctcgcatcttcacagcgctcgcgctgctctcggcgctcgcagctgccgactggggatgacggcgggcaggaggagaccgcagccgaagggacacagacacgccgcttcaccagctcgcctcaggctgcccccctgcatttttgttttaatttttacggctttttcccctctctttcttc

SEQ ID NO: 27242 - DNA, 2300 bp, Homo sapien
ttaagaaaaaaaagatttcctgtagcaatagcttcatatacaaaattttagaaataaagcagtagaaagcattagcacaggcctaggacaactctaagcaggaaataaaaccttatattttattttcatttttattttcatagagagtagcagaagggcaccccttcttgagaatcagcttcaaagggtgaacaatactgtctttacttaacagacaggctttttaaaaaacaaccttgagagtatcatgcaaactgactttttaatggttttgggcaacatgtttacattttaaacttgtgggtttgcatttttctttattttcaaagttcaatctgtcagctggttggaatttgtaatttatggctctgcagcaatccaaagttccttatccttaagtgatcccattcccaaggaagtttatgttagagagatttctaaaaaatcttaaaagtaaagacaatattttggaatcattatgtgatgtttctaaatatgttcttctatgttgatatccctgtaatttttgaaagatctttgatactacacaatgaggaaaaaaagaaatcttaatcaatgaaatgtcaagtccttaaaatatctcccgtaatacttcccttctgagtattttatttcagcttcagatgtgtatttttcctcttaagttaatttctctaatccttattgattccctactatatgcttgttacttcacataacattaataattaaaaagagaaataatatcaataacagtctctaacttgaagtgtttatggtcagttgcagtgaaaatcaacatcaaaacaggtaatatgaagtttaggacacattgttgggactaccagccaaaagtctggtgaggttgaagatacaataacatatagaagaatacactgatcatcattcagctgtgttttatttgagtaagctaaactgctttacttttgtccaatgcagaattttttaacgttgtatttatttgcttaaaacaaaagagttactctatacaagttttgtagtccatgatttctttctgaaacctttcaggattaaatcaaaatatggcttcagagttacaacagtaacttaaaagcacagaagccaaatatttaccagaactgtaaaactgtaaaactaaagtgtaaaacacttcagtttaaaactattcacattatttctagcttgaaagtgctagaaatacatcaaaattggcctttattaattgagaagttaatttgacatgttagtgacatttctccaggttaatgtatttattgcaagaaaatgtgggtgctttataggaaaatatttgcttaatttaggtgaactatttttttcttattttatttctaaaattttgtagaaagagaaaatctcatattctgtttctcgttggtttctcattggtataagtgtgccccatggagcattgactcattcacatttcacatagaggatgtgtaatttggcccctctgggtagagagaagcagatacccgtgggtccagcatgaccatgtgaaggtaagtctttccttgtcagccaatgcatcgcatgagggtgccaaacttctgttggtggtagagcagggggagtagtctggacctgggaagtccctgagttatcgttacgtctgtcccttagaaaataggcaagggccaggatcaaagacaggatgaatacataagctggtaggtatgggaggattttatatgatgcgtaactaggtctacaacactatcattttttattgtttttaaaaaaccttgatatccttcttcacacagagttagtggttttgttcttcagctacttgcactgaggctataaacttgttcagactttaccttctgtctcacagtatcagctatattgatgatggtggcaattgctgtaaaatacaaccccctagatgttagtggagagtaaaatttattcttgctccatcaagttcagtgcagatatagtcagccttcagtggtgctcttccccatggtgagccaaagttccaagctcctcttatgtagttatcttctactgttgctaagtatttcagagtcatctggagtcctgaagtcttctacaaatcccttccatttggacatcaaacaagagaagaaggacctttaatgaaataacttacattttttctaccaatatcccatcagccgaaactactctctctccccactcctccaacactctggaatataaaacagatttatgagtaaccaccactctgttaggtgcactttgaatttagttctttcaaagagaaacgggaatgggactgtagc

SEQ ID NO: 27243 - DNA, 2300 bp, Homo sapien
ttcacagagctgaacctgacagcatcttgcttcagctctgccaagaatctcttagcatttttctcaggcttttctgaaagggatctgcctggtacaggtgaggcttaaaaaaaacctcgtaatgtagaaaagctaacatctcttggggatacccttgaccacgggaggattaaagccagtgaaggaaagcccatgttttccctccctcatgcaactttaaggtggccaacgattgagccccagctgtttaaagttatgaccaactttgacctcttttcctgtttcacatggtttactcctattctttcagttcttaacagaaaacaaccagaaattgaggttaaaccatctgaccatatactaaatactgtgtatgcttcatgtggtagaaaaactttaataaactaaggtaccatttctgtagtaataaagaatgaaacatcaacattaaagacatatttttgatgaaaaatatattgttaaaataattttgaagttactcctaagagcctaccatttgaacaataataattcacaagtgacagttaaccactgtttacatatcccaaatattttatttgtaagcaaagaggcaattgcctagttcctagactcagaacctgaagaggttacacgttttagaaaaaattgacaatgttacattatggagtttagtcaaatttatctccatttgcatgcacacaaatcacaattcgacagaaatagtttgtccaattactagaataatttttaatttacctaaatttagaatatatttaagatcatagcacaatttcataataaatatgttacgtttgaaatatattatttaataaaaaagcatattttcatctgtttcagagaatagcattttactgtccatgagattaaaaaaatctcacatttgatacagcatttttcaaacccaagttacattaatatttctcaaaatattatttctttaccaaaatgaaaattagtttaacatatttgctttaccctattgtagaacttccttgaaacctatgttatttattgctaacattttcaaggataatggttcttgacagaccttttagaatagtttatttaccctcaaatgttgtcttgaaatttactttactcatggtattgtgaataaagttatccctaagggtatcttttctgctttgataaacaaaatactccgtttgtgagattaaattcatgcatatcaattgcttttcttttatctatctgcctcattcccgccagagaattaagtaaggcaatctagaaaaagaggcaaataggctataagatcacggagggtaaaaaaaggtggtaaatagacggtattttatagactctctaatttgggaattgtactctattcttgatattcatccaattggctaagatttgccttttatgagtctaatccctgacatctcgaccgtggggaagcacataattgtaggatcttcctatttcagtaggggaaggaaactactcagccagatgaacgtcaattgggccggaattgctgctgaatagaggctcaccttaagtgggaaggaaaatgtgctggttgctaagctactgataggctttgcccttcctctgtttaatgggcagtcactgggtcaaggcacaaatgatgacgttaaagctggcgtttctttgctaattgaatggttacataggaaatgtctaagggtttcctctaaattagttgttcctccttgctattctctgaccttcactcccaggatgaagggtgactggaggctaggagatggaatgaatggaagatttactaaatagtaaaattagctaacattaagatgctatagctgtataaaaaatgaatttgtcagcatttaaaatagtttataataaaaaacaggaggacatgtttcaaacatattggtttatattgttcatcctttccacgtcattattcctaatggcaaaaggttgtgagctcttatccttgggtctttgctcaaatttgaaatgccatatccttttaagattaggataacaaggtgaacctcagaaattaataggcacaaccccaaggcacaagatatgcagcctcctcattgcttgtctcttgcccactcacacacatagagtagcatgttatggcacttacactaataaagccactgctatcaaagttctggacttgatttccagcagtattagctctgttttaccctcaagcttctgggttagtgggttattgctcaccaaagaagttctggttggaagaagaggtaagatatctccagagccgctgagaagaatgagta

SEQ ID NO: 27244 - DNA, 2300 bp, Homo sapien
ggttttatttctttccttttcatagtttataaatagaatttattttaatgtcatattgcacaaactaggactttcagtatgttgtttaatagcatgggaaaacatctttgccttcttctgaatcttaggagaaaagtgttcagtgttgtaagttaagtatgatgttaattgtaggttttgtgtaaatgtatcttattgaggtgagaaaattccccttttaccctaggttttctgagattcattatcataaatgagtgttgagttttgtcaaatgcatttttgatatcaacccatataatcatatacttttttctttaacatgttgatatggtggattacatttattgaattttttaatggtgaatcactcttgtatacctcaatccttcatttgtgttgcaatgaaaaagggatgtattgttattggtctgtttcactttgttacgatatatggttgtccatagtgtctactcatgccccaatatcttgtagatatttaaaaaataaaacagctctttaaatttttcctatacccttgatttgttgagagtttaatgaagaaacagaaaacactttgaatattttaagcaagaaagaattcattaaagtaagtagatgcttacaaatttattgacagaggaaaaggagcaaaagtcagggacggccaatgaagtatagatctctcacagcggtttccatagaagaacgttaattagtatagtgactaataataataaaaatagctaatctttttcaagaatttaccatgtgacagaaacatagatctagggccgggcgcggtggctcacgcctgtaatcccagcactttgggaggccgaggcgggcggatcacgaggtcaggagatcgagaccatcccggctaaaacggtgaaaccccgtctctactaaaaatacaaaaaattagccgggcgtagtggcgggcgcctgtagtcccagctactcgggaggctgaggcaggagaatggcgtgaacccgggaggtggagcttgcagtgagcggagatcccgccactgcactccagcctgggcgacagagcgagactccgtctcaaaaaaaaaaaaaaaaaaaaaaagaaacatagatctaggggacacattccccttttccctagtggaaatcaaggtagaccaagaccagtagattaaaacagaaatcagagatgtgctatggtttggccctctgtcgccacccaaatctcgtctagaattgtaatccccaactgttgagagaggaacctggtgggaggtgattgtatcgtgggagccatttcccctgtgctgttcttgttatggtgaatgagttctcatgagatctgatgtttttaaagtagcagtttcccctgtgcacacacacactctctctcctgccaccttgtaaagaaggtacttggttctccttcaccttccaccataattgtaagttccctgaggccttcccagccatgcagaacagtgagtcaattaaacatctttcctttataaattacacagtctcaggcagttctttataacagtgtgaaaacgaattaatacaaaacttcaatttaacaattaaatcatgtgataaatacagtcctctcatcgtgttgcttaaaattagggatcagaatctcaacgagaggaatagaaatattgcctgatttcagacgaacacccccttgtattaatttccagaagtcagaaactatagtctataagccaaaattgggctcaccatgtgtttttatatggccagcaagccaagcatagtttctttatttttaagtgattgcattttaatgtattataaatgcttacatcatatcctcaattttgtctcctggaccacaaagcctaaaatatttactacatgaatctttaagaaaatagtttgctgatctcccgatttagtctaccaaactacaattagtgttgttttcatttttgttctctatatgcatgttgccatttttacacttcttcagaaaaacattgagaatttttctacactcactatttccatttgtgcctaaggacaactttttctttttcttctctttttttttgaagaaatttgtttatgaacttagataaaatttatagctttgcttgaaaatttggtacttactacctttgcaattctctttatttattattattacttttatttttccataagttattggggtacaggaggtatttggttatataagttctttagtggcgatttgtgtgattttggtgcacccattacccaaggagtatacactgcaccatactcggtcttttatccctcgcccc

SEQ ID NO: 27245 - DNA, 2300 bp, Homo sapien
gaaatgtaaataattctaccattaagacacatgggcatgtatgttcattgcagcactattcactacagcaaagacatggaatcaatataagtgcccatcaatggtagactgaataaagaaaatgtggtacacataagcacatatgcaccatagaatactatgcatccataaaaaaagaatgaggtcatgtcctttgtatgaacatggatggagctggaggccattatccttagaaaactaacataggaacagaaaaccaaatatagcatatcctcacttataaatgggagctaaatgatgaaaacacaagaagggaacaacagacactagagcctacttgggggtggagggtggaaagagggagaggatcagaaaaagtaacaattgagtactaagtttacatgatgaaataatctgtacaaaaaacccagtgacacgagttttttctatataacaaccctgcacatgtacccctgaacctaaaataaactttataaaaaatttcagatgaaaccagtcaccagtgaaacactactgagtgacccaatgatgctgttagaagaatagaagaatcaatactcatgttacgctgtgagcagaagttttgccaggacatttatttaatagtgtacttgctaggtcatagatgatgtatattttcaaatttacaagataatgcaaaagtgcgtcttcaaaatggttatgccatattatatcctcaccagcagcataagacgttgatcaacttatcctacaatttttcacattttatgcttcctcttcagcacgctgctgatttctccttatttttgctcattttgggggttgcatagcttatttgttattgatttgtaggagttagttacagattttgaaaacatattctttcttgattctgtgtgtgtgtttactttttcttcaggatgctttgatacacagaagtttttaattttaatgtcaaatttataaacttttttatgctttgcacttactgcaccttgtttaagacatttttctttacattcagatcaaatacattgcttatgttttcttgtaagacgttagtttttatcttttatgtctataatctgccgggaatctaatctgtgtgttctgaggattttgcgtgtgtgtgtgtgtgtgtgtgtgtgtgtgtgtgtgtaggcaagttatgcagagatcaaattttatttattttattgtgaatgattaatcgttcctgcagcatttgttgagtctttcttcccaggcaagtcatatattaagtataaatatatgcagggatccatcattggcttctatattctattcaccttatctacttgtctatctcggcaccaatactatactgtcactgctgtattttaaacatcaataagtatgcctagcaaataacagatattcaataattaattgttatatgcatgaattaatactgttttgtaataagtcctgaaatatgataagataggtcctctcatgtctttcttcttcaggagtgccttgtctaattccagggttttgatcaatcatgcacattttaggttcagcttattaacttacatgaaatacaatgttggtttttttagtttatggaaatcccataattcatcttcaacaataatcaatattttgaaatcttgtttcgtaatactacttttttttagaatgctttaaaacacattccagacatcattcaattttgttaatacataatttggtatcatcacgaagaaaacaggaatttacataattttcatgctgttcctaagatcaaaataaaaatttaaaaaaaaatagtgactagtctagttttcccaattattttagagatattttcttaccattgattagtttaataagttctcaaaaaagggctactcattactttggctatttggtttctcatgagtttctctcctccaacctcaccttttctgtttataggcaggttctttctaaacttaaaaataattttcaagactatttttaaaattttgcttttcagttaaagtattgggtacctagaatgcataagaaagaacgataatgaagtttcatccaataagtaagttaatatcaatgaagggaacctaagaactgaattgggtattactaatagtagtgataaattccagggatcatctcaaataaacttccaggtctatagttctaaagattaatttaataactttaatagtggaggtaaatagaaatgattgacattttgtcacatggcattatattttgatttctcataattcataccacgcactattcttccccttttcatttcctca

SEQ ID NO: 27246 - DNA, 2300 bp, Homo sapien
ccaactaaagatatgtattgtcattaatgacttgaacattctcaactattcatggcatttaacaatgcttcattacaaaaaatggattttttacattttatgtgttttattcatgataaatgaaatgtgctttattcatgataaatttatgtgctttattcatgacaaatgaaaacttgttctttttgtttgttctttttatcatgaataaagcacataaaatgtacctttcatgttacaggctaaaacgtttacattgcaggcccttttattcctctcctacccttaacctccccaaccgtatacatcaataaagaaaagagaaagagaaatgaattagcagtgagcagtaagtggaaaagatacaagtttttttcatggccaagtctaaagtcattttgagttaattaaacacaagctactactaagccaatagaggacatattaagtctttaaaaatattaattgtgatttttctacactagatttctgttgcttgatttctcattcatgactaaaattgttagacctgttaaaatataaaaacacttgggaaaagaatcccaaaacaattgctcctggaaagttgccatcttccctggaagtttccagtgagctgagttattctcattgcagcacgaaggacacatagacccacagtatcattccttctgtttgtctttgcattctcattttccaggctattgcatacagcaactattcaaacgttttttggataccttcattagctatggcttccaaacttttggttaaaatagtaagctaagctgagcaagcaacattttggccttttcattttattgggcacactggtcatttattgcccctcccccactctattcccctggcaccagcaccgaggattccctggatggggatttggctgtctggctagtggccacttcactgcatgccacacatctgtgcccttggaatctgaggccttgtcttcattttagggcactagaaatatttctgccaaaactccaaaagttgtttctttcttttctattcttctctttttttcctcctttttcttttctcttttccttttcttttttttaaatttctgagaacaatataagctacacatacatttgatggtcaacagctgacactactaggaaacatatgtgtaagagcagatttcaaaggccttaatgcatctcctagctccatttctgactctataatgttgtagaagtcacttaaatctctcatcccctgttgatttaactacaaaatgagaccagttatagaattgtgtgagaggagaaaatagttgatatagatggaagagctttgaacattctgcactctcacatatgcattgtattagtattactattaggtcagatggaccctcatctatgactgaccaagatgctgggtacacgagctaaaggaatccaattcactatcccagggttgcatcgcagtggatttcatacaggccaagaaaaaacaaaaacgtttttaagcctccatcctcagatcaaaacaataaacaaaaaattatgatatccttaacaatgtcctgggttaatattttattccataaatcaagttttcagaactctttaccctctaagagatacagattgaacatgcctttataggctctgaatttcataacttctaatctatgctcataacctggaaaatgtcatcatactgaatgcccacatgaaaaggtacttttaggacctgccagtgacagtttatacacacatcagtcccttttcaaatgtcatttccattagtatcttacatcagaatcacaagtgaaatgaatatgctgtaacctagtattttaaaaggttatgttgaaggagtagagaggcttaaattaattttcccttttctcatccagtaggcctttactcaataggatttcctacaattctatcttaatccatgtctctgtggatgaaccaaacagaccacaacatagaagagcctgccaaagtggcttcctgccagcagccctctctcctctttaagatagacttcagcttaatgattgtacagtgatccaaatcaatgaagaaagcaaagaacagacatgtatctcattatcttctgcaaagatctatttgtttagccatgtgcaaatattgccctaaaatggtaagttggttagcacatattaatcatttactagatctattcaattcctaaaattaatgttaatttaatatgcagggggagttgcatggctgttttcgttgctgtagacttgatataggcagagaacaagcagaaaattatttagaata

SEQ ID NO: 27247 - DNA, 2300 bp, Homo sapien
agtgaaataagccaatttgaaaaggatacagactagtgattctgattatgtgacattccacaagaaagaaacctatcaggggttgccaaatgtttgtggggagtaaaggaggatggaagaataattgatgcacaaatgattcttctgtcaataaagctatgattatatgctgtatgatactgtaatggtggatacatggcattaggtatttgtcaaaaccaacagaactttacagaagaaatagtaaaccttaatgtacgcaaatttaaaaagaaacatatagtatgtctggagatccctgacaccatctaagcaaaaaaaaaatctaactgtatttcacatgtgtgacacaacctcactgaagttggtagaggaagaaaatgtgctaacctaagttactttatatacgatataaatgaattttatttgtctcatgaaccctgtactttagttgacaaaaatgtttttgttaagaggtaacttaggttacaagtgctctgctgaatgaattgattaatgccattatcttgagagtaggttagctacctaggaagtgagttcttgataaaaggattagttcagcactattcctatttctctgtcacatgcatacatgctgtcttgctcttctgccttccaccatgggataacacagaaggaaggtccttgttacatgtaggttcctcaaccttggatttcccagtctcgagaactgtaagaaataagtctctgttctttataaattacccagtctaaggcatgctacattagcacaaaacggactaagacactatctatccatctacctatatgtctatatatctacctaatctatctggctatttatctatctatctatctatctatctatctatctatctatcatctatctgttcccacctaagcaggtgaaagtaagctaccttataaagcagaagataatatacacatcaaaacactctcttacctaataaagactggtacgttaaaggtagtggtacactgcttttacatctcaatgtttatttgctcatttgtttttcccaactgtgaacaaaatgttatgaaaaagctattataatagcaactagtatgcagctccaccatctttaacttaattggagagagacataaagaaaaatgtttgttcttaacattcttgcaagaagaagcaatatgcagagaatgtttttttctctctctctctttctctgtgtttatgtatacattcattaatctatacttatatacattaaaattcagttttttaaaataagtaagaaaatgggtgtttcagtcaactaaatattctaattaattcaatattttatcctgtgagatgttcaaaagatcaaatatttttaaaagtcataataatcccataaaattacttagatagtcactctttcttcctcatcttttgtctaggtcactcctaccatactgaacatgaatttgataattttttaatcttattcacgcacaagcttagatttgattccttattttatatttataaactatttttgtcttgccgctgacttttttgtatcagattgagttttatactactgttttatttaagccctttcttgcaattaccatcatcctgcaccaatatagaaatttcagtgtgtttccttcttccttgagctcacaatgagatctcctgttataggctgatggctacaggcatattttactgtcataattttcacagaactcacacactaataatccaaactaaccctaaaattatatcaaaaaattaatctgattaggatgataattcacagtcacatagtgttttggaatctttgtggtgaaaataaattgttcgtttaaaactattgacttagaagtcggactctattattgtgtaatgactgaaaccagaagtaacatttttcaatatatctctatataaagaatattctctgatatggtttggctgtgtccccacccaaatctcatcttaaattgtaactcccacaattcccacatgtcctgggaggaaccgggtgggaggtgattgaattatgggggtggatctttcctacgctgttctcatgacagtgaatgagtctcatgagatttgatagttttaaaaatgtaagtttctctgcacaagctctctttttgcctgctgccatccacgtaagatgtgacttgcacctccttgtcttctgccacgattgtgaggcttccccagccatgtggaactgtgagttctccattatacctctttcctttttatattgcccagtcttcagtatgtctttatcagcagcatgagacta

SEQ ID NO: 27248 - DNA, 2300 bp, Homo sapien
cctagcataaagaaacttctggagatgagctatgaaatggcatggagtttggaaagaaaggaaatagacaacatcctgccagggcaaaaaagattagggaatcgtgaaagctgtttctattaatatctacttgaatgatcattttgtgaaagagaaattaccaagtctttcaaattttttcttttccctgtttctagaaagcataataaggatcaattggtttcaattcaacaaattctcattggtcctctattaaattccaagcattgggcttggtgtttagggctacatacaggagaacacagatctgtctgacttcataaatattacagactggtagaaaaacaaacttaaactctttgtcaactccttttaaaacttctaaggtgaatttccaaatatttccgttttataatagtatcttaatgtatgattaatgtctgttattttatatatttgtcatacatatttctgtttatataataaaatacatgttagtaaaaatgagtcttcagaaatgttcacatacatttatggaaaagatatgttttagaggcaaagggaatttagcgcacaattactacaattggcattaatattaggatgtgataatagttccaaaggggttagtaaaattaaaacgttaggcactgattgatacgtaggaaaattgaattgggcaatctagccactaatgacaaaacatgtttgcaataaggatgattcagcaaagaatttactcctgcttagtaacagttgcaattttatcttttgagatataaatgtgcatatttgctttataactgttgtatgactcagagtttagagttatcttttatccttagctttataagcagtgtatccaatagcaacatatgtaagacttgcgttttacattgtatacattttactttgcattacatttcagtatgatatcattacaacaaaacagaggttcaaaaatacagcatgatcctatattaaatacagacttctggcagttttaaaaatattaaagatgtgtagtttattgttttaagaagtcctcaaaatgtattacctagtaaatcctcttaactatgttctgtcacatcttctatttaagaaaattgttttttcagtttgtaatcactctatacaatatgttcattttatgaagctttgattagaaatgtaagaattttatatattataatttaattgcattattctcataaaacattacaagattgacattgcattacctcacaatttgttttataaaattttaacctttgatctttaaattgatatgctgaggggattaaataacattaacaaacttgtcatggatatgaaattcacttagataagacaataaaatattgtttttttaaatcaacaaagtaaaattcttagaaaaataagctttgctctttaaatatatttctgaattgtattcctgtctgataactttatttactagagttgtggatctgtaaatgcatgataaaatgccagctagttagcttaaattgccactataaaaatgaagaagggatacatgaagctacttttaaaaagtctttataagcatgttaaagtatacagcatttgctggataacattcttctcatggttcttaaattcactaccaacaaaaaaagtaacagccaaaagtaattaaccaaagaaacacaatttaaaattatgtagagagtatgaaaaatcaccagtattttaccttcattgatacttactctatactttgcactgtatacaagcattacctcatttaatcctcacaagagccatttgaggtagcaaccattattaccttcatgtaactgaggaatcttaggttaagtatttagctgaatgtcaagcagttagaaagtgttattaacagataggtcctttagcccctagagaataaattctctatgtcactttcacatgcttcatagccctcgggctactgggcactaagaggcagcattcaaggcattcaccattcaataagcctttaatgaagtcttctttgcatttataccaaactaggagatatccctgtttctagttctcctccctccctctgtcacctcatctaatatagatcatcaagataggttgaaaggggagttcgtagtcatctcttctaatcaggagatccctgaaagccgaacatttaaatgttctcttcttgaaataaaaataccatagttttagttaggaatgtgctatgttgaaaataacagaaaaactgacctctgtggcttaaacaagtaaggatttattttccttccgtagctggaggaagg

SEQ ID NO: 27249 - DNA, 2300 bp, Homo sapien
ctttcagtttcctaagagaatcagatccggtggtgagaaatttcaaggtataatcacacacatgaatggctaatgtgaaattaaggaaagtttatagagtagaaaagcttaggaatggtgagtctagagttgctgaggactcaatgtccaacagccaaaatatactcacctacttcaaaagaactatactctgagcttcaattatttgctagttgttatttcctatttacttatgtaagttacttagttaaactggtttgaaaacaatagccagcaaataaagtgcaaattgtttcataactaatacactttgtcaagctaattgaactctacgtgctaaggactttggcatcaacaatgatgactaatagctgaaaagggagatgaagaaaagttaatgtgagggaaaatgaaaacttggatttatagtgtagtccaattgactaaagtttcaaaataatattgacatactgatagtaaatggaaaaaacgaatggtggagaaagcagtcacgatttcacagaaaaccacttccaatagaaataccattttagattgctcatcttctaaatgaatgtttaaaatgcaatttttaagagaaagttttatttccattgtggttactaatgcatctgagtcacttgtatattcttctccagtgtgatgtaaaaaaggccaatgaagaaataaatcactttgataaatacctatgtttaacagaacatcttaggaaggtcatccttaaagaccacgtgttaagttggctgagtatcaatacaatgagtatgcattgattcacaaggaactcatgtccctagggctccagtttctaagagtggtccacagtggtagcttcaagctgaactctgaacgtgaaatgaaatcctatgtcatttgaattttttcttttttttttttttttgagaccgagtctcgctgtgttacccaggctggagtgcagtggcgcgatctcggctcactgcaagctccacctcctgggttcacgccattctcctgcctcaacctcccaagtagctgggactacaggcgcccgccaccacgcccggctaattttttgtatttttagtagagacagggtttcactgtgttagccaagatggtctcgatctcctgacctcgtgatccacccaccttggcctcccaaagtgctgggattacaggcgtgagccaccgtgcccggcctgaactctttttctattctcgaaattgtgagatcctctgacaaattctgctaacagttccaaggtttaaaactggggaagttagagacatgttattattattttttttaatttcaacttttattgtagacacagggagtacatgtgcaggtttgttacatgggtatattgcacccaggtattgagcatagtactcaatgggtagtttttcaacccacatctcccttgctccctcccctgtctagtggtccacagtgcctaatgttcccatgtgtatgtccatgtatgctcaataccataatcctaagtgaattaatgcaggaacaaagacatgtttttgtttttgtttgaatgctacatctggggctggctaggattgaaaaaacactatgtcttgctgatatgtcagtcgcaacttcagcctcttttgtgtgtgtgtgtgtaaaaaagaaatcttttttatttatttattttcaaattataaattcatagggtacatatgcaggcttgttacatgggtgtattgcataatgctgggtttaggcttctagagaacccatcacccaaatagtgaacatagtatccaataggtagtttttcaattcttgtccccctttccaccctccccacttttggatttctcagatctattttttccatctttatagccaccaacatgagtcttttgatgaaataatgtttggctgaggtccacaacttaaaacaacattccaatatagattctcatgatccctgaagaagtgtgtctgatgtggctaaacatcatcaaatgagtaagtcaacatagtaaaagaaaagaacagttctttatcagattaaatgagcgaaacagctaaatgtcaagtgacaaaacattgggactgactgtataaaatgctaataacatctaccaaacagtttacattgtgctaaacaacttatgcacattatttctttgattctttttaacacatggttgtgggctgaatggtgtctcccaagaagtcatatgccgggatcctgtcccatagtgcctcacaacgtgacattgtttggagttagggttgttgaagatgtcattagtcaagatgaggtcat

SEQ ID NO: 27250 - DNA, 2300 bp, Homo sapien
ttgtgaatatggtggaaaaaaggaattattgacaaaacaaaggttgtgagaagtgctttactggatgctgctggggtggcctgttaactacagcagaagttgtagtcaaagaaattcctaaaaaaagagaaggaccctgtattgggtgcaatgggtggaacgggaggtgttatgggaaatggcaagttctaatgattagaatagcgttttactttaattaatgaactgtggcaggaagcccaaggcagtattcctcaccaataacttcagagaagtcagctggagaaaacgactgaagaaaaggctagcagatgtttaggaaatcactataacaatcagttactggtttcaagtgacaaaatatataatgttttactgctgtcactgtccatgcctacagataatttattttgtatttttggataaaaagacatttgtatattcctaatactgggtgcgagagcacctatggttccagttccagctactcaggaggctgagggaggaggatcgcttgaacccaggagatcaagtacaactctttctatatatatatatttttcatatttttacataataaaattctatatggcagttaagaggagtaacctaaccatatatcaaaacataaatctcatataatgttgactgaaaaagaaatttgaaaaatatgtccaacctagtaccagttatgtaaattttaaaatacaccgtatgttgcttataaagatatgaatgtttataaacgtataaatacaagatccatgtttttacatggattagatggacatacactaaatccataagagccttggagagaatgttacacaattaaactgaaggcaaatagagaaagaacatccatcttatttgtaatattttagttcttgtatttaaaaaatattttaaggaaacatgagaaaatactgtcatttctgggtttaaaacttggggttttgaaatttgtaacccagccgggtgcgttaaaggctcacacctgtaatctcagcactttgagagcccaaggcgggtggatcacctgaagtcagcagtttgagaccagcctggccaacatggggaaaatccgtctctactaaaaatacaaaaattaggcagccgtggctgcaggcgcctgtaatcccagctactccggaggctgaggcaggagaaccgcttgaacctgggaggcagaggttgcagtgagcctagctcgcgccactgcactccagcctgggggatacagcgagactctgtctccaaaaaaaaaaaatacataagtagaaataaaataaaataaaatttgtacctcaaatacttttctgtatttttatttctcaaatttaaaaaacgagctgtaaaaatgtttcattgcgaaacaaatttcagaaattgactcaaaaagaatgcaaatacttgaatagtctaataacttacagatgttccaaaacatcaaagatccattcactcaaaaaggcaccaagcccagccagttttaaggctttctacctaatgttccagaaacagtgtcctaactcacataacgagggtagcgtaatcttggtaaaaaaaaacggagccagattattagcctccccaattcagcagtgtattaaaccgcatcatcttgcttaaggtttataaaaagagtgcattcatgattcatcaggaaggcaatttataaagtacagtaaaaaaacgaggaaagtcttcatctttatagcgtaaagcttaaagttcagctgacaaaaaaacagtaaaatttattatgtattttttcaaatccttgcaaactaggaataaaacagaatttccaaatatcattagaatgaagaaagaacattcaccttagtcaaaaacaactcagaatgcccactatcaggttctagttcacagaataaaatttaaatgttccaaagaagaaagcaaatgtcaatagtcacggattatacaactgtctacttagcaatttcaaggagagccactgacaaatttagaattaagacccaacaacaacacactggtcgcccgggacgccagccccactcctaggcctgcgcatgagggtgagggcatgcgcatgcgcatgcgcacgccctgcgcacgcgcatggaacgcagcgaaggactatggcaggggagaacttcgctacgccgttccacgggcacgtgggccgcggcgccttcagcgacgtgtacgagcccgcggaggacacgtttctgcttttgaacgcgctggaggcagcggctgccgaactggcagggtgcgaggaggggaggggctctgacgggaaagggttgcgg

SEQ ID NO: 27251 - DNA, 2300 bp, Homo sapien
tcccaagtagctgggattaaaggcatgtgccaccatgcctggctaattttgtatttttagtagagacggcgtttcaccatgttggccaggctggtcttgaactcctgatctcaggtgatctccctcctcagcctcccgaagtgctgggattacagacgtgaaccaccgcgcctgacctattttcttaataaacttactttcacttaaaaaaaaaaatagagaaccttttttggaattagtcttaaatgctacagattgaaaacaaatgtaatgcaggccatcattttctttcctgttcactcagttcagtttaggaagtaggccagattattccttgtcagatgaattttccaaacacacttttgctaggtattaggaattttttttttttttttgagacagagcctcgctctgttgccctgggtggagtgcagtagcacaatcttgactcactgcaacctcagcctcccaggttcaagcaattctcatgactcaccctcctgagtaggtgggattacaggcacatgccaccacgcctggctaatttttgtgtttttggtagagacagggttttgccatgttgccgaggctggtttcgaacttcagggctcaagtgatccacccgccttgacctcccaaagtgttgggattacaggcatgagccaccttgcctggccggtatgagcaatttgtttttttttgttgtttttttttttttttgagacagagtctcgccctgtcacccaggctggagtgcaatggcacaatcttggctcattgcaacctctgccttccggttcaagcgattctcttgcctcagcctcccgagtagctgggattacaggcgtgcgccaccacgcccagttaattttttgtatctttggtagagatggggtttcaccatgttggccaggctggtctcgaactcctgacctcgtgatctgcccgccttggccttccaaagtgctgagattacaggcgtgagccactgtgcccggccggtatgagcaatttgaatcacacatttggataaccgttggcaaacatccttatagagaaataagaaatagatgactttagatgggttgtgatgtcagcttggtggtcaaactgaagcattttctgtttagataacaataagttaatttcttttagcagttcaaatattttctttctctgtatcaactcacctccttttagtagaagactactatattgtgtatcagtcaaagaaaccactgactatgattcaaaacaaaggagtctgtattatagattgactgttgtattgatttttatggctataataatgtaattttagcccaaagaggttaggctaggctttggagtgtgtggaaatgagtgtatccactctcaaggaactctcagtctagaggcagctatcattagacctgggccattgtgattgtttaataaatatttgttcatttaatgggtgaatgaaaggatgggttctatttatgagttcattttacatcattacatagtatacatatgtgtatacatactatttatatgaaagttagaaataaaaaattcataacagcatttatgaaaattttcctgcatgtgatacattctgattttaaaaattttaatcaatttctttaaaattctgtcatggtccattatattgatatcatgagccactaatggattgtatccatggtttacaaaacattctaatgtttaagaaacagaataatttctaggatcagtattgatggattcttggcaacaaaaccattaatctttggggaactttgcaatagatgaaattttaggctaggaaaaaagaaaataaaataaaagctcattctgaccatgggaatagccaaggaattataaagttaagttttgaacccttcctggactctgacttttttctccgtaattttcttatcagccttcaaacagtggccgagctgcagaactccttgccaaagaacagggaacagtgcctggatttattggttttggaacatctcagagtgacctaggctatgttcctgctattcaaggagctgaagaaattgacagtcttgtagattctgatttccgaatggtgctgcggaaactttcaaagaaagatgtcaccacaaaattaaaagcaagttttcttgttttcataaaaattatcaagaaaatccctttgttaaaataaaatgtcattagcatgttttatgtaaagaaaaatgaacaatttattgctaagttcttttataattgtacttttttctgacacagagtcttaaacttagttgatatttattttctag

SEQ ID NO: 27252 - DNA, 2300 bp, Homo sapien
aacctccacctcctgggttcaagcaattctcctgcctcagcctccctagtagctgggattacggctgcctgccaccatgcccagctaatttttgtattttagtagcaacggcgtttcaccatgttggtcaggcttgtctcaaactcctgacctcaagcaatccacccacctcggcctccccaagtgttgggattacaggcgtgagccaccgcacccggcctattctctgtatttatattatatatatatgcataaatatatatatatatatattattgtgttgtgggttttaaaaacacaaatggtatcatactgtatatattggtatttgctttttatttaagaatgtgtcttagaattcttcctatgtgtgttcagataaaccttattcttcttaaatgttgcctaatagcttattgaatacatataatttatttagcagttctccaatatatagacataggttgcttacaattatctttctattataaagtttttgtgaacctcctgtaatatgtctctttgtgtgacttttttctgagacagtctgctctgtcacccaggctggagtgcagtggcatgatcttggcttactgcaaccttcgcctcccgggttcaagagattctcgtgcctcagccttccaagtagctgggattgcaggcacctgccaccactgcccagctaattttcgtatttttagtagcgatgggtttttgccatgttggccaggctggtctcgaactcctgacttcaggtgatccacctgcctcggcctcccacagtggtgggattacaggcataagccactgcacctggcttttgtgtgcattttaaaatcagggtccagtcaggaaaacagaaatcacattagttattgagaaatattttaatatgggaaattggtcaaaaggaattataaaaggtaacaggtaatcactgcaggtagcagctaccattcctagagctaggaaaggatggaacaaaagaagtggttggagtcatcagaacctaaaagcttgaaggagggccctgaacaccttagttcaggcctatgaagaatgaagagagggtgatggctggctgttactggatctctggagcacaaagaagggatcccacggtgttgaggctcaaacttctgaggaggtggctcaaacattggctatctcaggagctcaggggaggggccgcatgaaagtagaattcagatctctgaggagagcactgactgctgctgtgatctctgaggggtgcaataaggctgattctgtgattgttggaaaaaggatagagattaaaaccaccttttggctaaagcaattgctcctgccacggtaaaatgcagctgctgctggcatgatgcttacagaatggagcaagtcccttcttcctcttgcctttgtttccctcttgttcgtcctgttggtggaatctagcagaagcccccccagtaacatggagttgagtataaaagggtgactgcgtggacaagaaacaataaccagcacacatttacttgtttctctggtgtgattctgagtcgcacaatcaatgggttacaggatttgtacatttcaaattttaatagggactcccacattatcctctttcctaaactgcacgttaacagtttcaatatgaataaaaggggacggggaggggagatttagagagaatagtgcctacagcagtaatcaaattttaacaagacttgggaatactgtcaaaatgcaggatctgattcaggagttctgaggggcccgagttggccttttctaaaaaacgcccaggtgatactgatgattgcatcatgttggaagtctaaaacactcccatcttcccacagcctctaccataacattctaatgctacccttatgtgaaactgcccctctgatgattcacgccagtttcctaccctctaagcaaggaacaaacctagcttctgaaagcggggaggacaggatttggcgccacgggtccaatgcttggcttcctattggccaggaatgacatcactcagacaggcgtggctttagctgtgacgtctccggtggcggatggtcagggacacagcgggaggcgggagcggaagtggggcagcaaatggacagggtgggtggcggaaaagggcccgggggaagttattacagggtgtcctcttccgccgccagaagccggaagttgtgtcccggacgtgtcaaccggggtctgagtgctcagagtacagctgcaaccgcgaccatgggcgggaagaacaagcagcgaactaaagggaacctgagggtgagcgggggctg

SEQ ID NO: 27253 - DNA, 2300 bp, Homo sapien
tcatacatacacagaaatgtgcaaatataagctctttgagagatgcgacatctttgtcttgttcatggctataattagtacctggaaatgcctggaatatagtaagtgctcgataaatatttattgaaaagaaagtcatgagcaataaaatgctatataagaacgttcacagcagctttatttataatagccaaaaaactgaagacagcccaggtttctatcaaaacaagaatggaactggtatattcatatgatggaatactactgagcaatcaaaagaaagtgatacacatgatatcagatgaaaatattaccctgagtgaaagaacccttacacaaaaatatctattgcatgactccaaccatatgacgttctataacaagaaaaataagtatggtgggggaaaaaatcagaacagtggttacctttggggagaactggttgggaactaagaaagggcatgaaagaactttctagggtgatggtaacgttctatatgttaatatggcttgagttccataggcgtgtgcatttaaaaactgatgtgtatttaaggtatgcatttcatttttaccttaaaaaatccttaatttgaactccaatgatgtgcattagaggtacttagaagcgtactgtctgcagtttacttttaaatgtatgaaaacagatagattgatgaggtatgtgacaaagctggtagagtaaaattctgtactctccaggtcagtgtttttcaacctcaacactatcaacattttggaccagcaaatttgttgttgtcgggggatgtcctgttcattgtaggaagttgaggaacatccctgtgctctacctaccccatgccaataccatccttccagttgtgacaacccaaaatgtcttcagacactgctaaatagaggggaaatccatccttccccttctcttgaggtctgctccactgtaaaattctctcgacttcgctttacacttgaattttttcataataaatgttggaggaaaaaataaattatgacattgaaaaacgctcatgaaacactatgcagaagacgtagtttatgaagacctacaatacatactgtcgtatttttgtttaaaaaaaaaaagtggaggggagacctagcagtgatatttagtattgctaaatgtcaatgtttacaaatcttatctatgacatttctaaaatgaatattataaagtgtattgcatatagttggattgggaagaaaaacatttctaattattctcctgtcagcatctccttcaaactacccttttattaacagggatagatatgcattcacacggttcctcccagcttggttaatgggcaagaacacctaagatagccaaggccaccatgcatccaggctcacatctccctaattgccctcctccatgattcagggacaaggaggatcaccatcgtgtgggaagatactagaaatgtagaatttggaaccccacccctacctacggaatcctgatctgcacttcaacaggatccccgaactattcctaggcgcgttcgaatttgaggaacattaacggaccaattctttgtccctgaaaagtgcccgttatagaggcggccgctgggaaatgacaacggggttggcatggagaggtattaagtagaaaaactccggccgggcacggtggctcaggcctgtaatcccagcactgtgggaggccgaggccggtggatcacctgaggtcaggagttcgagaccagcctggccaacatggtgaaaccccatttctactgaaaaatacaaaaattatctgggcatggtggtgggcgcctgtaatcccagctactcgggaggctgaggcaggagaatcgcttgaacccaggaggcggaggctgcagtgagccgagatcgcgccactgcactccagcttgagagacacagcgagactccgtctcaaaaaaaaaaaaaaggaagaaagaaagaagaagaagagaactctgcgactgaaaagtacctagcagggacaacgcattccctacgtccttccaagtgcagacaccaacaccggcggacgcggctcccaacaggcgagccccagcttccggtccgcggccttggacgcgcatgcgccgcatgctttttttttttttttccggtaggtcgccagctgaggcggtttgtaagttttgggtcgcagtatgctagaattttgaggctcccttctgatgaaaattgagctgtccatgcagccatggaacccgggttacagcagtgagggggccacggctcaaggtgagtctcgcctcagctagcgccagtggtga

SEQ ID NO: 27254 - DNA, 2300 bp, Homo sapien
gctacaaagccagaccctgtctctaaaataaataaattaaaaataaggtgtgaacagaatgacaataagataccaaccccggaagatcagggggaagaggctttctgacaggaagcacgtggtacaatgaccctaaggctctgttttaaaatgcgtgggggcaaaaagcctgcatttctggagcttggagaagaaagctttaaaaaattatctcatcccactcctgttcttttttgcatgagagctggagcctatgccctaccacacatccgtggatatgcccaggatttgacttgggccttcgaactttgcacagtagctgctactaactttttgagataatacattcgtgggggctcagtcctgcctcatctaaatcaccagagaccaaacaaggaccagcccaatatctcttggactgtaatgtcataatgttgtcagaatacagagaaagatgaaactaagccgggtccggtggcttatgcctgtaatccagcattttgggaggccgaggcaggtggatcacttgaggccaggagttcaagaccagcctggccaatatgctgaaaccctgcctctaccaaaaaaatacaaaagttagctgtgtggtggggtggcacgtgcctataatcccagccactggggagggtgaggtgggagaatcgggaggtggaggttgcagtgagctgaggtcgtgccactgcactccagcctgggtaacagagtgcaacccggtctcaataaataaataaataagtaaataaaacaaaaattatctcagcagtaaaaagcaagagagctagttttcccccaaatttaaccaaatgttactctggtggttagtatgccaccatcttaaactccttttatctgattagtaaggatggacatttattttatgaccaattgttcttttatggtgaattacctgtttacatatctatttttctatagctatctgcaactcccccgacccccacggtagcgattactatcttctctactaaactaagactccagggcagagaggcctatgtttaattcatttgaggaaaggcttggcacaaagtgtgcacttacatattttctttttttctttttgagagggagttttgctcttgttgcccaggctggagtgcaatggagtgatcttggctcattgcaacctctgcctccagacttcaagcgattctcccccttagcctcccgaatagctgggattacaggcgcccgccaccacgaccgactaattttttgtatttttagtagagacgggatttcaccacgttggccaggctggtctcgaactcctgacctcacgtgatccacccgcctcggcctcccagtgttgggattacaggggtgagccaccgcgccagggctcgcacttacaaattttcaaagaatggacagtaaatatttgaaaatcccctcctcccccgcaatttatctgacaccgtctttcggttttgctttaaaaattcactctcgcggccgggcgcggtggctcacgcctgtaatcccagcacgttgggaggccgaggcgggcgcatcacaaggtcaggagttggagaccagcctggccaattggtgaaaccccgtctctactaaaaatacaaaaattttagctgggcgtggtgccgtgcgcctgtagtcccagctactcgggaggctgaggcagaagaatgcactccagcctgggcgacagagggatattccgtctcaaacaaacaaaaaatcactcgctgcgttttttattctgacatggtgcaggaaggtaaattcaagacaacttaggtactcagttttagaagtcgacaggacagaattacggaaacaaatttaagcgttcccccttttagctccaaatataatgtgttccagaaaggtaaccatctaggaaactccaaggctcagaccaccaccggatgcccacacttcaggagcatttatataacttcgtggttatgtcagagacgagaaaacccattgacaaccaaacccctaaacccgaacatccggcgcaagccgcacgcaggcgcagatttactagcgtcagagccgatggtcccgggaggtgggggtggggtggtggtggcctagccacttcccataatgccgcgttccggaagttattgctttccaggggtcactctggcttcgactccgtcgctctcaattcgtcaccaggaggaagacggagctggctgcccagcccaaaggcccatgaggggatgcagttatgggctctgtcgccgtgggtgagttctggtcccactgcctggcagtcgtcgctcgcc

SEQ ID NO: 27255 - DNA, 2300 bp, Homo sapien
tgcttgtgatattataaggcatatagtggagatagggacgctaagaacaaatttcagataaaattgtaataaaattttggctatgaatttgcatgaaaataaatgtcagtctggtatgttatagatgctgcattgtaacatcattaaaacagatttttacgtcttaaaaatcattttcacagtagtcttcactgaatgacatcttttttttttttttgagacggaatctttctgtcgcccaggctggagtgcagtggtgtgatctcggctcaccacaacctccgcctcccaggttcaagcaattctcctgcctcagcctcccgagtagctgagattacagggatgcaccaccacgcccggctaatttttgtatttttagtagagacggggtttcaccatgttggtcaggctggtctcaaactcctgacctcgtgatccccttgtgatccgcatgcctcagcctcccaaagtgctgggattacaggcatgagccaccgtgcctggcttgaatggcatctttcaattgtaaaagttgttacttttgtctggctaacacgttgaaaccccatctctactaaaaatacaaaaaaaaagtagctgggcatggtggtgggtgcctgtagtcccagctactcgggaggctgaggtaggagaatggcatgaaccagggagctggaggttgcagtgagccgagatcctgccactgcacgcagcctgggcaacagagcgagactccgtctcaaaaaaaaccaaaaaacaaaacaaacaaaaaaaagttgttatttttgttagtgttattctgtattttaaaatatatgtaaacaatcttttgacttcaatgttataaccagtaaagtaaaacgtttggagtatttcatcatactacttatatgcagccataattctggctaattttattaataataaaccagagttaatatgcatagtcttcttcaggaaaacagaatttttacgttcggtttctttaatagaataagttggcagttacacactttgattccaggaattattatttgtctccccctttttagttgtcattttgtcatttttcatctctgatttttgggtcacaggtgttacgtatgtgataatgaggtccagtattgtagttcaaaccagttgggtcaagtggttgattatgtcagaaaacaagccagcattacaactccaaagccaggtaaaataatttgtttctttaatatacaccaaatgtcgatttgtgtatctgctgatacttagatttgttatactacctagcattacatacagctgagtaacattagttatggttgattgcaaactatgaaactatttttggtttaactataaggtattagaagggatatgagaaatgatctagtcagatgtgatgaaggccatagactaaggtaatggccattaatgctaagactaaggtaattcccataaccctagccaggcttactatagacctgccttacactgttcttactgtcgtacattttgtaatagcaagatttcagtctgtctgctgggataacataaagcatttgtgattccttctaatggtcagatatttcttaggttctttccatgcataattaaattaattggctgacatacagcatttgctttaagcatgttttttaagtttttattgtcacaagtatctttgtcagagccagaattatttgttttttactttaggattgatttttgacccacagaattcattaaaaaatttatttcatgtccatgttcttgattgttttatattcttaatttcacaaggtaagatgtgttcatttgtaaagaattttcgtgcagtaaaaaagggagatttataccaaagcacatactgtttggtttcatttatcaaactaatgcttactttaggtctgagtattttttgtttactgggttttgtgttttttttctggatggcaatttacctgtatctatttaaaatcaaatgggtgggtgggttggaaagaatgacttcaggtaaactcacaaactctagtactgtttcccaagtatacttctgcattcgatatgactgtattacacattttgctaaatcttttctttttttaaagcagagaaagataatggaaatattgaacttgaaaataaaaaattagaaaaagagagtaagaatgaacaagagagagaaaagaaggaaaacatggctaaagagaatcctcccatgaattctccttgccaaataaccgtgaaaggactcagtaatttgggaaacacatgtttcttcaatgcagttatgcaggtacattgtcatt

SEQ ID NO: 27256 - DNA, 2300 bp, Homo sapien
agtgtctgcatactgaggtagaattaattcagccataagggaatagaagagcattttaggtaggaagaacagcagaggcaaagaccctgaggcagaagtggtaaagcagacagcacgaactattccaggtactggggccagaatacaagacattaatgccaaatggagaagataccagtgagacaaggaccagaacctaggcctcaaagtcactttaaatatagattaatatatattaatatgttaatcaggtgtcattttagctcctttcagttttatttcaattttattttgtgttagctatttttataagtaatattatctctgagtcagaggaatgtgcttttgtttatttcttagctaatccaggaaaaatcttggattgttctgttgttcgggactgatcattacagtagttctctaacgtatcagtctcagaacacctttagactcttaaaaattaacttccccaaaggtcttttgtttatgtgggttataggtatgaatatttgctatattagaaattaaaactgataaatttttaacgttatttaaaaaataataatcctatcacatgataatatgtatgtttttatttaaaatatctctattttccaagaatgaaaagggtggctgtattagtccgttctcgaatcgctataaagaactacctgagactgggtaatttataaagaaaagaggtttaattggctcacagttccacaggcggtacaggaagcatggctggggaagcctcaggaagctgacaatcaaggtggaaggtgaaggggaagcagacacatcctacaaggctggaggaggaggaagagacagagtggggaggtgccacacacttttaaacaaccaggtcttatgagaagtcactcactatcacaagaacagctggggattataattccacatcatatttgggcaggcaattcaaacatatcagtggcatttacatttttgcaaaaatccaaaccatatcagtggcatttacatttttgcaatttttttttttttttgagacagggcctcactcttgcccaggctggagtgcagtggcatgatctcagctcactgctgcctcaacctcccaggctcaagcagatcctccaaccttagcctcccaagcagctgagactacaggtgcatgccaccaagccaaagggatttatatttatctataaattcatatataaatcagatatatttatataaaatgtgtatattatatatataaatcagataaataaatatgtatttatatctgatcttaaaagagtaaaagggatttatattcccaggaagaagtagaaaagaggaatatagatagtggttaagaaccggcattttgcaataagtctgatctagataggaattctagctttaatatttactagctctgtgatcttgggaaaattatttacagtttgtgaacttcagtttcccttctacaaaatagagacagtaccatttaatttttaatttttaatggtatcgtctccattttatggaaggaaaactaaatggtattttaaccgacaattcattaatttttaagactgaccattaacagagatactgcatgtaaagcagatcacacagaatatggcacacttgagcacttgatgtgtactacattactcttagtgacgactttaattatcgtgcgcattcccagcgcttcctatggtgcccaacacagagcggacgcctagagacaattttgggggatggggcagatgctctgcctcgggaaaaaaaaagcacacctgccctgacgttggtggctgggtctggaagatacgtggaaattaagctaaggatgtgtggcttccagatcaaaaaccgcaaaaatctaacgccgtgactactgactacggtcagagagcacagactggagcaacctctcacggcctgggctgtctgcgcgtgcgtgagccagaaacccgaggggctccctgggcccgccctatcgatcgacccgatcggggatcgtcagcttggttctggccacagaggttgctcttctcgcgatgcttcagacctggcggcagggaaagggtgggctaattggagagccaggaagagcgtgaggcggccccacgctgctttcccagaaggctgtgcgtgctcctcgcttcctccgcggtcttccgagcggtcgcgtgaactgcttcctgcaggctggccatggcgcttcacgttcccaaggctccgggctttgcccagatgctcaaggagggagcgaaagtaagggctgaaggaaaggaatgaggtgggagcgtcagcat

SEQ ID NO: 27257 - DNA, 2300 bp, Homo sapien
tgacacctgattaacatattaatatatattaatctatatttaaagtgactttgaggcctaggttctggtccttgtctcactggtatcttctccatttggcattaatgtcttgtattctggccccagtacctggaatagttcgtgctgtctgctttaccacttctgcctcagggtctttgcctctgctgttcttcctacctaaaatgctcttctattcccttatggctgaattaattctacctcagtatgcagacactttcattagaaagtctttgatgactcccaagacattccctgtttgtcattctcatagcttctgtgtttctccttcatagcacttaccacagttgtaatgacagaattatttgtcatctttctccaccagcaggtaggtggtgaatcaccagcacttatactgtaattggacaatgcacggagtaaggagtcaataaatcatcatcaaatgaactactgggtgaccaaatggatatccagaagaggagatcgaagaattaaggtgctgtggtctcaatgtttgtgtccctccaaaattcatgttaaaatcttaggccctgaagtgatggtattacgtagggccttttgggagatgattagttcattaggtctccacccttataaaagattagcgctcttatgaaagaggcccaggggagcttatttgcctttccaccatgtgctgacacagctagaaggtactatctatgaaccaggaagcaggccctcaccagacactgtatctgctagcaccttgatctcggacttccagcctcacgaactgtgagtaacacatttctaccgtttctaagccacccagtttgtagtattttgttatagtgtgtctggaattggtgggttcttggtctgactgacttcaagaatgaagccgtggaccctcgtggtgagtgttacagttcttaaaggcggcgtgtccggagtgtgttccttctgatattcggatgtgttcggagtttcttccttctggcaggctcgtggtctcgctggctcaggagtgaagctgcgaaccttcgcagtgagtgttacagctcttaaggcacgtctggagttgtttgttcctcccagtgggtttgtggtctcgctggcttcaggagtgaagctgcagacctttgcagtgagtgttacagctcataaaggcagtgaggacccaaagagtgagcagcagcaggatttattgcaaagaaaaaaaaagctcccacagtgtggaaggggacccaatcgggttgccactgctggctctggcagcctgctttcattctcttatctggccccgcccacatcctgctgattggtagagcccagtggtctgttttgacagggcgctgattggtgtgtttacaatccctgagctagacacacaggttctccatgtctccaccagagtagctagatacggagtgtcgattggtgcattcacaaaccctgagctagacacagggtgctgattgatgtgtttacaaaccttgagctagatacagagtgccgattggtgtatttacaatcccttagctagacgtaaaggttctccacgtccgcaccagactcaggagcccagctggcttcacccagtggatcacgcactagggctacaggtggagctgcttgccagtccgccgccgtgagcccacactcctcagcccttgggtggttgatgggactgggcgctgtggagcagcgggcggcgctcgtcgcggaggctcgggcatggcgggctgcaggtccctagccctgccctgcaggaagacagctaaggccaggcgagaaattgagcacggcagctgctggcccaggtgctaagcccctcaactgcccggggccggtggggccggcaggcggctccgagttgcgaggtccgcggggcccacgcccacccggaactcacgctggcccgcaagcaccgcgcgcagccccggttcctgcccgcacctctccctccacacctccccgcaagctgagggagccggctccggcctcggccagcccaggaaggcgctcccacagcgcagtggtgggctgaagggctcctcaagtgccgccaaagtgggagcccaggcagaggaggcgccgagagcgagggagggctgtgaggactgccagcacgctgtcacctctcaatagcagcccaaacagattaagacatgggaggtatggtctctattcttaccatccagacgtatgtgaagtaaaaccagagaacaacacaaagcaatcaagagggtttttgcgcagagtttgcaaaacgccaaggagactgtaggtttctg

SEQ ID NO: 27258 - DNA, 2300 bp, Homo sapien
tggaattcagagtctcgctggactacagagaacgtggcttagggtgaaagcacaggcatgctgggcatcattgctgctttgcactgatcagagaaggagagactttaaatgggttaactccatgcaatcaagaaaggtagccccatgtcaatcccttaccagtgaggtaacttccaatgtgggtcagaaggagtggattgagaggccgagaactgggggtaaccaaaagagtaagactaaacaatactctcctctcaatataattgttacttttgttcatctccctgtaaacctccctcccactcttctgccttttatctatggagtggggatgaggttgaggggagactcggcctacgactaccatgttggtcccacagctccacttagtttctgtcaagcacacatgagacaaggcatggctaaggtaaagtcctgactgattcgactggtaaagatgcaaggacacttttttagaatcagaccgtttattcattacatagatgacaaaaggaagactagccaaatgtgccaactccttgaggtcattgttctgctcatcaaaaagaatgacactgaaaccaaagggacttggagattgcaatgcgagttgggtaatgcagctcggtggttttgtgttctgccactctattaagagagggtgaagcaggaagacccacgtctcatcagaacactggaggtgatgagaaactgcttcatgacagcttcccaggtgagatcaggaggtgaaaggaagatggccttggagaagctctttgcaggtctccatcttctcgtgttccaggtggatcacaaggcatttggccaagactcaggccacaggagaagcagtgccaagagacaggaaggaagtggctctgccctggtgtatccacaaagggcatgcaggcaaaggcccatgctaatctgagtcttggccaaatgccaagctctttcttagctttggcttgcttccttttctctatgggtctctcagcttccccatactgtctcaccactccccccagaaaggtctctacgtgtttcatattcaaacatcccaagagggagcatctgattggttcagtttattgctttgccacaaaaagcccccaggttctgctaaattttcagaaaatacaagtttccgtggctgctttggcctaagcaagaattggtggtgcactcaatggcaaacgagggccagggtcatgtgagtcatctgtaaccttggtgtgagaatgctctgtggctgttttgttccaaagtgggctctgtgtgtggcctacattcagagtttcaagaatagtccaatcaatctacttgaggctgtactggagtgagtagctcccttaaagtctctccaggttagggcaaagtcacaagaaatgaaatgtattataatcactccctgcttattaccattctaagagggaagatcttgaactggatgaaagtgattgattcttttcttagtttaaatgttggtttagttgtcccggtgtcttttgtgcctaggtgtgattgagctggttagattaatgggaacgagaagggtgaaatggaatgagatgcatttaaatcctattggtgataccttagatatctagagatgaaatctttatttcaggtgacttgagagagaaggttctcttgagcctttatgaatcaactgttgatgaactaaaactgtgtttatcagtctctctttcagcaaagatagaagttactgtcatagttcccctgatcagtgtgctagactggcacacatggggtcttctactgcaaggctgggaagcagaaactgtgtttcttggattctgttgcagttatggctgtgggtacaaataagcctccaccaattagatactttcatgtgaggattggaaggtggtaggaaaacaaagcctattttcatgctgttttggcatttctgccataagcccctaaggctgccgtggtttaaaccagaattcctgatgcactcatgggtgtccaggggccagggtcttttgtaaccttagtgtagggaatgtgatgagatgatgcatttttggcacctctttgccaaagataacaccttgctctccgtgcttacagatgtacaagggcagccgtggggctggcaacagcttcgtaatcctggcttcctgctttctgggtcaaagccctggtggtgtgttcttgatatcggtccatctagtggcgttgtttgattcctcccaccttgctgatcattcgtagtgtagcccccaaggtgagtcattctgttacatctgggacctattcccagaagccca

SEQ ID NO: 27259 - DNA, 2300 bp, Homo sapien
tttctgtattgctaagtagcctgcagagggtgcactttccttatttttatgtctttccatccacttatgaccaaaagaggacacaatgttttataagattaaaagagattattcaatgaaagaagtgaggaaggcacaacttctcttttctttcttctaccaaatgttacaaaatgaaatacgtaaaaggcgtagggaatgcaatctctattagcttctttgttttgttttgttgttttttttttgagacagaggctcactctgtcgcccaggctggagtgcagtggtgcaatctcagctcactgcaagctccgcctcctgggttcacgccattctcctgcctcagcctcccgagtagctgggactacaggcacccctaccatgcccggctaattttttgtatttttagtagagacagggtttcactgtgttagccaggatggtcttgatctcctgacctcgtgatccgcctgccttggcctcccaaagtgctgggattacaggtgtgagccaccgcgcccggcagcttctttgttaatagaaaaatcaattttagtgactttttttgcatggagccaggatcatcaagcctgtggccttcctcactttttttttttttaaaattgctgcatccccgggacttcgttttttttcttgctctttgtgtatgtgtgttcttatttttcctctctatactgcattggtcaatagaaatataatgcaagccatatatgtaatttaaaattgcttaatagtcacattaaaaaactaaaaaggaggtaaaattcattttaaaatattttatttactccaacttaccaattttatcatttcaacattttgtcaatataaacattttattgaatattttactttttttggtaccaaatctttgaaatctgctgtgaattttgcatttacagcacctctcctcttgaactggtcacattttaagctgtgaatagccacatggtaccagtggcaactgtactggacaacacatctatatacattcctttttcattcacaatttctccatccctaaccaaaccagcagaaaacagtgtattaccaaatggtgctgtttactcagaaaatctttatgactaattatccaccaatttgaatcatgcaggaaacatgagatggcctgtgttccctctaagagactgtcgtttacagttttgagattttaaaaaatagaatgtttttagccagttgatttttaagtcactctagttccctccatcacaaaatgaggtatagctcttaataaaagtccttcaattttattttcctgagtgtacattttcttttctttttttcttttttattttttcaatacagccccttgctctgtcacgcaggctggaatgcagtggtggaatcatggctcactacagccctgacctcctgggcccaggtaattgtcccacctcagcccctcaagtaactgggaccacaggcgtgcaccaccacatccagctaagtttttctttctttttttttcatagagatggagtctcgctattttgcccaggttggtcttgaacacctggcttcaagcagtcctcctgcttttggcttcttgaagtgcttggattacaggtatgaactactgcacctggcctgtccattctcaaatacatgatagtaactcccatctgctgagtgcttcctatgtaccaggtactatgtattaattgtttatacatataattccatttaatattcacaaaagtccttttgagttggatactgttgttatcacctttgttttaaagatgaagaaactgagcatggggagggctaggggagttgtctaacataatccagctagaatactgcagagctgggattgcaagctgggcctgcatgactccaaatcctgccttctgtaattttatgcatggtgtctcccaagtggggagtatattaaatgcaaatttaagatgttggtaaagggtagaattctagaagtggtagaaatcctagagttcttataatcagctctctttgtttttataagaaaaatctgaggcagagcgaggctgagtggtttctctgttgaacatccaggactggaatccaggattctgagtccaagcccagtgctctttcccctgatgagaaacctttccagatttaaaccattaacaaccctctctaaagaggaggcaagaggtttcaatttcttctcagggaaaaaaagaactgacatcaaaaggtctgtgcggggtcatttgtctcatcatgactttgatttggccttgatctttatttagtatttcagttttatg

SEQ ID NO: 27260 - DNA, 2300 bp, Homo sapien
ctccgcctcctgggttcacaccattctcctgcctcagcctcccgagtagctggggctacaggcgcccaccaccacgcccggctaattttttgtatttttagtacagacggggtttcaccatgttagccaggatggtctcgatctcctgacctcatgatctgcctgcctcagcctcccaaattgctgggattacaggcgtgagccaccgcgcccggccaattaaatctttgatacggagtgcatcctggtgtagtggaagtagcttgaactaataattagaaaacctggatcctatctgggttcttaattctattatggtcattcatcctcaagcctgttatttgaattgtgtgcgtctcaatttgctcatctgtcaaatcgggatggcaatactgacaaagactattgtataggatcttctggaagattaaaatgaggtcgtgaataagaaattcacttcgataaattataatgcattagtaagttttattataaccataaaataatattaaaacagtaatattaattcctgaaaagaataagcttatatgtgaatgttttaattgtctgagtctgtacagctttattgttgtatatatcataacaaattagccttccattcattagattaagaaagcctgctgagtccttttacttgtatatttaataccttttgaacagttgtcaatttacagaaaaaaacggagtaaaatgtatggaattcccatatatttcctcatccctctaacccctaattaacatctttgcttcaattaatgaaccaatattgatacattattattcattattagtccatagtttacattagggttcactctgtgttgtacattctatgggtttggacaattgtgtaatgatgtgtatctaccattacagtctcatatagaatagtttcactgccctaaaaatccctcatgcaccacctattcatccttcctttttctcttcctgaatccctggcaaccactgatctttttacagtatccacagttttaccttttctagaatgtcatgttgttggaattatacagcatgtagcctttcaagatttagcttctttcatttagtaatatgcacttaagatacttccatatctttttgtggcttgatagtttttctttttatccctgaatgatattccattgtcaggatataccaggatttatttacctattgaagaacttggttgcttccaaattttggcaattatgcataaacctgctataaacatctgtatgcaggcttttggggaaataacaagaagtgtgatttctgggtcatgtggtaaaagtatgtttgcttttgtaagaaactgcccaactgtttactaaagtgggatatactattatgttttcattcccaccagcacggaatgaaagttcctgttgctccacagcctcaccaacatttgatgttgtcagtattttgaatttgggttattccaataggtgtatagtggtatttcattgttgtcttagtttgcaattccctaatgacatatgatgttgatcatcttttcatatgcttacttgccatctgtatattttctgtagtgagatatctttcagatcttttgcctattttttgattgggttgtttgtttttctgttgttgaattttaagagttcattgtatattttggatgccagtccatcatctgatatgtattttgcatattttctttcagtctgtggcttgtgtttgccttctcctaatatttattttgcttatttaacctcaaaaatcacaatccaattattttttaagtaccaatgacatccaggtttacagtttttaaaaaggttgacaaatcctaatgctgtattcttatttaccattgactccttttgtggttggttgcatttgaagaatgaatcgagtcatcaagcccaacatgggctcaacctcaaacctcacattcttaaccaggatcctcgctgctatcatctgagagtcagcctgtggcctgtccaagttggctgggtctggctgagctgattggagcggccgacatttttgctgactggagtcatgctatctttgccagtttgctggaatagacacagacaccgattgggtcacgctgaagacattcctgtcttgtgaagcaagtctgtttgtattttaagtttgccaggactaatgaattaaaacatttggactccccacaacttgctgtttatcaatgcctctgacaggaggagggttttcttttgctcttgctttttctagaaagatgacaacatcctggctgttagagaggcaaggaaaggagagag

SEQ ID NO: 27261 - DNA, 2300 bp, Homo sapien
tctgttataacatatgtttagcattatatagtaaatatagaataaaacagatacaaatagcttatttgtaatctaagaagagggggaaatgtttagataataaagttgggcacctactgtgttccaggtggcaacatatgttatttctcttaatcttcataacaatactataatactatggtatatattatgatgattttaatgtgcatcttgctgaatttcacaatgtttatttgctcatctatgatcactcaactagcaattggttattttgaaattcaaatctggtttgacttcaacatctatattgtttccatttaccacacctatagataggtactcacagataaacaataattatggtgcagttatggcagatacactgtgggaacagacaagagggagcatttaattctgtcttgaggacatcaagggtggctttggaaggagatgatgcttgagtggtgattgatgacaatgatctcattttctaataagtttaataacaggcaatgcatgaaacatattcacaagtaagataaatattaatagttttaaaaacacatgtatttcatcctaataagctctcattaggtttctgtaaccttttattaaatgttccacactgatcacattgatgacaaacacaaattctttttttttttttttttttttgagatggagttttgctcttgttgcccagactggagtgcaatggcaccatcttggctcaccgcaacctccacctcctgggttcaagcgattctcctgcctcagcctcccgagtagctgggattataggtgtgcaccaccatgcccggctaattttgtattttcagcagagacggggtttctccatgttggtcagacttgtctcgaactcccaacctcaggtgatccgcccacctcggcctctcaaagtgctgggattataggcgtgagccaccgcacccggccaacaaacacaaattcttatacttgctaccacaaacatcattagtcatatttattagatggtcattatttattaatttaaattaaataattaaatattcattaaatcattaaaaccttcagctacttatatgattatagtttggtgctgtttttgcaaagacactacacattcacatagaaatatgtctaaaacttttttataattctataaactacatgaatggttatacagttgagttgactaaattcctcccacataattatttcaattacataaaatattacttacataactggaatggtattatagctataaaatactcaagtctgtagttacataaaattaaattcagtaaaaagaaaggcctaaaattttagcaacatactctctagagaaaagctgctaaacagttgtgtttctataagttttaaaatacaattgtaaaaataaaaactaaaaacaaaatttttcaaaattttgctttctcaaaagacattagccaaattttaataaaaacattgaagagtttgttttgcatacactccgatgagatgaactaatattatcatccccttttaaaccaaattttgtttgcaaatcttctctccaagaagccccctaaacagatcttactttccttttggtaatgcttacttatgatctgttggcaacttattcgtattgttacaggtagttagataggcatgagtggggcaggagagcgctcttcccccacccactaggaatgtccggggatggtttgacaattatcacactgcctctctagcaatgataattcagcagcctgtgccagggagagacaatctcctgatgatccacagctgttaacattaaagtgttaattgaatgcagatgccagggaaagcagcctcctgggcatgtaccgtaaaagacaagttggcggagtatgaccttttggggacactccatcggaaaaaagggaaggaaggatcagacgcggctgtatacaacttcttaaactcactgtgtgctcaattcccagaagtaaggagggcactgcgcatgcgggaagcccaccctaagggaggaattatgggaaagaggcaagcctgtaaagcccgaggatcaaggttaaacgctctctttttgaccttcaggcaccctcttgggtcttttacaagtgaactttctttcctgttttaaagccttttaaataaacttccactcctgtgctgaaacttgccttagtctttttttctgctttatgcccctcagtcgaattctttcatctgaggaggcaagaattgaagttgctgcagacgcctgtggattcaccacaagtacattggagtaaccactg

SEQ ID NO: 27262 - DNA, 2300 bp, Homo sapien
ttagcatcttttgggggtgggacccaggaatctgcatttttttttttttttttttttttgagatagagttttgctctgtcgccaggctggagtgcagtggcgcgatctcagctcactgcaacctccaccgcccaggttcaagcgattcccctgtgtcagcctcctgagcggctgggactacaggcgcacaccatcatgcctggctaattttttgtattttagtagaaacggggtttcaccatgttggggtttagtagaaacggggtttcaccatgtcgatctcctgacctcgtgatccgcccgccttggcctttgaaagtgctgggattacaggcatgagccactgctcccggccggaatctgcattttaacaagcaaaccaaatattcttccccataatgaagcttgagagtcactcacttgacttgatactcttagcacatctgtatacctttgtgagaacttctcaaataattaaacctatcagggcatacatcataattttcaggctagaaaatgtcactgctattatctaaagaagcaagagttcctcccaaagaggagggtctgatcttcccctagaaaaaactgcacaggtgtagaaaaaactgcataggtgtagaaaaaagacactgcaattccactggctcaaggtggaaggagaataaagcctcggacactcccatgtgtctgcaagaacttcaatccttctttcatggtgtatttccaagtgtcctttcctcctgtttcactaaatatctgcactctcaccatgaactgaggcagcctgggatgcgaggtacctcctacctctggaccctatctagactgctgggttccactcttcccaatcaagacccaatgcaaatgtcacctgctccaggaagcctcccctaattctaggtcataatgtatcacttcacccctcgcactctcatccaatttcacttgtgtgattttctcatgtattttggatgtagctcaaacgtccccaagtcccacagcctgtgggtgcaaatgcagtcatgttagtcgtaatacctgaattattatcttggtatcctttttgccccgggaactccagggctgtgttcttgttgctggctccaaagctaacaataaaatcccttcacacaaatcgtcctttggcttcagacctcaaggtccgtgtcatctccgcaggaaccctcgtggggttggcgtgcccagtcccctccgctgcgcgtgcatcccgctccgctgacagccagtgctttggttctccagaggtgttaaatggcttgggaacataatttcaaaacggacagttggataaacaccagaataagcaccagaagatgacagcggaaccaaggctcgagatgggccggctgacaccactgggcgctgaacctggctggaagcttcctggcagcgacagcgaaaagggaacacctgtcgtgggcgcccttgtttcactgtcagtaagaagtagagcaactgctagacgcgctccacaaaaccctggacgcacttcatacacacccccaccccagcaagctcaagtaccctgtgaacctggacgcccaccacccccagggcaggcagcgaggagctcttcaaggggtaaagcgacccctgtggggccagcgcccgtcctctctcctgctgttcgcgggcacccgggcacgcggcgactcggctgaattagggcgtcctgcagctcccgaggcgaggaggcgcttggcctttccgttccgccctcagaagggagaggagaggtggtcctcgagtgggagtcagttcaggatgcgggctgtgccacgcgcggaggtccggggaccccaccgccgcctcctcgaggcccgccccgccccttacgacccgtccctgcaaccccccgcgtgggcttccggccgcggcgacccctgccccgcgctattgcgcgcgctcgttcgctgacagaggcttcgagggcggcagggcggggcttcggcgccgggggcggggccttcagcgggcgggcggggttttggcgccgcgaggtggcggcagcagagcggcgcagaagggagggggcggctggccgcgcggaaggagtgagtcacctgaccgctgccctcgccgcccgccgggcgctctcgcttcagtcagtcgggccgcgccgcgcctcagctctggtgagtggctcggccgtcccgccggcccttctccgggagggttggcgcggtcagggccgcgggcctgtgaggggaggccggcggacaggtccagtgaaggcgcgggcgggccgggggcggctctttctgggctgggcgggg

SEQ ID NO: 27263 - DNA, 2300 bp, Homo sapien
actgctattatctaaagaagcaagagttcctcccaaagaggagggtctgatcttcccctagaaaaaactgcacaggtgtagaaaaaactgcataggtgtagaaaaaagacactgcaattccactggctcaaggtggaaggagaataaagcctcggacactcccatgtgtctgcaagaacttcaatccttctttcatggtgtatttccaagtgtcctttcctcctgtttcactaaatatctgcactctcaccatgaactgaggcagcctgggatgcgaggtacctcctacctctggaccctatctagactgctgggttccactcttcccaatcaagacccaatgcaaatgtcacctgctccaggaagcctcccctaattctaggtcataatgtatcacttcacccctcgcactctcatccaatttcacttgtgtgattttctcatgtattttggatgtagctcaaacgtccccaagtcccacagcctgtgggtgcaaatgcagtcatgttagtcgtaatacctgaattattatcttggtatcctttttgccccgggaactccagggctgtgttcttgttgctggctccaaagctaacaataaaatcccttcacacaaatcgtcctttggcttcagacctcaaggtccgtgtcatctccgcaggaaccctcgtggggttggcgtgcccagtcccctccgctgcgcgtgcatcccgctccgctgacagccagtgctttggttctccagaggtgttaaatggcttgggaacataatttcaaaacggacagttggataaacaccagaataagcaccagaagatgacagcggaaccaaggctcgagatgggccggctgacaccactgggcgctgaacctggctggaagcttcctggcagcgacagcgaaaagggaacacctgtcgtgggcgcccttgtttcactgtcagtaagaagtagagcaactgctagacgcgctccacaaaaccctggacgcacttcatacacacccccaccccagcaagctcaagtaccctgtgaacctggacgcccaccacccccagggcaggcagcgaggagctcttcaaggggtaaagcgacccctgtggggccagcgcccgtcctctctcctgctgttcgcgggcacccgggcacgcggcgactcggctgaattagggcgtcctgcagctcccgaggcgaggaggcgcttggcctttccgttccgccctcagaagggagaggagaggtggtcctcgagtgggagtcagttcaggatgcgggctgtgccacgcgcggaggtccggggaccccaccgccgcctcctcgaggcccgccccgccccttacgacccgtccctgcaaccccccgcgtgggcttccggccgcggcgacccctgccccgcgctattgcgcgcgctcgttcgctgacagaggcttcgagggcggcagggcggggcttcggcgccgggggcggggccttcagcgggcgggcggggttttggcgccgcgaggtggcggcagcagagcggcgcagaagggagggggcggctggccgcgcggaaggagtgagtcacctgaccgctgccctcgccgcccgccgggcgctctcgcttcagtcagtcgggccgcgccgcgcctcagctctggtgagtggctcggccgtcccgccggcccttctccgggagggttggcgcggtcagggccgcgggcctgtgaggggaggccggcggacaggtccagtgaaggcgcgggcgggccgggggcggctctttctgggctgggcggggcgcggggggcacgtatcggggcccgcggggggcgccggcggccgggatcctggaagtggccgcgacgccggaaggggcgtcccgtcggcggccgaaccccctgcactgccggagctgttgtttacccgcgcgcgccgtactttacccggggcgggcgggggctgggggccgcggggtccctgccccacccccctccctgccctcgggcgccagcccggcccctcgcccgcggcccgcccgggctgtgacacatcagcaccgccctcgcggctggggccccgtattgtcctccgccgcctcccaccgcatgcccagcctcgcgtctactcagcccggtggctgtcgcgcgtggaatcgcgtaagaaaagccgagtttgtggctggggagagaaggccaccgtgctgagctggatttagcgaagactggttttggggaccggagagcccaggactccctttgttggagttttgcccacgcgttgtaattaagcctcgcacaatatggtgagagtgggcgttga

SEQ ID NO: 27264 - DNA, 2300 bp, Homo sapien
gtaaatttgtaagctaattagtttcttctaagtattatgttttctttagatgatatgcctgtactaatacagaaaaattatccatgaaatggatatgaatacaatggacatatttatcgtatagctttttgtacctgttagtaattcagaaaggttgtgttattttgaccattctttcagccagattgtaagtttcctgatggtgagaatctgtgtctttctgttttatctcctatggcactctgaatgtgccttggctgtgtttctttaataaactgttggttgctgaactgggtggtatgatatgcgttcattctagttctgtgattttgaaacttgggaatgtttaacagattgaaggagagaacatcgtgtgtggtaccttgtaagtgtgcactgagttgaaattcttttgattatttagctttctactttctgtttttatcattggtgtgattattgagaaggcagctggaattaagtaattctagttcatctcctaagatagacataaaacttgtcttgtgacttatttttacccataattggattagaattgaattgagcaaaatataatttggttttctagatgttaaatgtcttatatgtctaatactttgaatatcactcctctagaacaggttctttgttttatttaggatcagggacaggttagaaaatattcaaatattcataggataataaaaaactgccctgaagcaaacgtgaggaagaagaaatagtggtagccagaatcttggttgttaatgaccagtgtagaaacacagtgggcatgcagtgaaattggctggcagctggttccttctcagtacgggcacaatttagaaaatgttacattaatgcagctgaaattttgtgcagatcatgttatttgaaaaataaatgtaaacactttttgcagtgccttaggaaagtcatcgttcaaactaatatttttgtaataaactagttattcccagttttttttttcttttttttttttttgagatggagtatcactctgtcgctcaggctggagtgcagtggcgcgatctcgggtcactgcaacctccgcctcttgggttcaagcaattcttctgcctcagcctccgtagtagctggaattatggggcaccccccaccatgcccagctaatttttgtgttttagtagagatgggtttcaccatgttggccaggctggtctcgaactcctgacctcaagcaatccacccgccttggcttcccaaagtgctgagattacaggcgtgagccactgtgcctggcccctaattattcccagtttctttcaggtaaagtttttttcactttttaaatttatcatttttttagatcagatcagtcagtggacagttgcactctacttccccatccctcattaaagtggaattacactaaaaaaggttttcaattcctttgtagcctggacattagtaatagcctacctctaaggctgtagagtaaatagtatagtaagggaaatgtccctccctccccctacacaccttttttccagttatctcttctttttattgatttgtctgcctccaggaccctagggaggtgtttttgtcctaaggaggtgaactcctgagggtcctattgaagaaatagggcgacctatccacccaacttcctctttactgatatcttcacatgcttattgccttattcattttctaaagtgtgccagcgtctttcagaagtcagctaaattagtgcagttgctcatccatcagacagttttgttataaaatatgtggctataaaagattgaataaatttattaggttgtaatttcattaatgtgtattttatatttaaatattattttaaaaaatgtacagtggttatctgatcttggcccaggcctcttcaatttccagtgtacctgatgtctctttatcaactgtttttctgaggtgtatctcagcctggccttgggtactcccctaggtaagagtcataattcaggttaaaagaggtaagaaaaaaaaaagcttttggcttttgtaatcttgtttttttttttttctttcacattagcaaaagactgttgaagtagagagcattttgcccagctcactcggattctttgctggcatgccttcagtttcagttgtcatccagagaagtcaaaggaaatgctgcttggggatgagcatgtaattacgattaactttccctacttcgttgtctctttgtggtaaaagactgtcacaagtgctattcaaactataggtatttttttttagatttctaaaaagtatattttgtctct

SEQ ID NO: 27265 - DNA, 2300 bp, Homo sapien
atccaatcaactaagtcccaagtcctattcagtttaaactttccttcttaaaatgagaaaagggtgaccattttttcccctattgtctctacagagggacctacagaaggtcctttaaatgtagactagaagagtatcaaaatatagtaaaggtcaggctattcctgggaaatgtacagtatatatatgctgagtgacctcagtcttctgtttccaaacctgtaatcagcaaaacagaactgtgtatgtgtgtgtgtgtgtgtgtgtatgtgcacgcatgtgtgtacctgtgtcttttaaacccaagtagtcatgtggctttatctgttacttgaagtaaatgaatatgttctcaggaaatgaatgtctccctttaaagaagtcagatctcatgattcatgtgtgctggagacagaggtacagttaagaagatgcctggacatttgacatttcagtactgttctacgaactaggaggagtgcctccagggagcggaacctcagttttcaagcttcacagtgaaagcagacagtagtcatttaccagtgagaagtagtggagggtggatcagttacttgtggggaggagcactcaatatctaaattacctggccctgatttctttcactttgtaagctggcacaagggagcagccatgtgttatctaggacaactgagaaaagcatttgaaaatgagtgcccaaatgacattaagcaaactttttttaaaaagcgatgcaataaaaagggtattcagagagccactagtatctatcttctaaacctagacagtgattcatgtaaactcaacatctaaagtggctgagggaaataatcaggtatctagggcaaagataaaggtatatgtgtttcctgtattacgaaccttatataacaaatattttagtgagggatgttgtaaagattgctaccttcctcttttggaaagaattttgggtgaataatactattctaaaataagtcagagtacgaggaaagcttttgggatttcaatatgatgaaggtgaatttttgtttaagttggagacttctggaaaaagtgcaatgtgtttgttgggtctgagtgggtcgcctgtgctagaactcaggttaccgtgaatttttgacggagttataacacaaaacagcacaccacagtatatacaacttacaatgtggaacatgatgggctaccaggagggaagaggcatgaaggcatggaggatcaagatcagaaagttacaaccctcgggagtgtgtgtggctcttgcagtttagtgacaaatagaggacatcccccctcccctttatataatttcaaagcttggattccattccctgggacatttgtattagattaattcaaagtgcccagagtctcaagatggattagtgtaataggtttttttttttttttttctttttctgggtgccggttaggttcatctatttaccagtaaaattttagtgaggaaaccagatcgccttctacatgcacttagtagccttgttcactgaagattaaaacaaggcttttaaacctatgctttgaaaacttaaaaagaaaaaatttttgaattcatcactgagtactactaagagggggacaaggtttttggctacagggagaaacttgtgtacactttctgtgacatagctgataatttgaaagatgaaagtgaacctgacaaaactgttcaagttgaacaacctgaagcaatttaaggtccattcatcagtccatagattttttttaccaagtagttttagagagagagagacagagagggaaggaaggagaggaggaagagaaagagagagaagagatgaaagaaaatgtttgcttaccacggggacatttctctgatccaaatgtttttaatgtctcatatttgcttacataaatctatgcacattcattggcaacatggcactgtataataaactataaaatagtgggtgttataattcacaagataatctcatttcctttccaaggtccctaacgtttgtgtcctctttagaactgtggctctaaaacaaattgcaagacagtatactctgatgaagatatcacacaaaacaaaagatagctcatgagaaaaggaaatttctgaaaatggttcatattttgtggtggtgacattacaggaggtgtcctagccttctgaggctgtagcctatctgactagtctcatggatcaaatctattgtgatttttatcccccttaaggaaaatatttagtgatttgagaaggaatataaataggtcagtgtctccttctgttacagttgcctgct

SEQ ID NO: 27266 - DNA, 2300 bp, Homo sapien
gatttttacacacagagaaaaagaaaacattttttccctactcaaggtactgccatacaaaataatcaaaaggaaaaagtatcacttttaggtagccattttctacacctcaatcagattaaaggtctatttttcatcggtttacttagagtgaatttgcactgctgcatggtgttgttagtctttgttggataccataaggtgtctcccaagaacttaggaataatgaaaataaaattgttccctgagagctaaactatgagccaaacaaataataaataaaagtagagaatcacagttaccttaaatagacaaaagagctcccaggactgcaagacttgattgtaacctgcctgaatgtattagagtactaagaaagaatatagtctcaactgatgtctgcacagccatgggaagataagggaaaagaaagtctcagagcaatatgggcatgccatttatgcatggtcctggctagggagtaagagcatccttttgagtaggatatgtctagctcttacacatcagattaatctcccaaatccttgttgtgttctctttacatgatcaggaaggaaatctccaattgtgatctggcttcctgcaggggttaaggtaaacaaggcagaccctgagaagaggcgaaggcagaaagtatcagttggttgaagaaagatagtatcagttgttgaagaaagaatagaaagcatgggccaggccgggtggctcacacctataatcccagcactttggtaggctgaggcaggtggatcacgaggtcaggagatcgagaccatcctggccaatatggtgaaaccccgtctctactaaaaatacaaaaattagctgggcgtggtggcacgtgcctgtagttccagctactcgggaggctgaggcaggagaatcgcttgaacctgggaggcagagctggcagtgagcagagattgcaccactgcacttcagcctggcgacagagcatgactccatctcaaagaaaaaagaatagaaagcatgagtagtgattacagacataaatttcagtagcccactgaagaaatattctgtgatttaatgtcagtctttttaaagtcacaatttacagcaacctttttctcccttagaatttaaacatgcttaatcccgtttcatctcaaacaataaaataaaagagacatgccacctccactttttccaacacccctttcctgagttccagctaacactgtgaaagcaaggtgtatgtttcttaagtattcatttaagttcttgggtttatttacatattgtttctccctggcattaatcagagtattgtttgaattttccaacggtatttcagttacactctgttgattcaaaagaaggttgtttgtccaagcttgtccaagtcagtttcaagaggctcagccaccaaaagtttcatcaaagaggaagccaaggtcatcagtaaagcctcacgagaggtaggatcacaggggtgaagtggacactcacgggtcctgccatccttggcatcaggaaagtctccattctggaccacctttgtctgtctgaacaattcctctcagattttagagtctggaaatttcctgagtagcttaagagaagataagagtcaaagtttccaaactgtagaaataacccaaatgcatggctccttttatttccacaaatttggccagagacatgacaatttgggcaactttgtgcaatgttttacatttaatgatttttatgacccaaactctgctaggcagaatagtataagcatttgtaatccgtactgaaataatccatctggcataaaatccaaatttcaaaattggatgagattgtgtgttctgggcctaccaagatagttattacacacatgagaactcaaaatactaaagctactggtagaaacaattgctcttctccttgctgtaaacatgaaagtgagaagcagcaaagaacgatcaacaaattaacacccttttcatattttttgtgacagctacctggaacgggcaggaaagaaaaatgcagataagaaaattaaaaccacagactcctgggcagcgaacaagagccttctgatcctaattcgatctggagttaagaatgaaggggatttctgtagcagtttcttttgcatagcagagctccgacttttccagcaacagcgtgtccctggaagctacacaaagtcctctttgattgcctgtgatcaaagccacgaaggctctcctgcaacatcttagcttcagaaagccaggaaaatcagaatgctgagagtatattaataattcctaaacata

SEQ ID NO: 27267 - DNA, 2300 bp, Homo sapien
ggaaaactagatatacgtaagcaccagcaatggactacaggcagacataaaaatttaaccaaagctaaaaacatagacttggtaaaaccagaatttaaacccagtttgttcaaaagctgacttaattctagaccttgggtcttcaaactttagccactcactatctgctatgtattggtctttgatgtacccagagaaaatagatgactaaaaatgcttaccacagacctttaggtttaaaaataaaccctctaacagatttacattcattctcactttaagaaatacttactaatcccttttaaaccactgattctttgagttttgaagcatcacttcctgaagaacccctttccaaactcttaaatgggattacactactttttttctttacttccataacaccattttgtaaagctcatcatactttaatgccaatgagttccagagtggcagcaatcatatccctctgtgtctccagagattggcacaatacctcacacaacgtgggctctcaaaaaatatgcataaataaatgaatagtttgactttgcctcttttctgaagcaggtcatgctactgtttttcttaatttttatttgcacaggaagggtctcgctatgtttccaaggctggcctcgaactcctggttttaggtcatcttccctcctcaacatcaccaaagtgctccaatgtaagccagcacacccagccttgccgctgtttgatattctctggtcttaaaaatgctccccgaatgagacaaaatttactcttctacaatttccctctgacaatcttatttttcttagctcttctcacatatctaacactgaataaggctactttcttttaacacaagaattcttcaaatgtctgaagataaccagcatgtgctcctaattcctcttggtttcctcaatctttccacgcaaaaatgcattcctaaatccctatcagtccctcttcttatctgcagacatgttctgctttgttaactctcatcccaaagtgtccagaaccaagcctactacttgagatatgaactgactagctttccacagtggagttctaacctcccttggagaatgaacatgcattttccccaccatagggtttttagtgaaaagtatagtgtctgacaccacaaacaaaatactcagtaggtatttgttgaataatgaatgaattaattaattaatacacgaatggactttaagatatattagattccttttgcaattgtttcccactctaggctcatataacaactgtggacatacttttcatatggatttggtcagttcttcaaaatctatttaccagttaaaaaaaagagatgttaatatagacctagcaaacatatatatagaacattccccacaaaactcgaaggaaattaatccaacataatcaaatgctgatttccctagggaagtgtccttgtccttctacagagaaacagtctccaaacctacattgctaaaatagcctatctttcagtattcagacctgacagttaaaagaaatgaagaaaagtagcggcgctggaggctgcttctatctcagtggcatgtgtaaatggaagcaatttgcaagagattatcttgggtccaaataggaatgaagccactataatcttggagtactgaagctttctcattcctctcccccttcccctgttcatcatcctcgtcagagtcaaaacaggagccccggtattttccaaaatattggaggtgattttccattaaatgatgggacgagtcatagctggctgtctataagaccccctaacaggtgcacacggacattaccaagaaggcttccttgccactcacagcggacagcagaggctttctctgctcggaccaatagtttagatttgatctgtcttgagaatgcaacactcgatcgacttcccagcagcagagcgcaaagttgagggagagaaaaaagagcgtgtgtgtgtgtgtgtgtgtctgtgtgtgtgtctgtgtgtctgtgtgtgtgtgtgcgcgcgcgcgcgcgagtatcttgatcagtggggttggggcgggcagtaaataaagggtggggccagcgaggggaggaggaaagcaaagattcagagaagccggaacgtggctccgctcccagttaacctgctggagctcatcaggcttgctcagagcccctgcaccaactcaccctgtaccctctctccttcttcgttagtcttctttcccccttttccctcctctgtctgtgcctatcccccgacttttgcatctgaccaaaggacgaatgagggagacgtt

SEQ ID NO: 27268 - DNA, 2300 bp, Homo sapien
gacatttagatattgggggaattaatttgttaaatccttaaattttctttaattggttatgtaagtatgatgtgactatctaacagaatgtagttggtttcatgtagaaaaataatttccttgtttaatacaagatatgtaaatattcattacaccaaataaaaccaaatgaaatgtatgctagacatttatgaataaatcaatgaaagaaggagagactattggaaaaaaaatcatccattgttgtaattttgaatacaaatgttggaagccaatcaatgccaacctttagaacacttatattccatttttgtcttattatcatttcattgaatcatatttggaactttaaatgttcagtttggatgattattctggttttttttttttttctttttgatgtgctgtttgaaaagcgtgtgtgtgtgtgtgtgtgtgtgtgcaagcgcacctctgttagttgtgtgagaaatgactttcaggttgaactgtaggtatataaagcatgcactggtgaatcgattcttgtttctgggcttatgagtagctagtgtgacatttgaaaaatgaccttaatgagagtttttcttttctatgccctatcgttgtatgtgacaccacagcccaaggtgacggtgtcttcacttcaatgccatcttttgtcccagaggctatttttgctttagttaccccaactgacattggaatagacctggtgatgttttattcatgaaagcagatcttgtgaatatagctcccaatacaccagagagacaaaaatatcactacgattgcacctaaactaatctgtagttatgtaacaaattgacacataaattaaattttcactgctaatgcctgcttaactctgtaattatactttagtttggaattctactgaagtaattaggttagctgagatttgctcatcaaagatcactgaaagctagaaagtatatggacctctgttcttaagccacatgcttcctgctcaggggagattttaaagctatgtccataactctatgcctattcttttacattttactgaatttgatcagctgctggatactgttttttttttttttttcttgagaatgtatttatcccgttgtggacatgttcctgtctccaattcccccgcacttttcctttgctctttattgaggagtcatccttgtgctgaagaactttctgttttttatatgattgatctttaggtggtaggggagccctcactgaaatgtggtttaaaaaaaaatcacactctttcatcttcggtttcatcttctggaagaaagaagaattgagctattttaccaactgttgtgaactattcaaatttcctctggggagaaaaaccagttgctttcaaagctctgaggagtatcaaaaaaaatgctcctaggctaaatacagtaaataaaaggcaatgtggactttcaaaagactgcttcgggggcctacaagaaagttttagctggtgtgagaatcactgaaaccgaaacctgtgggaaaaaacccaaaaaaacaaaaccagatgaaatcagaaagagtatctataaatttagcctaagtgcagggatacctacattcattgtcctgatgaaataaaacactgaaagaaaatatgggtaatctcttccagagtttgtgaccttgcaagttaaaaataggatttactgatttatgcattagatttattaatatggacttgttcttaacatttgctctttaatcggtctttataggtcattattttttacaacaggctcctaccttatcttctggattctggattcaccactttgaatctattttgtgagcatgcgctctctctctctcgctctctgtctctctctctctcacacacacacacacacacaatgaaaaagtaactgaagacattgtttaagcctggcaggggacttcaatcatcaccttctaagtgttgtcctcgtgtagactttttcctcattggatcgggtttgttctgtgtaaccaacagtgtgtaacaaaagtgatggtgtgctcaagagattagatattaaaagactgttctttccttcctgggtgtactcttgttccctccctccctccccacctccatctttctctctctctctcactgcttcctctgggggaagtcagctactacctagtgaagacactcaggtagcctcctgtcaagtcacagagatctcttaacaaccatctgagagagcttggaagcagaccattgaaccccagacaagctttgcgatgagacggcaaccccagcttccggcttggctacagcc

SEQ ID NO: 27269 - DNA, 2300 bp, Homo sapien
aatcacatctcactgcagttttgatctcccaggctcaagcgatcctcccacctcagccttccgagtagctgggattgcaggcgtttgccaccacatccagctaatttttagttttttgtagaaacatggtgtcactatttgcctaggctggtctcaaattcctgggctcaaaaaatcctcctgcctcagcctctcagagtgttgggattatagatgtgaaccactgtacccagcctcagattatttttatatttaggaggtatctccatatcttaaacaaacatgtgttctcacttataatacagataatatgctctagctgatgagaaagcaaataattggaaaaaaacactggaaacttccaggacaaaatgaacataggaataaaactgaagtagaatgaggaagaggaactagaacaaggaagaggacccagaagtaacaaatcagagtaatgctggaaaatcctgtcagggagggaatggttaagcctatgtctcagtaaccatgaacaaagggccaaagaaacccttcatccaatccggtgttgggaaactgttaacgacacagaagtcatctgtttgctcaatgattcacattccttagagagggagttctcagaccaatcattttgaaaactcagtgattttcacattcattaattcagtgagtggactctttaaatctggatgtcattggaccagccattaaatctttggccggtaattgactgaaatggaggacattttgcaaattgtaatgcctcccacctggagtgtggttggcgtgcttgctttggagacattttcatccttagaatagatcccttgccagtgggatgtaaaagaaaaaggaaaagggtccacttctcccacatgaagccccccactgcctctagggagtggcaagaaagcggcagtcaaaagctacaacttgactcgaattttgaaataatctcagttgaatttttcttcctttgaaaaccatttgaaaaactatagaaaggatagtgttaaatttctactgggtttagtcccacttatatgaaaagattcgaaaaagcatctttccttcctatttttgaatcggaccagacagaggaggtaagcatagtgagttacagggctgggcttgttcctggatcagttaccacatggcttgtctcagtcaaacactttgcacacctcccgttcatctggcaaataagggtcttaagtttgatggccttgaagataaacttccagcactaaattgttctctagcgtctaaattttaagtgactgcatagcttatttcaagggccacttttatattgttccataaaaatgaaaggtatgtgtttggctttaataaatgtgatctatttcaagctgccattgaagaaacattgaatgaaagtttccatattaaacattacttcaatagagagagaggtgttccttaacagctaatgtaataattaacagttcattcaaattaattataaggagtacttctctattttcttcttttctggatcttaagaataaactatgaaatgttaatttcttgcttagggctcctgctaagtatcaacagttttcgtgtgtcttgaaactaatacctaaatatttctccctattgaggcatctttattaaagccagaattgattaccatcttaaggaaaagtggcttacttacactagaataaagtaataaagtccaaaatgttttttaattactccccaataaacttacaacattttggcattgtcttcagctgtgtcttgacacatgtatttatacttttatatcagagtgatttttacacaggaagtttcagctctgtaattagcaatccacaatagaaactttgacacttaattacagcattgctaaggcaataataatatgagaaatcctaaacttgaatgcagtatttcttgacacacccctagctaccttcttattggctgggaaacaattatatatgactagtaaataatccatactgaaatgaatgtgtatgaaaaaaggcaacatgcatttacaacaggtacttctagttaggccaagttcagtcacagctactgatttggactaaaacgttatgggcagcagccaaggagaacatcatcaaagacttctctagactcaaaaggcttccacgttctacatcttgagcatcttctaccactccgaattgaaccagtcttcaaagtaaaggcaatggcattttatcccttgcaaattgctgggctggttcttgggttccttggcatggtggggactcttgccacaacccttctgcctcagtgga

SEQ ID NO: 27270 - DNA, 2300 bp, Homo sapien
acagtgcattaatttttgaaaatataaagtactctatgttatttatgttatttaacaacaatataccttataatcattggatccctataccaatattcaatgcagataatatatttataatttaagatagtactataaattcaagcaaatctatatgttataaatattatgtatataacagccaggtttgaaaaattttctgtagctaaatatatatttctacttctgagaaataataaataatattgtctaatgttctgggggcatgtattacatgctaggacctctactgcttatatgaattgttattaaatcttttatgagactgataatgttattagttcaattcaaagatgaggctatctcagaacaattcattgattactcaatagaatcaggagatttataaaaaggctgcctggactcatagctcaacactctttctctcaaggaaagtgaattattttttcagcaatgtctagtttaaacacgaatttttatatgttaaaatgacacacttaactaccatgagttgggaaaacttttagttgtcttttttttttgtaaatttttttagttgagacagagtctcactctgtcacccaggccagaatgcagtggtgcaatcttggctcactgcaacctccactgcctgggttcaagcgattctcctgcctcagcctcctgtgtagctgggattacaggcatgtgccaccacccccagcaattccttttttccatattggtgattctcttatacccaagtgctcattcatcctaggcaattttgctttttcaggtcaaaacattcgtaaaaggaaaaatacagcaaaaataactgagcaccttggagaagaaatccataggccccatcttctaaataccagtctctaatcaactattttttcttttacctagaaagccctttaaatgtcccaaactcaatttattatttctctcctcttttctctaaaacagaataacacatctagtttttattatggcatcacttcgagtatctgaaatctttctacaactttccacctttactatctgctcatctcttatctacataattggaaaagacttctagacttgtgtcattgtctgcagagtcttttcccaacagctgtcatctatacttttatcttagttgtttctaaaacgcaagtcaagtcccatcacggcctgcccataagctcggtaaggacatcccattgcctataaggaaagtccaaatgccttcgcatacgctaactgacgggaaggaaaaattatcttacaattttcaaggtaaattttatcagacagtttaacatcagtgtataaccagtataataacaattataaagttaatgtccccaaattagcgtaattaacatggcacaggcctctttaatattctgaaagagatacattgacaactacaaaatgattcaattggtggcaaattgcatgcaatagaaagttttataatgtatttgcatggaaaaaaatcatgtgatggaaaggacaggggaggcacaggaagtgatgttaagtattcacattgtagctagttggttttatgacttgaagcaaattttagaatccaatgtatctcactgtaattatctattattttccaattgtcagatagaataataggccataaggtccgatgggattataatagggtataatattcattgtgttagtgaatttggaacattaaatgtgttgcaacaatgaaaggcaatatatatagtaaaaagaggaccaacttttgaaagagtcaaatgagagaatcattccatacacacccccaagcagcgaatttagaaaagttcattagcccctcagactcaatctcttctcattcatataatgaaggtaggattactgcaggaaagaagtatataaagtaactagcccaatgctagagtgaagaaatagtggatcacttctctttgtataatattcctccttaaaattccttggagttgtgtgtaaaatatgcacatcaataaaataagcaaaaatagagaataaaatattaaaataataatttttccacatcaggtattcattgtgaatcttaccaacaggttattttatgattaattatatagccctgggaaatggatcttcaactgaattaaggaaaagaggtaatttcataattttaccattaatacagaaagcaaaaacattagtatgcttatatctttttttcgtagtaagatttagataactgttttaggatatgcatttaaaatattttccatttatttttctaatccattggtccaaactttaat

SEQ ID NO: 27271 - DNA, 2300 bp, Homo sapien
gctttacttcattttcttttcttcttcacatcataaaaatgatcctttctttgaaattttactttctctctgcttcatcgggctaccttaaatccaaatatgggagaaaatgttttctgctcacttcttaaactttgaaagtttaaaatctcaacttttaaaatcttattttcccaagattaatctaagtctccctccaccacaaatctgtaactgatagaaacttgatgaagaaaatgtcatatattttcttttcttttttttttttttttttgagacagagtcttgctctgtcacccaggctggagtgcagtggcgcgatctcggctcactgcaagatctgcctcctgggttcatgccattctcctgcctcagcctcccgagtagctgggactgcaggcgcccgccaccatgccaggctaattttttgtatttttagtagagacggggtttcaccgtgttagccaggatggtctcgatctcttgacctcttgatctgcccgtctcggcctcccaaagtgctgggattacaggcgtgagccaccgccccggccaaatgctgcatattttctgcatcagcctaagggacaccctgaagtttggcacctcacaggtcaacaaatgagaatatttctgtaaatattaagttttaactttttataaggtttataacgtctgtttaacaaaattataacaactcatactactgtgcgtctgtcctgcctcttttttagaagacagtctacttgatcctccttttgccctttctaccatatagtttttgttttaataatatccacaaatgactcagattttttgaaccatgaaactctcaaagtttaatcagtgagcagaaacgattttctcccatatttggatttaaggtagtccaatgaaacagagagaaagtaaaactgtaaagagaaaatcattttttatgatgttaagaagaaaagaaaatgaagtggcagcttaaactttggaaagatcagacagagagcttaaggtgatctccagaagaaaattgctagtcgaattttctcagataaacatttatgcttagtatagcactactgttagagcatcattattttgagaagaaagttcaaattgtcttgcgtttaggggtttctatgtcctactgcagacataatattaaaaggtaggaaaacatatttggttaatacctaatataatacagtttggtaaatatagttcccttgtcttgtaaatatcttattttgaaatatcagccatttgtataggcccaagggtcttgtgtcatcttcagaattctagttccttcagcccaggaattcaaagcagcaagaataacaccacaaaataagctcataagcttattttaatgctatagtgctggatacataagataatcatctggtgatttttattttggcaaaaaatgtttttataagtgaagattatcagaaaagtgtcaatgagtattttttctggcttaaagaactccaatatgttttcagtgccaaggagaaggacagccttgtgtatttaattactttagcttattttgtcctctggcatgatctgttccctgatttcaccacagtagagcttgctttgaagttgtagaaaaattaaatcaatcacttggatcacatgtgtcccaaagaatgtggcttcccaggtaaaagcaatctttcaatcccctactctcgtttcactttggcatttcaacagcgttgcagaattcttcggcagataatttattttatcccttggtcccagcagctcttattaagagtttcagaattgcctgtacaaggtgcacctttcacattacaagggatcggctcatttcttgatgcttatgcaaccacttataactatgcctacaggtaaacatactgctgtcttcttggaagaccgagaagtataaagaatgtttatgtgcaggtctagctgttccaagtacccaagtgttggtttagacacacctggattaccatccaccttttattggctgagaaagttgccacacctgatttgtaagtttacctgttgcagccaatagcagggccatctcagccagccagcactggatactatctggccagaagtagcaaagcagctcttatttgaaaaaccactgggttccgagttcattactacaggaaaaactgttctcttctgtggcacagagaaccctgcttcaaagcagaagtagcagttccggagtccagctggctaaaactcatcccagaggataatggcaacccatgccttagaaatcgctgggctgtttcttggtggtgttggaa

SEQ ID NO: 27272 - DNA, 2300 bp, Homo sapien
aaactcatggtggtgctctaaagaaattaaacccaaggtcgtactctccagaatgggttaagaacgccaaagcaagaaaatagattactcttgtataacgttttacagtttattttaacttttaatgacatctcaatatattcctgaaatgtcactgaaaagtagatactattaatatttccataaaattatactgatagtgactggggagcagagcaattatgcaaattacccaattcacacggttattggttattaaatgatagtatcaatgcatctctatgtaatgccatattggatagagaaaaactgtttggggagtcaaggagccttttttcagatgtttttcgtaatacctattactgcaactttctaaagctcaagttttctcgtatgagtacttgaaatagtaagatctactgtatagaattgtgaggacaaagtgaatggcacatgtgggcacccacagcacaaggttcttcagagtaggcattccatgaatgccagtttcctcttattccacaccccttctcttcatggaaaaccatccatgtatacatagaacatgtagtatatacatctatccacacatacacacaagcgtattgatgtactaatgatacagatgttgggctcttgtttatattagagaagagcagacataaaaaggatcaacatacaatttcataagcattcagctaaatatgactgtacctattactaacgccattcagctgatgcaaccaggattttacaagaagactctagcagctgtatacacagagtattaggtgatgtccgaagtatacaaagtatccggttatacaaacagtattaggtgatgagggcctggggttgggggttggagtgagtggggctttctcaaatacatcaggtacaaatcgtctgacctaaaatactgagataaattcaacatgttagtacaggacctccgggattataccattttatttttatatttctcccccagtagtaaaatagtctagtgttgtctcattgagaaaccaactttctgtttcagagatttcactcctccaggacagagggagactggataagcacaagtatgtccctcaaacaccaaaatagaagaaagtgttatgatttaaattgactagccaaaaggaattggaacttagagccagcagataatttaaaatcccattaaaatagctactggagccactgggtatgtcagtatgagaaaaatatagagggatagttgaaactaactaaaatcatacattttttaaaacaattttaccagaaatacatattctcaaatgacctttaaagtactaaaacttaggaaaacaataatttatcctgatgcttttccctatgtaaagcagtttagaagctcctttttggaaattgacatcaaggccaatgtagaaagcaaaataaattcatgtcataatcagtgtattttttaaccaagaacaatattttttcagttggaatatgagaaaccatgcaatacataaccttgaaataatcatgaaaaatgtcaagatgcctgactttctttaagaggtctacttctctgcttttgttcacagtaggatacataattttaacttggcccaacttcattatctatattcaagaatatcttaaacataagccaaggtttcagcttcactcagcttatttatttattgaaatgactaaaatgagcacatatttttgaataaagatattttggtagaaagtcaagtctgaatagaattctgaaataaagcaaatcacaacttagaaaaataaattctaaccaagcaaaacatattgaaattgtccatatttctgtcatatagtttgcaaggattttcattttctcttatacttgttccaagttactcacttctggcaatttccaagaagaatagaatttttcttcaaaaagatgtaagttctcactgtttcaaagaagttgctacaactttcaaagacaattctaagagaggaatcttaagaatgtttgtgcaatggtggttataattggaataagcacataggctttaaaatgtgtctgttttgtttggataatttaagaaggatagatcctattaaaactcagtcgcattggtttatagatagacgtaatcaatggatggcattgcaaggagcatccagttttatggagggtggaagcctcacttccttggctataataaagagttctgatgcatcttcatacaacaagaggaagagtctgcacgcagaagcaccaccttctagggataaataaagggtcaagctaaggaagggcagaacaa

SEQ ID NO: 27273 - DNA, 2300 bp, Homo sapien
gaaggagagagagagaaaagatttcaatatcacgttttccctgacatatcaagatagtgaatttttctttctatactaatactttgcctgtgtatgtagagtacgtagagtattttattagttccagaatccacttttgaactgttaaggctactctagttttgttctgctttttctgcctttcagatggacacatttattagcatttgggagttgttcattagcatttgtacaaagtgcacaaataactcctaataaaaagtgttaacccaattaggaatgggtggagggactgttaattggaactgacttactcccaagttattttagtgtttattcccagacatagggagctggtctagaaaggcaagaacttttggatattagtaagttttttgttttcttttttttgagcagaatcaacctgtagtaagaaaagaaaaatatttctcattttaaaggtgttaaaagctgccattataaggaatcccatgtgttgggggtggtgcatactttttggtgaatttaataggtgtccattcataaagcacagcttattttacttcagtgaatcagagtgatggtttaagtattgcacaagggcacttcatgtgatgcatgccacactttggattctgcatgggagagataatcataaaacaaagtaactaagtgctctgaaacagtgtgctttggaatgaaggaagttaattttcaggtagttaagaggctctcttttcgataaccattgtgaatgccatttcccttagttaaaccaaataaaatgtcaaattcaaaagaagaagaatagacacagataagaagcctcttccccccattaatctaaacatggattaccaatattctttctctttcttgggctaggaagtgaaatatacttcaaatgtatgaagatcagtaaggcatagaattccccagttgaacactattcagtgtgaatattgttaggaaaagtaaataaggctttgttaggcttttatatcttagtataaataagcttaatagtttcttttctgagacaagttaaagttgaatttacttttatatttgcaaggtatttgcaacttgactctgaataagaaaaccataattaaagcttcaattttgcttctatcttactgagaaattaggggaaagttaaagctctctgagaggtaatttttccatgtatgggttgaacaggggatgtttaaagacccatataactctaatacttcaagttaaaagcttcagaaaaatgttaacaattcctcaaagtttaagtataaattaataattgcagctaagaatctgtccttttatccagaaaaaaaaattgaaacataaaacaaaataaaatttatgagttgatttagagcataaccatagaatagtgcttgctacaagataggttcatcagaaaatatctgaaaaacttcaatttaaagtcttactaaaaagtttgtgtttattgtttcctaagtgagcattgtctaaagtagcctcttgttaaggaagatgcctgatatggacacccaacataatgctgcactcctcagttctgatcctgagctcttaaggtactagtaaaaggtttaactgacagattgctgaggctactgaatacagttagtatttggagaaatcctccgtttctggtaacaaataatatgcttgtgttaaaaagaaggacaatctattttgagtagtaaccactgatgctcctgataacttaagggaagtaaagaaagaattttgtgtaattccatttggtacaataaggactcactgtactcaaataataagaggcaagatactcataaatgtgatgacatataacattgaaggtcaaaccacagtgaattccaggaaaaaaaaaaactgagtggcttccttctaagtgttccagagtgactaaagtacaagtaagtatatgaagatgtgataaattaaacaataacctagggaagcattcttataataaaaagtgagcaaggagaagggagtgtcgagacagtggacacacccaggtctaagagcatatataacttggagtccagactatgacattcaaactcagagaatctttccactataactcagctgaactcacatctcccgtcaacatgtcctacaactgctgctctggaaacttctcctcccgctcctgtggtgactacctgcgctacccagcatcctcacgtggcttttcctaccccagcaatctggtctacagcactgacctctgctctcccagcacctgccagctgggttcctctctctataggggctgtcaggag

SEQ ID NO: 27274 - DNA, 2300 bp, Homo sapien
tgctcagacatcttgggcagggcatgttaggcagaggcagagacagatgtaacctaatgaagggtaagcttgagggtacttctcttgcctgacattttccaaagctctgttatcactcctggggagactgggaggaacccgctgctccagctatgctgctgtggcctaggagtccctcgtggcatcctcaggctgtgggtgtatccggagagctgcctgcactacttctaatatatctagtccccagggtcaaccttataaaccttagaaagttttccttttttttttttttttttttttttgaaacagagtctcactctgtcgcccaggctggagtgcagtggcgccatctcggctcactgcaagctctgtctccggggttcacgccattctccagcctcagcctcccgagtagctgggactacaggcgcccgccaccacatccagctaattttttgtatttttagtaaagacagggtttcaccgtgttagccaggatggtctctatctcctgacattgtgatccgcccgcctcggcctcccaaagtgttgggattacaggcgtgagccacagcccccggcccatagttttccttttaagaagaaggattggaacgaggatactgctctgccacaaactagaagacccctacaaccctggatccacagctgtttgcagccgatcctcatgcaaattgccaacagatacaggtgggaggtgaaccagggacatctggacaagaggcgcacaatctcaggcttgaagcactgctgaaatgaaatgacagagggtgttacagctgtggcgttgctcacaacaaatggcaatgttaaaaaaaaaaaacttttctgtgtcataaaaaataattcaagtatttttgatgtactatttctaaaagaaacaccaagttttacttccatttgttctacagaaaatcatgtggacaaaaccattgtcatgtgtagagatgatcaaagaccgactatgcaaccaaaaaatgtagaaaaagattatagatgaggatgatgataaaggtatattattgtcttgattttgtgacatcttgggttttgttaactatggaagtttttattctaagttaatatccatgtttatatctattattatattcctaatattgtgtttttaatgaggatctccaaattatacttttcaacaccacaaaacctaaatccacctctttaaagagggctgggacagagtcacgaaaaacatagaagctggtgttaccccgcaaatgctcagaaggcagtcaacattttgaggtgggggtttagaggtgttgtagacaggtaggctccagaacacttacaaatatgaatgcatcatacaaaagtcatcaaataagtttatttgaaagcattttgatttgcttttaggatggagtcctgagcatccttctgctattgtgactactctgacttgtttcctacctcatctcagcagtgtcttctactttcctttttttcacatgggtccttattgttgtatttgtatttatttattttttgcttttgttttgatttcttttttctaaatactaattttttaaaaaaatttgttcaagatgatatctatgtctagttatctctcaattcctttggcttacttttatataggccctcgagactggacttacaagcactgattatagtaaataacagatggcaaactattttggagagtgtgaacaataagatttctgcctctaggccactgacaaaaaaagatgaatacattgctatccccacccaagacagaaagaatttcccagccaaaacaggagcagatgtataaatcatgggcagagaaaataagaggggttttcctggacataatggagtagggactaatcacatactgtcatagcatttgtaacataaatgcatttcattgacgcagagctgtaaaaacaaaaggagttcttccataaatataagatgaagggtgttagttaactgcaatgacaaagaagattactaagttgcttatatgaaatgtgggagcttaaatgtgtgaaggatgaccctgtaaggtgccacacccacggctgaacgtatataaatggtcctgtccagatgtggcatgcaaactcagaatcttctcagtgtaactcagctgaactcacatctcccatcaacatgtcctacaactgctgctctggaaacttctcctcccgctcctgtggtggctacctgcactacccagcctcctcctgtggcttttcctaccccagcaaccaggtctacagcactgacctctgctctcccagcacgtg

SEQ ID NO: 27275 - DNA, 2300 bp, Homo sapien
cttgttggaacttgcgttcagccttacaacatctcccagaatagccagtaagttgctcatgttatgctattcatggcccttgcattgatgtcaaagtcatatgcttcattcaaataatatttttgaatgccaactaaatatgagactttgttttgacactcagcaggtcagagaaacaccgcattgtaaaaaaaaaaaaagtgtgacttgaacagaaagtcattatgtttagggaaataaacaggcacacaaagagaggtatcacatgttctcactcataagtgggagataaaaaagttaatcttatgaatgtagagaaaagagtgatagatatcagatgctggaatgggtgtgtgggtgcaggagagataaaagttggatgaaaggtataagttctattgcagagtgactatagttaacaacaatatactgtatatttcaaagtagctggaagagagagcttgatttattcccaacataaagaaatgataaatatttaaagtgatggatatttcaattactctaccttgaacattatacattctatgcatgcaattaaatatcatatgtatctaataagtatgtaaaatatgtatcaataaaaaatttaaataaaataaaaattttaaaatgtgtcattcggttactcataaatctcaaaaaaatcttagtagtatgattatagtcatataaaactgatacctttctggagttccaagtttcaagatataggtacatctggatgaggcttaatcaggtatgaggtaagccttgggcatttctaactctatgggctgagctgagggactcactggtcaactctccctacagagctactccttcttttctatatttttcacaattgtcccttacatttagagaatttcgtgttaatctaagttgcacaaatatttttttaaatttcagataatttgaagagttgaaaaatgttttaaacaagaaacaccataatcaatatcttagaagatctagttgatttctcaggaaaagataactagaaagcggttaaaacaaagcacaacaaaaaacatgggcacagaataggcaaagacaagggcaaatattgactatggagatctaaatggaaagaatgaatgttgatttgagtaaataggttgtagccagaacattttacctacttcaaacttttacctggttatagtaatgaattgtggaggaaaagaagttgggtgaaatttgaagtgagatcagcaaaagatgcaagagggatgaattaatgacaaaaggtagagaaagagaaacaattctgtatgaaggcagattataatcttcattttttggtaacagtgaggttagaacatataatggagaagggacttgagatataaatagaaaactctggaaagaccagatgagatgggcttttgatccctgtaagagtctctccacttatgactacaattgtgctatgttcttaaaacaaaacaaatattttgtatgctgttgtgcaaagcccaaaataaatataacaattgtgcatgatcaaagttttaaaagtctacaaattaggtgacatttgtttctttcaggtacatacacagatgaatcaaatctttcttgcttctcactctacaaaatatgtgtgttttatgaagaaactgatgaaagtaagagtcttgaccttggctatttcttgaaattttgtggaatcaactataaccacgtccaaaaatgctagtgatgagaatatatttgaatagaaattcaagaatttttaatgtgactgatgttaagtgactggtaataaagaattctatttaaggtttggtatgttttagactttgaagaagcagcaatcccttctaataaaattaaagcagcaagctcagggacaacctaactaggtagccaaacaagctcaggcaatcttactgagtgttgtcaggggacaatagattaacgagctgcctcaggcaagtataattcatggaatgacacaaaaagaggggcacatgtttatcacatgctctgaccagggtatataaacctcctatacatgctggcattcacactcaggatcttgcctgaacaacaaaccaactcaccactcctgacaccatgagtcactacggcagctactacggaggcctgggctacagctgtggaggcttcggtggcctgggctatggctatggctgtggatgtggcagcttctgcagacggggttctggctgtggctatggaggctacggatatggctctggctttggaagctacggatatggctctggctttggaggctacggatatggctctgg

SEQ ID NO: 27276 - DNA, 2300 bp, Homo sapien
tggtctataaatataagaaaaatatcaccaacttgtatacttaagatttaagtatttttaaatatgccttaaacaacagcaacaaaaagcaaatgaaatgataggttatttgttcctctaaagaaagaaagctatttgagctaatttctcttttaaattcttattgttggatacattcgtagtattgttcatttctatgagatgtaagatttttacctgtaagaactagaattcattcatctattcaacacttatatattgagtttctattgcatgctggtcattgaactgcagccagcaaatctatctggagaaatgcacaatttcaaaattgcttataaactcatcaaaagcttaacagtatattcaaagtaataaaaattaaacaagaaattatatatttaagcttaaagttaagggcatatgtgggtggggtttggggtcagccttgggtctaggtgactaaattcttagagtcagctgaggtactctttgtctttaattattatttccttcatcctgtctttttatattatacatatttttaggggattcctaagacattcacaatgctaacagtctcttactgaattccccagggtctttggcgatggcatctattaacatctaacactttaataaatacctaacatcttagtaaagcttagttagctattttcttttaggaaaaaaaagaaacacacaataggtaaaggtaacataaaggcaaaaatatctgaaaaatcgaagattttatttatatatatatatgaatttaagtaagtattaaatgaaaatggatgggaggcaaaaagaattgcatatatttcaccatctcacctagtcccagaccctaatgggaactgaaagaatatattgaaaagaggaggccgggcgctgtggctcatgcctgtaatcccagcactgtgggaggccgagacgggtggatcacgaggtcaggagatcgagaccatccgggctaacacggtgaaaccccgtctctactaaaaatacaaaaaaaaattagccgggcgtggtggcgggtgcctgtagtcccagctaatccggaggctgaggccggagaatggcgtgaacccgggtggtggagcttgcagtgagccgagacagcgccactgcactccagcctgggcgaaagagcgagattctgtctcagaaaaaaaaaaaaaaagaaaagaaaagaggataattgtgtggatcaggaaaaaggaatgaatgggaggagggcaatacaatctgtatttttggtagcaccttggatgtctaatatgccagtaagggagtcgggatgtgaaaacaattttgaacagtttgtaaagctgcttaggaaatagatttttgattactgtgatttgactttaatgtttgagcaatatactgttgtgttgttaaatcaaaatggtttttattttttaaacgagtaaaaccaaaaaaagagaatattggttatgatggccaatgttctagagtaatagaagaatgatggctttattttaacttttttaaccccatgaaattctttactgttaggcatagcaggtgagcagatggctccagtctttcaaatgtttgcttctctttaaaaagggacctcacctgaggtaatagatacctctggaagaatataataaatttcagagcattgaatttaaccaaagtctgttatttaatcataaatgagtaaaacaattcaaggaaagccagagatgaagcaatatttaatttcaaaacatagcattaccaactatgtaatgcaatatgcctacgaagaagtctatttaaggtctggtatgcacagactttgaagctacagcaatttcttctcataaaagtgatgcaatatgttaaagggacagcatgagaagacagcaatgcaagctcaaacactttaatgagtttgagggcctcttcagatgtcaggattgggtcaggtaagtgtaacatacacaactacactaaaataggcagcaagtgttttgttacgtgatgtgtcagggtatataagcatgcctgcacagatgtcaacattcacactcaggaccttgccttgagcagcaaaccaaactcactacccctgacaccatgagctactacggcagctactatggaggcctgggctatggctgtggaggctttggtggcctgggctatggctatggctgtggatgtggcagcttccgcagactgggttctggctgtggctatggaggctacggatatggctctggctttggaggctatggatatggctctggcttcggaggctacggatatggctgcta

SEQ ID NO: 27277 - DNA, 2300 bp, Homo sapien
ggtatgtgggacaaatcacaggcactgttagattcacattccacactaattagcattgaaaccatctaaaatattccttgtaaccaatacatccaagacaactttgctgtttctcaggaatgttgaatataatgaaataatgtacctttaataagagatccatctcctattttgatgactcgtttatttcagatgtcaaatttaaactacattaccagcaaccaagagtaacccacatggcttccacttgttgttgttgttgttgttgttgttgtgagacagagactagctctgttgcctggctggagtgcagtggcacaatctcactgcaacctccacctcctggtttcaagtgattctcctggattctctgcctcagccttatgaatagctggtgcgtgccaccacgcccagctaatttttgtatttttagtagagatggggtttcgccatgttggccaggatggtcttgatctcctgacctcaagatccgcccgcctcggcctcccaaagcctggggttatggacgtgatggcttccattttttaaaaatcctactttcacccaataatatccttcagcctaaatacatatatgcagacttgggaataagagtgtagctccaaagtgataaggaaggatgataagcgtgtaagagaagtcatggtggcagcattcacttgtaaaatgttgagtgataaggtgtttcatcactttttgtggagcaatatcattctctttggtttatacttcacatgtagctatcattttatatatgattctaaaccgtggcaaagactttgatttttgacttcgttgattctgggtatatagtaagaaaaggacttctattaaaaatctgaattttaaaacaattccagaattactcaaagatttattggcatcatgactccctgagatggcacaagacaagagttacatctcttcccaaatgtataacctcaatctacatatgaggaaaccttagacagattcaattggggaatattccacaaaatatctggctctctaaaattgtaaggtcataaaagccaagaaaagacgaatgaaccatgagcaattggaggtgactaagaagtataaaaaccaaatgcaatgtgaattggatccaagaacagaaaaaaagaacattaaaataaatatgtgaatagtgctacaatgaaccatggtcctagaacttaaaataaaataagttaataataacagaaaaatggtaaaataaagtctgcagtttagttaagaatactgtacacagttaatttctttggtgtgataagtggattatggttatgaaagatattaatattagggatgttgaatgatggatatatggaaattttctatactattttgacaactatctctatgcctgagattattttaagataagaagttaaaagagaatataaaactattgttccatttcattgacttggtcacttattaattcttttataaatcaagaaaataacttacattttcttgttcttccgtagaggttgaacataaaggaaaattagactcactggtataagtagaaaaatacaacaaatttttctcagatctggttttctagaatttttaattagttgaattattatcaacatcatggctttagtatagaaaagacactaaatccctgaaaaaagtattatttggataaagagagcagaaatactaaaagggcaaagttattgtttgctgaatgttgtgcaaaagagtacaattaattggggcctagagcaaataagagtgtaactaacaaaagtctttcttgatgtaaaggatggctatagaaagtctagtttgaggcaggattatatgagtgtgagtgtgtgaggtctcctttcatcagagccctcaatcagataaggggagcccaaattgcaaggccaaacaaaacaagcctccttaatacctctgcagcattatcttacaattgagaaaaaacaaactaattatattagtcaaaaaattagccagtggtatgctacctctgctggatcattcccatcctgaggcatataaaaggacttctacaggaagtatccatactgaagtcacctacactccttcctacccaaggacaacctccacaaccatcacgatgtgcggcagctactacggaaactactacggcgaccatggctatgggtgctgtggatacgaaggcctaggctatggctatggaagcctgcgctgtggctatagctcctgctgtggctatggtcatggctacggctcccgcttcttctgtggctgtggctatggatgcggct

SEQ ID NO: 27278 - DNA, 2300 bp, Homo sapien
attatacaatgctattttttgtctaatttttcttttttccctaacattaccagcttttctatcatgaaacacagcaatgtgatgccagtagaaatagtatgtaaatcattctatgatttttagggaatgatctgtggttgaatacctttatgttttgggaataaatctaatttcaattccctgaacttgtttagctataagccacatatcgtgtttgaattttaattactgaatccccataggcagccatccaggtttgctcacgaagcagggtactgtaggtgttttcattctccagaatgtgattattacgcattgcatatctgtatcaaaacatcttatgtactctataaatatataaacctaccatgcactcacaaaaactaaaaataaaaaaatttaggccaggcgcggtggcccacgcctgtaatcccagctctttgggaggccgagatgtgcagatcacttgaggtcaggagttcgagaccagcctggccaacatgctgaaaccctgtctctactaaaaatacaaaaattagcctggcgcagtggcatgcacctgtaatcccagctactcgggaggctgaggcaggagactcgcttgaaccaaggaggtggaggttgcagtgagtccagattgcaccactgcactccagcctgggcaataaagcaagactctgcctcaaaaaaaaattatatatatatctatatttaaaaaaaatgcctctgctgtaattagtctactgctggctagaacactggcatggttttgaattttccaagtgtctcatcttgttcttggattcagcctttgattcctagctgctgatagcagggagcaaagttacctctgggttatgaagtaaaatctgggagagctcatgtgtaatacatatctgttttgtggccttctagaatgattcctattatctctgtgcctatttctgttccatatgccctctttggtatttgttctgtaagttctctactaagtgccactgtaagaaatcttaatgcaggtgtctgagaataatatatcaggtcttacatgatccaagatagttttgatcagccttatccctcctttaactcatgcttgagaactgactctctgtttagaaaggaataacattccttctttatcctggggtgcatgatcattgtaaaagtgaaataactgatttcatgttgtcatctggccctttataatatcatcacatttgtcagacaatctagtttcattagatctaagagaaaaaaaattttaaatcttacaataaattttttaattcatttttctgtgtttaccttattagtttcaatgtttagtttgaaatatgtttcaggccaaaaaattaaatttgtttgacaattcagtacaaggattaatccaaatactccgttttaaaatctcaatactattaattcaagtagtcttctagaaatgtgatgttaggtatagtttaggaggggactatgattaagattacacttttaaccagtttcccaaacacggtagctgtagtagaggaaaaaaaaaagactctttctcatgagttccattgcacttgtctttcatattccaaaaaagagaatccttgaagcaggtgaatactaagacatactttaattttgagaattttgagatagactcactatccatttgttattttatatattaatgtatttaacacatatttattgaatttcaactgtgtgttgtggaaattcagagagcaagaggactgcataacagctaacaacctcagaatatttcttgatattatatacctgcttacagagttatatggggtctataagacagagtgctttgaagtcctggcaataatttttttttttttaggaagggaaataatttgtttaaaggcatcttctccctgtattgcatcacacgagagctttcttaagccactgtaaagacatcataagcaagagcaaaacaagttaatgagctttttagaatgtaaattggtgtcaagaatgaaaatgagggctttgtgtttttcaccacccaccagagctgggatatataaagaaggttctgagactaggaatccatcccactgaggaaacgcactctgttgctacctaagccctccactcccgacaccatgctctgcgacaacttccccggggctgtcttcccaggatgctactggggcagctatggctacccgctgggatatagcgttggctgtggctatggcagcacctactctccagtgggctatggcttcggctatggctacaacggctgtggggctttcggctacaggaga

SEQ ID NO: 27279 - DNA, 2300 bp, Homo sapien
caccatgttagccaggatgatctcgatctcctgacctcgtgatctgcctgcctttgcctcccaaagtgctaggattacaggcgtgagccaccgtgcccggctgagttgtacaaacctttaactcaatgcctggaagagagttgtgtgcttaaaagacactcattttcttttttcctgaagtgatggaagatattttctaggatccttttatctgtaatttccagctttcaatgggagagacacatcaagacaaggtaataacttatacaattgtctgtcattccaggaatgtggcagtaggcactgaaacgttctcctttgtaactctactactcacttcagattttgggaattgccacagttaagtactcttccatagtagcctgtgaacctgtggctgggagaagcctgtaaactagtaatccattttacaacatgcaagccaggccctagggccaaggactcaggccttcaaacaccaactaagataccctctgtggtgggaagagcatagccacaacattgtggaaagtagtcatctcattaatttcaccccgttcctgggaacacatggtgagtcactgagggagggtcaggacattgaggtctgatatctgggaatcatgctattgctcacagcaccctcttctttgggtgtgtcgttagtttccaattagggatttctgatgagtcctgacataacgctgtttgctttgtggatatttaaaacatagcttacctgtagccctcaaatacatggaaatccattttattcccttacgctccctcatgtaagctagtttaaaaatgagtcagatgctacagctgttttgggacagaaataccactgaccacttgaagcgatgttgaagttgcttattttgccagagttgaggcagtttattcatctatgttcaggtggacccaaacgagccatcattctggtgtttaaaattcattatattgtagtgagatgaaataaaatagagtgatatccctatagcttccccaagcataaaaagaataattaaatatagcacactcttcacacatctcttcattaccaaacattgattaagtgcctgcttcccccagctctgcctcccccttatccctgatggagacaatgaccttgaagagcctttagtttgtccataattaaaatgcattctatctatatgtgtgaaaataaatatcttttgaacatattgaacaaattgggagaaagacactgtaccctttcaaattaacattatgataattttaaaaattaactaagccttttccactggcatattaatgagacccaggagtcactattatccactgttattaaattaaacattttaggaataaagctcatccaatttacttagaaaaggtcttggctacaaatacagttgcacttagttagcttctaatttgctttgttggttgaacataaagggtgggtcccactgccctctagccttcccacgggcatcttgtttgagtcagttgattaattttgagagccagctcagactttggatacaagtctctgtgccctttgttcctgtcaagtgttgtcactgttgtcttgaaacatattcaaggaggcaccttcccaatgaggagctccgttaggtgtggtagagtgactgattaagttatgtttaaaagatattaagtccagtgacaaatgaaacagggcatgggcttgtaattggtcctggtagggagggagagagtgtgtgatggtaggatggtggcatctttggtaggatgagtgtcaggtcaacactcatcataagcaagatgaatgagggacaacgtgtgggctgggatgaccaatagctttgaagctgccaaccagccttcttaatcagactaagtacagtacagaagacttgtgatttagttaccaaactactaaactttctttatgagggtgaaggcttcttaagagacaattaatgtgtagattcacaagatgttctaaggcaaactggtctgagccaaagaagccacggagaccagggagagagccccacccaccagcaaggatatataaaagctcaggagtctggagtgacattcacaactcaggaggtaacttcagcaagctacctgcagccctctgtctgacatcatgtccttcaactgctccacaagaaattgctcttccaggcccattggaggacgctgcattgttccagtggcccaagttaccacgacttccaccactgatgctgactgcctgggcggcatctgtttgcccagttccttccagactggctcttggctcctggaccactgtc

SEQ ID NO: 27280 - DNA, 2300 bp, Homo sapien
cctaatggaaattcaaacacatttttaaaagggctgcaagcgattagataaatctaattaaacctaaggccaagtaaaacaagtcctgtttgaagctgagaacagcagtccttcatgccttttataataaaaagaaattggggctgggggagtgaagaacgcagaaaaggaaagcgacaaggggccatcctctattacagatttcctctaacacagaatcaacaggactctaatatttcatacgtggctgtcactgtgctttgaggttaatctatatggtcgtttaagccccgcccccctagaggttattccttatccccactttacagatgcgcaaactgagacacaggaagatagaatagctcggccgggatcacccagcttgtgagtgacaccgagcaggtactggaacccgggtttgtttgacctcagcgcacaggctctaaacctctgctccaactcaaagtatgcgccaagtcagcgtgcatgggtaacccgatccggacggctctgactcgggatgcggcacagctgccctgcggggccgcgcgggtgtcaccgaggcgggcacagactgcacagtgtccccaagggctcgcgcacgtccttcaagacctgccagcgcgcgggaaaaggcaggctccgagtcaaccagggctgacccgggggcaagaccaggagacgcgacgactggaaccgggtgagtgtggccgagtcggcgccccgagggccgccagcctggaccccaggctgggacacgggcgcccccgggtgcaggggacctagaggcgccgtgcgcggcgggggctgggcgcgaaggcgccgagacggcatctttcccctgcagcatcccgccccgcggccggggggagggggcgtcacctgacagcgcgcaacaacttctccaggtttcgagggggcaagcggcagccgccggggctggggggcgcacggcgcgctgctctcgcccaatggcgaggtctgtaaacaaaagcgggccccacgcgggtccccagccgggtggcgaggggcgcggcgcagcagcatcgcagcggcagagctggtgagagggcgaggcggggacgggatagggcgcggggacccagggcacagtccccgggacccgaccgcccggatgaggcattgtctgcgcacccgcaggattccgcttttaatgcccccctccgggggttcgtcgcgggtccccagctccgtgcgccggcccccgggctttccgcccggtgagcccggccccgagggcggcacggatcgccaaggtgagcgcccaggacgcgtcgccgaaaagccaggcccggaggtgcctaagtcagggaccgagacgcaaacatagacacaaggatgcacaagcacgccctccccgaagttgacaaaaatcagccgataaaatacaaagtgccgcggccgccgcaggtcagcgctgacctcctgctgccgagaggaccgaatgccgacgtccggacgctgtcatttccatccagcgaaggcacctgggctgcacggtctcgtctccctccttcgcgcgagggatgcctcctcctgcctctcctccccgcatctccccacctcccaagtgtgtgaacacgaaaacaatacgtggaaagcccgatcggggggagctaggacccgccgggagccccagtgtgcgggagacgggggtcagaacgtgcccggcacgggcaccgaggctccgggcatcctcgccgccgtctcccggggcggctccggccggacgcccgcgcaccccaggcccgcggtactcacccgcgacggtcgtccgggatctccgcgacggggccgggcacgatgcggggcagccgtgcccctggggctgcgggcgccaaggcgtccgcggagctgcagagctgcgcgcccgacggcggcggcgctgctctgccggccgcgctcgaacccgctcgtggtctgccaatcggagctgtcagggcccctccgcctgcggcctcgggggccgggccgcgggagcccgtgggaaaccgagctccgattgggccgcctgacaatcgctccgcctccggccagccaatccgaggcggtggatgcaggagcggggcgttcggagttgggctgtagagcgactatgggcgcacgccgggtatccgcgccgcagccaggctcggagcgcgcggctggaggggcgcgggcggcgcgcgctccagagatgccttcctgcgaggctccgtcagcgcggcccggggagatcgcccgcaggcagcggaggcgcggcgggccgggggacgaccagggagcccctaacaaagcag

SEQ ID NO: 27281 - DNA, 2300 bp, Homo sapien
ctccattccaagctgttggctgaaacgaggctggttttggaaggggtgtctttggaaaatctctcaaacttgactcaaaaacctccctgtaatactgatcatggaacctggtggacgcatccgttcaagagctaccatgctacccattcttctcaaactgatgttttagaagcacttcaaatccttaaagctcttgcctataattatagctcctctataattcatggattccatgttttttcagtgccccaaatgtgccaaacactgtgctaggactgggatccagcagggaagatagataagattccggcttccatggaaggctgcagtgcaacaggcaacttcagccccgtgtcatacaggcctgtgaggggagcacagggggtggaagcactggaagtggaaatgtggcatctaaccttgacagggtacaggaggcttcccggggtctgtaagagcagtagttcagcaatgcctactgcatggatgccttggcggccaagctgggatctgaagaagggtaggaattagtgaagtgaagggaggggctgggggttgacgtgttctggggaaagaaaagagacccagagttgggagcgcaaaatgagatttttctgcttagaaggatcattctgcaaagtggagaacagatttcagggggcaaggcctgggacagaaggacgatgggagccctttactgaggtccaggtgagacaggatgggaggaatgggtttgggaggttaacaaaaatggatgggagagggttaagaagaaggaggaatcagggatgactttcaattttccggtttaggtttatcttccacagcgtgggcaattctttttgttttcaacaagatcaccccgggagcgcagaccttcccagctcccggggcgaacacgtgtgtatggaatcaaggtgtaaggaacatacatcccagcctttgttgtaaatggggaagtctagagctcttcaggagaggaggaagctccggcctcgtgtagggaaaggtttcgctcgaggctgtaccgccagcgtctccgtttccgcgttctccacaaccttgcgagaggtaaactgcaactgtagtttccggattttacagaggagcccaggaggtctgcgtgaaccctgcccgagtcacttactctgcccagcaggtaagcgtaaggcccaaaccccacgctgttattccaagttcgcttgctgggcacggtaagtgaaccctgggagtcctggactctggtgaaggccaccatgccctacctggaggctgctcagggtctaacatcctctagcatccacgggaagggattgcgttaggatttttttctctcgtaaaaaagttcctgtctccccctagagccaggcacacgcctcccgcgccagaccacttgtcccaggcacaacattttttgactcttcgcctcccccgtttcgatcccccttcctctccgccttaggtggcaggaaaatcctttacctccgaccaatcccaccgatgccgagccgcgcgcgcgcgccaactagagctccgtctgtgcacgccattggccacctccacctatgcgagatgacaggcagcttcgcggacctatcgccgagggaggcagaggcctccggccctcccaaagctgctttgttaggggctccctggtcgtcccccggcccgccgcgcctccgctgcctgcgggcgatctccccgggccgcgctgacggagcctcgcaggaaggcatctctggagcgcgcgccgcccgcgcccctccagccgcgcgctccgagcctggctgcggcgcggatacccggcgtgcgcccatagtcgctctacagcccaactccgaacgccccgctcctgcatccaccgcctcggattggctggccggaggcggagcgattgtcaggcggcccaatcggagctcggtttcccacgggctcccgcggcccggcccccgaggccgcaggcggaggggccctgacagctccgattggcagaccacgagcgggttcgagcgcggccggcagagcagcgccgccgccgtcgggcgcgcagctctgcagctccgcggacgccttggcgcccgcagccccaggggcacggctgccccgcatcgtgcccggccccgtcgcggagatcccggacgaccgtcgcgggtgagtaccgcgggcctggggtgcgcgggcgtccggccggagccgccccgggagacggcggcgaggatgcccggagcctcggtgcccgtgccgggcacgttctgacccccgtctcccgcacactggggctcccggcgggtcctagctcc

SEQ ID NO: 27282 - DNA, 2300 bp, Homo sapien
gtagagctgagattcaacccagccaacctaccgccaggattctgcatctcaaagtgcttttcagacgtcttaggcacaaggcaatcagatggctgctgtgatgattcatctgaggttctccttacaataatgtcacctccttaacaggagaccctaaggcagcagccctcagatgaggcagggaagagagatcccattactcaccttcagggaagcctctagtaacccgccactcactcatgaggactccctacccatcacacacatgtccagtggaagctgtttatttattcagtaaacattattaaatgctactatgtgccaggtactcttctaaacacattttttttttaaattgttgttttttatttattttttttttggagacggagtctcgttctgttgcccaggctggagtgcagtggcgcaatctcggcttactgcaaccactgccttctgggttcaagcaattctcctgccctcagcctcctgagtagctgggaccacaggagtacaccgccatgcccggctaattttttgtatttttagtagagacggggtttcaccgtgttgcccaggctggtctcaaactcctgagctcaggcaatctgcccatcttggcctcccaaagtgctaggattacaggagtgagccaccgcgcctggccagcacattgttaatattaactcattcatcctcgtaccaactgtatgtggtatgaagcactattgttatctcatttatataaatggggaaaccgaggcacggaggcctgaagtaacttgccctaggtaacagctagaaaggaaccgggcctgaaattaggcagcctcactccagggtctgttcttttaaggatggccagatgtacttctaaacttccttagggaaaaaccctctactcattttcaaatatatgtatttcccctagatggtggcttgtaacaggtaaagaaatggctctttgtcctgggatgaaaagcttctcaagggaattattctccattccaagctgttggctgaaacgaggctggttttggaaggggtgtctttggaaaatctctcaaacttgactcaaaaacctccctgtaatactgatcatggaacctggtggacgcatccgttcaagagctaccatgctacccattcttctcaaactgatgttttagaagcacttcaaatccttaaagctcttgcctataattatagctcctctataattcatggattccatgttttttcagtgccccaaatgtgccaaacactgtgctaggactgggatccagcagggaagatagataagattccggcttccatggaaggctgcagtgcaacaggcaacttcagccccgtgtcatacaggcctgtgaggggagcacagggggtggaagcactggaagtggaaatgtggcatctaaccttgacagggtacaggaggcttcccggggtctgtaagagcagtagttcagcaatgcctactgcatggatgccttggcggccaagctgggatctgaagaagggtaggaattagtgaagtgaagggaggggctgggggttgacgtgttctggggaaagaaaagagacccagagttgggagcgcaaaatgagatttttctgcttagaaggatcattctgcaaagtggagaacagatttcagggggcaaggcctgggacagaaggacgatgggagccctttactgaggtccaggtgagacaggatgggaggaatgggtttgggaggttaacaaaaatggatgggagagggttaagaagaaggaggaatcagggatgactttcaattttccggtttaggtttatcttccacagcgtgggcaattctttttgttttcaacaagatcaccccgggagcgcagaccttcccagctcccggggcgaacacgtgtgtatggaatcaaggtgtaaggaacatacatcccagcctttgttgtaaatggggaagtctagagctcttcaggagaggaggaagctccggcctcgtgtagggaaaggtttcgctcgaggctgtaccgccagcgtctccgtttccgcgttctccacaaccttgcgagaggtaaactgcaactgtagtttccggattttacagaggagcccaggaggtctgcgtgaaccctgcccgagtcacttactctgcccagcaggtaagcgtaaggcccaaaccccacgctgttattccaagttcgcttgctgggcacggtaagtgaaccctgggagtcctggactctggtgaaggccaccatgccctacctggaggctgctcagggtctaacatcctctagcat

SEQ ID NO: 27283 - DNA, 2300 bp, Homo sapien
gtgcacgcctgtagtcccagctactcgggaggctgaggcaggagaatcacttgaacccagcaggcggaggttgcagtgagctgagattgcaccactgcactccagcctggtgacagagtgagactccatatcaaaataaatacataaataaataaaaacagtgattcttaactgggagtgatttggcaacgtctggaattatttttggttatcccagcctggcagggagggacagggtattactggcatctagtgagtaggggctagggattctactgaacatcctacagtgtacaggacagcctccacagcaaagaactgtctggcccaaaatgtccatagtgcccacattcgatgccctgcattaggaagatataaatactcttaaatatcacagagttaaattccttacccctgttctagcagagatgatattcttgcggggggagcatcttcttggcttcaacacattcttttctccatgggagatgatgccagaagagggacagaacagggcccagtaaagcatggggcctggggccagggacccccttgttcaggtgtgacgaccatcctacgaaggcaccacccaggcatcattagaccgtctcaaaagaagagtaattcactgtcccaaagcagctctctcgtgtctgtgggcggatcccttggcaagtttacaatgaactgaaatctgccgaacttcctggaacccaaagaaactttagccttgggcaaaggccctttggccagcatttgcactgtttatgcaaccgtttagaatatacgaattatctggagactactaccaaatacaacaggcaaaactgcaaatatgtatacttcctagaggatgataaaaaaatgtgaattgtatttctctgatagaggatgcattagagtctgagggtctaaatagcgtaaataataaataagtaaataaatcgatagtagtgtactccaaacgaggctggaatagcttctattgttgtttcacactggacttcaattaagtctcagtattttgccatactcaatattaagtactaggctggacgtggtggctcatgtctgtaatcccagcactttgggaggccgaggtgggtagatggctggcttgagctcaggagtttgaaaccagcctgggcaacatggtaaaaccccatctgtacccaaaatacaaaaatcagccaggtgtggtggcacatgcctgtggtcccaggtacttgggaggctgaggcaggaggatggcttgaacccaggaggtggaggctgcagtgagctatgatggcgccactgcactccagcctgggtgacagagcgagaccctgtctcaaaaatcaaacaaacaaccccctcgccccggacaaaagtagtttgcactattttctcatttcacaatatgtttttgaaatatttcccttgaaaggtaagtcatatttatcattcctgttgtatggaggcatcataaattatttcaccattctaccctccttgagtgttgtggcctttaggccagacaaaaacgcaggtgatgcctagaagccaactagttgccgtttggttatctgtagggttgtggccttgccaaacaggaaaaatataaaaagaataccgaattctgccaaccaaataagaaactctatactaaggactaagaaaattgcaggggaagaaaaggtaagtcccgggattgaggtgtagcgactttctataccctcagaaaactaaaaaacaagacaaaaaaatgaaaactacaaaagcatccatcttggggcgtcccaattgctgagtaacaaatgagacgctgtggccaaactcagtcataactaatgacatttctagacaaagtgacttcagattttcaaagcgtaccctgtttacatcattttgccaatttcgcgtactgcaaccggcgggccacgcccccgtgaaaagaaggttgttttctccacatttcggggttctggacgtttcccggctgcggggcggggggagtctccggcgcacgcggccccttggccccgcccccagtcattcccggccactcgcgacccgaggctgccgcagggggcgggctgagcgcgtgcgaggcgattggtttggggccagagtgggcgaggcgcggaggtctggcctataaagtagtcgcggagacggggtgctggtttgcgtcgtagtctcctgcagcgtctggggtttccgttgcagtcctcggaaccaggacctcggcgtggcctagcgagttatggcgacgaaggccgtgtgcgtgctgaagggcgacggcccagtgcagggca

SEQ ID NO: 27284 - DNA, 2300 bp, Homo sapien
cacgacgtcaacagatcgagaccatcctggccaacatggtgaaacgccgtctctactaaaatataaaaaattagccaggcgtggcggcgcgcgcctgtagtcccagctacccgggaggctgaggcaggagaattgcttgaacctgggaggcggaggttgcagtgagctgagatcgcgccactgcactccagcctgggcgacagagcgagacttggtctgaaaaacaaaacactagtactggtgaattatgtggggagaagtaaagagggacaaaaagaagtctgacaaatgaaacagcaaaatggagtcaaatgccaaagaaccttttccagaaaatctggagacctattaaagaaaaaggctaaactcattatctccctcacatatatttcagacatttacacagactaactgttcctgtcctctcacgtttctgtaaacccctttaaagactgaatctcattcgtatagtaaatattccctcatgatttttaagccgagtgcaagagaaaattttccaccagttggtaacttcactaaggttctggggacagtgttatcacaagcaccttccttgcaacacgttttgtaattttactgataaaagttctgaaaatatttctgtatattttacaagagtcgttcagaagtttgtctctgaccatcttagcaacctgcctactggcagagcaattttaaagccactttacgaaaatgtggcttaagaaatgctccgacaacagttattaagtgccaattcggtgtaatggaaactccaggtcttctaatttccaaatacgaaactccacccactgtcctcaaacgacagttctcaatcgtaggtgcacatcaaaatcacttttggaaactttcaaaaaacagcaatactcaccctgcactaggacaggttttgatgtaattggtcggaggttgggctctggtgtatttttagtaagatcttcaaataagctaactgtgcacccaaagttaagatcactgccctcaaaaatccccaaaagggtcagttaaacctctggctcccggagcttaggaggaggaaaaggacctctgttcaaggctaccttctctgcccttgcagcccaatcatgacctagaacagaggccagcaaacttccctgcaaagtgtcacacaaacggtctctgttgcgtatttttgttttccaaagccttttaaaaatataaaaaccattcctagccttagagctgtacaaaagcgaagactccctgacctagagcgctgaagccggaaagcggagagggatgcgaagacaccaggcgggcccaggcgcagtcgccatccccgggctgggcctggcactgcgccactcggtgtccgcgggaccctcaggaacgagaacacggccaagcaagggacgagcacagccgctccaggcaccacgacagacccgcggcggcggcccaaggaccacagagggcagcacgcccgcccccgcccctccccggcccgcggcaatccctccccgcgctcccgccacgcgcaggcccagccccgcggcggcctcggtcccacgccccgcgcccgggcccgcccggtgactcagcacttgggcaccgcaccgctgggggcgaaggcaccgaccgggcggcacgggccgggaccgggcgctggaccagggcggccccgaggcctggcgggcgacccgctcctagcaaaggtgcgcggggggacgagcgggtgggagcggcctcgcaaacaagcctccgtcccagcccttgccttctgctcgaaattgatgatgccctgcactgggccgtcgcccttcagcacgcacacggccttcgtcgccataactcgctaggccacgccgaggtcctggttccgaggactgcaacggaaaccccagacgctgcaggagactacgacgcaaaccagcaccccgtctccgcgactactttataggccagacctccgcgcctcgcccactctggccccaaaccaatcgcctcgcacgcgctcagcccgccccctgcggcagcctcgggtcgcgagtggccgggaatgactgggggcggggccaaggggccgcgtgcgccggagactccccccgccccgcagccgggaaacgtccagaaccccgaaatgtggagaaaacaaccttcttttcacgggggcgtggcccgccggttgcagtacgcgaaattggcaaaatgatgtaaacagggtacgctttgaaaatctgaagtcactttgtctagaaatgtcattagttatgactgagtttggccacagcgtctcatttgttactcagcaattggga

SEQ ID NO: 27285 - DNA, 2300 bp, Homo sapien
cagaatacatttagtaaggtgtgctagacatatatttgatataaatcagtaactattaagatgactaagattttaatttataatatgactagggcatatgtaagatttctgattccataaggcttatcacctaggacacaacataaaagaaaaaccatcaacacttaagagtggagaaaggacagttacatgcaagtgaacaaagcactgagctggttggtaatcaagagacttgagctccaatcctagttctgctgttcattggcagggtgaggtgggcaagttattgcttccctggcttcagtttttatagatgtaatctttagatccatctacaaaaaaaccagttttttccaacttttatgtatatctttcactatcccagttctctttctggaagtactaatgcagttttctagaatttttaaaatgtatgtgagatttactatttaaacttgtggtgttgtaatatagttcatgaatattttgtgtaatgattttttaatgtaagctacagtgctgctcattatcaaatgtgaatctctttatgattgtaattttattttaagtttgcagtactaccctctgggtggggcagctggacaaaagaactactcagcaggatgttgccagtctcttggaagagtttggtccaattgaatcaattaatgtgagtgtttattcagttttttaagtacgatggacaggtgtgattaatgtcattttatgaaatggaggacctgagaccaaagttacaatttgcccaggtttatagatgtgactagaatttaggtgttcagagtccacgtttagaattatctgtatttaacatttcttagaattctttgtatttaacatttcttggataaccaagtttaatttcaaacatttctaggtaagtctttatataacaaagcttggaggactcagttgagaccaaacttgaattgccaacttagaaatgaatttaaccttacattatatagcatggggtgagggatgggattgttggaactgcttacttggtgttgtatcttgttgcttttcaattttgttatcttttataatattaaaatgttttggagcagatgattcctcccaggggttgtgcctatattgttatggttcataggcaagatgcctatcgtgccctgcagaaactgagccgaggaaactataaagtgaaccagaaatccataaaggtacagtcttacatgttataattaattttttttttaaataggcagaaggggaaaaatatgtggcatataaaaactaatttgggtcttcgaaatgactttcaacactgaggcatttcatgtgcatctttttttttttttttttttaaagaatatttcctaaaagaactccagtgtttcagcataaaattgtaaatgttacgtgcatggtagaatttgttttgttttgtttttcctaaatgtagatgggttcatcatggtaaattagtgctttaaatataatgtcttttagcaatatgttttgtcctgttcaaaaaatttggatactgtatttttaaagtttgccatcttagaattaactgaaaaatattcaccaaaggtggagaaaaacatataggtatatgggtatttttcccctaaggagctaaagtcagtgtttcttcagtgtcttaacaccccattctaccgctggattgcactgcaaaaagattttgtctgatgttaagtaattacaaggcacccctagacttggaaaagtagtccccagtatactactaggctattcagggaacttcagcctttccctgttaaactttttccttttctctaagttttatgttggctgggttgggtgagagttggtaaggagaagatgccagtgaaatttccatcctaggacaaagtgagaattaaagggtaaccagttctgtagtgagaataaggctttgaatgagatccaagcctagctggtccagattgctcccttggtgcccgagtcggaatggatagaatgatagagaataataccctcaagacttacgaccttgctttgttttctttttatattttcactaatggtgaaatagattgcctgggccttaaacaaaggaataaaggcagattataagcagtattgggatgtagaacttggtgttacttatattccatgggacaaagtcaagcctgaggaactggagagtttttgtgaaggaggaatgttggacagtgacacacttaacccaggtaaagcagtatttaatttctcttacagttcacttatttgcttggtagtacatatgacaaatcgaatgtcctgttcct

SEQ ID NO: 27286 - DNA, 2300 bp, Homo sapien
ccagaatacaaggttccgggattatatgtaattgactcaattgtgcgacagtctcgtcatcagtttggaactgataaagatgtttttgggccaagattctctaaaaacataactgccacattccaatatttatatctttgtccatctgaagataaggtataattaatttttaaactaaaacttgtattctttaaaaaatattattttaaatgtatgttagatatttggagcctactatattaccagataagattttcatgtagcgatgtctgtgagcttgaaacaaaacagtttttttcttcagtggtcatttcgtgtttattttcttatgagttcttcaggattatcagtcatactgttgaaatatgacaggaacaaaatttatagaatcaaagagtttaatagtggttgccagggactaggggtaagggaaacattaggagctgctaatcaataggtatgacatttcagttaagcaagatgaataggttgtagagatctgctgaacaaccttgtacctatagttaacaattctgtattgtacacttaaaaattggctaagtgagtagatctcatgttaagtgttcttatcacagtaaagtaaaatttttaaaaaataatatgaaaggcgcatcatctttaaagaagatatcgttggaaagatgtgcttgtgtagttgagtaaggaagaaattgtgcagtaggaaaagacagcgatcatctgattgtggttattccagaaagaaagagccaataatagatgttcttccccaacatatagagatactaaagtttaagtggtattcattagcaatcagactacagtatttaattccttatatatacagttggctttacaacatactatataaaagtagaaaaacattacagatatagtagctgactataagtagataggaggaattatactagtaaacatactcagaataatgaagaacggagacatttacaataaacagcatataaatttcagtgtcataggtgctgtttttatattcttggaagaatgctcttgtgggaaaaatacacccaaaaccaagatgattccttgagtaaagataaaagttgtgcccatgaataacatatattctctggatcttcatatttgcttggccacataatttaagttttgactacaggccagttgcttaaatattttagctgttataattactctgaagaaattctccttcatttacttcaagatagcttttttttggggggtcagtgatagtttatttgtaaccataagtaaaataaaatgaaaatgtcaaataataaatttctttttattgtctgggtctatagtccatctctgttccttactctagatgataccactgaagaaagactaattagtttaaccaggttgtaattctgatttttttttttccttgtttatgaaacacacatagtatggaaatattagcctagggagttttcctctcttttttttgtaagagtataatcggttatttatgcaaatatttattgtatatttgtgtttctcatgcgtaacagagtaaaatagttcgtgtgctgaacctttggcaaaaaaatggagtgttcaaaattgaaattattcaacctcttttggacatggcagcgggaaccagtaatgcagccccagtagcagaaaatgttaccaataatgaaggtatggtcagatgtatctgtgagctcacacaatggtatgattttttgcacatgaaacagtcagagtttatgtgtattgaaggaatttttctataagaaggaaacttgagtttacatcttggaaggtatgattttctttccataattcctatttataataaaggtctgctcttctggtagttgttacagtataaactctagtgccacaatctctatattttatactttgttaaattggataaaatgttattttagcaaagaagcttaattaggaaaacttgtaggttaactttttttttaggccttaatgcccttttcttttttaggctcacctccacctccagtaaaagtttcttctgaacctcccacacaagccactccaaactccgtcccagctgtaccacagttgcccagctctgatgcttttgctgctgtggctcagctgtttcagacaactcaaggccaacaggtaaactgtctactcaaaagtgaaattgtttgcaggactaggtactgttgtcacttcttgttttctattcttcattaataagcacattgaaaggagaaaatacatctgcttttcaactagaaaagccttcacaagagaagtaatgtaggaggaac

SEQ ID NO: 27287 - DNA, 2300 bp, Homo sapien
aataataaaataaaataattttaaaaaagagtacattactctcatctcaaaacaaaacaacacacaagcaaacactctcacttcctcctgcaggttttttctgttgtcttcacaacttgccttcacagccaagtttctataaactttctcctgcctgccttcccctctttgatacacatcagtctagcttttgccctcaccacgccagcctacacgcaggacaagctccctgcatgtagcacccgtcaggcactttccaattcttatcttgctggacttctactccaagcaccagacagagctgatcacttcagagctctctcttcacctcttcttgcctccaacttatcccttacatacccgtgttcctgggctttttccccctatctatttcagctccttccaccactagctgtgcactaatgactcccagatttctatcatctcagccatcgctcctgactctgcaagtgtttacccaactgcctcctagacatcctcacttacttgtcccaggcgcagctcaaactccacaggcaccaaagggaaatgatccagctgtgtgaccttgggcacattaattaactcactccctgaattataaaatgagggcattactaatggacacctcacccagaagcctgttacggagagtacagaatagcatgtcagcagacgttggcacatggtaagcgacaagtgttaaccatcattctgtcttccctcaaacccacgccttcttccccataaatcccctacgttgactcataaacccaccacccaggtcattcatcaagtcaggctgtgggcatcctccttgacaccccctttattaacctcacagttactctgcctcagcccttccactccacttcctaaacatctgttcttccttctctatcgccaccaccttcagccctcattttcccagggggctggggtcattctttccctgtctcctcttactactttgcaccatccttctgagagaacactgcatccatcactccaccttcccctttcaagggctcccctctgccttatgggggcaaaatccaaactctggaagagcaaagcctctttatggtctcactctcctctctcagtccaccttgctcctcagctccagctggtcctccttcgggggaggtgatggtggcagtcctcatcaggctctgcaggcctctcctccctccagatgtagcctggacttcctgtcggaggcgcatctttctcgtttcccagggcctgtgccctaacactaagcatgctttggtaagtatctgctcagttgtctgtcctctccactaaactgtgctgttttcaggcaaaacaattatcgtttatttccatgtctccaacactaggcagacagtaggtactcaaggaaagtgatcaacataaagagttttggccaaaaatgaaacaacttggtttgaggaatcagcgtgaaagttagtgaatccactcctctcgtggcacaaggctgcacaggggttccttaaggcctgcgtggatatccagtgcctgaacgtctttctcggtgttttcgctcgcgcagaattaacctgcacaactacagcggacacacagctgcactggcattggcagaagctttttttcttttccccagcagagcgcacgagggcctgcaaaggcacgcccagagagccgaggttaaatcctgcgccctttgttcgcggcagccgagagccagcggctcagtgcccgccgcccccgccgggtgcagggccggttagggccgagcgtttcgcagagacgcaccccgggagcaccgcgtcgagcggagcgcgcgtgcgccagggcttgctctgggtcaccctcgcagccctgggatcccgcgctctgcaaggccgtctccccggcccgcggccgcggccgccgccgccgccggcgggaaagcgcccagcgtcccggcgtcacgcgccagcagccctgcacgcggggcggtgcagggcggcgcagggcgggacgaggcggggagggggcggggccagcgcgacggggcggggcgaacgccgggcacaggaagcgccgggaggcctgagccgtcccagggtgccccgcgcggcgtggactcgggccgctgccgccatcccgctggagagagggagagagaggcccgcccgctcgccggccgggccagtgtgagccagtgcgtgagggcgcggggggccgtgtcagcgagacgcagagcgcagccgccaccaccaaacggacatgttgaagaccagcgctgccgccgcctccttttcctcatcctgcgaacgggactgaga

SEQ ID NO: 27288 - DNA, 2300 bp, Homo sapien
ccttaataaataaatctctaaattttcataaagagtgcatgtcctaacattaaaaaaaatcatactctattaacacaacattgggtggactcccaaactgtttctgatggaagattcagagtggtttttttttttttttttttgagaaggagtcttgctctgtcgcccaggctggagtgcagtggcaagatttcagctcactgcaactttcgcctcctggattcaagcaattctctgcctcagcctcccgagtagctgggattacaggcgcccgccaccacgcccggctaatttttgtatttctagtagagacagggtttcaccatcttgaccaggctggtcttgaactcctgacctcgtgatctacctgcctcggcctcccaaagtgctaggattacaggcgtgagccaccgcgcccggcctcagagtggtttttaccccaaagtgagctccatattcctcattctttagacagttgctggacatctattctgctggcaccacgctagttaccattcccctcccatgcaactgtcctgttaagatttgattactgaattagagacattaaaaggattgaatgaacgttactgaaatagtcaaggccggtgggagcaaagaagtcccttcagcacagcaagaaaaacattttaagctgtatctttaatattggtaaacgggaacaatgagacagaacaacagaaaacgcagtatgttccgtcataataactgaggctggtgacttgtaacaggtaggtggatgaatatagtagcgtatttaaaattagatgtattgaaagcaggcatttctctgcgtccctcttcagatgggtcagcgagacccccagacactggattgatgacagctgttgttcccccaccccccactcccaatctcaaagcattgctatgggtcgatgtcatacttgtttactcaggaataaacaatgaaaggaactttgttaggaccaaatccttcctttcagctctgatgttgcatgatcggggtgaagtttccatcaaatgcgggcacctcaacaggtagcattttgtaaatgcctcctcctacctaccctcctccttctccctcacaagattcttcattttcggtttgagaagacgttggggatcctgggagagggtccagtgtcgtcagggcagttgcaattgtttatgcgatgagcacagtcacagcgcttgcagaacaaaagcatcgaagagaggcgagcgccggtccacctcctgcaatcacaggcatcatttcaatggaaggcaaagaaggtgtaagctacaagcagaggcagcaaacgccctggttcctacattgctgctgctactattactgctgtggctgcgcctcctccaacacagccaaccaggctgcgtgcgagcccgggcagacgcctggccgcctccccaccctttcttccagccatccatctatccttccacccccggtccagggggccctactgtgtggcggactcagggccgggcacgcaacccgactcacagtccacggagttcgagagccttcccccttccccccgccccgggtgggtgcggccagtgggggatttcaccgccgaaaggtccagaaaacccaagcccagaatccgggcaagaggcgcagccggaggcggcccgacctgggcggcccgggagcgcgcgcctccgaggccgcgcaggttctccctgtctggcgctcaggtggcttctccgtccactccgccgctcccctccccgggccctcccctctccagcgagggtcgagtttgactgtggcgcgcggggaaggaggggctactagggatttgaaagtgcacgggctgcggagtggagctcgcatctgttcccgccgcccgcgagcggattaaatttctgcaaattcaaactgaatggggctttcttctgctgccttccagagggcgccggcagcccgccgcgcgcttctctccggcgggagcggccgcccagcgcacggctaggagcgatcgcgggagcccgacccaagcccgtgcgggccagacggcggcggcgaggcggaggctgcggaggcacccgggctcccggacccaggcacccggaccccgggacccaggcgccgccggaccgcgccccaccccgcgcgcccgagcagggcgactgtcattagcttcctggacgggacccggggcgggatcctggtgtcctgaaaggggcccgggcgaccctaagaggaagaacttttgggggcggggtccccggtcccgcgtcccctgggcagccgctattgtctacgcgcctcgctgggcggcgcg

SEQ ID NO: 27289 - DNA, 2300 bp, Homo sapien
ttaatacaaacacacttgtgcctatagaggaattcattttgcatcagccaacttctccatgatgtgcaggaggcatcatgcctacaaaccatgatattctgaaggaccatgaaaatgtttcaatttttttaatcaagagcaataaatgaacttacaggtctaaaaatgttttatgatatcattttaatataatcatcttcatagcaatgtgactataaaatgaaatttttattaactgttttatggagagaaaggcctactaaggcaaaaatagggcccctgaaagtcaccacgcagctcggccttgtattccttctttcctggggcatcctatcatagaatttaagtattgacaataggaacccaaagtctgagacaagatgatcctttgaatccccaagtaactagccacttacttaaagaactcatgtggattgtatcaatgttgtaccagagatattatgcttgaaaacaacagtccaggaaggtcaggcttggctctacaaaagtagaaggggcaaagtatggtgaggcatgcctgtagttccagctacttgggaggctgaggcaggaggatcgcttgaggccaggagttcgagaccagcctgggcaacatactgaaacatcatctctgaaaaaataaagaaaagaaaaaaaaaagcagaaggaaggaagggaattctatgggtaaaaaaaaaaagcctaaattatctaaagcattttcttccagtaagaaggtgattaacatgagcatggtgtgccagggtttacaaagtattttcatgaatattagaaaactcgatcctcatgaacaacttggtgtagtactgaagaaacagactccatttactccatgaagaattagactcagggaaggcaaacagccttttccacagttccctacactgttactaccttgtggagggaggggtaagttaaccaggaccactgactccaaagcttttgctttttgctagtggctgtaagcactaaaattggaagtacatttacataaatagtttatgcaaccaagcaaaataggcagtgacttgggggacacccagagcgtagtaggaacagagtaggtccttgcaggtagctttcttcccaggtataccaccagactgtctgtggtgcagctggctggttccccgccagctttccctcctgacctacggtgttttaggcagaggctggctttctggggcagctgaggaaatctgtccttatcatcaacaagggatgcttcttccttgcaaggacgaattgttccttgatccaagcagcagggacacttccaggctttccaggggcactgctgcttcctcaactttttccttgcagtgacagcctgagtgatccggggcccttcccagggtctcattccagggatagcagtgcgcaaaaggaccctgtgatgagggactcctctatccccttccttctccacttcatggaaaggaggtccccaggagccgacaaaatagagcagtggtcatcaaaagtggagctgcttatatacaactataattagtccacttacaaaaaagaagaaaaagggtggtggtctggcacagtggcttacgcttgcgatcctggcattttgggaggccgagtagggaagatcgcttaaggctaggagttcgagaccggcaacatagaaaaactcccccccccaccccccaaaaaaggttgggctgccaatactgacagcgtgggcacgcctaggagcttgttagaaatgcagattctcgggctaacctgctacctgctgaaccagagtctgcgaagatggaacctggcgatctgcttaagaagctcgccaggcggttcttagacactcaagcttgcaacccgtaactttctcagtgacgctgcccctcccacggaaaggggtgaataatccttaggaagacaagcaaacaggtctgcatcatcaatttcttcaggctggaaaacctgacgcaggcgcagtgactatcacgcttggccaaggccgcacggcgcgcatgcgcactagaggccgcccgccgtcccgcccccttcaggcttttgccccttctcggcctccgccaccgctccccgccccgcgcatgagcagcggcggttttttttcccatggcgctctggggcgcgggcgatttgtaggtaatggcaggcgttcggtcactgaggtgtagcagaggatgcgctggcggctgtgagtgcggcgacaagggcaaatgcagcgactcctcgctgttgggcaagagactctccgaagactcgagccgccaccagctgttgcagaagtgggcgag

SEQ ID NO: 27290 - DNA, 2300 bp, Homo sapien
atattccattatatatatatactgtatatatatacagtatatatattccattatatatatatactgtatgtatataccattatatatatactgtatatatacagtatatatattccattatatatatacagtatatatactccattatatatatacagtatatatattccattatatatatactgtatatatctactgtgatatatatattccatatatagtccacatatatatagtccacatatatatatagtccacatatatatagtccacatatatatatattccacatatatatagtccacatatatatagtccacatatatatatagtccacatatatatagtccacatatatatagtccacatatatatatatatagtccacatatatatatcttccacatatatatatcttccacatatatatatcttccacatatatatattccacatatatatattccacatatatatattccattatatatataatggaatactactcagccacaaagaggcatttgcagcaacctggactggattggagactattattcaggaataatagtaattcctgaagtaattcaggaatggaaaaccaaacattgtatgttctcactcataagtgggagctaagctatgaggatgcaaaggcataaaaatgatacagtggattttggggactcagggggaaagggtgggaagcgggtgggggataaaaaaccacaaattgggttcagtgtacactgctcaagtgacaggtgcaccaaaatctcacaaatcaccactaaataacttactcatgtaagcaaataccacctgttccccaaaaacctatggaaataaaaagtttttgaaaaaaagaacaaaaataataaattcttccaaagacaaaaaagaattgatattgctattctggggtcgtttgtgtgtacgttgtatattgagtaattatgttagtcttgttgggaatataattttaagttttggagaaagagatacagctaagaaagataaggttaagtaaaaactccatgcttgtgattttgaagtggaagcatcagtatgaactcatgctattttttatctcaaaaaataaatattttctagctctctacattgaattggtctaaacattataaccaacccagtagcaacaagcacccctatcatctagaccatgatagctaaataccattttctactaagaactgggattccttggagaaatgactgaattcaaggttcgcgggggtatccaatcttttggcttccctgggccacactggaagaagaataattgtcttgggccacacataaaatacacaaatagtaacaatagctgatgagctttaaaaaaaatgcaaaagaatctcataatgttttaagaaagtttatgaatttgtattgagccacactcaaagccatcctgggccacatgtggcctatggcaagcttgttctaggacaagaaatgtacaaaatgtacatagatttaagttcaaaaatgcattttatatatatatatttctgagacagagtctcactccattacccagtctggagtgtagtggcatgatcttggctcactgcaaccttcacctcttgggttcaagccgattctcctgcctcagcctcctgagtagttgagactgactacaggtgtgcacaaccatgcttgactaatttttgtattattttagtagagacggggtttcaccctgttggtcaggctggtcttgaacttctggcctcaagtgatccttctgcctcggcctcccaaattgctgggattacaggcatgagccaccgtgcccagcctcagaaatgcataatttttttaagcttcttattatttactgttggaagacgctaggcagggataaataggtgcagcataaaagactttcagggcagtgaaactactttgtatgatacgataatggtggatacatgttattatacattttcccaaacccgtagaatgtacaacaacagtgaaccctaatgtaaactatggactctgggtgataatgatgtgtcattgtcattgttggttcatcagttgtaacaaatgtaccactctgaggcagcaggtggataatggggaggctatgcaggtgtgtgggctggaggtatatagaaaatctgcccctttttctcaattttgctatgaatataaaaccgctctttaaaaaaaaaggtttattagaaagagagagagtaagaataggaaagagaagatacctgtaaatttaacaagacttcagagacacatctcccatcaagcaattgcaa

SEQ ID NO: 27291 - DNA, 2300 bp, Homo sapien
cagtaaaaatacactataaaagatttttttaaaaatagtacatctgtatagggcccttaccatgaatgaagcctccaggcctggaagttgccctgcatgaggcagggagtggtgagtgaatgcgaaggcctaggacattactggacactactgtagactttataagcaccacacttagcctatactaaatttatttataaaataaagtaaatgtgcaatgatgttatgttggctacggtgtcactagtgataggaatttttcagctccattataatcttatgtgaccactgttctatatggagctggtcattgatggaagcattattagtcagcatttgactgtatttgatctttgtccctggtagcacagaactcataaaacttgcaatatctgagtaatggggtaagagaagcatcttctgttaatcagcataagccactttcaactctacctgagtttatgccaatgaggtgggggctagttgtcagaggaaccaaccatatattagagggttgcaatgttcactcccaccctggaaaggggagagaggctggggattgagttcattcactgatagccagtgatttcatcaatggtgcccacataatggaatataataatcatctagatggcatagcacatgataaaaccctacaaaaaccctcctcaaggggcttcagagaacttccaagttggtgaacacattgaggtgctgggagggtgtgcacctggatcaggcgtggaaaaatccgtgccctttcccacaccctgccccatgtgtctcttccacgtggctgttcctgagttgtattcttttatgacaaaccagtcatctagtaagtgaactgtttgacctgagttctgtgtgtgagccattctagcaaatgacatagtgtcaggattgagttacattgtaggacacccagcgagtgtctaccaagaataggaaattgcttggtatggaaaagcccacaagtctggcgtcagaaatgtacggtgtagcgggagcagaggttttattttacttttcaagtagatattttgcccctcacttgggaaacacaagagcctcattcctccccttctggtcaactgaactaccctcaaagtgctccccaaggaatgcctcaggcgtggcaggcctcagcaaaaccagcggaggggctcaagttatctgggtggactgtctacactgtcaatacccaggtttactctgatactgtagacctgaatcaagaacacaagaaagctgggcgtattggagggaaaggccatgtaagccgtgtgttttggcctcctaattctcaaaggctaaattctagggttcctctcacctgtggtcctgctcattccagatgttcagaatgttcctcttgttagtgtctgaggatctcagaggagggtgtataatttggagtcaagctctacagaaacccagaagaatctgcgtcacgtgtggtatcagccaagagctgagtggactctatttcccaagagcttggaccacatggggttgtgtcagagataaacagccttttgagtctgaacaaatgcagccggctggttggttcttggggggcttagatataagtggagaggtgcactctgttggggcagggggctctcttttggttttaattaactggctatgagtacatgacagaggtttacaagttcacggctggcatcactcgatttctgccctcagatattgaatctaagccagcagtttggtggttgctcaatagcatccagaattgcttaaatgtaagtcaagggcactgtcgggcttacattttggttcttttaacttttcaagtatttaagacaaaaagcgattgtctttccagccctattgggcatcttctaaggggccctgggcgactatttcccgcccagctccctgtcctcacacagagagggatcctagggctgccctggaaagccgttctcctgcctctctgctctgtgtgctttggagttttatcaagaaggggcagatgggaagctctgctggatgctggcgttgtgagacacacccccctgacctttcttccagccaaatagctctgataagtgggcagaccttgagcctagagacccacagacacacttggacgattcctgcagaaatcagtgaggcagtctcctcccaggggcttggcgcctggctcgaggcgaggctgccggcccggacgctgactgcccagtgccacagacatggccaacgggaccaacgcctctgccccatactacagctatgaatactacctggactatctggacctcattcccgtg

SEQ ID NO: 27292 - DNA, 2300 bp, Homo sapien
tctctactgaaaatacaaaaattagctgggtgtggtggtgggcgcctgtaatcccagctactcaggaggctgaggcaggagaatcacttgaaccaaggagtcggaagttgcagcgagccaagattgcgccactgcaccccagcctggcaacagagcaagactcagtctcaaaaaaaaaaagaaaaaaaaaagaaatgtgtcctccctgggtggattctcctgcccgggaagtgctggggcagtggacatggccatctggagtgagctctggccaccacttcccagctgcctttaacgtcatccataaaatgggacaatattggctcacagatatcctcaggatgaaatgagatgatgtataaaacgacttaaatgtggttacagcgctggcacaaatgaagagtaccaagtgatgaacccactgggcagaggccatgctttcagatggcactcgcctaagaatgctctccccacctccctcctcccctcccccccccatcatgggaaggtgtcagctcctcagggaatgactcctaaatcttgctgaggatccactttgccgccctgagcattccaggaatgttaccaagtgccttgagagcattttctttagtaagccatgtagctggtcaggatgtatagtgtcatcagtttgcccctgtgaaatagcccagaaggcctgtgccccccagggagctgggcgtggtggaggcagcccctgggcttgccggaccagaccagggatctttgcaccttccctggcatagggcggctgcaggtcatctcagaagagtagtaaagaaaggtgacatcactcgtttatccctcagatgtgtcttgggtataaaaatgtgcttaaattgaatgtgagttctaaaaactgaaagaaaagaacagatttcaggctgtgcacagtggctcctgacctcagtgatgccatctcggctaactgcaacctctgcctcccaggttcaagcgattctcttgcctcagcctcccgagtagctgggattacaggcaccggccacgatgcccagctaatttttgtatttttaatagagacagggtttcgccaagctggccaggccagtctcgaactcctgaccccaggtgatccacccacctcggcctctcaaagtgctaggattacaggtctggagtttgagactggcctggccaacttggcaaaaccctgtctctactaaaaatacaaaaattagctgtgcgtcgtggcgggtgcctgtaatcccagctactcgggaggctgaggcaagagaatagcttgaacttgggaggtggaggttgcagtgagccgagatcacgccactgcactccagcctgggtgacacagcgagattcttgtctcaaaaacaaaaaaaaaaaaatgaatttcttcattgctctaaagctaccttccatatgtgaccaaaggtgagcggaaatggcctggcgagtgtagccctggtgggtgagacaccacgggcagggcaggcaggggcggggaggagaatcagaggccccttcaaggtaatgttgggctgtggtatggtttgtccccaccaaaactcgtggagacctggtccccagtgtggcaacactgggagctgggacctttaagaggtaatgagttttttttttctctagactgaattagatctttttacaaaatgaggccctcaccagaagctaagcagatgtcggtgccatgcttcctagacttctaagccttcagaaccatgagctaaataagcctcttttcttcataaattactcagcctcaggtattctgttacagcaacagaaaacactaagacgctgtgccaatgcgcgagtccacggctcttcacgggacctggcatgggacgcactggctcaggggctccaaggccactcagctcttcctcagcacagtttggctcatctctctgctgaccagcttcctacgcttagggtttccagtccccaagacttccgtccgtaatggacataatggtctataatggcacccagccctagtcctcctcctggaccaatcagtgcagcccccatagccaccaggtccatccctcaggttctagattccaaattccaaagatgagaatctgaccagtcccagctcttttgccagggcacacgtttccaagggcatgggccagccactggacaggccctcttcgggtgagcgatggcaaaatatagggtccctcctaagaacagtcattaggagagcagcagctgtgagggctgattagcctagaagggaacattggatgtgtcagccaatcctctagcacaacaga

SEQ ID NO: 27293 - DNA, 2300 bp, Homo sapien
gtttcttagaaagaaaatattttctgtgactctaacataagacagggtgttcccaaacttgcctctgccttcattagcctgcgaagactcattgtccatgaattctctggaatgtttcagtattttcctccgatcccttggagtcatgcttttggtttcctcagaagagctaaatttccctccaattctaccatgttacagaaaatacactgtgtacactcattatttctgatttgggagccaagttatgctaaccggaaccagaaggttggtagcaagaggattgtaatctcagaaggaaaaatgtcctgataaaaagaacaaggccttttgttttgtattgttcaaaactaaattgttaagtccgtgctggatagtcaacctttcctatgtagggatcttcggaagacatgctggtgtctaagaaccagttgctatttaaaatactggttttatgtttacaattgtgtggaactgatgttacaggctttaactgtcttggaattcagggagatctttttcctcctggtggtcatcaggttttggccgtgggtggtgacactgtcccagggcctccctgggtttttctcactttactggtggtctgtgaggcaagggaaactggcaggcctggagtggagccctcgcaggctcttggtaccctggctgtcaagctgtgtgtttggctgccctgtttagccagggtttcaggaggtttctgtgcctgtggggtgcaggtcagactccaggtcccctttgtgccttcctggagtggctcacttttttcttttctgcgtcctgggggcccatgctagatgtctgctgtgcaggaaaacctggttcctggagggactgtgtgcacctctgggtgtgtgatgtcgtcagggtgccgcagtgctgactgccaggcaggggcagcagcctttgctcagtctgtaacattgactcccaaacaggcccaccttggcccccgtccagctgaccaacttcttcgggacacttgactccgtgctgaggtaccgggccactgtcatacaggcctttagggacatgaacagattcaccgtaaatgagacagtgctttccaccaaggacgtccttgtcctcttgcacaagtggagcctcattgaaagagacctcaagctccaggaagacctgagagcagccattgagaaggcccaagcccgggagctcatgagtgagtgtcagaacccaggactggcccagagtagccaacatgtctctctcaccctgtccgtccctccctctctctctgtctctcagccacatttccaaagctaatgaggctcagagatgggacacatccatcttggagccctggatggggagctgggcagcctttgagtttcagcccagctgcttactagctccctgtctttggagaagtcacttcacctaccttagtatcatggtgctcacctgtaaagaggctgggggtagctatgagctacttgccccaacctcctcctgtagtgcagggttaaggaaaagactggaacctggcctcctggactgaagctctgatgctgtcctgattccctgtgtttaaagaggacagtaatggcttctacctcatggtgtgaggattaataagttggttataataacagtgatgacaggcgtagtgaaacatcgagcactcaccaggctcctgacgtgggagcagggccgggtgctcaggacatgcaagccgcccctcgtgtcccccattgacacctccccacatctggatctgtgtgggcaggagggaccccagtctcattaccttctctttgtgcatttaacagaaatgctcaaggataagaacaagcctgtcatgccagcccgagccaaaggcccacggggccgaaagaggaggcctggggaggcagaggagatggctgaccctgagctgatggcatctaccttggagacatgcaagggcctcctgaggtccatcttgacttactggagaccagtgatccctggtcctgaccccactcaggagcctgtggactcagccagccccgagagcgatgcgccaggccccgtatatgctgccgcttccctggcagtcagttgggtgctgcggtcggtggccgagcacccgctcagcagggcagaggctgcaggactcattggctggcttaagagccatattttgccacaccctgtggtcgtggctgacctccttaaggacagtgccgtgaggagcagcatattcaggctgtatagccggctctgtggggctgaggggctggcagggcctgtgcaggaggtggcctgcctgttcaatacgg

SEQ ID NO: 27294 - DNA, 2300 bp, Homo sapien
agccataaaaaacgatgagttcatgtcctttgtagggacatggatgaagctggaaaccatcattctcagcaaactatcgcaaggacaaaaaaccaaacaccgcatgttctcactcataggtgggaactgaacaatgagaacacatggacacaggaaggggaacatcacacaccggggcctgttgtcgggtcggggggaggggggagggacagcattaggagatatacctaaggttaaatgacgagttaatgggtgcaggacaccaacatggcacatgtatacatatgtaacaaaggggcacgttgtgcacatgtaccctaaaacttaaagtatgattaaaaaaaaaagaaaagaaaagccacttcctcaggggagccttctttgagctcccagattagatccaaggtctgttaaacaccctcaggcaccatgtacctctcctttggaaaactcgtgcttgaaactgtatgtatgtgattttactgaccaatatctgcctgccccactcgactgtttgtaaaccccacaatggcagaggctttttgacatttttattcatcactttatctctaccgtagcaaataatagcctctagtaatacttaatgaattcggaaataaataactctatgctaactaagtatcatcttcctagctgtgactagcaagtacaggtataggtatcaaagtttaaaaacaggccaggtgtggtggctcatacctatactcccagccctttgagaagacaaggtgggaagattgcttgagactgggagttcgagggcagcctggacaacatagtgagattccatctctacaaaaagtaaaaaaaaaaaaaaaaacatagctgggcatggtgttgtgcacctacaatctcagctacttgggaggctgaggtgggaggacagcttaagcccagaagttcaaggctgcagtgagctatgatagtgccactgcacttcagcctgggcaacagagcaagaccctgtcgtttaaaaaaaaaaatgaggacaaaaattggaagttgaagatattttggccattaatttaatcgtttatttaacctgggagaaaaactgccactgttttattttagagcaatgcttccacatggcaacacgttcaattgcgtttttcccaaaccatgttactttccaaacgattacaagtagtcgcgaagggtggtcacactttacaaaaagtgtaattaaattatagagtcggctacatctcagtcactggcccattcctggtcaactgacaagtagctgtggtggcttctagtagcttgttacaagtcatcaagtcagtatgagtgttgggggatggaagctattgaaaacggtgctgacggcccaaggagtagcaaactgtctcatgaaccgtcctgagccgactcagtaaggactcaatagagaaggacacttcatttacttccctgacaactgcaataaagaggttttagagctcgctgagggatgctgcctgggcaagggaaataaatgtgttgtaacatgaaacggtcccaatcaagcaagtcggggccctctcgctgtcgccgacagtccagagcaaggaagtacacagcagtcctgaacctcagttttctgcaaaccagaggcttgccactgagcctatgtgacccgaaagctgcagaaaggagaggctgtgcccggcacacggaggccgcctcgccagcctgtgctcccgaccctgcgcctgccgccccggactcacctggcccggggccctgcgggtccttcagctgagccttgaaccgcacgcccgtgagctcttctttgcgggcgcgcttggctgcacccgcggaggaagccgcgccgtcctggccgcccgaggccttcctcttggggacccccatggccgagagggcggaagcgcgacggaaacgacacacctgaggggacccggcaggagcactggcacagacagcagacacgcgcttcaggcccacatggcgcaggaagaggcggggctggcggaagaggcggggctggcggaagaggcggggctcggggaaaggccggcggaaggggccgacccgcgcgaggctgggaccggcggaaggggcgtggcctgcagaaggggcggggcgatagggatccagagtcttggggatccagagtcttggggctccatgtgagtttgctgtaccggttgtcccggtcacggcatggggcgagcggacactccacgacaccccccgcccccggctgcagggtttggggtccaccggggcgcatttctgatcccagtggctcttcgggtgctcttggccggaag

SEQ ID NO: 27295 - DNA, 2300 bp, Homo sapien
tttttcctcagcttagaatgtcctaggagcagtaccacatagtctgcaacaaaccagaatgctcctggaggcaaataatacaaagctttgatatggaaagacaagtcactatccagaggttggtgagcctcatatctgaacaaagggttaacccagcatcaatgattcatggcattaacttagtctaaaacatccaaatgcacttctgagccacacttgccatccatacatctctggctaaggctgtaaatgggcactgccaacttctgtttctttgtttttaatttgggactaggatacactgggtgagtcctggctccaccagttactagctggataatcctgggaagttcctcatgctctttaattgtttgtaaagcaaaccagcacagagggatggtaatttgcccaaggtcacacaggcagaaactgaactcagggcttttgactgtttcctaactctttctgataactttttggttgggaccaccatggcagaaaacaaagttggtggttagcgattaaccaaagaagaggaccagtgtggataatcagtcagaattaagtctgtattcactaatgagtgttgccttttacagatgactttttgagcatattcccctctcttaacattgctgcattagctcatatctgctaggggtgacaccctctctctgacctgcctacaacatagacatctccacaggcacaatcatcttgtcgggacagaggctcagcgtcaacacacgtgctttttctactagaaactctgagaccccaacaggccacaaaagcccacatcctcagatgttcaaaacacatctgcttacagaatatgaaacacaattttcttagactagaggacaacctgatggagaatttcagtaatcaccaagttacttatctaatgcgctggttcatgatttatttggacacatacctaagtatcgatgaagtcgtattaaaatatgtaccagcctgtttttacttatttttactttcattttatttcagagcatttaatgcggtttacaaatcaatcacatcttccaaaaacacactgtgttgtttttctcctcaaagcagtttttcatacattgcatcattttctgttcataacagtcccaaggactggatagggtcggctttgctgtctccattttaatgacaggaacttagatgtggaggccttacgctgtccaggaaggggttttacagacgttacttcgtttggtcttctcctcccaccctgcacggcgcaaagagcccatcagtttgcggaagtctggggtggaggacagtctggagtgacaggctgctaccagaccagtcgatctggttcgggctgtgacataagctaggggtcgaagtcaggggcacccgcacaggcggacctgcctggcacctagccaaggcgaatccaccttcccggccagccaccagggccttgaattggcaaagtatcgaatcctgttgtgtgtgaagcaagctcttcatgcgacaccttcagggcgacctcgggtcaagaactactcattgtgctgcttggacgcgccggggcccgagtcttcgtggatcggccaggccaggagtgaaaggtctgggagttcttccggccaagagcacccgaagagccactgggatcagaaatgcgccccggtggaccccaaaccctgcagccgggggcggggggtgtcgtggagtgtccgctcgccccatgccgtgaccgggacaaccggtacagcaaactcacatggagccccaagactctggatccccaagactctggatccctatcgccccgccccttctgcaggccacgccccttccgccggtcccagcctcgcgcgggtcggccccttccgccggcctttccccgagccccgcctcttccgccagccccgcctcttccgccagccccgcctcttcctgcgccatgtgggcctgaagcgcgtgtctgctgtctgtgccagtgctcctgccgggtcccctcaggtgtgtcgtttccgtcgcgcttccgccctctcggccatgggggtccccaagaggaaggcctcgggcggccaggacggcgcggcttcctccgcgggtgcagccaagcgcgcccgcaaagaagagctcacgggcgtgcggttcaaggctcagctgaaggacccgcagggccccgggccaggtgagtccggggcggcaggcgcagggtcgggagcacaggctggcgaggcggcctccgtgtgccgggcacagcctctcctttctgcagctttcgggtcacataggctcagtggcaagcctctggtttg

SEQ ID NO: 27296 - DNA, 2300 bp, Homo sapien
tccccagacccacttttcttttttgagacggagtctcgctctgtcttgcccaggctggagtgcagtggtgcaaccttggctcactgcagcctctgcctcccgggttcaagcaatactcctgcctcagcctcccgagtaggtgggactacaagcgtgtgccgccatacctggctaatattgtatttttagtagagatggggtttcaccgtgtgggtcaggctggtcttgaactcctgacctcaggtgatccacccacctcggcctcccaaagtgctgggattacaggcaccagccactgcagccggccacatgccatatattgtttatccattcatccactgaggttcttccatctgtcagctcttctaaataatgctgcaaggaatattggtgcataagtatctgtttgagtctgtctctgcttttagttatttggcacacatacttccagggcctgcttttgactcctccagtccatttgcactcagcagccgagaaggactttttaccaacacacatccaatcacatcacttttgtacttacagttctttgctggcttaagataaaagacggaaattctcaccaaagtctccagggccctgagctctggcctgcctacctccaagtcccctggctcttccctttgctctgctccagctgtctagacttttccccatccttcaagacagccatgctccttttggatttcaacatgctggtccctttttctaaaatgttcatcctcccgcaacacccgggttttgctagtttttgcttggccaattcatcctctagctttctcatccatcttgccttaaaatgctcctgaatatctcccttcctccctcgggctcagctccttcattcctcgcttctgctcccatggttcctgtctttcgtgactgtccgttcacggggcattattttccaatgtctgtcttccctgctgtaatagtaactgtatgcattcatccactggagttgcttccatcttttggccatcataaataatgctgcaatgaatattggtgtgtaagtatgtttgagtttctgctttaccaggtaagaaagcctggggatgctgtcacagtgagtaacagtgcccacttagacatttggaagccagtgcagacccacagggcagtgctgcccactcccaggactcgggagcatggctgcctccctgtgccaacactgtcagtcactagcgcagaacctggcacacgttggtaccaattcatatctaaactggatgaatgaacagacagaatggaaagtacaggagggacccgagttttggacaaacattacttaccctgtggctcctaagtgctgggcatccttacccacactcccagcttcagtttccctaacctagagagcgcacactaatatttatgttcaaatgttattggggaggttgagtttttatttaatatttgaatgtagattttaaaaatcattatgccagacaggctgggcctcactcgataaacactgatgtttagcatttaacacacttttccccagactggaagaagaggccgagatcccaattcggtgacccagcccttgctggagtactaggtggtatctaatgccatccacccttccgggatctttacggcccacctctgagtgggtcccacggggacctcagccgcattttctttctgcaggcctccctgcacactctggggcgttcgcagctctggagcccgcggggcagtgcgtccggccccgccctgggcctcattatctacgtttccgcgtcacgcccgccgcgaacttggcaggccctcccgccgggttcgggaacactgtgtgcctagcgcccgccctcctcccttccgccggccccgcgcgatccatagggtttgggtcgctgggcgccaggtacccgcacccggcaagcagccacggagcccctcgcgcacttgtcctcgatacccttgagttggggctacgcaggccactcctaggccactggctgggcgtccgaacgtgggtcaccccgcgcacagtctagaggttcagaaagatgctgtggcccactttaaaacaaagcccaattattagcgctcggcggctgtttgcgccggtgcagtgtcagatcccccagcgctgcggacaaccagcacccaaaggaagccgagctggagctaaagatcccggctccggagccatctgaccggttttgagacctccagctcgtcgccgtcctggctgcgagagcttgggcacggcgccggggctcagtctcctcttctgtggaatggcgataactgtatgtgccggg

SEQ ID NO: 27297 - DNA, 2300 bp, Homo sapien
tccttttggatttcaacatgctggtccctttttctaaaatgttcatcctcccgcaacacccgggttttgctagtttttgcttggccaattcatcctctagctttctcatccatcttgccttaaaatgctcctgaatatctcccttcctccctcgggctcagctccttcattcctcgcttctgctcccatggttcctgtctttcgtgactgtccgttcacggggcattattttccaatgtctgtcttccctgctgtaatagtaactgtatgcattcatccactggagttgcttccatcttttggccatcataaataatgctgcaatgaatattggtgtgtaagtatgtttgagtttctgctttaccaggtaagaaagcctggggatgctgtcacagtgagtaacagtgcccacttagacatttggaagccagtgcagacccacagggcagtgctgcccactcccaggactcgggagcatggctgcctccctgtgccaacactgtcagtcactagcgcagaacctggcacacgttggtaccaattcatatctaaactggatgaatgaacagacagaatggaaagtacaggagggacccgagttttggacaaacattacttaccctgtggctcctaagtgctgggcatccttacccacactcccagcttcagtttccctaacctagagagcgcacactaatatttatgttcaaatgttattggggaggttgagtttttatttaatatttgaatgtagattttaaaaatcattatgccagacaggctgggcctcactcgataaacactgatgtttagcatttaacacacttttccccagactggaagaagaggccgagatcccaattcggtgacccagcccttgctggagtactaggtggtatctaatgccatccacccttccgggatctttacggcccacctctgagtgggtcccacggggacctcagccgcattttctttctgcaggcctccctgcacactctggggcgttcgcagctctggagcccgcggggcagtgcgtccggccccgccctgggcctcattatctacgtttccgcgtcacgcccgccgcgaacttggcaggccctcccgccgggttcgggaacactgtgtgcctagcgcccgccctcctcccttccgccggccccgcgcgatccatagggtttgggtcgctgggcgccaggtacccgcacccggcaagcagccacggagcccctcgcgcacttgtcctcgatacccttgagttggggctacgcaggccactcctaggccactggctgggcgtccgaacgtgggtcaccccgcgcacagtctagaggttcagaaagatgctgtggcccactttaaaacaaagcccaattattagcgctcggcggctgtttgcgccggtgcagtgtcagatcccccagcgctgcggacaaccagcacccaaaggaagccgagctggagctaaagatcccggctccggagccatctgaccggttttgagacctccagctcgtcgccgtcctggctgcgagagcttgggcacggcgccggggctcagtctcctcttctgtggaatggcgataactgtatgtgccgggtgactgcacgtggcgcgcggcgggtggcggggatggcagcggtgcgatcccacgcctccaggaccccaccttcctgcggcccccgatcggccccgccccgggggcgccccagctgcacgcgcggcgctggctccaaagtgcgtcacgggcaccggccgcgctccttctgccgccagggcgaggctggcacccggccagcgcgggcagggccacgggtgcccggctgtttcccgggtgtggaaggcgctcaaggtgcgcggcccggggcgcgctactgggggcgccctccgcggtgggcagcgcgccagggatcggcctgggcagccgcggggcgcgcgaaggctgcgctttccctacggcccccctcgcttcctccggcacggcggcaacggagatttcctctcggggaaactacgcggatccttttcggggatcctcgccccgccccagttctccgccccctcccctttgctggggcgcctgggctggcccgcgcaggggaggaggctctggcagcctgggcagggaggcggcggggggccgcggagccgctggccatcgattctccccgccatgtgacgccgtccttagccctgcgacccccagcgcgtcccgggcctgcgcctccgccccgccgcgcagcgcacgatgcttctgccgggacgcgcacgccaaccgccgacgccccagcccgtg

SEQ ID NO: 27298 - DNA, 2300 bp, Homo sapien
cagaataccactctcagaataagaatatggtaaggccagttggataggtggggcatggattggaggctcaggccactgcaccgcacgtacaggtcttgatgtaaatggtctggaggaggtcaagttctgtttagcggggatagactatgtgacagagtgaagaaagataatggtctaaacgcagcaaaagtttcattcccactcacgtgacagtctgtggagcaggcagctcctctcttcatgaacctgggacccaggtatcttccatcttgtggctctgcttctctggagccttgtcattttttttttttttcatctagctacagtgacaagatcttttggataagccatgaatattaaaccaaaggcaaactctgaaaattgatttgatgtgtggtcagctgcttatttattccccggaccacagtccgggaatgctggggtgatggacaagaaggttttcatgaggaggctgaagagatctaagtataggggtgccagcctggggcacttcagaaggggcactggcctaggggtagcatcagggtgaccctgagttccctggggcagggtgtggctcatgacagggtgctgagaacccaccaagaaggctggaattttcagtactcattgttttatgagggcctgcctgtgtgccaggcgggaagacactgaccagaggcccagggccactgaggggtcttggcctggtctcttggtgcctggggggtacactgtgcaagcaatgatgtagttccaaggggcaggactctgacccacactcctggtgccaatgtccgttttgccactcatgttagattttgcttctctaagtgaacttactcaggatagctgggttcttggccattcttccagtggttttcaagggtgaaaaaaggagtttcagcaagacagctaacgtctggatgaacgtgccaggaaatgtctgtagccttcctctagagagcactctgggctggtgggcgtgaggaccccagggcaggctggctcagcccctttgacttcagatttcagggaaggccagggagctggattgggcgcctggattttccgagaattatgtttctgagaggattttgaaacctaaacaggaatactttacacacaggtcatcgagcaggaatcgggaagttcctaagctgccctccttcacgccacctcctcccttcagagaccaagggctgccaagctgtctcccacacacctcagtgaaaagtccctggctctcctcccagccgcctcgctgtgacctcgtgaggtgtgagaaggaggaaggggatctacattctggatgaaccttccttcctccttgccgagaaatagtttaggcccctgcgcctgctgggcctcagagcttctcagagcccagggctgagtgtggctcctgcaagctgcctgggaattccatggagtctgactggctgcctgtcttattcacagtctgctgcaacccctttcctaagcttgggtggctgaaaacaacagaaattcatcctctcacagttctggaggccacagtctgaatccaggtgttggcagggctgtgctgcctttgaaggttctagggaagaatccttcctggccttttccagctttgggtggtggccggcaacgctcggcattccttggcttcaggtgcatcattccagctgcagatggctgtcttccctctgtgtctcttcttttcttcttataaggacaccggttatatggtgttaagggcccaccttactccagtatgtcaccaacttaattcattacatctgcaaccaccctatttccaaatgtcacattctggggttcctgatgaacgtgaatttgaggggacatcattcaacccacagcagagccccaccatcgcctccctgcaccacgcccttggagcaggccccttctctacgcagggcaccctgcctgtctttcctctccagcagcaagacagagccaagagtgatttcttgaaatgaaattgcatcctctcattccaataaggcatggcctcactagtgggagatgagcaaatgaaagcctccctcaggatgggcatccacacatccaggggacactcaccccgatttttttcctggtttataaaggtgcttcaggactccttggctcctggccaatatcttagtgcttcctgaaggggaaagagccctccaaaccattcagtgggccatcccagaccgaggtttctgacccagacattgaaacaggaggagttcccttatccccccttgcagggcacgtgacaggggcatggctcgcttctcagtacc

SEQ ID NO: 27299 - DNA, 2300 bp, Homo sapien
gcggaggtgatgtgtgtggcactgtctccacccgtgagtctgagggctcgcagcctcccgtgctccctgcttctgcactgcggtcttgcacctgctgcttgtcggcgtggactcctctgaacaggggtggcgctgttagcttgggagccacagtacaggatgctattttgtctcttgttgggaataggcccccagatctggccataaactggccccaaaactggccacaaacaaaatctctgcagcactgtgacatgttcgtgatggccatgatgcccacgctgaaggttgtgggtttaccagaatgatggcaaggaacacctggcccacccagggtggaaaaccgcttaaaggcgttcttaaaccacaaacagtagcatgagcgatctgtgccttaaggacatgtttctgctgtggatatctagccagagcccatccctttgttttggcccatccctttgtttcccataaggaatacttttagttaatctataatctatagaaacaatttatcactggcttgctgtcaataaatatgtgggtaaatctctgttcacggctctcagctctgaaggctgtgagtgccctgatttcccactccacatgctatacttccgtgcgtatgtctttaattcctctagcactgctgggttagggtcttcctgaccgagctggtctcggcagtctctatcacatttttctttgttaaaattagctcctctttagaacattctcccagccagtgtgtctcttcctgtcccagctttgtgtcaccctcatactcaggaagcaaatctcgtgagtccacagccagcaactgatactgggttgatgtggatggagaaggcgcccccaactcctgaagatgatttatcccctcgcattctttcccaaagcaactgctgagcagataacactttattccctgaaggaagatcagaaatctactccaagcatttgtcacaagtaggaaaagagccttttcagatcctatgagtacaaaacatcgtaagtcccagggtggactgcacaggcccagcctcctgtgagacgcggacttctctcatgctccatcattgacctgagttaatcacaggcatgcggggcaatgtacgagtaaatagataactgaatgggtggcttatccacgccttgaaaccatcaattgttaaatagtgcaaaatgtagaaaattatttttattatgcatttttgaattgagtttcaagcactttatttcactgttgactttacaatatcagccatgtattggaatcccaaatttcacaagagcgtgggctgtaaaatggggaatgagagacactaagtgtggatacctcatgtgtccttctgtaggaagggggagtagaatcatctacattctgtgatagctggtatgatgtgttgcttaacatttaaaaataatataattgttactaatgcaaaaatattcccacatttgttttcagccaatgagtttaaagatagaaagaattagctcgtggaaaacaccaccacaggaaaatagagataaaaatctttccaggagacgtcaagacagaagagcaacacctactggaaggccaactccctgtgcagagagacgggggggtgtctgaagatggaaaggtggcctcggacacctgtgtcactctacactggccccttggaaaattcagattcagataaagttccacttaggtctaataaaagtactcaatttgttattcaaaatagacctagtaatttattaaactaattatgtttctatagataaaaacttgaagttcttcagacatgtctctaatgctataaaagcaaacaacttggattgggttttataaatcagttgctttcctgagctctgtagttggtatatttctgcagagtctttaaaaaaattaacccaccttgtagtatggagtgtcgggctgttgggtgagccctggggtcttgctggaaatcgaggatggctgaagatggctttgtgctcccagcctttgggctcaaggcattgcccgctccagggaccttgtgacaaggcgggcctgtgactgtcattgccccaggctatgcatccatcttcccgaagtctgcaaaacttgagtggcagaaaatcaccagtgcaggcttcccaggccgccatgctgcaggagcagatggcagcagccggaggagctggtgagcagagttggggactcctgtttctatgctccccgtgaaatgcggggctttctcgtggatacgcgtgagcagaacatcttactatggcaaggacatgtccttcctggagctgcctaa

SEQ ID NO: 27300 - DNA, 2300 bp, Homo sapien
ggtctgtaccactatagaagtagtcctttgaaccagaaatttaaacacataagctactttaaaaagtgtatctgctgctactccaagcagccagctcaggaactggcttctgattttaaaagatgagtgaaaggtgtgccgtggtttcctctacagaatgttcagaccagagggccctggaagaccatgcctgaaatgcggctaaggcaccgcgaggctgaacagaaaaccggggccttatcagagagaagagaagggccccacagtccaaacgcccaggagcctccgccctgacctgctgccgcacgtggttgctgcagggtgagaatctggggaagactcaatgaagaaaatgtcctggccaggccgggaagagcaacacacagagagccgcagcagagacagggatggggggaccctgccctgggagccgcccggctgaggctcaggaggggagctgcaaagcctgaaacctacacaacctctcacacacttcaggacacacacaacccctcacgcacctcagggactcacacaacctctcacacacctcaggaagctacacaaactctcacacacctcagaaacctacacaaactctcacacaccccagggactcacacaacctctcacacacctcaggacacacacaacccctcacatacctcaggaacctacgcaaactctcacacacctcaggacacacacacaacctctcacacacctcaggacaaacacccactcacacaccccaggacccaagcacaacccctcacacacctcaggacacacacacaacccctcacacacctcaggaacccatataaggaacccacacacctcaggctcatacacacaagccctcacacacctcaggaatccacacacaacccctcacacacctcagggtctcacacacaatgttgacacacctcagggtctcatacacaaaccctcacacacctcaggacccacacaattcatcacacttctcaggacacacataaaacccctcacacacctcaggggcccatacataacccctcacacacctcaggactcacacacaatcctctcacacacctcaggactcacacaacctctcacacaccttaggacccacacacaaccactcacacaccttaggacccacacacaacctctcacacaccttaggacccacacacaaccactcacacaccttaggacccacacacaacctctcacacacctcagggacccacacacaaccactcacacacctcaggacccacacacacctcatacacctcagggacacacacaacccctcacatacctcagaaacctatataaactctcacacacttcaggacaaacatacaacctctcacgcacctcaggacacacacacacacactcgcacacctcaggacacacacacacactctcacagttagaatgacacatggggacaaaagtgccttctgtttcctctttgtagtattctcttcattcattcatgacgtcggcatttactgcctattgcatgcgaatcgcttgcagaactatccaagtgacacacgtcccaagcaggctcaggtgagccccaggtgtatgttgtccacacgcagcaccatggatgagaaggacagccagggtttaacaggaatatcgactcttgcttgctcctcattctcttctctatcacaaaaatcacacggacaattcagatggagatgcatttagtgaaatgatgaaactttgaatcctgtctcctatttaaactcacatatattattttcccttcataaaaatgttttttctagtaaataatttgatatccgaagaaagtttgtatttctccaagaatgtatgctcagagaaatgagctcttactacacgttgcgtattgaagactggatataaaacacatggtttttgtcaatttggaggagtagtttgactctctccaatgtcctttgtggatggatggactccactgacgatgagcttctatattaagaattgcaggtttggggatgtttaattattatctgagctggtacagtggtgacgctgagtgagacgttcatgtccctttaagacagaaagtccgttggaactgtccgctgctctctggtctctggatatgaggcaggagggcttggggacaactgtggggacatggcccagatgatctgatcctggcagtagtgactgttggggaccaggtgaggtgacgaggtctggtggtggggctgaaggaaagggtcttccctggactgagggggtcatgagtttggggccgaggacactgg

SEQ ID NO: 27301 - DNA, 2300 bp, Homo sapien
tctgtgcctgttaatataggaaaggctttatgaagctctacaggagaggccctggttgagcccgtcgtttgcgtggtgatggcatctaggcatgtgagcacgtctcaggccatggcaagaaaacagtggtctggctgttgttctgcacccttctccccacactttgctgtggaactcctctctcggtcgcctcacttctcccctttgcctgtgtacttctgaaagtactttttatccttggtcttcttcctctctcagtatcttatctactctgccaaatgcaaattccaccctctgcagataactctgaagcttccatcctttccccctgacatcttgcttcacttccaacctgaatttccagctggttgtgagatggttctatctgaacacccagtcagcactttgaagtccagttttctagaaatgagctctttgcttcctcactcctctccctctctgttctgtccctgagaatcagcacctcctatgagcttctctgtttccagtaacagaaccacagtgtcttggttttatagggcaaatcctcagtgtcatcttcaacacttctcccttctgtcacctctaggtttgaagtggggttctgtaccgtctgctcccatgatgcctcttaagtccacctcttcctttcacttccacagctgtggctttctttaaggctctcctgtagccttttgcattctgatgcccactgggggtcctgccagtcaattcaattccgttctgacactaactactcagagacagcacagaccccacaggtcaagggcagatccttcaattctgacactaactgcctggagttagcatcagacctaaaagttaaagggtgagatcaccaacaagactcctcttatttcagacaccagctgcacgtgaggtccccaggccacccatacttgtgtccagcttgactacaaatttggagcttcccacaacgcccccactgatgtgtgtcacccggcacatcaacgtcttcaccaatcaggaagcttcactgagccatgatgtctgggatttttatagcgtttttgttcagtaggcatgatggcttaaaccactggccacgtgtttgatcccaacctctagcgcctggaggtggaggaagggagtgaggccgaaagctccaaccctctaattatgtgcttggtctcccaggcacggccagccccttccttgaaacccagcgcggactacaggttactgtattagcacaagctcaggtatggtgagaaggggctcgttataaataacaagacactcctgtcactcaggaaattccaagagttttggagctctgtgcctggaactgagtagcaaagaccagatatatttgttatttcatcacaccttcctctgtactcttcagagcctgctacctggtctccctccaactaggtctgttcttttttttgaggcagagtcttattctgttgcccaagctggagtgcagtggcacgattttggcttactccaacctctgcctcccaggctcaagcaattgtcctgcctcagcctgctgagtagctgggactacaggcacctgccaccacgcccagctaatttttgtatttttagtagagacagggctttgccatgttggccaggctggtctcgaactgctgacctcaggtgatttgcccacctcggcctcccaaagtgctgggattacataaggtgtgagccaccacatctggccaactaggtctgttctatatcagctacaagataaatctctcaacattaccactccttcccagaaaaggcagtcgcttcccgtggcctaacagaggaaaggtgaactcttcagcctggcttttgtggccattcaaaaacaaacttcagctgatccagctagagctggcctcatcttctctccttcctgccccatgctgagggggctggcgcctgcttttctttgtttcagcttgtcctgaagcacctgctgccatctgtaccttttcagcccatctgcatttcgaggcccacctgcggtgcctgctccgcctgccgtatctcccgatcctcactgccatctgtgctgccagcattgggctctttctcctttgagaattctttgcacttcattgtactccatgctcagtgctgctcaccgtctgctttataatacaggccacggtgtgcttcgctcagcccctgaaatagatggtagtcactctgggagcaagaactgtttgatttctttttgttgctctggcagtatctggcaagggtcttgtacaagatcttgatcgaatttatggaagtgattagccaca

SEQ ID NO: 27302 - DNA, 2300 bp, Homo sapien
gaaactttagggatattgtgcccattttattcttttctatttcccattttatgtatatgcaagtgtataataaagcagcaatcaatgtgtgtataaatctgtaacttcaacaaatgtaaaatgaaaatgctaagtggtggctgggcgcgatcgctcacgcctgtaatctcagcactttgggaggctgaatcaggcggatcacctgaggtcgggagttcaagaccagcctgaccaatatggagaaacactgtctctactaaaaatacaaaaaaaaaaaaaaaaaaaaaaaattgccgggcatggtagcgcatgcctgtaatcccagctacttggaaggctgaaacaggagaatcgcttgaatacgggaggcagaggctgcagtgagccgagatcatgccattacactccagcctgggcagcaagagtgaaactctgttaaaaaaaaaaaaaaaaaaaaaagaaaagaaaaaaagagaaaatattacttccattatcgcagggggtgctcacccctgatgatattgttttctaatatccagggaaggagagtatgatattactcccaatatcgcagggggtgtacacttttttgtgatattgtgtctaatatccggggaaacagaggatgatattactcccaatatcgcagagggtggacacccccctgggatattgttcctagtatcccaacggggagaggatgatattactccccatatcgaaggaaatgtacaccacccctgtgatattgttcctgatatccagagaggaaaagaatgatattactcccaacagcgaaggaaatgtatacccgcgctgtgatatttttcccagtatccgggggggagaggatcatattacttccaatatcgcagggtgtgtacaccccctctgttatcttgttgctaacatccaggtttggggaggaaaacattactcccaatatcacagggggagtacacccctccgtgaccttgttagtaatttcctgggtggagaggatgacattactctcaatatcgcaggggtgtacaccccactgtgatatttttctaaatattcagggcgggagacgataatattactcccaatatcgcagaaggtgtacattccctgaccatcaaacataagaagtccatcaacctgtttagttttctttagatctgtatttgaatttgtgttgtccgtttgtttatttattatttttgagacacagtctcactctgtcgccaaggctggagggtagtggcgcgatctaggctcactgcaacctccgcctcccgggttcaagcaattctcccacctcaggctccctagtagctggaattactggcacgcgccactacgttcggctaatttttgtatttttagtagagaaggggtttcaccatgttggccaggctgctttcgaactcctgacctcaggtgatccgccctcctcggcctccctaagtgttgggattacacgcgtgagccaccgctcctggcctgtccatttatttttgttttctttttgtcacactaaaatataagctccatgagagcagtgactctggatctgtggggcccggaataaacagcgactgacgccgactgccttcagcaagagtccgctggaggatggctggatatttctgggagggtcgctctggcaggggccgctggagctaccccagcaacgccatccaaatcaacctgaacgaagaagtgcggacactcgccctggcccctccgtcctgaaaagctgacccgcgcaaacagcagcgaacagcaagactcagttctgggtcgctgccgccgaactttcccaggccggaaacagcgtggaaacgttgccggaagtggagactgaaagcggcggaagggacgctggaatgtggagcggttgtggggcggcagctgcggaactgcgcgattgtggttcccgccgtatttcccgttccccatctagtaactcccatctcagcccacgtatctccctgagtggaaatctcgggccccagaccagtcgattgggaggtccgccctccccttcagcgacttggtctgtgttttggcagttgccgcgacaacagtcacttccgggaaggggctctgcgaatctccttccgtcggtccgctcagaatcagctgtcctctcagactgtgtgggtggtttccccggccgcagctccgtacgggcttggattgctgggcctcggtgcaccccagcctcccccactcgggttctgagcttgagctggcggctctttaactctgcttcactgttgctcttggcaacatccacttccgggagcgag

SEQ ID NO: 27303 - DNA, 2300 bp, Homo sapien
ttttttgtacagaaagggtttcaccacgctgcccagactggtctcaaactccccgcctcaagcgatcagccccccttggcctcccaaagtgctgggactacaggcgtgagcccccacacctggcatatcttacattaagaaagacccagtatccaaattaattttaatttcatccatctgcccctaaaataactcaaacattactaatctatttttcttgtggtacaatagtccttttctttaaattagactatcaaaatacttttaaaaataatacaaaatcaatcatgtatctcacatgaaaatctagaggttgtttacaattcccttaatgaaaacacaacggccataacagaaatactccaacaatattggataatattagataatacctactactataactgacctaccagtaaatatgtcaagcaagacactgtatgggtttatgtgatacatgatacaaactgaaacaatatttctttggaaaaaacatttacttttagaagcagcagcagaacccaagaaagcaaaatcctgcaaccaaaacctgcatctccctgcaccccctcaacaaaaacctgttaacaaaaagtttgcaggaaaataagtttgattaaaaggaaatacaagcataatctgctagaggaaatacagtgaaagggttgtcgggctcttttctaaaaaatggttgcatctgaattgtttcaaatcaaaacagagaccatgacaaattgggctctaacagatgacttacagagcacagcgacagccccagactcgaacatgagacattcttccttatgcctagtttccactatgaggctgaaaggtgggggatccaatttgtgatagatccggaatcctttactgaacgccattctcctttcttcggaggcagccctgcgaaaaccaagcaaagcaaagcaaatgaagctgatgtttccttctgcagcaaggactgcaaagcatccaaaagtccctccccgccaggttttgatggggggttggggtgggaaaaaacagacagctctgggagaaaatggctttttccaaaagataagtcgtcacttaattttaccaaaaagcaagaggaaaagctatcaattctcataccaaggcaagacaaggttttagcactgtaagtcaatcaacggtctggttgagtttcccgtttaatttatgcttactgaaaggaaaaattttgagcgtatttcgtccggagctgtttatcagcttcctgcttcaagatctgtcactacgttgaaagggaacctatttggaaacttcaagcagttccttcgaggtgaaaggagcggaggtgggagggaagggtgacaaggctggttcaaagctccttagggggcaggagaaggaaaaggattatcccacgcgacaggctctcccgggggtggcgatgaagggcaagggaaaaggcacaggttaccgccgcctctcctgccccgggctaccgccggctggggggacggcaggcggggccgataaatacgaatggccacccgggaagagtcacgactcggggcaccgacccgactggggctcctcgggggtcccgggcagtcgactgcccgggaaagcggctccttctcggagagacggaagagccgagcagcccaaaccctccatttatgcgccagaagagataccccggcgcccaggcggattcggttcgttcccgcgggcgggctgacagccgctgtcaccacagcccccagcctgacgcggcaccccgcacaaccagtggtctgctcacaaccccgcccgtcctcccgcaccccggctgctcgcggtcgcccctcaccgctcccgctgacgctgcggaggcagagactggtcttggaggcgtccgcccgcccggctgcccgtgggtctggccgcagcagctccccgccccccgccggcttgctcacctcttcctccggctcctcctcctccttctcccgcagccgccgccacagccgccgggagcgtcacttccgctccagcaggcccatctcttccgcattgcgccgcggccgggggcggaagatccgccccgcgcgagggaaggggcggggcatcaggagggagaccacgcccactctgcgccgaccggctgggcctggcacccgcgggcggccccagcctcagtctccagctacctttgcctcctgcggccgcccccaggcagagctgcgatcccaccgccgggggtgcagggagagggaagatctggcctccttggtccttttgcgtgggctcttcagagcgtgagcgccggggagggactccggagaaaa

SEQ ID NO: 27304 - DNA, 2300 bp, Homo sapien
agacatttcaaggtcagtgaaaatttttccaactattgtcaaatgctgtaacaaaagtagaagtataaataggaaagagggacaagaaaaagaagatagaaccaatcaagccactagtcaaattgcctttatgtttttcaaactctgggcatgtgtctttttcatgactaaaatgagatgtggaaaagctgtggccttctaacaaatctaggaataagtcttgctaccccccagtttaatttgaagaaagaagctggaattccaacccagaacccagaaattttgacctaaatctcctcagtccaaaataaaaaggaaccaggaatatgcagaacacttgttcgtaaaagagcttagtacccatgcttcccactataagaaaggaagcatttctagtgtagccttacagacacacaggcatggtggaaaggattttgggctttggagtaagcaagtttggtttcagtacccaactcctcttgaaactgaatgatttcagttgtcataaaaggtacctctcggccgggcgcgatggctcacgcctgttatcccagcactttgggaggccgaggcgggtggatcacgaggtcaggagatcgagaccatcctggctaacacggtgaaaccctgtctctactaaaaatacaaaaattagccgggcgtggtggtgggcacctgtaatcccagctactcgggaggctgaggcaggagaacggcgtgaacccgggaggcggagcttgcagtgagccgagatcgcgccactgcactctagcctgggcggacagagcgagactccgtctcaaaaaaaaaaaggtacttctcaagcaacacatttgatatcaacagttttttctgagacagtactgacatagaaatcccctctagttcttagaactaaatccaagaatctttgtgtttctccttcatgacttgaagtggcttcttttctaataaatttagttccgtgtcctgaaaccagggtgggtacagcttctctaaaatggacgaaaaaatcaagtcacatgacagggcctgaagagggaaatgatttttgcaacataaccaaatttaaatcctgctttggctgttgaaaaccagaaggagaagaggtaaagaaaaagcaaacgcaagtggagacagtttgagtgctgggttcttcaggttttcaatttctttctgccctgttggctttgacttcattctctttcttattaggtctattcaatggaagcagaaatctatgggacacgctgatattagccaggaagcaccatttgttgaaaaatgaggatgagataaaagggttaggtgcctttagttactaaattccacggttggcaaaagctattcatccgtcggtgacaaccacagctgtcgtggcctccctacggccatgttttgttggactcagccttgagatcctggtttgtgacgtcccactctccatcgtatacacctaagcactcttcgatagaaccctgtgagctccagaacacacaagaaaaggcaccgaacagaactgtcccagagcaggcattagtttttcttctgctacctatccagacactcagactaggaactcggtgccgtttgctgggctgtcgacaccatggacagctcttcaggcgccacctggttggctcggcgagccgaccgtcccgagcccttcctcctctcccgtcaggcccgtgggggcggcggggttggtcctgacgcccagcttggggagcagcaatacgcagccccccaagcttttctccggagtccctccccggcgctcacgctctgaagagcccacgcaaaaggaccaaggaggccagatcttccctctccctgcacccccggcggtgggatcgcagctctgcctgggggcggccgcaggaggcaaaggtagctggagactgaggctggggccgcccgcgggtgccaggcccagccggtcggcgcagagtgggcgtggtctccctcctgatgccccgccccttccctcgcgcggggcggatcttccgcccccggccgcggcgcaatgcggaagagatgggcctgctggagcggaagtgacgctcccggcggctgtggcggcggctgcgggagaaggaggaggaggagccggaggaagaggtgagcaagccggcggggggcggggagctgctgcggccagacccacgggcagccgggcgggcggacgcctccaagaccagtctctgcctccgcagcgtcagcgggagcggtgaggggcgaccgcgagcagccggggtgcgggaggacgggcggggttgtgagcagaccactggttgtgc

SEQ ID NO: 27305 - DNA, 2300 bp, Homo sapien
aaaaaaaaaaaagataaggaggtggaatcaagaggacctattggcctgtcatataagggagggggctagaattgactctggaggtctagtggtgatgtttacaatgtggttttagaagttaccaacgtgggtgaagctgtagacatggttgagattggctaggttgaatttgtgaactataaggaaaagggagctgaggttgatgccatggaaacacaactgaaaaaaatgtgagctctgagaagcattcagctcacagctcctatttcctgtgtgctcttggccagaccttctgaagttttgctgtgtgcatgagtgtcttggtagatagcaaaggcccaagactgtattttggagttatttttctgtgtcccccactcctctgccccacagtttccagctgtgtcagccttcctgagctccaccctctgtctcctccactcagcaaaactgctctgctgtcctgaactagcatctcacctcatttgattcctttctttaaagggtcatagtcttgtgctgcctatggtccattgtattttgtccagttcttttttattttctttggcttttaagttccagggtacatgtgcagatttgttacataggtaaacatgtgacatggtggtttacagcacagatcaacccatcaccttggtaggaagcctagcatccagtagctgttgttgctctccctcccccaagtccccacccccaccccccaacaggcctcagtgtgtgtttttccccagtatgtgtccatatattctcattgttcagctcccacttgcgagaacatgtggtgcttgggtttctgttcctgcgttagtttgctgaggataatggcttctagctccatccatgtccctgcaaaggacatgacctcgttcctttttatggctgcatagtattccatggtgtatatgtataacattttctttatccagtctataattgatgggcatttgggttgattccatgtctttgctattgtgaatagtgctgcagtgaacatacatatgcatgtagctttataatagaatgatttatatttctgtaggtatatacccagtaatgggattgctgggtcaaatggcatttctgcttctagatctgtgaggaattggcacactgtcttccttacactcccaccaatagtgtaaaagtgttcctttttctctgaaaccttaccagcatcttttgtttctggacttttaaataattcccattctgattggcatgggatggtatctcattgtggtttagatttgcatttctccaatcatcggtgatgttgagctttttttcatgtttgttggctacatgaatgtcttcttttgagaagtatctgttcatgtcctttgcccacttttaatggggttgtttttttcctataaagtttcctgtagactctggatattagacctttgtcagatggatagattgcaagaattttctcccattctgtaggttgtctgttcactctgataatagtttcttttgctgcgtagaagctctttagttgaattagataccatttgtcaatttttgcttttgttgcagttgcttttggtgtttttgtcgtgaaatctttgcccatgccgatgtcttgaatggtattgcctagattttcttctaggatttttatagttttggggtttacatttaagtctttaatccatcttgacttaacttttgtatatggtgtaaggaaggagcccagtttcaattttctgtatatggctagccaattctcccaacaccatttattaaacagggaatcttttccccattgcttgttcgtgtcaggtttgtcggagatcagatggttgtaggtgtgcggtcttattgctgagttctctattctgttccattggtctatgtgtctgtttttgtatcagtaccatgctgttttggttactgtggccttatagtttgaagtctggtagcatgatatctccagccgtccagtttttagttgtttgcaaccaaaggttaaatccagttcttgtttctcttatcatagctggaagcagaaatagccactattttagtatttgggtaaccttttaaatgtcttttaggcaaaatgtcgtgactttgagaatatgctgtggtttgaatctttgctgttttatggttgtgaagaacgagagcaagaaaaagatgatgtagatgttgccctactacctaccattgtggaaaaggtgattcttcctaaactaacaggtaaatctcctgttctctgaattgagcattcagacacactggctttctcaaatctatttttatgagtttat

SEQ ID NO: 27306 - DNA, 2300 bp, Homo sapien
cacctacatgactcatgcatccctcccagatcacttttgatccagacagaaccagatttctggggcagattacaggtaaccattatactacaaagggaggtaattttcttttaagttagatggtttgtgtgagctgtacatttcatcaaataccttttcccatctgtaatttgttcttgagaatatggagctatttacttagaggggatttgaaagaagagttgaattatttatattagtttgattgaaagttggaaagaaattaaaagatactgggaaagtgaaaaatacagtcctagagggagtatacattaattgccaaagatttgaggaaaatgacatgggatgctggagaatcaattcattttctgatctgttttttaaagaagtaaagaatagtctgaaattcttctgtttagatttataagcacttatctgcaattactgtgtataattcttacagaaatggaggaggctatcacttgagtcatgttagactcacctgtctcctccagtgcacattttacaaaacctatacatgcagtgatgttttaagtataatgttttttttttttttttttttttgagacggagtctcgctttgttgcccaggctggagtgcaatggcgcaatctcggctcaccgccacctccgcctcccgggttcaagcaattctcctgcctcagctacgcctggctgatttttgtattttttttagtagagacggggtttcaccatgttggtcaggctggtcttgaactcctgacctcgtgatccaccagcctcagcctcccaaagtgctgggattacaggcgtgagccaccgtgcccagccgtataatgatatttttaaaaatatttcttgaaggaaaactcttgagtctggaattatttttatagtttgggatattttagctaattcatctggggtgtgtagtgaactcacatctagggctgggaaatctttctggtttagtaatttttcattgtaattgatgcactcaggaacatacctccttcctaatttcagagctattttgaaatatgaatgaaaaactcagtaaaaaaaaaagtcaacttttaaaaatagtagggtctggtcaggcacggtggctctcgcctgtaatcccagcactttgagaggccgaggcggagtttgagaccagcttggccaacatggcaaaaccccgtctctaaaaatacaaaaattagctggtggcgggtgcctgtaatcccagctactcaggaggaggctgaggcgggagaatcgcttgaacctgggcggcggaggttgcagtgaactgaggttgtgccattgcactccattctgggcgacaagagcaagactccgtctcaataaataaatagatagatagatagtaaggtctgataattaggatattctgaagtaagagctaaattttggttttgtttttcctgttgctgattttggtgacacatctctgttgatatcagtaaatatcaattgataagtaaaaaaatatgcaagtcttaacttggatgtctttcatcttgcatgtgctcacctccctcccctctcacccagtcgtttgggttgtttgcctccccttactgtcatatcttcatagtgtggaactaaaacgtagaaatgagggaagtatagtggacagatgtttcccccaccccttcttttacctaggcaagagattaggggagtcttttttgattaaagagagtaggtccaaaataaagaccctgaaacactaaaatctggggatccccaacaaaagaactggctcagtacctagtgatccgacggagacacctctgttagacagctcctgcccacacacacagcttccagtcttgctcttctatatgaacaggcagttaacgatgatcataaggaccaacctgagcagcagaaccaaagggactgaggaaacagacagtgctggtacaagtatgcaagttttctgtaaacagattactttcaaacagttgggagccccagggagataatagaaggtatcctactcaacaggagtatatagaatgctgtagaagaggaatattgtaagaacaagaactatctcttgaaaactaaaaatatgataactgaaatataaatttaaataggattggaagctaaagctaggaaattaccctagaatgttttttgagaaatggaaaatacgaagaccaaaaaaataaaataaaactatgctgtgaaagagaaagattagcatttgagaaggcggaagttggtcctgctcagatgcggttttcagatgccttattctaaaaatagtgatagaa

SEQ ID NO: 27307 - DNA, 2300 bp, Homo sapien
aatcttaaaccttatacagtgactacgttttaattaaaagagaggtagacatagcttcatttaaagatgagtattatatttcattctaacattttcatgtgtatttcattttaagagtactgctcagcttagatctttagaagataatcttaaaaataaagaaaaaacaaaaaagtactgctgagttgataatataaattgttatattggagatacttagaaataattggatactttgaataattatactataataatatttcagagttaaccgtaaaaagataaagatccctttttttttcctctttgcttatgaaagtttaggtggtttttaaagaagttttaaatatttgtaaatcattttaacttgccattgtttttgtttccctgtaattatctttcttgggttctttgccttaactttggccctaaaatagtaataattggtgagagttttgagtttggagaggataaagaaattgtcacggtgcagactcttgagataaatcaatattgttaagaaacttgaatgagagctcacagtctgtttagggcttttattctcagtagagtttttctctggacctccggtaaaaggcattccagttaacctaaagagaaaaactacattgtcagaatcttaactatatgttgcaaaattatattctgtatgatgccagcttaggtgggtagttcctacagtacaggaagcttaacaatctctaggattaaaagataaaagaatgcctcaggctcatttatctttagtacttcatggtttaaaaaaaaaaatgagggcatggggaagtgtaaatggcaatgttgtggcagtaattgctaaaaaaaaatcagattataataaattttaatgatagagtctctggactcagctatcaaggataatcattacagatttggggacattgttgcccatggtgtggcatattaaagaacaaaataactccattagtttgacctttctgtgaacatttgctacttttgcaatggaatcatgcaagtatataaaattgcttttattacagacatctctgtattccacctgcctttttttattttccatttgcagtctgttcagttcaggaagctgctataacacttggtgccagtgttcccaaactctaaataatgtgttttccatttgcactaaccatcaggaaactagaatttctggtttcctcaggtatgtgtagtggtcattagtgttacgtgaaagtctcatagcatttgattataacataaggtatttagaaaaagaaagttttctgttttaagttagctctcatgttcttttgtattctatatgaatcaagtaaatgctttagggatattaacctggaaaaattattgactttgtaagttcacaattcatgtaaagaaatttttataaaatatgggagaatttaaacatttgacaggaagagaacaactttttaaatttgagatatattgagttcagagaggttagtgatagctggaaattttattcgccctagtaattattttgtttacattaaaaaatctgtaataaagctacaaaatagtaaacagattactgtaacgtacttggtacatatgagtggcagagcaactgaaatgtccaaaattggagaattagcagactcttgttcttacctacttatagagccattgcacttttttggtaccacacagtgataatgttttactttgaactacaaaaatcgcaatgcagataatgctgctggaaaattaaaaatagatattaaaaagacttctaagtacttaaatattctctaagggaaaagctctaaaattgttgacatttctttacttgttctatgaatactgaagtgttacatttcttaactaatgtttgctccaataactaggcactggacattatagctctatgcatggattaaaagaagaagtgtcgtttcccaaacataaaacagaatttgctacttgtgtgctgttggggattcatgattattctgtccatagagagggtactttttcagaaatccggaaatagtatggaaccctcaaataaataagcagctgaggagtttggtgttacggagtgtgttgtatttttacaggtgccactgattaatgaacttgaatcagcaatacatcagctgtacaaacagcgagcttcccgccttgtccaaagacgacaagatgatattaaagatgaatcttcggagttttcaagccattcaagtcagtccatcttgaaggtttttattattcattaaacaaccttgtttacttagtgcagcctaattgaaaattag

SEQ ID NO: 27308 - DNA, 2300 bp, Homo sapien
cctttgttgaaaacagaaataaagataatatcttaaagcacatttaaataagactttggaaagtcttatttcaatatggtggtagattattattggcctgtgctgaattcttagaatataagggactcatctgataaaattttcttttctggttcaggtttaaacttatttttaaacgtttctacaagcaattctaaatatgcatataaagttgcaaatttttattagttttttttttttttttttttttaccctggatgatgattaccattgttgctaatagtttttatctaagtaagcctatgcttgatttctttcagaaaccatttcattggatatcattttttctaaggtttcatttctcccaagtttgtttttttcaataggatagtcagttgacaaaatgtttggcattcttatactatttattgtttacatttaaaattaggtgcaaacagctagtttctcaaatgacctcctaattgattttttttctttaagataaaagtattggttgaggcactggtttataagcatttgtggactttgcagccttatctttaaaaaaaaaaaaattaaaactgtggtccttaaatatcctgtctgaactttggattggaaggcacatttccctttgttattggctatgtagattagcttagaatctgtaagcatatagtgtggttaaatatgtatttcaacttttgttatctttgttgattacttgaataccctaaaaccaatggctgggaaaagatcattgccagactatgtcttcctgatggatctttcttcctgatgggtcttaatggttccagtcagtctgtggccagattcaggatgagataacattcaccatgtcctctctgtagggtttctcatgttttgtctttatcacctggtttctggagaagcagctgcagtctgagttatgataccacttgtggtgtatcagttgcttagggtggggaagaagtataggcttgtctgtattcctctgtgccgggagctggagtcaagattggaagtggaacctaagtgtcaagagttgacagtcatgtccttcctactggcaaaactcttctgagcccagtgggcatggtgggagctggtctcataacctttgtgactagagaaaggatctttttcttaaactatgctttatgagtttgtccctggagagctgcttcttgaagtgtcttggcgcttgcttcggaactttcttgagtaaattaagacattcataattgcaaacacaactctaaaaaatttgacagtaatatgatcagctagatcataccaaaagtaggacaacctagtttatagtttttaattgttgaattattagtgtatttcatctcgattaccttgttcctagagaagtttacttcagattatgctaatgtggttatacagagtcacttagattttttggaacaaatcttaaaccttatacagtgactacgttttaattaaaagagaggtagacatagcttcatttaaagatgagtattatatttcattctaacattttcatgtgtatttcattttaagagtactgctcagcttagatctttagaagataatcttaaaaataaagaaaaaacaaaaaagtactgctgagttgataatataaattgttatattggagatacttagaaataattggatactttgaataattatactataataatatttcagagttaaccgtaaaaagataaagatccctttttttttcctctttgcttatgaaagtttaggtggtttttaaagaagttttaaatatttgtaaatcattttaacttgccattgtttttgtttccctgtaattatctttcttgggttctttgccttaactttggccctaaaatagtaataattggtgagagttttgagtttggagaggataaagaaattgtcacggtgcagactcttgagataaatcaatattgttaagaaacttgaatgagagctcacagtctgtttagggcttttattctcagtagagtttttctctggacctccggtaaaaggcattccagttaacctaaagagaaaaactacattgtcagaatcttaactatatgttgcaaaattatattctgtatgatgccagcttaggtgggtagttcctacagtacaggaagcttaacaatctctaggattaaaagataaaagaatgcctcaggctcatttatctttagtacttcatggtttaaaaaaaaaaatgagggcatggggaagtgtaaatggcaatgttgtggcagtaattgctaaaaaaaaatcagattataata

SEQ ID NO: 27309 - DNA, 2300 bp, Homo sapien
tctttcacatgatcttacgtgctgtccaaattatcccaaatatatatactcatatgccaaaatcattgtataattatttcaagtctgtcacagactcaaaaacagaggtcaacttcctaaattactgtgaagtaatgagatttttgagactttttaaaggaatagcacatgtaacttcacaaaattttcctattattgtcgtccttaaatcatctatttgagaggggaaaaaatcattcaaaatgtttctgaaaaaccacatcaccaagttattaacgaatccgaaacaaaatatctaaaataaaaaggtgctgtcaattctgagtaactacatccaccacaagctgacatagtggttttaaagctaaggtaagggcaaatcacttttctttgatttgaaattttaaaagtactaaatacttaaaaaaaaatagctcatgtatctcaaaaacaaaaatctgtctgtactcctctcaaaccaaataaagagtaacagaaatgccaaagataaactacctaccttactggaaacctctcgaataaaaatgcaagatttacaaaacttaatttcttttttcgtaacatggaattaactgggttatgcacattcaaatggtcagaagaaaagatttaaggctcatttaagatcagcaatctaaaaccactgcagcctggcctcccacaggaattggagaaactaccttgcttttactatttttacaccgtctcgcttcactgttcccaaagtcagtgcgaagaaggctgggtatctgctacccctaattacttttatgggtaaactgaggctcagcgactgcaagggactggcccaaggtcactcagaaccagagctgcaactccaggcttctgttccctctcctagtattcctttttacaaactcggccttcatggtcgaggatgcctggacagagcatccaagaagtgtgggcgcagtgacctgcagagggctcggaaagcatgccaagagcagccaggggacccacaccaagttggccctgaaacacgccaggcagaaaagaggcaggacagggaacaccgaatttcccctgaaacactctgaatgcctgatctgagctccggccccgtggcagaggaggtggttaagaaaaggctgggggcagcgcgggaacgcgtcccttgcccgagcagaaggccggaggctggggaagattcgcagccggtcggacggcaggggactccgttccagggctccggggctgggcgtccagagaatacgggggcgggggacgggggcctgcgtcggggatgcggccgtctaagggcgtccgaagcgcgcactttaccttcctcctcgtcctggaagctgagcaggctggcccggggcacctctttgttctcgcgaggcctcttgcgcggcttcagcccgttgccgggctccgcgccgccggggaagccgcccccggcctcagccccgaggcccggggtcagcgcggaaggcggcgacggccccgggcccagcagcgactccccgccaggggccctgtcgccgccaccggggcccgcctcttcgcccgtgcccggcggcggcaacaacggcggcggctcctgctcctcatcgcgttcccgctcttcctcttcggagtcgttccgcttgcgcacgttcacccgccgggcctttcggaacatccccgcggcccgcacggcggtcgaatactcgcttccacaccgcggccccggcagcgccgagctcgtgacggcgcacgcgcgctctccggagctccagccgggtcgagtcctctgttgctaccgcgcaccccacgagcgcgcatgcgcctatgctcccacgcgctctcaatacttggagaaagagagagagtgagagagagagagagagagagagagagagagagagagagagagagagagagagagagagagagagagagagagagagagagagagagagcgagagagagagagagagagagagcgagagagagagagagagccccacacctctcgcgagagcgtcggctctttgcatcgctctctgtcggagtggagtactattagcatggaactctggtgttgtttgacaggtcacaaagaggatcatagagatgagaagaaagagtaggctctgttgtccctcagacggcgctgctgcagtgcgtcttcgcacttacgcggagcggtaatgtgaggaagcctcccgccaaacagatgagggaggaggaggaggggagaggccagagagagaagcggctttcgggaaggaaagtgtgatctagtaggtggaatagtcctctccaaactt

SEQ ID NO: 27310 - DNA, 2300 bp, Homo sapien
tccgtcttaaaaaacaaaacaaaacaaaacaaaaatacaaaaattagccgggtgtggtgccagatgcctgtaatcccagctacccgggaggctgagacatgacaatagcttgaacatgggagacagaagttgcagtgagctgagatcgtgccaccgcactccagtctgggccatagagcaagactccgtctcaaacaaataataaataaataaataaataaaataaaaagaaatgcttggagtgctcgggatcttccacttcaacctggaatttaaatcttactgaaatttctacaggatggtgtgggcaaacaggcatcctaatgtttgctgatataagtgcaaactgcataacttctataaaaagaaatttagaattagcaaaatcataaatgcatatattgagatctagcaatttcaattctatttcatcctacagatgtaacagtttttcaaagcttttcattacagcactgattaagactagaaataatctaaatatcaatgtttatggaactggttaaataaattacggtatatcccaacaatgaatcactacgcaggtgggttaaaaaaaaaaatagacggccgtgcgcggtggctcacgcctgtaatcccagcactttgggagactgaggcgggcggatcacgaagtcaagagattgagatcatcctggccaacagagtgaaatacaaaaatacaaaataaattagctgggcgtggtggcacgtgcctgtaatcccagctactagggaggctgaggcagaagaatcacttgaacctgggaggcggagattgcagtgagcggagatcgcgccattgcactctagcctgggcgacaagagcgaaatttagtctcaaaacaaacaaacaaaaaaccaaaaaaacacaacccttcatatacagatatgggccgatctccaatctacggtaggctaaaaatgcagcttacacaccatctgtgtaaaaaggggaacacattaaaatatgcatatttatttgcttttatgttcatggaacatctttagaggatcataagaaactgttaacattgccactgaggaagtgaacagccttccagacatgggtggatttttttcactctaccgaatacccttttaatttcgaaacatcaaaatgaattcgcatgcacaggtgcatgcccgaaggaaaaacttctagttcggtgatgagatagggaaagccggtgagttcaaccttaggcgcaatcaccctgtgaaggtgtggccagcgagggctttgtcacgcaagtctgagaactgtcacaaccttccccaccccctgctctattttccttccacttgtttctgaaactcactaagctttggaaagtatttagtcatagaattgcttgcaaacttggcattctttagaaaacacggaaacacttttgctttccttgttcctgaaagactggggaacgggggacatcaagccaggtaacattgtatcataactgaaattcaatgtctttgaagtaacattgtaccataaatgaaattcaatgtctttgaagtaacattgtatcataaataaaattcaatgtctttctaagagctctgtagctataaagctgtagaaatacaaagtattactcaagaataactagtaattaccaatagtcacacctcaggtcaaagtttggagaggactattccacctactagatcacactttccttcccgaaagccgcttctctctctggcctctcccctcctcctcctccctcatctgtttggcgggaggcttcctcacattaccgctccgcgtaagtgcgaagacgcactgcagcagcgccgtctgagggacaacagagcctactctttcttctcatctctatgatcctctttgtgacctgtcaaacaacaccagagttccatgctaatagtactccactccgacagagagcgatgcaaagagccgacgctctcgcgagaggtgtggggctctctctctctctctcgctctctctctctctctctctctcgctctctctctctctctctctctctctctctctctctctctctctctctctctctctctctctctctctctctctctctctctctctctcactctctctctttctccaagtattgagagcgcgtgggagcataggcgcatgcgcgctcgtggggtgcgcggtagcaacagaggactcgacccggctggagctccggagagcgcgcgtgcgccgtcacgagctcggcgctgccggggccgcggtgtggaagcgagtattcgaccgccgtgcgggccgcggggatgttccgaa

SEQ ID NO: 27311 - DNA, 2300 bp, Homo sapien
ctgaataggcctgggactcttccacctccaaacctttgctccagcaattttcttaattacttgagttcctttatcctgtgggccaccgagaagccatttgtgccaggctctctgggtgcagaaaggaggaaggatatatccatcagcttggatccgcagttcatcaaataatcactccatgagagatcgttgtcctttcccccacatctgaccatgcagatctcagccatcccttaaggcctagatccaaaactacctctccccaaggacttcaccagtctccctggcaaaggccgaccttcactgggattcccctgcattgtgtctgtatctcccttcaaacatttcccagatgcaacttacataattgcccctcctatagtataacttccttaaagacaagaaccatgacattgatctctgtgccccttaaatctcctggcacagtgcatgtgtgtggtaaggattcagtagatgaataataaataaatgaatgaataaatttccctactgaggtgctctcttctttaacatattggagaatctgtatctgggtaattacaaatcaattgctccagactcctagtgcttttaattagcaagatttttctttatctcagcagtccccttcttggcactagagaccagtttcatggaagataatttttccacagacaggcaggggtaggaggtggtttggggatgattcaagcgattacatttattgtgcactttgtattattattgcattataatatataatgaaatacttataccactcaccataatgtagaatcagtgagagccctgagcttgttttcttgcaactagactgtcccatctaggggtgatgggagacagtgacagatcatcaggcattagattctcatatggagcatgcaacctagatccctcgcatacacagttcacaatagttcacaatagaatagcattctcaattcaatcctatgagaatctaatgccactgctgatctgacagaaggcagagctcaggtggtaatgtgattgatagggagcggctgtaaatacagatgaagcttcttctcttgctcacccactgctcaactcctactgtagcatggactggtaccagtccgtggcctggagatcggggacccctgccttatctttttttcccatatttagtgagacttcatcagttgttaaggcccaggtatttatcttcccttaaaatacatatattgaaacctaatccttaatgtgatagcataggaggtggagatgttggaatgtgattaggtcatgagggtggagcccttatgaatgggattagtgcccttgtaagaagctgaagaaaccacagtttcccttccaccatgtaaggactcagctagaaggtgccatctatgaaccaggaagcagaccctcaccagaaaacaaatctgccttgatcttggccttcccagcctacagaaataaatatgttgtttgtaagttacccaactaatggtattttgttatagaagcccacatggactatcagttaatgtacatagaataattgttacctatttattggttttgtggcttctaatatttttttaaatgaattttaaaaaagacagagaataatgtctatctttggagttcaaatgagttttttttctttggaacaactacgataggacactttatacagtagtgcaggcatttaccataagtaacaattcatcagaccaaaaaaggtggaataaatcatgaaagtaaaagtatcaaggagtctccgtactctacatttaatccattcaatttcctgctaaagtagaatttcttccatttgtgtcaatcctttgggatcagcctacagcaacagtctcctcagtttcttctagaaacttcccagtttagaaccccaaaagagtggtcagcagtcaccaaggcaggttctctcctgcgtgtagttaatgagactggtaggccagcagcttcctcctggttgccatggaaatgaccaggctgctggccctccgaagacggaaaagaacagcaagtgcaagaccacgcattccaccctggcttgcagattaaaccagctgtcaagccagggtgaaggatccgtggccaggcagaggtctgtggagtggagaggcgaggcctcacggtggaactctcagatgtaagtaatttctgtgttcttcttttttaaaaagcatgtctagtctgacagtttttcagagcttcagaatttctgctgcatggcaggaactgtgacggttggaagaaccattgtcagggtcaccttcttgttgcatttgcat

SEQ ID NO: 27312 - DNA, 2300 bp, Homo sapien
tacactggcaggcgcacaactccgcgccccgactggtggccccacagcgcgcaccacacatggcctcgctgctgttggcggggtaggcccgaaggaggcatctacaaatgcccgagccctttctgatccccacccccccgctccctgcgtcgtccgagtgacagattctactaattgaacggttatgggtcatccttgtaaccgttggacgacataacaccacgcttcagttcttcatgttttaaatacatatttaacggatggctgcagagccagctgggaaacacgcggattgaaaaataatgctccagaaggcacgagactggggcgaaggcgagagcgggctgggcttctagcggagaccgcagagggagacatatctcagaactaggggcaataacgtgggtttctctttgtatttgtttattttgtaactttgctacttgaagaccaattatttactatgctaatttgtttgcttgtttttaaaaccgtacttgcacagtaaaagttccccaacaacggaagtaacccgacgttcctcacactccctaggagactgtgtgcgtgtgtgcccgcgcgtgcgctcacagtgtcaagtgctagcatccgagatctgcagaaacaaatgtctgaattcgaaatgtatgggtgtgagaaattcagctcggggaagagattagggactgggggagacaggtggctgcctgtactataaggaaccgccaacgccagcatctgtagtccaagcagggctgctctgtaaaggcttagcaattttttctgtaggcttgctgcacacggtctctggcttttcccatctgtaaaatgggtgaatgcatccgtacctcagctacctccgtgaggtgcttctccagttcgggcttaattcctcatcgtcaagagttttcaggtttcagagccagcctgcaatcggtaaaacatgtcccaacgcggtcgcgagtggttccatctcgctgtctggcccacagcgtggagaagccttgcccaggcctgaaacttctctttgcagttccagaaagcaggcgactgggacggaaggctctttgctaaccttttacagcggagccctgcttggactacagatgccagcgttgcccctgccccaaggcgtgtggtgatcacaaagacgacactgaaaatacttactatcatccggctcccctgctaataaatggaggggtgtttaactacaggcacgaccctgcccttgtgctagcgcggttaccgtgcggaaataactcgtccctgtacccacaccatcctcaacctaaaggagagttgtgaattctttcaaaacactcttctggagtccgtcccctccctccttgcccgccctctacccctcaagtccctgcccccagctgggggcgctaccggctgccgtcggagctgcagccacggccatctcctagacgcgcgagtagagcaccaagatagtggggactttgtgcctgggcatcgtttacatttggggcgccaaatgcccacgtgttgatgaaaccagtgagatgggaacaggcggcgggaaaccagacagaggaagagctagggaggagaccccagccccggatcctgggtcgccagggttttccgcgcgcatcccaaaaggtgcggctgcgtggggcatcaggttagtttgttagactctgcagagtctccaaaccatcccatcccccaacctgactctgtggtggccgtattttttacagaaatttgaccacgttccctttctcccttggtcccaagcgcgctcagccctccctccatcccccttgagccgcccttctcctccccctcgcctcctcgggtccctcctccagtccctccccaagaatctcccggccacgggcgcccattggttgtgcgcagggaggaggcgtgtgcccggcctggcgagtttcattgagcggaattagcccggatgacatcagcttcccagccccccggcgggcccagctcattggcgaggcagcccctccaggacacgcacattgttccccgcccccgcccccgccaccgctgccgccgtcgccgctgccaccgggctataaaaaccggccgagcccctaaaggtgcggatgcttattatagatcgacgcgacaccagcgcccggtgccaggttctcccctgaggcttttcggagcgagctcctcaaatcgcatccagagtaagtgtccccgccccacagcagccgcagcctagatcccagggacagactctcctcaactcggctgtgacccagaatgctccgatacagggggtctggatccctact

SEQ ID NO: 27313 - DNA, 2300 bp, Homo sapien
gacgaggatgacttgaagccactgcctcctagcttgtccccaggatgcgcgcccgcagagcccatagcgccgcgcagctcggcgctcagctccggcgggcagtcactcggggtggacgaggacacggtgcccccagtgaaggcgctgccgctgctgcccttactccgggccggcagaaaaaggtcatcgggctctggcgacgacgggcggctggacaccaggctggcgtccgagtccatggccccaggggaagatagtcgtcgcagctttcgcagggtcctccttccctcggacccgaaaacttccaggagaggaggagaaaagagagagaatgagagagagagagagggagagagagagagagtgagtcagtgagagacagaaaagctgctcccgcctgcaccgcagtaccacagcgcggggtcccggcacaggtggcccgtggctcctcgtccccctcgctactatctctggccctccttttagctgcacgcgggtacctataattaagctctctctatctcccctctgctctcatgcaacaggttatttcagggagcgttggtgaccctcggggtgcgggtggcattctagaggcttcgggctttcagttaggtgtgggaaaactgagcccccgggctggaataaacgagtgggaagtgagggcctttctttggggagaatggagatctagatagagaactaatgatttggttcctcaaacggatccaccttatctccatcgacaccacgcagcaaacacacgcacacgcacatgcacccagagccggcgcggggcccagagtccatgtgctgcatctggagaccacggggagctcaccagctgactggggcttgggcagaaagagctgttgtcgctccgacttctcgcttttggtgagggagatgcagcggtgagtgtggggaggacagaagagcaaagtcgctctggagaaatggcccgcagagtagggatccagaccccctgtatcggagcattctgggtcacagccgagttgaggagagtctgtccctgggatctaggctgcggctgctgtggggcggggacacttactctggatgcgatttgaggagctcgctccgaaaagcctcaggggagaacctggcaccgggcgctggtgtcgcgtcgatctataataagcatccgcacctttaggggctcggccggtttttatagcccggtggcagcggcgacggcggcagcggtggcgggggcgggggcggggaacaatgtgcgtgtcctggaggggctgcctcgccaatgagctgggcccgccggggggctgggaagctgatgtcatccgggctaattccgctcaatgaaactcgccaggccgggcacacgcctcctccctgcgcacaaccaatgggcgcccgtggccgggagattcttggggagggactggaggagggacccgaggaggcgagggggaggagaagggcggctcaagggggatggagggagggctgagcgcgcttgggaccaagggagaaagggaacgtggtcaaatttctgtaaaaaatacggccaccacagagtcaggttgggggatgggatggtttggagactctgcagagtctaacaaactaacctgatgccccacgcagccgcaccttttgggatgcgcgcggaaaaccctggcgacccaggatccggggctggggtctcctccctagctcttcctctgtctggtttcccgccgcctgttcccatctcactggtttcatcaacacgtgggcatttggcgccccaaatgtaaacgatgcccaggcacaaagtccccactatcttggtgctctactcgcgcgtctaggagatggccgtggctgcagctccgacggcagccggtagcgcccccagctgggggcagggacttgaggggtagagggcgggcaaggagggaggggacggactccagaagagtgttttgaaagaattcacaactctcctttaggttgaggatggtgtgggtacagggacgagttatttccgcacggtaaccgcgctagcacaagggcagggtcgtgcctgtagttaaacacccctccatttattagcaggggagccggatgatagtaagtattttcagtgtcgtctttgtgatcaccacacgccttggggcaggggcaacgctggcatctgtagtccaagcagggctccgctgtaaaaggttagcaaagagccttccgtcccagtcgcctgctttctggaactgcaaagagaagtttcaggcctgggcaaggcttctccacgctgtgggccagacagcgagatggaa

SEQ ID NO: 27314 - DNA, 2300 bp, Homo sapien
tctgcctgtcctgtctgaaggcacagagcaatctactgccttctgggagcctcagttatatcatggacatcaagggatcaaaaatgcccagctcacaggggccccatgagaaccaaacgtgaaagtgtctgtaaaaatgacttgaaagcaagctgcttcaacagaaggcgaaatgattagtgaggtgttaaacttaattgcttgaaacattcaagacccttcccttggtctctctctctccttcctgcttagtatggttctgcttaagcactcagctccttcctaccaaggcttccctctctctcccaaagtggggcccccagcaccacgtccatgtcaggccaggcccctctgagaggcaggagatcttaccaggttccttccctctctataaaacctttaggaaaatgcttgggttagagcattgccaggagtttgtgcatttaagggatgagcctctgagctaagggagatttcagaccatctttagagacctccaggacacacagtaagtgccaagcactgtgctaggcttcaggaagatggagaaatgagcaggtggtccctaccgtaaaacaatcatagccaaatgcagagatggtatctacataacacaataggctatgaagaaatcctatcaatggtttgccaagagtcatgaaaggaggaagaggagaaatcaccaaggcttccagaagaaagcaaggttggagctgaacctgaggcataggcaggatgctacaggcagagctgggggtcagaagcaaagatcagagtgaacccatgtggcaaatattggtggaagaaaaccagaacaaagcagccctgaaaccagcaagcacagccaccaagatgccctcttccccaggacattgacaagttatagtagcatgcactggtgctgggggcagaaaatgtccatagacaccaagtaatgctattctatttggcaaataaaatgattcattcccaccctcaaccgataggactatgtgggtgttttgttttgtttctaataagaggccaatttctgagtgacttttgcttaagcaaatgtcaagttgctgatagaccatccctttcggggaggatagaaacccgacccaaaggctcctttgtccctaaagacctttcaatcagagggatggggaaggaggttgggagcagcagggaggaaatatcctaatgctacttgtcatttagtccagaaatttagcgacctgaacctggcaggaaattatgtattttaagaaaaaaaaaacatgatacactcatgttcatagcagcataattcgcaacaaccaaaagcaccccaaatgtccatcaacgaatgaatggataaaccaaatgtggtatatccatatactggaatattattcagccttgaaaaggaagaaactttgatacatgctacaacatggataaaccttgacgacaatatgctaagtgaaagaagccagtcactaaaagacaagtgctgtatgattctacttatatgagggacctagagtagaacaaattcatagagacagaacagaagagtgaattccaggaacttgggtcggggggagtggggagttgtttaatgggtggagcttcagggttgcaagttgaaaagagttctggagatgggttgcacaacaatgtgaatttaatttaaatcaatttaatgtgcacactaatgcatataacattactgaacagtactctaaacataagacggtaaattttatgttatgaatatgtgatcacagttaaaaaaaaatatgagggaggttgtttttgagtagacagttgctggaggaaggcacgtgagttgcagcctgaccagtgcgaccagtcctccttcaacagccccgcttgccttgaaaaggcgcccttactccgctcagggggcctgtcccgcgcggctggcacaggcgctcacaataacctcctaaagcggtgccagccgcacctccgcgcggccccggcacaagcagccaatgaacacgcggctgcgcccggcctcgcgcctccattggctgcgccccgccacccgctgccccgcaggttcccaagccgggtttaaaggggtagggcgcgggccagggccccaccatcgtttccccgcgcgcaggtccgcggggaggggcggcctgccgaccggcccaccccagggcgttcctgaagggcgtcctcggccgcccccaccgcctcccagatgtactatgcggtttcccaggcgcgcgtgaacgcggtccccgggaccatgctgcggccacagcggcccggagacttgcagctcggggcctccctct

SEQ ID NO: 27315 - DNA, 2300 bp, Homo sapien
ccacacttggaagagaggataattcagtttcttcccagggactgaactgggaaccggaggacagacagaccttggctgaatgagatggatgtggggtgttgatgccaaaatgaagcctcatctgacttggttcatgtccccaagtggcacagcaacaaggaagcaattttggacaaatgtccagctttatataaaagtagagttgttcctgcttccccttatccaaagccagattctggggaacctgaacttcccagtttgtggaagaaacatcagatccaacgtagagagggtcaggagagggattgcctgggccttacttcccccagacctcagacctagactttaggtgctctcccggagtgcagctgcgcataaggtctctagaaacatagtccattgcttgcactgggctcacacgccaggtcacgctgacatgcatgatgaaagagggttttttttgtaagccctgtagttgttctgtggataatatagctggattttcattgtgtttctatgttagaagtaaatctttaaaatagatgacaatttgcctattcctgttaaagcatttcttcatttgctaacataatgcaagccccctgtggtctgcgctgctggctctgggggaacagggcaaaacaagctcttccggtcacaggagcttgggccagatggctgggtggcttcgcagtccgtggcacgagtctccatggctcctgaccacagacacttgcctgccaccaaaacaaggaagagctttcctgccccacctctcttttcatatttggggccagttgggtggggagaaaccttaccacatgcggcctgtgtactgcagtctggtggggtagcaaggtcctgctgtgcacaggtcaggccccaggtgtcctcctgccctccacccggccactgacattttaatatttagaaaacctgccccaaacaggcagctcttccagcgggggaccctgcttgctaccaggaaggagggtgcatttggggtacctgaccctctgctgcgtttctgcagaaacatgccacccccttcggagttttggccagggattgtcaacctcttgccgtaccagtgaccgctatcacaggagaagcaccttctcagaattccaggggcttggcaagcgatatagcctgttttctctgctttgccaatagattcttcattgtcctgtcctcctttgctaaagggaggtagggcagtacaaaatttttctgattcaacatgtgtggattccacattaattcttttttttttttttttttgaaacagagtctcactctgttgcctaggctggagtgcagtggcacaatctcagcttactgcagcaacctctgcctcccaggttcaagcaattctcctgcctcagcctcccaagtagctgggattaattaataggcctgcaccaccacacctggctaatttttgtatttttagtagagatggggtttcccccatgtagggcaggggggtcttgaactcctggcttcaagtgatctgcccacttcggcctcccaaagtgctgggattacaggcctgagccaccaagcccagcatgattccacattaattcttacccacacatttttgagcccatggccagccctgacacactggctttatcccatcggatgtaagatgtgattggtcggctcactgacctgtttatatttgtttatatattttttactcatcgagggtctccctgcaggggtcggtcttcaaaagaagatccaatgaggactcagagtgttggtacccaggcttggaaaggtaaggcccctctgacagtttctctacctcagcttttgttttcattggtcaatgccgacatcatttgggatgagtcactcctttgatggcagcttcctcagggtactgggctctgcacccagtgcccagggaccctggttctggttggctggcctctgtcagcagtttcctgattgcccttgggtgagttgtttgccttgaatggcttctgggtgattttgtataagaaaaaatctctttcccctttaaggcatataagaactttggtcacagggcaaaacaaaggaaagctctatttgtcagtggctgggtggagggcaggaggacacccggggcctgacctgtgcacagcaggaccttgctatcccaccagaccggagtacacaggctgcatgtggtaagaagttttctccccacccgactggccccaaatatgagaagagaggtggggcaggaaagctcttccttgttttagtgtgaactttgttcacagggccagggtcacctg

SEQ ID NO: 27316 - DNA, 2300 bp, Homo sapien
ggccagaaggggtatccctctttttcaagtttgacccaatagaacaaagcggagaaagactaaccagggcgactttgattcctgccatcctcgaaacaacacagtgttcaaagatcaggccggcccggcgcggtggctcaagcctgtaagcccagcattttgggaggccaaggtgggcggatcacttgaggtccggagttacagactagcctggccaacatgatgaaacccggtctctactaaaagtataaaaatcagccaggcgtggtggtgcgctcctgtaacctcagctactcgggaggctgaggcaagagaatcacttaaacccagaagacagaggttgcagtgagccgagatcatgccactgcactccagcctgggtgacagagcgagattcaatctcaaaaaaaaaaaaaaaatcaggccagcacatcaccatcaccccattctgtttctccaccatcttcctgctttaaatgtgtctgtgagtgctgggaatatggacattggaaaaccaagttgagatgccagcatttaaccttttcagttttataaaattgacccattttgctggaagttgagggctgggagaaggagtgacaggtttaaagccagcagttcactgccatctcttaaaggccctcaaaatggatttggggtttatctcttaagagacatctggggcacgattgccactctcttttctttcactgaccctgcagctcaggacttgcgcagaaggtatgtgtgggcatccctcccagacaaggggagtagagcacacagaagaaagtgtgttagtccccagaggccaagtgaattcatgtctgggtgcagagcagaccaagggccaagggttgccccatacacagtctcccctgcagcaccgaggagcatcttcaaagcagacccagctgcccgttctctggctcccaaagcaccacacctttggccagagaagggaagaagggaagtttccaccgacaggctctctcattgccaaaggtgatggctgtccttcacatgccagtggccatccttgctgaggactcacgccctcatcacgggtactgagcactgcctctccatcactgtgcttgttcttggaagcatctgggattcgcttcctctcctcacctttccctcccccaaagctccccgcatcacacccccagctcctgccactggacacttctctttccaaaattgagcttcagaatgaactttggcctagaaattatatgacccaccgtaacaggttctacaggctatgctaaattctttctgggctggcctggaattcaaacaaacatgtggggctgggtcttaggggtatatgctggtaaatgaatcgggggcccctgccctcaagaagttcacagctacaccagcaagattgtcaccaattcatcaaaatacaatgtggcaagtggtacacattgagaattaccatggggatgccaggtgcagtggctcacacctataatcccagcactttaggaggctgaggcaggaagatcacttgaggccagagattcgagcctgcagtgagctatgattgtgccactgcactccagcctgggcaacaaagtgagaccatatctctacaaattatattaaaaataatttttgaccaggcacagtggcttatgcctataatcccagcactttgggaggccaaggtgggtggatcacttgaggtcaggagttcgagaccagcctggccaacatgatgaaaccccatctctattaaaaatgcaaaaattagccgtgcgtggtggtgggcacctgtaatcccagctactcaggaggctcaggcaggagaatcacttgaacccaggaggcggaggctgcagtgagttgaaatctcaccactgcactccagcctgggtgacagggtaagactctatgtcaaaaaaaaatttttaacaaaataaaaataatttttttataaaagaaacaaaatgctgggcaaggtggctcttctagcacttcaggaggctgagacaggaggatcacttgaggccaggagttcaagaccagcctggtcaacatactgagatcccccatctctacaaaaaattcaaaaattttggtgcacctgtagtcccagcttctcaggaggctgaggtgagaggattgcttgagcccaggattctgaggttgcagtgagctatgattatgccactgcactccagcctgggtaagagaataagactccattggaagggagggagggagggagggagggagggagggagggaggaaggaaggaaggaaggaaggaaagaaggggaaga

SEQ ID NO: 27317 - DNA, 2300 bp, Homo sapien
tgctaagtgaggggagaatggaatcatataaaatattcaattaaaaccagagaagggctgggcatggtggctcacacctgtaatcccagcactttgggaggccgagggggcggatcacgaggtcaggagatcaagaccatcctggctaccatggtgaaaccctgtctccactaaacatacaaaaaattagccaggcgtggtggcaggtgcctgtagtgccagctactcaggaggctgaggcaggagaatggtgtgaacccaggaggcagagcttgtagtgagccaagatcgtgccactgcactccagcctggggacagagccagactccgtctcaaaagaaaaaaaaaaaacaaaaaaacaacaacaacagagaaggcagaaaaagagaaggaagaaaaacaataacagcaacaacaataaacataaaaagaacaagtgcattgaatagaaaacagttacaaatatgggagatattaatctaactatcaatagtatatttaagtgaatggtctaagtgtaccaattaaaagacagagactaatagagtggatttaaaaataaatcaagggccaactatatattgtctaccagaaacccactttaaatatagagacactgatagattacatttttaaaaatgccaacctgaccaacatagtaaaaccaaaaaaacaaaaaacaaaaaaattttagctgggtgtagtggcaggtgcctgtagtcctagttactcaggagattgaggtgggaggatcacttgagcccaggagttcaaggctgtagtgagctatgattgtgccactgcactccaggctgggcaacagaggcagatccagtttcaaaaaaaaaagaagaaaaatggagaaatatatgacattctaacattaatcaaaagaaagctggagtagctgtattaatttcaggcaagcagatttcggaacaaagaaaattatctggggtaaaagacaattatataatgataagaaagtcggctttccaagaaagcataacagtccttagtgtatatgcacccaactccaaagtgtctaaatatatgatgcaaaaattaatagaactgcaaggagaaatagacaaatccatcattacagttggagttttcaatatctgtttatcagtaattgacagattgagccagcagggagagaatcagtaaggatatagttgagatgaccagcaccatcaattaatttgatctaactggcatttatagaatatgtcatctaacagcagcagaatacccattctcaagttcttgtgaaacattaattaaaatagaccacattctgggccataaaactcatgctaacaaatttgaaagaatagaaatcacacaaaatatactattagatcttatggaattaaacttgaaatcaataacagatagctagaaaaagtcccaaaatatttggagattaaacaataaacttgtaaataacacatgggtcaaagaagaagacttaggaagaattggaatattttaactgaataaaaatgaaaataaaacatcaaaatttgtggaataaaatgaaagcagtgcttagaggaaaatgtatggcattaaatgaatacacaagaaaagaagtgtaaaccaaaaaatatagttataagcagcccctgccctccccccaaccatctgaatggatctgtcctctctgccaagggcattccaaagttaacctgaaaaatttgttcaggccatgatgaaaggtggggtcagacatgcctcattataccctcttcccttgtggaattcaggaaaagctgaccagcattaatatcaacacagaccttaagtctgataagaagcatttacaatctatcctctctgaagccagctacttggaggcttcatctgcgtgataaaaccttggtgtccacaatcccttactgtaacccagacattcttttctattgataataacaacaaattgccaatcagaaaatatttaaatctacctgtgacctggaagcctcaccccacttcggattaacccacccttccagatctaaccaatgtacatctaacacatatctgagtgatgtctcatatctccctaaaatgtataaaactaggctgtgaggccgggcgcggtggctcacgcctgtaatcccagcactttgggaggccgaggcgggtggatcatgaggtcaggagatcgagaccatcctggctaacaaggtgaaaccccgtctctactaaaaatacaaaaaattagccgggcgcggtggcgggcgcctgtagtcccagctattcgggaggctgaggcaggagaatggcgt

SEQ ID NO: 27318 - DNA, 2300 bp, Homo sapien
tcagtctccagcaattagtcaattacaatttaagttttgctatgatttcagaggcttctggtccctgtaaactgtgattctttgcatttgtctgtctttcagtttttgcagtttgccctgtgactcaattcactgatactgaaacaagaagagttgttaatcttcaatttgttcagcttttctcttgttgtggggagtggagtgacagctttcaagctcttcacaccttggcatagactgcatttgcttttgttttgttttgttttttgtttgtttgcttgttttgagacggagtctcgctctgtcgcccaggctggagtgcggtagcgcaatcttggctcacggcaagctccacctcctgggttaacgccattctctcgcctcagcctcctgagtagctggggctacaggcgcccgccaccacacctggctaatttttttttttttttttttttttttttggtatttttagtagagacggggtttcaccgtgttagccaggactgcatttgttttttaaaaaatctttttcctaattatataagtaaggatgtttactgtagaatgtttggaaaggaaacaaaataaaaatcacctactatcatccaatctgcaataagtcatagttaaggttttgacatagttttatttttaatatatatgtttatataaaagagtgcatgcagcacatggagtttggtattggatttctcccattttcagaggctatttctgcaaattctctaaaactgtggctgaaaatattttcaatgttgaatgtcttttataagaaataggatcctagataagttcccttcagatcgtatggggctggtgggaattctgccaagggtcacataagaggcaggaccgtgacatcctctttatgatcacccttgtgcctagccttaaaggagtatcagcaaatgttggttgacttcatagattaaaaggctcatttttcccatctacaaaaagtatgaaacatcctcctcctccctttcctaggaggccagaaagctgaacgagagattaaatactcagttaaaacaatttaggtggttagtgtatcttttccctctccttcaaaaagatattaacatttccattttagtagctgtaatgtttagaatatacatacattttacttgaaagctgcctcatagtctattttggttttggattttcttttttttttcgtttttcttgagacagagtttcgctcttgtctcccaggctggagtgcaatggtgcaatctcaactcactgcaacctccacctcccaggttcaagcaattctcctgcctcaggctcccaagtaactgggattacaggcgcccgccaccacgcccagctaatttttgtatttttagtacagacagggtttcaccatgttggtcaggctgggtcttgaagtcctgacctcagatggtccatctgccttggcctcccaaagtgctgagataacaggtgtgagccaccgctcccggcctcatagtctattttagaagttgacaggctataaataacaagcagacaaattaatgaagaacatctgtctttctgcctatcccgaaacacgttgatcagtggggggtcgagggaagggtaggagtatggagaagagacccgcggagaagaggggagaatctacaacggataatgttgtagatatttacaacatttactcaatggtaggtatttttatcctcgttttactagttggagaattatatcatgcaggtttatacaattaacaagtgggggagccaggagagaacccattcactctttagttcattcattcattcagtcagtcaacacatctttgggtgtcttctaaatgccaggcactattctaacccctaaggatacttcagtaaacaaaacagtcccaaattcttcccctatggagctttctcggcgaaggcgggattggttaggagctgacaatcggcagcagacgattgtaaatgaccggaccttttttctattctcctgcccagcccccggcccggcctccgcctccggccctgctccagccccgccagcggcccaggacccgcccctggctccggccccgcccctggctccgcccccgcccccgcgccggcggcggcgcggcgcccgcgcttccgtatcgctcctcgtaggccggggctcggcgcgcgcacccgcactaaagacgcttcttcccggcgggtaggaatcccgccggcgagccgaacagttccccgagcgcagcccgcggaccaccacccggccgcacgggccgcttttgtcccccgcccgccgcttct

SEQ ID NO: 27319 - DNA, 2300 bp, Homo sapien
aggtgagcagtggagagaaggggggccctgcacaaggaaacagggaagagccatcgaagtttcagtcggtgagccttgggcacctcacccatgtcacatcctgtctcctgcaattggaattccaccttgtccagccctccccagttaaagtggggaagacagactttaggatcacgtgtgtgactaatacagaaaggaaacatggcgtcggggagagggataaaacctgaatgccatattttaagttaaaaaaaaaaaaagcaaacacaaagatgcttcaagatcttcaggagaagtatggtatacaagtttcagggaccctatttgacaattttcagagtgctctctatgctgattccgagtcgagtgtgtcagctgtgattacagtgcctgtggatctaggccgggttgggggggtgtgggcgggggaagggaagtctggcccggagcaattgctcctgccggtaaccccagcactttgggatgcctaaacaggcgtatcgcttgaggccagtaattcgagaccagcctgggcaacatggcaaatctgtctctacaaaacaaaattagaaaaattaactgggcgtagtggcatgtgcctgttgtcccagctacttgggaggctgaggtgggagaatggcttgagcccaggaagcggaggttgcagtgagccaagatcatgtcactgcacttcagcctgggtgacagaaccagaccctgtctttaaaaagggagttggtggggagaggttctagaatgtcatgtagcaaccagtttaaggactgggactcagggatccaactcccacagtttccctgtgtgaccctaggcatttgacttagcctttctgagcctcaggttttttgtttctgaagtaaaaggattggactaggtaatctccaagatcctaggaacccaggagaaagatgagaaaatgtacaagaatgaacactcaggtggaaatgctgcaatcctgagaagctcccaggatgaatgaaaggcacaggacctcttacccctcacccctgcccccctcaagagctggtttctcaaacctttctcttaggccccttcaaagggggaaaactaaaaattatacaagttatagttcaaggactttaaatagattatttatatgattgctcataaggatgaggctgtgaggagggaacaccttatttaatctaatgaaattccataggaaagaggccttttgtatattgaatcaatttatctgccttctcagtgcatctgtcatattctgaaagattctgggttgatcttttgcgataacctctatggctgtgagtgtgtgtgtgtgtttgtgtattttttaacattttgtataatgattggaggttggtaaaaagtaacacaacagtacttttttaatacaaacttggtgtggtcttgagttgtcttccattggagagcgtacgtgtgccacagattggtgcacctgccggcatctctaggattgcaccaactccctctagctcttcttggtggcctgcaggggcctagggcgcattcacttccctctgcttgactttacgtggtgttctagcgtcagacatcaggcgatgccgtgcattacccaagacactggacagctccggatcttcccgtctaaccactaatcaagttaaaaagaggaaattaacgctttcttagtagtctctgaaagaaactagttatttgcgtaaagatgacttggttttgtgttgtttatccctggggagaagggtaaagaagaccctcaaactggatttgctgctgaagtgcttttaactcacctgtgcggagagcggacttcaagagagggcgtgccggtgctccggacaaaacctggggaatactgaaagccaccaccaccaccgtcattccagcatgcagatctcagtcctgggttggtgttgtagggcatttatttatttgacttgacggcgcctttcaaagcttgcgaggatcccttcctcttcctcgtgtgcatctgccaagcctgtgccccgcgcctcgcgggtggacccgggctggtgggcggggcctgcagcggggtgggagcccggtcgcccggcccctccccaccccgccccgcccatctccgctggttcccggaagccgccgcggacaagctctcccgggcgcgggcgggggtcgtgtgcttggaggaagccgcggaacccccagcgtccgtccatggcgtggagccttgggagctggctgggtggctgcctgctggtgtcaggtgaggggtccgcggggagggggcgcgcttgggaaccgggaggccccgcgag

SEQ ID NO: 27320 - DNA, 2300 bp, Homo sapien
ttctagcgtcagacatcaggcgatgccgtgcattacccaagacactggacagctccggatcttcccgtctaaccactaatcaagttaaaaagaggaaattaacgctttcttagtagtctctgaaagaaactagttatttgcgtaaagatgacttggttttgtgttgtttatccctggggagaagggtaaagaagaccctcaaactggatttgctgctgaagtgcttttaactcacctgtgcggagagcggacttcaagagagggcgtgccggtgctccggacaaaacctggggaatactgaaagccaccaccaccaccgtcattccagcatgcagatctcagtcctgggttggtgttgtagggcatttatttatttgacttgacggcgcctttcaaagcttgcgaggatcccttcctcttcctcgtgtgcatctgccaagcctgtgccccgcgcctcgcgggtggacccgggctggtgggcggggcctgcagcggggtgggagcccggtcgcccggcccctccccaccccgccccgcccatctccgctggttcccggaagccgccgcggacaagctctcccgggcgcgggcgggggtcgtgtgcttggaggaagccgcggaacccccagcgtccgtccatggcgtggagccttgggagctggctgggtggctgcctgctggtgtcaggtgaggggtccgcggggagggggcgcgcttgggaaccgggaggccccgcgagatgccgcccctgatcccatccctgggcgccctgcaagtgacttaagagccttcggggcctcgggagagaagatgcaaacgccacggccggctgctgagacgcaactaggctgctgctgccgtcgattctgtaacaggagaaagccccatccgcgcccggattacagaccgtctgggccctaaactcagggggagactcccggcgtcttttgattccctgtcctcctgcagctctctgctggcgggcgtctaaataaagtagcttccccaaaagacccaagatcccaccgtggctgtcatctgacccttctggagactatcagttcaagtggaggcccccaccagtccccgagtgccctgacagccctccctgaccccaagtctgccccctcagtgccagccctccctacagatgtgcctcccatcacccgctgcacctcccctccttccggttcaggcccgagcaccctgaaatctggattctgtcccccagcgccccagctccatggcttctaaacctaaatccattgaaaccttttctgtcctctaaattgactgcctaggttccaataacaccatggtcacctccttcctttctcatgaactcttccctggccttccgggatacccctccggtttcccgccctgtcaggctgtctctgcttgggaccctcctgctctgtcaggtttctatgtagctaattgtgatgcccaaggccttttctctccttccctggcactgttcctttgggggatttcagccaaaccctggcattaaacacgggctataggcccatgactcgcacatttatatctctcttggtaccagttgggtgatgggtggtggtttattatagtcttctacttttctacttgcatgtaggtttcaaattttcttttctttctttcttcttccgtttttttttttgtttgtttgtttttttgtttttttgtttttttttgagacagggttttgctctgttgctgtggcccaggctggagtgcagtggcttgatcttgcctcactgccacctccgcctcccgggttcaagcgattttcctccctcagcctcccgagtagctggaattacaggtgtgtgccactacgcctggctaatttttgtatttttattggagatggggtttcgccatgttggccaggctggtctcgaactcctgacctcaggtgattcaccttcctcagcctcccaaagagctgggattacaggcgcgagccaccatgcctggccaggtttcgaattttctattaaaaggtttgaaaataatttctgtctctagcccacatctcttcttggtgtgacctctgggctcattcatctggctgtctccctgacattcctacttcagcctctctccagcatctccaacctaatgcagctcaaatgggactcgtgagttccccagctgagctccaatcggggcaccagctgcttaagcccaaaatggacattgacctcagcttttatgcatcaaatgtatcaggaagtctccagtttgtttttacgtctggaaatatatctgaaatccatgtgcccacccta

SEQ ID NO: 27321 - DNA, 2300 bp, Homo sapien
tctcctcaaaacagatgcccatgaaaaagcccacatccagcacttggttctcctctatggctccatgtcttcaaaggccacgtgggtgagggagggagagacaggttggctgtgctgaggagtctagattttctttgaacagccgtgaggagaaatttctggaggggcaggagtaaaatggggacagacaaaggagccttggatttgtctggtggcagaaagctatgagggggtagggtgggcacatggatttcagatatatttccagacgtaaaaacaaactggagacttcctgatacatttgatgcataaaagctgaggtcaatgtccattttgggcttaagcagctggtgccccgattggagctcagctggggaactcacgagtcccatttgagctgcattaggttggagatgctggagagaggctgaagtaggaatgtcagggagacagccagatgaatgagcccagaggtcacaccaagaagagatgtgggctagagacagaaattattttcaaaccttttaatagaaaattcgaaacctggccaggcatggtggctcgcgcctgtaatcccagctctttgggaggctgaggaaggtgaatcacctgaggtcaggagttcgagaccagcctggccaacatggcgaaaccccatctccaataaaaatacaaaaattagccaggcgtagtggcacacacctgtaattccagctactcgggaggctgagggaggaaaatcgcttgaacccgggaggcggaggtggcagtgaggcaagatcaagccactgcactccagcctgggccacagcaacagagcaaaaccctgtctcaaaaaaaaacaaaaaaacaaaaaaacaaacaaacaaaaaaaaaaacggaagaagaaagaaagaaaagaaaatttgaaacctacatgcaagtagaaaagtagaagactataataaaccaccacccatcacccaactggtaccaagagagatataaatgtgcgagtcatgggcctatagcccgtgtttaatgccagggtttggctgaaatcccccaaaggaacagtgccagggaaggagagaaaaggccttgggcatcacaattagctacatagaaacctgacagagcaggagggtcccaagcagagacagcctgacagggcgggaaaccggaggggtatcccggaaggccagggaagagttcatgagaaaggaaggaggtgaccatggtgttattggaacctaggcagtcaatttagaggacagaaaaggtttcaatggatttaggtttagaagccatggagctggggcgctgggggacagaatccagatttcagggtgctcgggcctgaaccggaaggaggggaggtgcagcgggtgatgggaggcacatctgtagggagggctggcactgagggggcagacttggggtcagggagggctgtcagggcactcggggactggtgggggcctccacttgaactgatagtctccagaagggtcagatgacagccacggtgggatcttgggtcttttggggaagctactttatttagacgcccgccagcagagagctgcaggaggacagggaatcaaaagacgccgggagtctccccctgagtttagggcccagacggtctgtaatccgggcgcggatggggctttctcctgttacagaatcgacggcagcagcagcctagttgcgtctcagcagccggccgtggcgtttgcatcttctctcccgaggccccgaaggctcttaagtcacttgcagggcgcccagggatgggatcaggggcggcatctcgcggggcctcccggttcccaagcgcgccccctccccgcggacccctcacctgacaccagcaggcagccacccagccagctcccaaggctccacgccatggacggacgctgggggttccgcggcttcctccaagcacacgacccccgcccgcgcccgggagagcttgtccgcggcggcttccgggaaccagcggagatgggcggggcggggtggggaggggccgggcgaccgggctcccaccccgctgcaggccccgcccaccagcccgggtccacccgcgaggcgcggggcacaggcttggcagatgcacacgaggaagaggaagggatcctcgcaagctttgaaaggcgccgtcaagtcaaataaataaatgccctacaacaccaacccaggactgagatctgcatgctggaatgacggtggtggtggtggctttcagtattccccaggttttgtccggagcaccggcacgccctctcttgaagtccgctctccgcacaggt

SEQ ID NO: 27322 - DNA, 2300 bp, Homo sapien
atatatatacggaatatatatataatatatgtatggaatatatatatacggaatagatatataatatatgtatggaatatatatatacggaatatatatataatatatatatatggcatatatacatggaatatatatatatggaatatatacatggaatatatatatatggaatatatacatggaatatatatatatggaatatatacatggaatatatatatatggaatatatacatggaatatatatatatggaatatatacatggaatatatatatatggcatatatacatggaatatatatatatggcatatatacatggcatatatatatatggcatatatatatatggcatatatatatggcatatatatatatggcatatatatatggcatatatatatatggcatatatatatggcatatatatatatggcatatatatatggcatatatatatatggcatatatatatggcatatatatatatggcatatatatatggcatatatatatggcatatatatatggcatatatatatggcatatatatatggctatagagatggcatatatatatggcatatagagatggcatatagagatggcatatagagatggcatatagagatggcatatagagatggcatatagagatggcatatagagatggcatatagagatggaatatagagatggaatatatatggcatatagagatggaatatatatggcatatagagatggaatatatatggcatatagagatggcatatagagatggaatatagagatggaatatagagatggaatagatatggaatatagagatggaatagatatggaatatagagatggaatagagatggaatatagagatggaatatagagatgggatatagagatgggatatagagatgggatatagagatgggatatagagatgggatatagagatgggatatagtgatggaatatagagatgggatatagagatggaatagatatggaatatagagatggaatagatatggaatatagagatggaatagatatggaatatagagatggaatatagagatgggatatagagatgggatatagagatggaatatagagatgggatatagagatggaatatagagatgggatatagagatggaatatagtgatgggatatagagatggaatatatagatggaatatagagatggaatatatagatggaatacatatatattccattgcattgttctttacaaacattcatttaattatgtaattgctaattaattgcttggttgttataacaacgaagtatttgattccttattttatctcatcatttaaattttatttcgcatattttcacaatgcactggatctattactgaggaatttaattaaataatcattcgaaccatgggctcgaattgtttactgataaagcccgacgaccaaaacagcctagcgactgctgtttggagcccctcggcccagggcccgtggctgttctctccaagggaccatctcgcccctcagccaagtcgcccggaaaacgagcgctcgaccgcctctgccccgctctcgctctgcacacagcaacggtctggtcgctcagccacttcctccttccagcctcatctggttcccaggccgctggggactcccaacgccactgtccaagactctagggtcagcaagcgccccgggcggagaagggcgaggacgaagagcgccgggccgcgaccaggagcccacccgcgccctccgactgcagacatggggaagagacgcgggaactccaaagtcgctgggtctgcgcaggtgtgtgccgcgatcctgtgaaggtcaaggcctcctgtgagggggagtcgtcctggaatgcgatggtgaagtgctccagaccggccataggccggaaagagtgaggaagaagagaatgcaggaggcctgcgatttctaaggcgcgcgcgcacaggggtgctgcaattaggatggggcaatgggagcttggagaaggggtgctagctaggaggaaaggcgcgtgcgtggaggaacggcgcgtgcgcggaggggcggtgtgtgtgtcagaagaggcggcgcgtgcgtagaggggcggtgagagctaagaggggcagcgcgtgtgcagaggggcggtgtgacttaggacggggcgatggcggctgagaggagctgcgcgtgcgcgaacatgtaactggtgggatctgcggcggctcccagatgatggtcgtcctcctgggcgcgacgaccctagtgctcgtcgccgtggcgcc

SEQ ID NO: 27323 - DNA, 2300 bp, Homo sapien
tggctaatttttgtatttttagtagagacgagtttcaccatgttggccaggctggtcttgaactcctgatctcaggtgatccacctggctcagcctcccaaagcgctgggattagaggcgtgagccaccgcacccagccatcaaagatgtaaccttgaaacaaactgcagaagccttttcccttagccttaaaatggactccatgtccctcccttcttcaccgtataaactcccttcacatttatctaactgtatgcccgtgtctagttacgtgccttcttagaggttccagacgctaatcttgagacagacagaccaagcctggagattcttctgcaaaattccacatgtgacctcaaggcgtctaattaagaatccagccattgttgagatgatgccagaccacaggcttcctgtggactaggacccaagacagccaccggaacaagacaaacagacagtgtacttagcataatccttgcctgacttccacatcgttttcccgttttaaacccttgccttggccgggcgcggtggctcacgcctgtaatcccagcactttgggaggccgaggcaggcagatcacgaggtcaggagatcgagaccaacctggctaacacggtgaaaacccatctctacaaaaaacacaaaaaattagccgggtgtggtggcgtgcgcctgcagtcccagctactcgggaggctgaggcaggagaatggtgtgaacccagaaggcggagcttgcagtgagcggagatcacaccactgcactccagcctgggtgacggagactctgtctcaaataaataaataaataaataaataaataaataaataaataaataaaataaataacccttgcctttcccactccccataccccacaattcaacgtgattgctttggggataggaatccaaccacttccccttgctagctttggaaataaagtcactttctttccaccacatcttgctcttgttagactctgcaagcagccagcgactgaaccagcattcggttacatcccctgaggcggatgacacttgtgtgatcctgtaaccgatttcttgttagaatgttggcatctttcacccagtcgttttcttgtaattttatttatttgtttgaaaacagaatccttcttgcaatcctgtcattttcagtgccttttttttttttttttttttttttttttttttttttttttgagacggagtctcggtctgtcacccaggccggggtgcagtggcgcaatctccgctcactacaacctccgcctcccgggttcaagtgattctcctgtcttagccctccaagtagctgggattacaggcgccggccaccacgcctgactaatttttgtatttttagtagagacgggtttcagccatattggccaggctggtctccaactcctggcctcatgtgatccgcccacctcggcctcctaaagtgctgagattacaggcgtgagccaccgcgcctggcatcagtgcatactttttgaagtgattccaagttatcgcccgcttttttcgtgtaacatataaatacatctctgtatctagaaatatccaatgcataattcaattgtctgcgaggtatttcatcacgtattttcacgagcgtggccaatttcaaaatagttctacaaagaggaaatgcaagaatgtgggaagagcaaaagaaaagctctatgttgcaaaacccatttttgctaacgtgtccagtgggctcccgggacgacctgtttttaaattcttggtctccctgcaccgcgtccctcctttgctgcgctagctttatgacgcatcttggaagaacagggcagatttaaaaccctctcccaacaggcgtcaaacgacatggtgcaggctcgggctggggagcgggcctgcggctgcccagctgctaaaggacttcctactcgtgcaccgccgccggctccagggcaaaccccacgccatttagaaatgctggaagtttctgtctctccctccccctgctcggaggccattccccccacccccagagccccacctcctccttcactgggccctttctaactccttccccttaaaacccttttcaaaatggggttgactggaggcggaggttgcagtgagccgagatcgccccactgcactccagcctggtgactccgtctcaaaaaaaaggggaggggggcgggggagagttgaaagcttaatatgtactttgggggctattaaagcaaacatttcgactaaaggggcgaatcctcgaattgtgcgatcaagcacccgagaggagagttgg

SEQ ID NO: 27324 - DNA, 2300 bp, Homo sapien
ggtggctcacgcctgtaatcccagcactttgggaggccgaggcaggcagatcacgaggtcaggagatcgagaccaacctggctaacacggtgaaaacccatctctacaaaaaacacaaaaaattagccgggtgtggtggcgtgcgcctgcagtcccagctactcgggaggctgaggcaggagaatggtgtgaacccagaaggcggagcttgcagtgagcggagatcacaccactgcactccagcctgggtgacggagactctgtctcaaataaataaataaataaataaataaataaataaataaataaataaaataaataacccttgcctttcccactccccataccccacaattcaacgtgattgctttggggataggaatccaaccacttccccttgctagctttggaaataaagtcactttctttccaccacatcttgctcttgttagactctgcaagcagccagcgactgaaccagcattcggttacatcccctgaggcggatgacacttgtgtgatcctgtaaccgatttcttgttagaatgttggcatctttcacccagtcgttttcttgtaattttatttatttgtttgaaaacagaatccttcttgcaatcctgtcattttcagtgccttttttttttttttttttttttttttttttttttttttttgagacggagtctcggtctgtcacccaggccggggtgcagtggcgcaatctccgctcactacaacctccgcctcccgggttcaagtgattctcctgtcttagccctccaagtagctgggattacaggcgccggccaccacgcctgactaatttttgtatttttagtagagacgggtttcagccatattggccaggctggtctccaactcctggcctcatgtgatccgcccacctcggcctcctaaagtgctgagattacaggcgtgagccaccgcgcctggcatcagtgcatactttttgaagtgattccaagttatcgcccgcttttttcgtgtaacatataaatacatctctgtatctagaaatatccaatgcataattcaattgtctgcgaggtatttcatcacgtattttcacgagcgtggccaatttcaaaatagttctacaaagaggaaatgcaagaatgtgggaagagcaaaagaaaagctctatgttgcaaaacccatttttgctaacgtgtccagtgggctcccgggacgacctgtttttaaattcttggtctccctgcaccgcgtccctcctttgctgcgctagctttatgacgcatcttggaagaacagggcagatttaaaaccctctcccaacaggcgtcaaacgacatggtgcaggctcgggctggggagcgggcctgcggctgcccagctgctaaaggacttcctactcgtgcaccgccgccggctccagggcaaaccccacgccatttagaaatgctggaagtttctgtctctccctccccctgctcggaggccattccccccacccccagagccccacctcctccttcactgggccctttctaactccttccccttaaaacccttttcaaaatggggttgactggaggcggaggttgcagtgagccgagatcgccccactgcactccagcctggtgactccgtctcaaaaaaaaggggaggggggcgggggagagttgaaagcttaatatgtactttgggggctattaaagcaaacatttcgactaaaggggcgaatcctcgaattgtgcgatcaagcacccgagaggagagttggggggggtcaggaggggtgggggctccagggaaagcccgggggtctgggccggggtctcgcggggcccttccggaaggatcgcggcccccgaaggtgggcgtcccgcggggctccagtctccaggacgttccgggaggctccgcgctctgggaggccggctgcgtggggtccccgcgctgcagccgcagaggccccccagggccgcggttcccggagcgggaaagtcccgcgcgggggcggtggcctcgggggcgggacggggcgggggcgggggcgcgggcggccgagccgaatcccctccaccgggacgccccgctgctgctcgggaagaggcgggccctgcgcgccctgcgctcgccatggcggtttgggcggcgacgtgagcggctccgcggaccccgagcggggccccggccgcgacctgagccgccgccgagcgcccggggccatgcgaccgacgctgctgtggtcgctgctgctgctgctcggagtcttcgccgccgccgccgcggccccgccaggtgagccgggc

SEQ ID NO: 27325 - DNA, 2300 bp, Homo sapien
cacagtgctgggtggtatgcagccaaatgcttccgcaaagctcagtgccccattgtggagcccctcactaactccatgatgatgcacggctgcaacaacagcaacaagctcatgatcatgtgcatcatcaagcatgccttcgatttcatccacctgctcacaggcgagaaccctctccaggtcctggtgaacgccatcatcaacagtggtccctgggaggactccacatgcattgggcgagcagggactgtgagacaacaggctgtggacatgtccccactgcactgtgtgaatcaggtcgtctggctgctgtgcacaggcactcgtgaggctgccttctggaacatcaagaccattgctgagtgcctggcggatgagctcatcaatgccaccaaggcctcctccagctcctatgccatcaacaagaaggatgagctggagtgtggggacaagtccaaccgctgattttcctggctgctgcctaataaaccagtctgccctttgggatgcctcccccacccccccaaaaaaagtgatgagatttggaaacttctaattgtcccctaatatctagttttccttccttagtactgaaaccccattttccagccttctttgcaatttggtgtagtcaagtgactattttactagcagaatgaaaacaaaaatggtacatgcaacccccgcccctttcaaaaggttcttaaagagaggagagtgttcccttctgtatcctctcttctggtggaatgccagcattgtgacatatttcaaaagtaaattattcagcacatatttattgaacacctagatcctagcccatgtataagagctataggagaacattatccaggatggcatttttggtgataattccatgatacaaaaccttttacttcattatgcctcaagtaaaatgctttttagatttccactgataataactctacttggctgggcacagtggcccacgcttgtaatcccagcattttgggaggcagaggcgggtggatcacctgaggtcaggagttcaggatcagccaggtgaaatcccgtctctactaaaaatacacaaattagccaagcatggtggtgcgcacctgtaatcccagctactcggaaggctgaggtgggaggattgattgagcgtgggaggtaagaggctgcagtgagccaagatcacaccactgcactccaccctggacaacagagcaagaccctgtctcaaaacaaacaaacaaaccacccaaaaaacaaagctcgactttcccccaaacaactaaatggttataggcatttctgtaggaaatttagacggggcttccaaacgctgttaaagttatgttgaaaatccaagaggctgaaagatatctgactataagaaagacgaaaaaaaaaaaaaaagacaaaaatctacgtgaatagacgggagagcgccgagcgaaatcagaagactagttgtattgtgaggatcacctcgggtaaccagcactcgctgggtagccctggtttactaacttcaactttctggggctccatttctgaattgaggggattagaaaaaggcatctctaaagaccctccgttcccgagaaccctcccggagcaccttccctactctgggcagctcgcagacagacaagactgatcggccataggcgaagggaaaccctggtcccccgggtctcgagctccgtccgcacgtaatctcacggtactgcacttcaagtcagcgtgcagaaacgcagcagtgggagcccggcggcggccgcccaccggcaggggacaggagaggcccgtcccgctctgcccggaaccgtagatagctgggtctgaactccggctccgggaggcctgcagagcagcccaccccgtccctcggagctcgccctgcccccggccggccacttgctgcacgccgattggtcgcgaggagcgcccggcgtcccgctgcgcccagccaacgccctctccccgccccctcgcgtcccgccccgcccccggccggccacttgctgcgctccgattggtcgctgcggtgcacacggcgcctcgccccgcctcaccggcgctctatcctcgcgtctgctcccagctccgggctcccggggctgaggtggagccgcgggacgccggcagggttgtggcgcagcagtctccttcctgcgcgcgcgcctgaagtcggcgtgggcgtttgaggaagctgggtgagtcctgtctgtgggtctccggcgccaggcaaccgtagagggctcgcgcccgccgcccgcgcgtaaggaggctccctcgtcgggccctgt

SEQ ID NO: 27326 - DNA, 2300 bp, Homo sapien
cctgggctggagtgcagtggcgcaatctcagctcactgcaacctccacctccagggttcaaacgattctcctgcctcagcctcccgagtagctgggattacaggcatgcgccaccacgcccatctaattttttgtatttttagagagatgggggttttccgtgttggtcaggctggtctcaaactcccgacctcaggttatccacctgcctcagcctcccaaagtgctgagattacaggcgtgagcactgcgtctggccttatttttctttttaaaaattttttagtggccaggtctttttttttttagacggagtctggctctgtcgcccaggctggagtgcagtggcacgatctaggctcactgcaagctccgcctcccgggttcacgccattctcctgcctcagactcccgagcaggtgggactacaggcgcccgccaccacacctggctaattttttgtatttttagtagagacggggtttcaccgtgttagccaggatggtctcgatctcctgacctcgtgatccgcccgcctcggcctcccaaagtgctgggattacaggcgtgagcaccgcgcccggccagaaatcctattttctttcacatgagttattttgttgattgtttgcttataactaaagccctcagaatcagagtttatactgtatctttttctgtgttcctacatagatggcaataaatgattctaatgtttatgatgtagaagctgaggaggctaatacctatttctggctccttttaggagacacagtcataacaaaaaatattgcttaatgtgcgaggcacagtgccaagtggtttacatacattgtgtaattctccccctaaaaaagtcaatgaagttgatacaattattatttcattatatgtaaaatagggaaaataacagcatttatctcagagggctgttgtaaagattaaatgaatgcctgtaatcccagcactttgaaaggccgaggcaggcagatcaccttagctcaggggttcgagaccagcctggccaacatggtgaaacctggtctccactaaaaatacaaaaaaattagctgggcatggtggtgcgcgcctgtaattccagctactcgggaggctgaggcaggagaatagcttaaacccgggaggtggaggttgcagcgagccgagatcgcgccaccacactccagcctgggcgacagagcgagactctgtctcaaaaaaaaaaaaaaaaaagtaaatgagaatatacataaagcacttagcacaatggcatactatttactatagtttactatttattgcaactctcattttgcaggtatcttgcctaaggtgcaagcagaagaaacaggattttcaacccagatctgaaaactcccaagcctctgcctttttctttttatcctttttctttttccttgttaaaaaacttgcttcctgtacagagaggggaaatgctcagtccccacgtcagtggttgaactccaagccagaagatccctattttgattttgtcctctggcctgtcgccagcccctcaacagtacttgaattaataaaagggcaggttttaagcctcatgtatctgcgcaggtgactccttctgtgaccccgaataaacctgttccggtcccgttccggggaaacagccttgccttcccctgcccccagaaagttaccctcgccctccgagccacaactccccacgccgccaactcggtctttacatcattttcgacgccccctaagtccctcccgagaggcgcaggcgcacatcgccccttctagcgaactacatctcccacaatcccaatcggccggaccacctccgctcggggcggggacggaggtggagctggtggtccccggtcgggacgaaggctcccgaggtgccctgcctgggtcctccggggtaaagttcgtttggcggaagattgtccgttttcctggtaaggtcacctgtcccaatcaggtacgattctgccttccgtacccccgagcccctcagtgtaaagtggcaaatggtctagcccggcggaggcaccagctggaggcggtgggagggacacccgcagtgaagggcggaccgcgcacgcatgcgcagaggcgcggcaggggggcgggagccgcggaacccctaccccaggtctgcgcaggtgaggagggggcggggcaggaccgacctcccttgccatgataaccaccttcgcagccggctcccagaccgttggcaccgattgcctagaaaatagggggtctcaggagctccgttttagcgtttatatatcccaattccaatt

SEQ ID NO: 27327 - DNA, 2300 bp, Homo sapien
tcaaatccctaggctcaagtgatcctcccacctgggcctcccagagggctgggattacaggcatgagccactgtgcctggccttggagtgcatttagaagcaaggctgggagaaggatgagattgagagatataaggcaccttactgggcctggaagcagaagagggggatggctactggcaacttttaggaagttttgcttggtggctttttttttttttgagacagtgtctcgcactgtcacctgggctggagtgcagtggcgcaatctcagctcactgcaacctccacctccagggttcaaacgattctcctgcctcagcctcccgagtagctgggattacaggcatgcgccaccacgcccatctaattttttgtatttttagagagatgggggttttccgtgttggtcaggctggtctcaaactcccgacctcaggttatccacctgcctcagcctcccaaagtgctgagattacaggcgtgagcactgcgtctggccttatttttctttttaaaaattttttagtggccaggtctttttttttttagacggagtctggctctgtcgcccaggctggagtgcagtggcacgatctaggctcactgcaagctccgcctcccgggttcacgccattctcctgcctcagactcccgagcaggtgggactacaggcgcccgccaccacacctggctaattttttgtatttttagtagagacggggtttcaccgtgttagccaggatggtctcgatctcctgacctcgtgatccgcccgcctcggcctcccaaagtgctgggattacaggcgtgagcaccgcgcccggccagaaatcctattttctttcacatgagttattttgttgattgtttgcttataactaaagccctcagaatcagagtttatactgtatctttttctgtgttcctacatagatggcaataaatgattctaatgtttatgatgtagaagctgaggaggctaatacctatttctggctccttttaggagacacagtcataacaaaaaatattgcttaatgtgcgaggcacagtgccaagtggtttacatacattgtgtaattctccccctaaaaaagtcaatgaagttgatacaattattatttcattatatgtaaaatagggaaaataacagcatttatctcagagggctgttgtaaagattaaatgaatgcctgtaatcccagcactttgaaaggccgaggcaggcagatcaccttagctcaggggttcgagaccagcctggccaacatggtgaaacctggtctccactaaaaatacaaaaaaattagctgggcatggtggtgcgcgcctgtaattccagctactcgggaggctgaggcaggagaatagcttaaacccgggaggtggaggttgcagcgagccgagatcgcgccaccacactccagcctgggcgacagagcgagactctgtctcaaaaaaaaaaaaaaaaaagtaaatgagaatatacataaagcacttagcacaatggcatactatttactatagtttactatttattgcaactctcattttgcaggtatcttgcctaaggtgcaagcagaagaaacaggattttcaacccagatctgaaaactcccaagcctctgcctttttctttttatcctttttctttttccttgttaaaaaacttgcttcctgtacagagaggggaaatgctcagtccccacgtcagtggttgaactccaagccagaagatccctattttgattttgtcctctggcctgtcgccagcccctcaacagtacttgaattaataaaagggcaggttttaagcctcatgtatctgcgcaggtgactccttctgtgaccccgaataaacctgttccggtcccgttccggggaaacagccttgccttcccctgcccccagaaagttaccctcgccctccgagccacaactccccacgccgccaactcggtctttacatcattttcgacgccccctaagtccctcccgagaggcgcaggcgcacatcgccccttctagcgaactacatctcccacaatcccaatcggccggaccacctccgctcggggcggggacggaggtggagctggtggtccccggtcgggacgaaggctcccgaggtgccctgcctgggtcctccggggtaaagttcgtttggcggaagattgtccgttttcctggtaaggtcacctgtcccaatcaggtacgattctgccttccgtacccccgagcccctcagtgtaaagtggcaaatggtctagcccggcggaggcaccagctggaggcgg

SEQ ID NO: 27328 - DNA, 2300 bp, Homo sapien
ggtagagaaggcaaaaatcaaattccaactcatttcactttagttctggcacctgagacttagaaggatggatacaacagcagtgtaacctaggagattaactgaaatgacatttataaataagtacaatctggcactcagcagtagtaaatgttaacttgttacatttacttaccacaagacaaactggtaacaggaaaaagaaaattgaaaacttattttgatgatgttgggattacatattttaagaaaaatgtaagctgacaatatacaaaactaacatttttttgagcacttaaccttgggcagggtactatttaaaatgcttgtcatgaaagaatcctatgagggagatactattactatcaccaatttgcagataagacaaggaggcccagataggtaaataacttgctggaggtcacacaggtaagagggggtggagcctaacagaagcaattttgcttcagattctctcaacaagtgaaacgatgatcattgaaaatttgagaaaggaaaaaaaaaaaccctgttaaattacagtctcggaaggaacagctactttagtgtaacgggaaaacacattttacttgccatgtgtatctgaaataaacagattttttattttatttatttatttatttgtttagacagtctctctctgtcgcccaggctggagggcagtggtgtgatctcagctcactacaacctccgcctcccgggttcaagcgattctcttgcctcacagcctcccaagtagctgggattacgggcgtgcgccgccacgccaggcgaatttttgtatttttagtagcgacggggtttcactacgttggccaggctggtctcgaactcctgacctccaatggtcaacccaccttggcctcccaagtgctgggattacatcacatccggccagaaataaacagatctttaaatctagagcaaatgttacatctttagtttgaatatagcagtagtgtgggaaaattctgtttactctagtggatcactgaaaatagccttactacccagtggtgaggacgcctgggctcctgagtctcacacagcgccttggcctgggtagagacgctgccccatactagcaggaagaccttgggggacttcactaaccttgggcctcattcctcagaatgggtaacataagcagaataagacaggcaaataaagccgtatcagaggatatggagaataaagtagaaaccaactacaaaattaaccaagtaatctgccagagacaacgggtgcataaagagaaagtacaccaatttagggttatgtcctaaaaatgtataaagacacaaaaaggccttgacatcttagaaaacaggaaaagtaaaagagcaaatagaaaccagctaacagtagcaagtgaaaagcacatggccaacccccacccaccgcatttacaaacaacaggaaaatttctacaaatcagtttctatggtttcactcagttcgcgatcttaaatccccaaaccaaagcctaagcgcgctccgtgtaaaagcggagggggtttacgcaccgacaccgggtggccacctggttcccgcttgcccgctcgccggaagtcggcccaccgggaccggcgcgggaccagcgcggcaccgcccctcactgccccgccctacgacggcttccctgccccattggtccgcgcggccctgggtctccgcggcgagaatctagtctgattccctcccgccctgggcgctgcctgactgctccccagccgagacacccaagccttagcacgtttataatgtgacagtggtacggggtgccacgcagtgtttccaggagcgccgggggggagcgccaaaatgctaaacccattcttagccaattgtgcgccgctcacgagtcagagctgagcagctaccgcggaaaaatctcgtgacacgcctgactcctgatgagactaaaatgcaccgggctttgaatgccggtcgcttaggacatccggcctattgctaaaaaaaaaaatgaggctggttatagaacgcactggggaagacacagggcaacagcgagttcctcctctcacatgccagtgggggcgggggctgaaaaattctctcccggatgcatatccctgtcgaaactgaacttggcgccacctgagagcgcctgaaagccgtgtgttaaacaccgggttgcccttcttgctcttcttcctcttcgcctttaatctcaggcacttagcaagcctgttaaggctcccaaacactgctggggactgacaacttatgcggacacggtcgcctcaagagagacg

SEQ ID NO: 27329 - DNA, 2300 bp, Homo sapien
taatcctgtattactttgggcacttacaactggttttcggcccattttcaaattcacgtactgctcttgctctcaacttttaaaatacaattaaaaacacttgaactcggaacacttacgtttcaagatctctttcctacttctgtactttaaagaaatgagtatcttatacaaaagcaaatatcgagagacaaccgctgaacatgacacactattttcctaagtaaacaaccatttctttaacaatctcttcgccttcaaattttgtgaagccaagcgcaaattatgtaaagtctaccagcaatgacaaaaatagcgtgtcaactggggcaggggtagcaagaaaataatagacctacacacaaagtccactttcacttgctgtaattaatcgcaaccatttcaaagtccccttccatctttatctcgagtattttaacaaactagcaagtgcatcagtttgagttcgttttaattgaaacatttaactatcagaacggctgacagatactacaggacactaggccccgaataatcttattaatagatccagacccccaagcggtctgaagctcgcaataataaagaggatttaagattaaccaagaaacggccgttagagaccctttccggtcataggcaccggccggcaaaatccgcggaggcgagagggggaggggatacgcggcggcggaggaggagctgaggaaggaactaggcccgtccctggcggacaaccgggcctacgagtagctaaacggcaggggggacccaaacaggggagaagggtgaacatcttaactcggttctgaaacagggagtcttgggttacctcggaaaaggcgaagttcctcgagggaaaaggaagggagcggctgggggggcggttggggggggcccggaaaatggatcccaggcccaggcggggccctagcggggcctgagccggggaacgactgcgtctccgaagaaaggtgccaaagaaggctaggtgagggcctaacggtccgttgggagcagaagaatctgggaggcgtttacctggaaagctcctgttgaatttcccggaatttactgaccacgaaagacctaaaaatctgctcgatgttggtcgccatggcgtccgctccgttctctcaactcctcctcgctagtcctccaggctcccagcatgcctcgggaggaggcgcacgggccaattcggtctctcgccttcctgattggctccaaagggaatgcccggtccggcccgctccaccgagggaccaatcagtgagcacggccctgctctcctctgctgtttctgagcggctggggtagaggtgctgacgtttgcgccgcgcacgactatgtccgccatgttagtgtctgacgcaggcgccattacaggagccgtctctcttgaggcgaccgtgtccgcataagttgtcagtccccagcagtgtttgggagccttaacaggcttgctaagtgcctgagattaaaggcgaagaggaagaagagcaagaagggcaacccggtgtttaacacacggctttcaggcgctctcaggtggcgccaagttcagtttcgacagggatatgcatccgggagagaatttttcagcccccgcccccactggcatgtgagaggaggaactcgctgttgccctgtgtcttccccagtgcgttctataaccagcctcatttttttttttagcaataggccggatgtcctaagcgaccggcattcaaagcccggtgcattttagtctcatcaggagtcaggcgtgtcacgagatttttccgcggtagctgctcagctctgactcgtgagcggcgcacaattggctaagaatgggtttagcattttggcgctcccccccggcgctcctggaaacactgcgtggcaccccgtaccactgtcacattataaacgtgctaaggcttgggtgtctcggctggggagcagtcaggcagcgcccagggcgggagggaatcagactagattctcgccgcggagacccagggccgcgcggaccaatggggcagggaagccgtcgtagggcggggcagtgaggggcggtgccgcgctggtcccgcgccggtcccggtgggccgacttccggcgagcgggcaagcgggaaccaggtggccacccggtgtcggtgcgtaaaccccctccgcttttacacggagcgcgcttaggctttggtttggggatttaagatcgcgaactgagtgaaaccatagaaactgatttgtagaaattttcctgttgtttgtaaatgcggtgggtgggggttggccatgtgcttttca

SEQ ID NO: 27330 - DNA, 2300 bp, Homo sapien
taatcaaaaacttgtttgcagactgataacgcattatgtgttgaagagaagctgcatattcctctagtaataaactgcttcgtctaatattatttttagatattccttctgtagcactttattttacaattttcctaagcatttatacataattatgacaaatttgaaaatcagaaaagtaattatggttttaaaagttaatctacaaggaagtaatgatttcatcttaaagccagcaatcgttaaccgcatttactgaaaagcaatgaaaatttcaaaccacctaaatatgcaacagtatattcctacaatgggattctatgcagccatgaagaagtccaaaagactgagactgagagggataaacctgttcacaacgtattagctggaaaaatgatcaatacaaaacaagatgatcacatatcacacaatacatggggggggaaatgaaatgacatgagaatatcaataacgtgagttttttcttttctcctttttcatgtcttctaaattataataaaacgctcattttctaaaggaaagactagcttttaaaagctacaaaaacacacctcgttaaactaagcaaacaactacttattgcagccagagatttgtcaggaaaattatattctcttagctcgggtctcttctcatccaaaacactactagcaatatcacaaaaatttaaaaagcaatgtgagtggatctatttccacttaaaaaacaacacattctgcaaaagtgataattctagcaataatacatcattgccctaataatcctgtattactttgggcacttacaactggttttcggcccattttcaaattcacgtactgctcttgctctcaacttttaaaatacaattaaaaacacttgaactcggaacacttacgtttcaagatctctttcctacttctgtactttaaagaaatgagtatcttatacaaaagcaaatatcgagagacaaccgctgaacatgacacactattttcctaagtaaacaaccatttctttaacaatctcttcgccttcaaattttgtgaagccaagcgcaaattatgtaaagtctaccagcaatgacaaaaatagcgtgtcaactggggcaggggtagcaagaaaataatagacctacacacaaagtccactttcacttgctgtaattaatcgcaaccatttcaaagtccccttccatctttatctcgagtattttaacaaactagcaagtgcatcagtttgagttcgttttaattgaaacatttaactatcagaacggctgacagatactacaggacactaggccccgaataatcttattaatagatccagacccccaagcggtctgaagctcgcaataataaagaggatttaagattaaccaagaaacggccgttagagaccctttccggtcataggcaccggccggcaaaatccgcggaggcgagagggggaggggatacgcggcggcggaggaggagctgaggaaggaactaggcccgtccctggcggacaaccgggcctacgagtagctaaacggcaggggggacccaaacaggggagaagggtgaacatcttaactcggttctgaaacagggagtcttgggttacctcggaaaaggcgaagttcctcgagggaaaaggaagggagcggctgggggggcggttggggggggcccggaaaatggatcccaggcccaggcggggccctagcggggcctgagccggggaacgactgcgtctccgaagaaaggtgccaaagaaggctaggtgagggcctaacggtccgttgggagcagaagaatctgggaggcgtttacctggaaagctcctgttgaatttcccggaatttactgaccacgaaagacctaaaaatctgctcgatgttggtcgccatggcgtccgctccgttctctcaactcctcctcgctagtcctccaggctcccagcatgcctcgggaggaggcgcacgggccaattcggtctctcgccttcctgattggctccaaagggaatgcccggtccggcccgctccaccgagggaccaatcagtgagcacggccctgctctcctctgctgtttctgagcggctggggtagaggtgctgacgtttgcgccgcgcacgactatgtccgccatgttagtgtctgacgcaggcgccattacaggagccgtctctcttgaggcgaccgtgtccgcataagttgtcagtccccagcagtgtttgggagccttaacaggcttgctaagtgcctgagattaaaggcgaagaggaagaagagcaagaagggcaacccggt

SEQ ID NO: 27331 - DNA, 2300 bp, Homo sapien
atatggttggtttgtcctcttttttggggggaactttagctgtgcttagattcatgactctcaaacagacttgcttagattcatggctctaacaaccttcattgaagtatgacttatctaacattttgtattatgaaacaaacaattaatagaaaatggtaagttttgctttggcctatgtcaagtgttgatttattttcttctgtagtctttttttttttttttttttttttttttgagacggagtctcgctctgacgcccaggctggagtgcagtggggtgatctcagctgactgcaagctccgcctcccgggttcacgccattgtcctgcctcagcctccggagtagctgggactacaggcgcacaccaccacgcccggctaattttttgtattttttttttttttagtagagacggggttttaccgtgttagccaggatggtcttgatctcctggcctcgtgatccacacgtcttggcctcccaaagtgctgggattacaggcgtgagccacagtgcccggccttttttctgtagtcttaatggctcagatttctgatgagcttttttgggggtccctaagatttatctaatttgatattggcattagagtaaataaatcccatctggttgttaaagttgaatactcccatctctttagggtatgtaaattcaaaccttcttaagttgtaaattaaggactaagaatttcctctctaaaatcagtattcttttctaaaatagaaacatttgaaaagttatttattagtggttttagaatagtattgggggaaaatgttatctctttagggtatgtaaattcaaactttcttaagttataaggactaagaatttcctctctaaaatcagtatccttttctaaaacagaaacatttaaaaagttattttagtggtttcagaatagtattgggggaaaatattatttttattagaatgtaacgtaggcatgataaggtaaaatttgagttctctatgaatattttatatttgttattcagatatttttatactctgtagaagcaatcactaacctttgttgaaagcttattctgtgccaggcattatttgatgtactttgcatgttttaactcactttatcctctaactctagaagacacaagtgtgtcagtaatttggccaagaccattaacctagtaagtgatgaactgattgaggattcaaaagtggcagtctgttccagagccagtgccatgttgcttcctgtataaacaagggttaataatcgcaaaaattatattatgtgggtatttttaatagaaactgtagcaactaataacatgaaatatattcagtgacaaaagtagtttaaaagtaattttgctatgatttgagagctggagggaataattattttaatagaatttagtgaaacatgtcttaatgtaattcaaagtaagttttggtgtttaataatttatttttaacccaggcattagttgtggaaagaattatcagaaaagtagtagtctccaggttaactgttttatgaaaaatagtttatttggtaacttttaatttaacgtgaggtgttatactgtggggtttttttttttttttgagacagagtcttgctctgttgcctaggctggagtacagtggtgcaatttcagctcactgaaacctcgacctactgggttcaagtgatccgcctcagcctcccaaatagctgggactacaggtgcgcgtcaccatgcctggctaatttttgtatttttagtagagatggggtttcaccatgctggccaggctggttttgaactcctgacctcatgatccacctgccttggcctctcagagtgctaagattacaggcgtgagccactgtacttggcctgtactaaggtgttttaacatggaatgtaaatatgggtttatatgatttaatctaactctactttggggaatgtctgacaaaattaatttctattacttttagacttgaaagagggctccagaaaaagtagatgcgtatctgtacaaacagatcctactgatgaaattcccactaaaaagtcaaagaagcataaaaagcacaaaaacaaaaagaagaaaaagaagaaagaaaaggaaaaaaaatataaaagacagccagaagaatctgagtcaaagacgaaatctcatgatgatgggaacatagatttagaatctgattcctttttaaagtttgattctgaaccttcagctgtggcgctggagcttcctacaagagcatttggcccatctgagaccaatgaatcccctgcagttgtgctagaa

SEQ ID NO: 27332 - DNA, 2300 bp, Homo sapien
cttagggtaccccgccctgggagccgcgattctggcaaggccgggtttgtgggaagagcgctcccctggctaccccgctgcgggctgtgctcacgggacgcgttcccgaggaaagtgagggggccccagagggcagcgaggagccccttggagaggacttagaggtgacttggaaaagagctcgaaaaaccctgagagcccccatcttgcaaggacgctgttcgatggggcaggtgacaagccctgcttcccccgtgatttagggcctcccttctctcacgcactccaaattattctggagatgggggaatgtcgaggattcgtggggtcagaattcactagcatctgtcttacccaaagccttttggatctttcggtttgaaacgccggtccctgttcccctcaattttgatactaaagttcagacacaaaactgaagtgttgaaactcatagattggatggggtgcctctgaatttaggtgtacttgcgtttattgagaaacatgtatgccaggtgaggctctgtacatatttaacgcaaacttcagcatcctttaaattttaaaggagaatatatttaacctcagtttttagattctaatcaagaaaatgatttgctatgggaagagaagtttcctgaaagaacaactgttactgaattacctcaggtaatactttttaaatatcattagaatgtgtatttgtataaacttttttttcataggatttgagcctatttttaaaaatacatttatacttctcagaagcattttgcttggaaagtagttttacagagaggcttgatcatctcaaccagggatgaaaataccgcatcagccaaggtaaaggagttggtttgatacagtaatgatgactgtaaagatagccagcgctaaaataggcctgatagacgtgggggttttcttttactctctaacagtttttaccactcttctttgggcagttgacttctccagttcatcactcagagccagccctcctggcccacctccacaggttgtggcatagcactgaacctcgttgctcctctcccctaacacacacacgtttccattccccaactactaccattgtgctgtgtagtttgataaatgcggtttgtcctaatgggaacaggctagaagagttctccaagacccagtttctcttgtaaataagtgaccttcttatggtctatccaagatagttcccccttctctgatattttattgtgatataaaagaatgcttggccgggcacagtggctcatgtctgtaatcccaacactttgagaggctgaagcaggcggatcacacctgaggtcaggagttcgcgaacagcctggccaatatgacgaaacccccgtctcgactaaaaatacaaaaaaattagccaggcgtggtggggcacgcctgtagtcccaggtactcgggaggacgaggcacgagaatcgcttgatcctaggcggcagaggttggtactgagccgagatcacaccacttcactcagcctaggcgacagagggagactccgtctcaatttaaaaaaaaaaaaattcttgtattgtggagaacgtcgacctgaagcagacaggttgaggggaaatatttgaagtcaggaaatgtttcttaaatatgggctttgttagccctggatgcagagtttcagaagcttaaaagatccaaaatgttttaacacttggaatatttctacttcaatacaaacatctatactaccataaagaactgtaaaaactaaaaagtgaaatctgcccctccaccacccctacccccaacaacaaattcccgcttcccataggtaaccatggttaaaagtttagtgtgactcctttcagacttttttacagtgtgtaatgtatttttcatgttatttattatacagcttatatgatttttacttttcagtgatcatgttagctgataaaatctttaggttgaaggttttttcttgatactcgactaatttttgcattctttgttttctaaagacttcacatgtatcattctccgagcctgatattccgtcctcaaaaagtactgagttacctgtggactggagtattaaaacgcgactccttttcacctcttctcaaccctttacctgggcagatcatttgaaagcacaggaagaagctcaaggtcttgtccagcattgtagggcaacagaagttactttgcctaaaagtatacaggtaactctgaaataaaatagttatgtgttaaagtaacaaattaagtgtgaaatgctctcctttgcaaaatagcagatgctgccttcc

SEQ ID NO: 27333 - DNA, 2300 bp, Homo sapien
agcaacttgaagtaaccaatagcttgaaggagagaaaaccatggtatatttgtttaaagttgaatatgtttatcagttataaaagagggagtaggccaggcgtggtggctcacgcctgtaatcccagcactttgggaggctgaagtgggtgaatcacctgagatcaggagttcgagaccagcctggccaacatggcaaaacactgtctctactaaaaaatagaaaaattcgctgagcgtggtggcgaacgcccataatcccagctactgggaggctggggcaggagaattgcttgaacctgggaggtgaaggttgcagtgagccgagatcacaccattgcactccagcctgggcaacaagagaaactccgtctcagaaaaaaagagggagtaaataaagtagataatttttttccttcaaaacttaaccacttttaacattggaaacactaatggacgaatttgtttgaattacttaaagtaatagatttgaggccgggtgcagtggctcatgcctgtaatcccagcactttgggaggctaaggtgggtggatcacttgaggctaggagttcaagaccagcctggccaacatggtgaaacccatctctactaaaaatacaaaaattagccaggcttgatggtgcatgcctgtaatcccagctactcaggaggctgaagtatgagaattgcttgaacccgggagccggaggttgcagtgagctgagatcgtgccactgcactccagcctggatgagagagccagactctgtctcaaaaaattaattaatacactaatagatttgagcactagcatttgtcatataccaccctgtttgttctacttatctttaactagacctgacatttctaatttcattccttctcagacctcagttggatgaacccattccactgtatgaggcaaaagtttccatggaagctgttcagaaaaatcaaggaagaaaaaagcaagttgttcaattttaattttcttctttctcagacctcagtcggatgaacatattccagtatttgaagccagaattttctttggaaattgttgagaaaaaccaaggaagataaaacaagttgcatttttaagcacgtttctctgctaagacaagatgctcagttgacacatttgaaaagtgtttgaaaaattcttgtgcaaatgatcaagataattctataattaacatcttaagggaatttttctaaaaaccttttcattgtttctatatattttgcccctgctataaaattccttccatgaagaaaactgctgctttcagcaaaagtcacactactcttgataaaagctgttgcaggcctttgctaagctatcaaagtaacgtattaattttgtatcaactccgttctcaacaccttccttaagtctttgctgtcataatttaagcatttgagtatattttgaagtcttaaaagacttagcccataggcacttaaattttgtgttttcaactattcattcactccggctttccccaggatcaaagaagatcccattaacttgccagtggcagctgcctggaagtctgagatgaccaggcactgggaacggggaagggagggatgtcggtaggctgcgctggcataggaagcgtgctgacgtcttatctgagttctctgggggttgaggaaggtggcctagtcccctctcctcgcctcttgagagcagtagccactgccctctcttaagtttatggaagcagcagcccatcgccgcagctcaagtttgtttccttttcatccaggcgccaaaccccgggctgatcacatccctgctgcgggcttaaatagagttaagctatttcggtgccccacagggtagtgcacatcagcgccctggatcgcatactttccagaagcgtcgctgaacctggcgactggactctggccgaggacctggcagaagcgccagggcagggtcaccgctgggacagtgggcgttgacggccacccgggatcgccgctgcgggctgcgtctcgcgggctgcccactgcgcatgctccgctcggaaccggcgggggcggaggcggggccgcgtcgggggcgggagctcggcgaggcgccacgtcaggggcgggcccggcgcgcgcgggaagtctctgtagggcggccggctaccctcagccgccgcgcgtcatggccctttcggtgcccggctactcaccgggcttccgaaagccgcccgaggtagtgcggctccgacggaaaagggcccggagccgtggagctgccgcctccccgccccgtgagctgacggagccggcggccc

SEQ ID NO: 27334 - DNA, 2300 bp, Homo sapien
atccttggaccaagttgaaacatgacatgtgtatatgaaatactgtacattttccagaatcagaaatacatgctttgcacacaggtaagaattttattaacagcagtaggaagggaacttgcagggatgtgaattagtaaatttatattctttagtttccttttaaaaatatttttaggccaggtgtggtggctcacgcctgtaatcccagcactttgggaggccaaggtgggcggatcacgaggtcaggagattgagaccatcctggcgaacatggtgaaaccccttctctactaaaaatacaaaaaattaaccaggcatggtggcgggcacctgtagtcccagctactcgggaggctgaggcaggagaatggcatgaacccaggaggcggagcttgcagtgagccgaggtcgtgccactgcactccagcctgggcaacatagcgagactccgtctcaaaaaaaaagaaatgttttaaatgacttatatttgctaatttgcattttctttctttctttttttttttttttgagatagagtctcgctctgtcaccaaggctagagtgaagtggcgccatctcagctcactgcaacctctgcctcccaggttcaagcaattctcctgtctcagcctcccaagtagctgagactataggcgcatgccaccatgcccacctaatttttgtatttttagtagaggcaggatttcaccatattggtcaggctggtctcgaactcttgacctcaggtgatccacctgctacagcctcccaaaatgctgggattacaggcgttagccaccgcacccagccctaatttgcattttctaaagtcctgaatcatacagtagtcctcacttgtgcaaaccctcctcattcagttcatacaagctaagttgctgcttgtgatttaacagagacatctccttccaactgtgtcattctgggccataaataattcagaagtacgggcaattacatagaatcttgatcttagtattataatttcaattaaattagcaagatagattttttctttgatttttacatcattttctgattctcttagtgacatacgatcagccccctgtatctgagggttccacatccagggattcaaccaatcaaggatcaaaaatatttggaggctgggggcagtggctcatgcctgtaatcccagcactttgggaggctgaggcaggaggatggcttcatctcaggagtttgagaccagcccgggcaacatagggagaccctgtctatacaaaaataaaaataaattaacctggtgtggcggtgaattgctgtggtcccagctacttgggaggctgaggatcactagagcctgagaggttgaggctgcagtgagccatgatcatgccactgcactctagcctgggccacagagggggcccctgtctcaaaaaaaaaaaaaaaaagctctgaaaaagtaataatacgacaataaaaaaaacaaaaaaaatagcataaccactatctacatagtatttacattgcattaggtattataagtaatatagagatgacttaatgtataatggagatgtgcctcggttatatgcaaatactaggccattttttttttctttctttttttttttcttttgagacagggtattgctctgttgccctggctggagtgcagtgctcattccagctcactgtaacctcaaacccatgtgctcaagggatcctcctgcctcagcctccccagtagctggggcaacaggcacatgccaccatgcctggctaatttttaatttttttgtagagagccttgtttcccaagctgctgcactattttctataagggacttgagtatctggagattttggtcttcatgggggtcctggaaccaatccctcatggatgcgtgagggatgactgtatatcatacacacataaagtttactggcttctgcaaacaaattttgagcccattaaccaaccagcctggtcaacgaatgtacatctaaagtaagatatatacgtgctaaaattgtttttaactaaaaatgccatatgtagtgtagaaatgaaaactagacactatttcattcgcatccattgagataatagtggtgagcacttaggataagcaccaggcttgacttgctgctcttgtcacttgtccttggaaatttaggctctattacaccaccaactctcaaatcatttccctgttgtagagctaaacttgacgtcctacagaatttctctaacttaacatgttgagtctctgagagtgcaaaacttgaaacaagagaaagtggcctgc

SEQ ID NO: 27335 - DNA, 2300 bp, Homo sapien
cacagtatttttgcaattttgcaacctgtgtcctagacagtcacacaaacataggctatgacttttatagttgcaacctgcatcctagacagtcacacaaacataggctatgacttttatagtaatccttgaaattttcatttctctgtggaagacataaagttagaaaacatttatataacttgtattatatagggccatataatatatattatgtggtggctcacacctgtaatcctagcactctgtgaggccaagacaggaagatcacttgagcccagtagttcaagaccagcctgggcaacattgcaaaagctcgactctacataaaaaatacaaaaattagccaggcgtggtggcacacacctgtggtcccagctactcaggaggctgaggtgggagatcgcctgagcctggaagtttgaggatgcagtgagccatgatcacaccactgtactccagcctggtgacagagggagaccttgtccaaaaaaaaaaaaaaaaaagagagaaagaaaagaaagaaaaaatatttagccttatagcgttaaaattatagcatgcttgaaattcttaaaggatagatttgtaagaaagttttcatcagctttttatagtattgcctttgactcaggcattatcctggagaattgattatttctttcttgtctttttattctgctcaggaaatcagtggcactctgtattattcaagattctttttgtgagaaaccaaaaacaaaatcagactagcttagaagaaaaatgggattttattagaaacatactctggctgggtgtagtggctcacacctgtaatcccagcactttgagaggctgaggtgggtggatcacaagatcaggagttcgagaccagcctggccaatgtggtgaaactgtgtctctactaataatacaaagattagctgggcgtggtggtgcacgcctgtaatcccagctactcgggaggctgaggcaggagaatcgcttgaacccaggaggcggaggttgcagtgggctgagatcgcgccattgcactccagcctaggcaacagagcgagactctgtctcaaaaaaaaagaattgaaacatactgaggtatgtcatggaaccaaactataggaaggtagctatgcatcaaggacaattttgtttatttgtttcttagtttgagacagaatcttgctcttgtcacccaggctggagtgcagtggtgtaatcatggctcattgcagccctgaactcctggactcaagcagtcctcctgcctcagcctcctcaatagctagaactacaggtgcataccatgatatccaactaatctttaaatttttcttctgtagagatgaggtctcactatgttgaccaggctggctttgaactcctggcctcaagcaatcctcctgccttggcctcccaaagtgttggattacaagtgtgaaccaccatgcccaacccatcagggacaattttttttttttttttttttgacacagagtctcgcactgtcggccgggctggaatgcagtggtgtaatctcagctcactacaacctccacctcccaggttcaagcgattctcctgcctcagcctcctgagtagctgggattacaggcgcctgccactatgcccagctaattttttatatttttagtagagacagggtttctccatgttggccaggctggtctcaaactcctgacctcatgattcacctgcctcggcctcccaaagtgctgggattacaggcgtgagccaccacgcccagcccatcagggagagttttaacaaggagtccagatgctcccaagactctgactttgttctataacatcagccatcatcttactgtcactcagaggggaaagaagaaagcgatagcaggagtggcacagtgcacttcccatcccatttctgaattttttcttgtccacactagtaattactggaaccttcctcaaaatttcactgaacaaaatttgtaataatactggcctctcattaggaatgaatttttgacttacatccctttaatttcttgttttgatttttaggaattttgcccctggactctgaagaccctggactttgtgaagttgttagagtacatgagcattacttgggtatgtagcaattcagtactttggagctcacataagtcttacttcactgacatatggtttaataacattttaatttttttgaatctaccataagtgttgtacttaataaagtatcattagccagtcatgtatgtaaaaaatgttggctggtcatgtgaatacttctagcttataatt

SEQ ID NO: 27336 - DNA, 2300 bp, Homo sapien
gtaagctggaacagaggcatcgataagggaaattagtgataaaaggtagtaattatacactgcaatggctgcgggatctgatttagaagtcataactgacccgagtttgaatcggggctttcctacttattagcggtatgactttgggctacttaattttaacctttctgggcctgagatcccatatcttagataataatagcagttatctcagagggttgccataaggattaaataatacctgcaaagcactcagcgcaacatcatactttcagaaatgttggctattttgactattatttctgtaaattgggcacatctcaattacagagaatctctaaagtagttctgaatcccatctcatagagttgcaaagggtttggtcaatgcaaccttatttttcccaccttttaatttctgcagtaggctactgtagcagccactagcacaggtggctattgagcactccaactgtgtctagtcggaattgagatgcgctgttaagtggaaaatacacatcagattttgaagatttaattttgaagaattaattttttaatttaattttgaagatttaatacgaagaaaagaacgtaaaatctcaatttttaaatatttgtttaagcgttgaaatgataatgtctcagatatactaggctaaatgaaacatataattaaaattaatttcacgtgtttcttttcactttttaaatgtagctaccccaaaattaaaatgacataagggactcgcattatatttgtactggacagagttcaggtaaaacctttctactcataacgtggacagcagcacctgggagcttcttagaaacgcagatgttcggccccgacccagacctatcccaaggcgatgcttacatctcgctccagatgattccgccgtttagcataatgaagagggccgatctggctcaaaagccacatacagcgaataactactaactgctttccgaaaacagcaaagtgatgaggaagaaagaagtggctgagaagaagtaacagagaaagaaaaagacactcaaattctaggaacaagaagcagaggagaaaaacccaacctgggagattaagtggaagggcactcccagacctctgcctccataaaagtagagggagatgcaaactgagataagacctacaatcaaaacccgtcaaggtccaggaaactgtccctcaaatctagtcttacccacccctcagcggcctcagctaagctaggcctgggcccgaacaagtcccaggttagggttcgacgcgaaccaccatcctccccagggctgcacggttctgtggggcatctctccacctttcgcttaaaggcccgtttcccaagacacaggacgcgtttcccggggctcacctgcctctgagccgccccaacggcctgcaccttcaccaccgccaccttccagtccttcgtcagagagcccgccccctgctcccattggtcaggccgctcgtcactcctgaagggcggggtcggactcgcgaggctgtccagaacgccatggcaaccggtctcggaactacatctcccgtcatgttccgctcgggggcggagaaagaggcgaggccccgccccaaggactaccaataaatgggcgaagttggaatcgcccggatgggttccgttttatgcaaattttagccgaagaccacacccttcctcattccaaccataggcccggccaacccctttgggttgtgcttcgcctttttcctttccacattattctctccttgaaaacctccaataattaagtcaattaagtgcatcctatctagtgtctctcacggcaacgagcagatgcaccgaaatcgtgcaacaaaatctccataaaccacgataggcaacctcagaccataaatctcctgttacgcctacatggggaggagggggagagtgctaatcctgcccccacacagcccctgctgattggctcattcggcttgtcactctgttgtcttacatttctttggctcaccctctttgggttcgcacggtgggcggggccagtggtagggggtggtgagaaggtgcgggccccttcttccaattggctggcggtttccccacccacttatgggcggagatggatggtggatggggggcgggggaggcagcggagggagatgaggagataggcgggagcgagggagcgagggagggagcgaaggaggtagagaagagtggaggcgccaggggagggagcgtagcttggttgctccgtagtacggcggctcgcgaggaagaatcccgagcgggctccgggacggac

SEQ ID NO: 27337 - DNA, 2300 bp, Homo sapien
ttgtatgggatttgctgttattatctaccctcttcattggccttgcctttattatctgtacgttttgatcaagaggagcagcaagagaagaatgccaacagacaagcacaaagaaacgcatctggccggagcctgcatgtatctaaatttccaggttgctgctgccctcagaatagcactgatgatggcaaagttctagaggaaactttcatattgaagaggctataaaaatctctatagcctccaactccacagagaagccgctaatctatttcttccaaagcaaagccttcttgagtctgaatcacaacaaaagattgcccataggaaatgtaatctccgaagttgttttctaatcccaaggcaagcagaagcgcaggaaggtgcggccgattcctcgccggtttcctttttttgggaattcggattgcattcgtgcaagcaagggactgcaattgtgtcttgggtccacaccacaaaaccgtgtcggtgcgtaagaagggaagggacgcggcggacccggggacgcgctcacagggcgcggaagacgctcccctttaaatgccttcaggggcggccccgcggcgcgccctggggccgaacggcattgcctgcccttcactgacccaggattctgcaggcttgcgagcgaggggccgaggaaggagccggggctccaggcagaggcggcgccgctcccgccaacgcgggtccccgggaggccggcgggaggcgaggccgggccgcccctcgccggcggccgagggcagcgaggtcagcccgggaaggagcggccgcccggggtccccgcgagaggagggagcccgctcggcggcggggccgcggcgcccattcatccccacgcccgtcccgcggccgccaccccacggcccaccgcggcccccggcctcccagtgcgggtccgcccgccactccgccgccacccccgaggacgggaaggacaaggcagaggggcagccgctgccgtctctcgggcgcgcggcgaggggctaagggcggccggggagacaagcgccgggcgcgggacggatgccccgggcagccatcgcgcagacccccgcgccgacccccgcccccgctgcagccgcccgtggtccaggccgccgccttgcagccctctcctcacctcatctccgggcgggtccgcgctgccgccccagggacaaatcagtgccgctcacgcgccgctgggagggacgcaggagccgcagccccgcacaccatccccgcccgcctctctgtccgtcccggagcccgctcgggattcttcctcgcgagccgccgtactacggagcaaccaagctacgctccctcccctggcgcctccactcttctctacctccttcgctccctccctcgctccctcgctcccgcctatctcctcatctccctccgctgcctcccccgccccccatccaccatccatctccgcccataagtgggtggggaaaccgccagccaattggaagaaggggcccgcaccttctcaccaccccctaccactggccccgcccaccgtgcgaacccaaagagggtgagccaaagaaatgtaagacaacagagtgacaagccgaatgagccaatcagcaggggctgtgtgggggcaggattagcactctccccctcctccccatgtaggcgtaacaggagatttatggtctgaggttgcctatcgtggtttatggagattttgttgcacgatttcggtgcatctgctcgttgccgtgagagacactagataggatgcacttaattgacttaattattggaggttttcaaggagagaataatgtggaaaggaaaaaggcgaagcacaacccaaaggggttggccgggcctatggttggaatgaggaagggtgtggtcttcggctaaaatttgcataaaacggaacccatccgggcgattccaacttcgcccatttattggtagtccttggggcggggcctcgcctctttctccgcccccgagcggaacatgacgggagatgtagttccgagaccggttgccatggcgttctggacagcctcgcgagtccgaccccgcccttcaggagtgacgagcggcctgaccaatgggagcagggggcgggctctctgacgaaggactggaaggtggcggtggtgaaggtgcaggccgttggggcggctcagaggcaggtgagccccgggaaacgcgtcctgtgtcttgggaaacgggcctttaagcgaaaggtggagagatgccccacagaaccgtgcagccctggggaggatggtggttcgcgtcgaaccctaacc

SEQ ID NO: 27338 - DNA, 2300 bp, Homo sapien
catttttttaaaaaaagatcatactatcagaaatgatctccactggactacttaaaggtgtctgaaataattttaacaccatcatcaaattagtgtccctcacttcttaatttatatgacttaaaagtccctggattctttacaaacccatctgcactaaggatttttctttcatatgtatgtatttttcaatgtttttacttacaaggaaactcccatcaaaataacgtttcaagcacaccagtaaaagaaattttaaacagaaacatattttgttctcagagataaactaagaaataataactatgaaggatgtttaagcttctgcactctcaaccttaaagtcatctaaaaataaaggtatcccaacaaatacattcctcctattcatattttgggggtttagagtggcaccatgcaaaccagctggcctgctgggtcctggccccagttcctgccctcacatcctgtccactacataatccatgagatctctgtgcctttcttttcatccgttccacgggattagcaaaactgcctccccgctgacagaactgagaatttctagaggcatttgtttgtatgggatttgctgttattatctaccctcttcattggccttgcctttattatctgtacgttttgatcaagaggagcagcaagagaagaatgccaacagacaagcacaaagaaacgcatctggccggagcctgcatgtatctaaatttccaggttgctgctgccctcagaatagcactgatgatggcaaagttctagaggaaactttcatattgaagaggctataaaaatctctatagcctccaactccacagagaagccgctaatctatttcttccaaagcaaagccttcttgagtctgaatcacaacaaaagattgcccataggaaatgtaatctccgaagttgttttctaatcccaaggcaagcagaagcgcaggaaggtgcggccgattcctcgccggtttcctttttttgggaattcggattgcattcgtgcaagcaagggactgcaattgtgtcttgggtccacaccacaaaaccgtgtcggtgcgtaagaagggaagggacgcggcggacccggggacgcgctcacagggcgcggaagacgctcccctttaaatgccttcaggggcggccccgcggcgcgccctggggccgaacggcattgcctgcccttcactgacccaggattctgcaggcttgcgagcgaggggccgaggaaggagccggggctccaggcagaggcggcgccgctcccgccaacgcgggtccccgggaggccggcgggaggcgaggccgggccgcccctcgccggcggccgagggcagcgaggtcagcccgggaaggagcggccgcccggggtccccgcgagaggagggagcccgctcggcggcggggccgcggcgcccattcatccccacgcccgtcccgcggccgccaccccacggcccaccgcggcccccggcctcccagtgcgggtccgcccgccactccgccgccacccccgaggacgggaaggacaaggcagaggggcagccgctgccgtctctcgggcgcgcggcgaggggctaagggcggccggggagacaagcgccgggcgcgggacggatgccccgggcagccatcgcgcagacccccgcgccgacccccgcccccgctgcagccgcccgtggtccaggccgccgccttgcagccctctcctcacctcatctccgggcgggtccgcgctgccgccccagggacaaatcagtgccgctcacgcgccgctgggagggacgcaggagccgcagccccgcacaccatccccgcccgcctctctgtccgtcccggagcccgctcgggattcttcctcgcgagccgccgtactacggagcaaccaagctacgctccctcccctggcgcctccactcttctctacctccttcgctccctccctcgctccctcgctcccgcctatctcctcatctccctccgctgcctcccccgccccccatccaccatccatctccgcccataagtgggtggggaaaccgccagccaattggaagaaggggcccgcaccttctcaccaccccctaccactggccccgcccaccgtgcgaacccaaagagggtgagccaaagaaatgtaagacaacagagtgacaagccgaatgagccaatcagcaggggctgtgtgggggcaggattagcactctccccctcctccccatgtaggcgtaacaggagatttatggtctgaggttgcctatcgtggtttatggagattttgttgcacga

SEQ ID NO: 27339 - DNA, 2300 bp, Homo sapien
caggagttcgagaacagcctggccaacgtggcgaaaccttgtctctactaaaaatacaaaaattagccaggggtggtggcaggcacctgtaatcccagctactcaggaggctgaggcaggagaatcactcgaacctgggaggcggaggttgcagtgagccgagatcacgccactgcactccagcctgggtaacagagcgagagtccttctcaaaacaaacaaaaaaagagctaatgcagacctcttctggttagacctgacacggaggaagtaattggctggtcaacttaatggcgccccacagcttcctctggatcctgcttctttgtacttggaacacagtttatttgagctagaggaaaggaaagttctagaattcctgtttcctcagcctgcactgtatcagatccaggatatgtctgcatttcatcaggatcaagtaagatacataaccttatatctgtaggagccagaaaaaaaaaaatctattcctgataggcatggaaacttagtccacatgaaagacagaagacatctaacagctgtctgtcttgggagcattaaaacccagacaccaagacacactagacagtccatctctgggttgtgatctctcagaaacatcttagtagttaatgcactgttcatttagggagtccccatcctggtccaggccaccctcctagaagctgggcggcagctggacgggcctgccttggtggcattcaagcaagcctaattggattaggttggtgcaaaagtgattgcggtttttgccattgcttttgatggcaaactaactttaagtcattaaaataagacccaacgcttataaaagagttcatatccacctcccaataacttctttagttccatgcagcctcaatcagttcctccattcaaaggaaccctctttaccctggccctgggggagccatattacacccacatcataatttttctgacactatgtgtgcttgtcaaatttcagggtcagtttccccttattggatgtcaggggtgttttgtgagttgtgttttaataggattctgttcgattttctataccagcctatattgttactatcatctgcctagtatgaatattttagtattcaaagcccaccagataaagctgtgttcagaagtggactttttggtcagccttgaaaaaaaaaaaatcagcatttctctgatatttcctgaggattaaccagaaactaaggtttctttttaggcagtggtaagaatgcgtattttcttcttccagaagttctggttttatacttttatcttttgaaagaataacattcctgtgcgactctgcttctcttcgcttttgcatttctcttttttaactcaaatctcttatttcctgccgttcctgtatctaaacagaatgggggcctcaggcagacaggaaccaaagaaagggtgtagtggctttgcagcgttgggtgagcagcagccgctgccattctgtgcactgtcaccggcgggggtggagggtctccctgtaggaggaggaaactcgctgttttcactggcagatttcaaggtgccggctccacctaccgcagctgctaggcattgctcttgtgtagatcgcagaaggagttattggtgatgtggggtgtaggggaagacaggaaaacggactcagagctaggaatgtgggcctggcagagaccgaaggctgggtgggaaggaagctcgcggcgagcctagggttcaagcctagcgcgccaggggtctccagtgagaccttgctcttccctgccgctgaggctggggctgcacggaggtcctcaggcttcccaccctttctgcatcagctttagtgtctgtcggctgggtggactgcagggcaggtgacctggaggaggccctgctccccagcaagcgttctaggagttacggtgtgctctattgggattggattacagtctctacttgtagactttgacttctggaattttaggtggaagggaatttttgttggtgggacgcagcagctcagtgcgtggtgtgtgcatgcgtgtttgtgcgtgcgtgtgcatgtatgtgtttgtgcgtgcacgtgtgcgtgtgtgtgcatgggtttgcgtgcatgcatgtgtgtgcgtgcgcgtgtttgtgtgtgcatgtgtgtgtgtctacgtgtgtgtgcacgcatgtgtgtgcgtgtatgtgtgcgtgtgtgcatgtttgtgagtgcatgtgtttgtgcgtgtgtgcgtatttgtgtgtgtgcgtgtgtgtgcgtgtgtatgtgcgtgtatgcatgtgcatgtttgtgt

SEQ ID NO: 27340 - DNA, 2300 bp, Homo sapien
aacgtttttttgtagagatgggatctcactattttggctggtcttgaactcatggccccaagcaatctttgcacctcagcctccagtagttgggattataggcatgcgcccctgtatatggtgttttaaggccacaaatctaagtttgttttttgggttgagtatacaacttcatgaataacttgttcaggtgagtttcttgttactgagacaccttcactctggcagatttgcttgctgaaaatggtcgattaagcaatacccaaggagtcgtttctgccttttctaccatgatgagtgtccatcgcggagaggtaccttgcacagtgacctctgcatctgtaagtaacgggttgttgctgctgtgtttgccttgatattacatgtgtcaccttttgcaggaagaaaagggaaaaacagggtaaaatcaagaaattgggaaaggtaacttgtcacctgggatgtttgtttcatttttatatcagcttctgtgaccctttgctttggaaaagccagcgtgtatcttattagtgcttctgtaaccagtgattattcataaggcctgggttaaatgtaaagtacatcaaaatgtgttggaaaagagtggtttagactctattatatgtttgaattattttatgaataccacttgaagtagtttcctgaaactagaattctagagtttatttttttgagacagagtctcactttgtcacccaggctagagtgcagtgacacagtcacacctctgtagcctcaacctcctgggctcaggtgatcctcctgcctcagcttcctgagtagctgggattacagtgcacccccaccacacccggctaatttttgtgtgttttttatagtgatggaggttttactgtgttctccaggcttgtctcgaacttctgggctcaagtgacccacctgccttggcctcctaaagtgctgggaataaaggtgtaagctaccacacctggcctgaaactagagttactaacctttcatctttggtggtggtgagtgggaaggagtagagccgttgggcctttgtatctttttgacttgatagtgggctataattggctaccgtttattgaaccctactatatgctgggtgctttattatgttattcagtatcaaaagattcatgtgagatagaagtataattaacctcattttacagatgaggaaaccgaatgcagggagatgaagtcgcttgcccaaagtcatacgaggtgggactagaatttgaacacaggcctcaaggcctcttagaagtccattttccttagactacactacattgcctccctagaattaattttgttgttgtcttcaatatgtattttcttccctatgtaactcagtcaaatgtagtgtagcttaccctacaggaaaacaggggagtgtggtagattgacttggaattcgtagcacctgacctcatctagattaatagatgtagcatttaaaggacagtctaaccttctagttagcacagattcaaggagaggcatcctagcacatcatacttacttgcacgtttgtagttcagtagttggtgcccccaaaacatgtgcctggctgcaaatcattacagctcagacataggcagggagccctctgtggctgcatcagttatccctaacagtgtggcacagattagacattcacctgccccacggtcacccatcatgaagcactggtgcaggccattcttcagtgaacacaaggacatgattttcttttttttttttttttttttcttttttgagactgagtctcactctgtcacccaggctggagtgcagtggcacgatcttagctcactgcaacttccgcctcccaggttcaagcaattctcctgcctcagcctcccaagtagctggactacagcacctgccaccacacccggctaatttagtgtatttttagtagagatggagtttcaccatgttggccaggctggtctcgaactcctgacttcagccaatccacccaccttggcctcccaatgtgctgggaccacaggtgtgagccaccgtgcacagccacaaggccatgattttcttttaaaggatgcttgtttttgcaaaagattttagaaccaactgttactaatgcttttgatgttgatactgttgggtgcgtgagtctgtactgtttgaaaaacgttatgtcttgatgagtgactaagagcacaggctttagaaatacacagactggtttcaaatattggggctggtcctcacctgctgatgtggccttaggtgagtttcttacccaccctgagcctccgttc

SEQ ID NO: 27341 - DNA, 2300 bp, Homo sapien
tggtagcatgtgtctgtaggcccagctactggggaggctaaggtggaaggattgcttgagcctaggaggtcaaggttgcagtgagtcgtgatcacacaactgcactccagcctggtgacagagcaaggcattgtctcaaaaaaaaaaaaaaaagactaaattaataagcaccactctctcaggcaattgttctaagcactttacatgtatacctttttgtttcttctaatgacctataggcagatactattataatacccattttatagataataaactgaagcacagagaagttatataattgggccaaggaactgattgggattcaggccagggtagttcaggccacagcctaaacaaatattgagaaacaagacaccaaaatatttacaacaattgcctccgagtggaagaaaagaggacaattactttctttatctttctctacgttttaaaaagtttttagggggttgggtgtggtggctcacacctctaagctttgggaggctgaggcaggcggatcgcttgaggtcaggagttcaagaccagcctggccaacatggcaaaaccccatctctactaaaaagagaaaaattagccgggtgtggttgtgtacacctgcagtcccagctactcgggaggctgaggcaggagaaccgcttgaactcaggaggcagaggttgtagtgagctgagatcacgccactgcactccagcctgggtgacaaagcgagactctgtctcaaaaaataaaaattgtaataatgagaaaactgctctctaaaagggcaaaatagtgaattaacgtgtttctataataaatctgagcagagaatttttcttttaagttgattacagaacccccactattacaaccaggaatactgacccttgctctgccagccagtctcttctctgacagaggagaaaattcgaccaagttctatttagagagaatgggttgaagataggttgtttttatggatgcagacaaactatatccaaggctagtacccagttctcagtttcaatatcaaatttgctcaaacccgggttctcctattttaggcctgatgctcagatagccactctgccctagccagaatcaagaatctaggtaccagaatcccatatgccctcacaaaccaacagctcagttctatactcaggtgagatgggggagaggggaggggaatggagggccacagggattctttgcttttgcttggccaaactttagtgagacttctgaaccttctcgtagtcctatctatgcacctccttgtaaagtccagttttagcaaaactgctaagtcagtttagccagaacccccaatcttcgacaaccgatcatctttgatatctgatcagggtcttcatccttcaccatcccccaggtgatgtctgatcaccctggcctgtcttctacaagattcctctaggtcattttagccagaatccctcttaccccagtttcctctaagtaattttctatccactgacccccgcactgctccttggccataaattcccatttgcccattctgctttcggagttgagcccaatctctctgcccactcccagaccctgttgcactggtcctatacccatcgctatggtcctgaataaagtcttccttatcatgctttaataagcatcactgaataattctttatttaacaatgggtagtcatggcccaggtaagagagacgtggtgtccgctcctggagctgcaaggctcctgggggctttttgttttgttttggttttgtctttgtatgcaacgtgagaaaaagccattgatgcaggctttagcatgctgggaaggaagtgtaaagaagccagtgacgctggtaataactgtgaaatggaacaaatgccaccatatttatctaaatgtaaattttaaaactggggacagcaaatccattctacagtgagcgccgcttggccagtaacaatgacttcattttcagatgcagtcgaagccctgtggctccaccccgagggtccagcccttaccactgctaagaactacaactcccagcccgagggaggtctctgcgcctgcggcctgacgccctacgcctacacttcccagagaacctagcggttacgccaacgcgcgcgtgcgcccttgcgcgtttctctcttcccactcgggtttgacctacagccgcccgggagaagatggctgccccagcagtgtccgggctctcccggcaggtgagagaaaggtggtcctgagagccagtgggaggatccctcctgggatgaccggtaccaaacctcgagcacc

SEQ ID NO: 27342 - DNA, 2300 bp, Homo sapien
ccaatttgccagtctgtgtcttttaattggagcatttagtccatttacatttaaagttaatattgttatgtgtgaatttgatcctgtcattatgatgttagctgattattttgcttgttagttgatgcagtttcttcctagtcgcgatggtctttacattttggcatgattttgcagcggctggtaccggttgttcctttccatgtttagcgcttccttcaggagctcttttagggcaggcctggtggtgacaaaatcgctcagcatttgcttgtctgtaaagtattttatttctccttcgcttatgaagcttagtttggctggatatgaaattctgggttgaaaattcttttctttaagaatgttgaatatcggcccccactctcttctggcttgtagggtttctgccaagagatccgctgttagtctgatgggcttccctttgagggtaacccgacctttctctctggctgcccttaacattttttccttcatttcaactttggtgaatctgacaattatgtgtcttggagttgctcttctcgaggagtatctttgtggcgttctctgtatttcctgaatctgaacgttggcctgccttgctagattggggaagttctcctggataatatcctgcagagtattttccaacttggttccattctccccatcactttcaggtacaccaatcagacgtagatttggtcttttcacatagtcccaaatttcttggaggctttgctcatttctttttattcttttttctctaaacttcccttctcgcttcatttcattcatttcatcttccatcactgataccctttcttccagttgatcccatcggctcctgaggcttctgcattcttcacgtagttctcgagccttggttttcagctccatcagctcctttaagcacttctctgcattggttattctagttatatattcttctaaatttttttcaaagttttcaacttctttacctttggtttgaatgtcctcccgtagctcagagtaatttgatcgtctgaagccttcttctctcagctcgtcaaagtcattctccatccagctttgttccgttgctggtgaggaactgcgttcctttggaggaggagaggcgctctgcattttagagcttccagtttttctgttctgttttttccccatctttgtggttttatctacttttggtctttgatgatggtgatgtacagatgggattttggtgtggatgtcctttctgtttattagttttccttctaacagacaggaccctcagctgcaggtctgttggaataccctgccgtgtgaggtgtcagtgtgcccctgctggggggtgcctcccagttaggctgctcgggggtcaggggtcagggacccacttgaggaggcagtctgcccgttctcagatctgcagctgcgtgctgggagaaccactgctctcttcaaagctgtcagacagggacatttaagtctgcagaggttactgctgtctttttgtttgtctgtgccctgcccccagaggtggagcctacagaggcaggcaggcctccttgagctgtggtgggctccacccagttccagcttcccggctgctttgtttacctaatcaagcctgggcaatggcgggctcccctcccccagcctcgctgctgccttgcagtttgatctcagactgctgtgctagcaatcagcgagactccgtgggcgtaggaccctccgagccaggtgtgggatatagtctcgtggtgcgccgttttttaagcccgtcggaaaagcgcagtattcgggtgggagtgacccgattttccaggtgcgtccgtcacccctttctttgactcggaaagggaactccctgaccccttgcgcttcccaagtgaggcaatgcctcgccctgcttcggctcgcgcacggtgcgcgcacccactgacctgcgcccactgtctggcactccctagagagatgaacccggtacctcagatggaaatgcagaaatcaccgtcttctgcgtcgctcacgctgggagctgtagaccagagctgttcctattcggccatcttggctccttattctcattaccttcttgagttgtggctcagacactacaacagagctctgtcacctctttctaaaagctgggaaatggttattgtcaacgccagccccattttggaggcacctggttgcaggggaccacagctaggtgagtcacaactgggtgtcttcatcagggggtttacaagggaagacagactagtgattttagaacaatcagcaatcagggcacattggcaagc

SEQ ID NO: 27343 - DNA, 2300 bp, Homo sapien
gtgatttgcccgcctcggcctcccaaagtgctgggattataggagtgagccaccacctccggccaactattaccttttctaagaatgctttatgacatcatggcatttcaaattgtgtaacattcagaacgttttctgttgtatcctttcctaggtcttcattactttcctgggacttgacagggcatattgaatctatcctgtaatgcatgggaataaataaggattccaaaacgtgaattggatttagttaatttttgtttctccatgtctccatacacacaggcagcatgagtgagcatctagtatgtattggatatgtgctgggttgataccataaagagatttataaaatggtgccgactttgaggggttcacactctgggggaaagactgtgctgtctaagtgaataaatttggagattgagggcttcatggagaggaggaaagttgtgctttataacatcatggcatatttgcatgagccatgcaaataagaagctcatcacccacccgatttatgtcagaatcagaacccaaagccagggacccaccaaccaactgttcggcccagcacagtttccctgtggcaattccacttctttttttcttatcttacgtcgcagtgtactttgtctcttgtaactcctgcaggatttttcttaaagccttacatggtgctgttatcacgtggcacaaaatgaagccgacctctttgtgtgtgggaatagagggagcattacactgctgggatgcaacagatggagggtggaaagctgtccagcaccttgtctcttccaagatacatagcccaggggtattcccattcctccacgacacaaatgacaacttccttgagctctgatggcttgccaggtggctgatggcgtggagaaccttgctcatgtttacctgttcttgcatccattactcacctctgcccacgtgcccccacacttgcacacaaagccacagagtggcttaaaaaaaaaaaatgaaaagcctccccccaaccctattgtaaaatgtcaagtgtttcagttttgagaaaaaagaaagctgaagaaaccatgactcatgacatgggctgacaaacaacgatctgaaggtatgctggtgagtcacactgtggagctctgcctttgtgttgtggtgagggccggggctggaaggagtgtcatgggaccagccagtaaaattccactactctccgaagccgattgggaggcaatttaaaaaccctgggctttttccagccccagtgtagtggatgactctgggtcccctcaggtatgtcgatctgtatgggaaatcaggaagaatgattattaataactggaaaaaaaaaacctgttagtatctttccatgcccaatgccatgctgaaccagccctgcctgcttctgcaagccagcgaggctgctggattttctcgaagggtattgagttgctaagcaacagcactggcggcgcctatcatgcccagcgatgtcaatgcctgagtgtggcctgcagagcacatttgctcccctccccctcgcctcctctcgaccccttccccccactacatgagaacattaatttgcatctcagggacaggagctgtgccaggtgattctgtgtataaaacagcgcagtgcagcccctgaagcacaaatattgttttgggttgcaaggcggtgcatgtgacgtagttgaaaatacagactcatttgtgtatactccccacgtaaggagggtaggcttcatctaaaagcctgcgtgtcaaatactcctttctaatacatcctggtgtgctctgccttgaagtgtttttttcctgtctgcccatccagcatcttatttatgccccattctgtccctctctctcgttgcctttgttctgtggtctcctgggtgatggagttattgtttgtgtgtagggatgtgtggataaaagggagctgatttctagaggtgagatggccctgtggttaacggttggaggctgctgttgacaaggcctgttgctgtggcagttttgctccggaagtggccattttctgggcagggctccaccagagcaccatctgtctgtgccttttacttcctgtcaagaggcagcaggcttcgtgagctggggaagtgccagaagcagccttcgaattagacagacctggacccaaaccctttctcttccccccacccattttggcatcttggcacgagactgtccccatttctggaaagggtgttcacaagaacagtctggctgggttgttgggatgaccgagtgtgatcatgcgtctctatggctggcca

SEQ ID NO: 27344 - DNA, 2300 bp, Homo sapien
tgggccactgcacccagcctgtaactcacttctgaaggtccagaaattccttgtttccttctgttatttatagtacgctacttatttaaaccaaacatgaagttaattgacacttagccaggcaatttggattacctgtgtggcttcacacaggtatgggttgtagacaagtctaaaaatagaaaatgttaaaatccagctatctcagaaaaacttgggttcatctccatctcctacctcccatatgtcacaaatagacgcatgggatgtgaaatggtaacctctgggtaaggtgacaaaggtactctaatcttggcttacgtggactacacggttaatccactgaataacaatcagcatcttcatctgtgtggtaggagaaccggaggtcagaagggtagaggggcggctaaaagtactttgtttctattactgtatgaccttggactagttacaaaactttttgtgcctacatttcctaatccctaatatggggttaacagtgcttgcctctgtttaaaaaaattactcagtgatgcttactaaagcatggtaagaaagactttattcaggaccaacgcgatgggtacagggatcagggaaacccggggagagagagtgggctccaattctgaatgcagcgtcggcaagtagaaatttatggccatgtaaaatcactaagagtaaccatcgggggaagagggattctggctcaaccgatctaaaggattcttgtagaactcaggccagggtgaaaagacatgactgggggatagaggaagatgaggaacctgatctgctatgaggggatgggggttctgtgctagaactggattttacaaggaagtgcacagatgggcctagcatgagattcagaagcctgactaaagtttggccaagcaaagaatctttgtcacctcagggctgttgtgagaattttaggagacacatccaccagccttggcatggggcctgatgcagagtaagtgttcactaaactttacctattaacgttaaagcactttaagttgacaaacactccacgtacagagcttttaatggggcaaacaaggggcagaggcctcagctgcagggtactcaacctctaaggaagggcgctggagaaaactgcacttgcagagcccctggctggagggcggagaaccatgtgggtgtaaagggatggcaagggcagaacgtatgcccctgcccaccttagacagttgctaaagggtctcccaggcactcagcctagcctttaagtgaaagcggaggaaacatttaaagaaatgagatagagttaaggtgttcgcctgccctccgctgaaacacgtgggggcaggtcaggggcacaccacaaatgcccgtatcgcgcctgtgtgtaccaggcaccgtcctcggaggttaacgtgcagtaactcactcgggtccccactttcggcacaggcagcaggcccaaggtcacgcagtgccaagggactgagtcagacccgagcccgcgcgccgcggcccacggcctgtgccagcgcgctcctcgccgggtagggggcctggtcagccgcgtcagacctgagagttgtggctgggggcgagagctgcacccccctaccgaccccgggcgggaatgttccagaacccctgcgagcagccgttggccgcacagcccccgggccggccgcgaccccgccttgcgccgcgaaggtccctagctccggggagtcgcgggcgaggggcacgcgcacggacgagaccgcaccgcagcgcacgcgcactggcgggcactcactcgcccgccgcccgggaggagaaggaaggcatggaaagttccagccggttcgagagctaggtagcaggcatggcaggaggcggggtaggggcaggcagggtcgcgagggggcgtgcggccgccgcgagccgctctgggccgcgtctgcagcaccgcccctagccgcggccggcgggctgggctggggtcggggcgggggcggtgcggcgggtgcggggctgcggagggggcgtggcggccgcccgcgggcggagagggggcggggcggcggcaaggcgcgcgggcggggcggggcgcgccgagggggcgtggcgcggcgtctgcgcagctgccagcgcctttaagcccgggctcgcgctctcggaccgtgctttcgccgcctgggagccgtccggcgcagcagtttctaggtccccactgtccccgccgtcccgccccttcgcgtcccgggaaccggctggcttccgagccgcactcgccgatcctccaggcatgccccgctacgagctggctt

SEQ ID NO: 27345 - DNA, 2300 bp, Homo sapien
catgaatctagtcagcagcattaacttttcctagcagtacgtgtattcttcattgctatgcagttgcagttttcaaaactggcttcactgcagaatgtccttcagaatgatgagtggtaccagagtagtatttagtcttggtaggggctttaagaagttgttgagttcaacctcccacccatgcagatattaatccaacagccatcctgtatctatttatgtacttcaagtgatgggaaggtcactacttcacaaggcagcccactgcattttcatacagctgtatatttttggaaatatgttcttgtttacaaaatacagcttgatttctctaatttttaccctttgattctagtccactcttggaatccaatcaaaataaaacaaatctaccttttgcataatagccctgcaaatatttgaagttagctcttgggttttccctaagtcttttgtaggctaaacattagttttggtaattaatataaaaaattagctttaatttcttctaggattaattaccttttttataagtattatactatttcgttaaatttttggatagtactttatcttacctaatcagcaaataattataatgtaattttaacatttatatttatatgtgtattggaatttgatatttgaaatgtataaaatatttaattaatttcacttctagatgaattgtaggtatttttgaaatacagtattggtgtgaacagcattttggtactgcgtgaagtaaatgggaaaacattagtattgtaattttgcctcagtgttacagttaccaccttgatagtgagctttgttgtatatgaaaagtggcttcaagttatgttagagatagaaggaaacttagagttccttgaggaaagataggagtaagtaagcaagagaccctcttaaaggaggtacaattagcacagctatttctagcacctgttcgatgagtgtggcccattttagacgttgggaatacagtcatgtacaagatagacaaaggtccttgctcctctgtagcttacattctggttagtgaaagaatatttttagattgctgtagtgctgttagaagtaaaaaaagaatgacatcaggagaactgggggatggaggtgcattttggtgatgaagatatcagaattggggggcataaaaagactttcatcaaactttgttgtgcctccagcagatgttgagaattgcagtatgaatgttgtttattcatgtgaagcttgtagcaacaggaaaatcgagaactactaatttagcagatgaggaaactgaggtacaagtttaaaattgataaattttaataacatattcaggtttgtataactcattagtgaatgagctaggactagaatcatagtcctagtttttctagtttccattcccattcattcattcctttctttctgtatttttttttcaaatgaatgttttcagccctcagtctgtgccttgccaaagtgtgtttcattgatgcatttggtaggtagaaggaaagagttgaaggagttgctttcagatggggtgagagaagcctctcagaagcctgcacaacttctcttagaatagttggaattgagtggttcagagactttataaatgagaattatggcagcaagatcatttgtttcctgtaaactatatgcttttgtaagttgaacattgtgctggattgagcagaactttttcccctactaagcgtaagaattttattttaatagatctataggtttcaccaaatgaggaacattgaagttggcaacctgggttgataaagacattattaggagcttggcagatggaatagtggattagtggaatcagttctgagccctgcagtgagttgaacagctcaactgatggtattcgttagatggtacccgatgtgtctacctgatgacacatccagtgaggaatacaccctctatacgtcagtcagtggcccaggctcatggttttatttgtggtgcattttagggtacatggattaaggacctgccagcttccctcagcccatcacaatatagaaccaggggttggccagatagtaaatagtttaggctctggggccatgtggtctcttgtaattacagatctacctttagcacagaagtagccatagacactatgcagatgtgtgagttggctgtgttccagttcaactttatttgcaaatacaggtagcaagccagatttggcccaagagccctggtttgccaaccctgctttatggtgaggtaaggtctatggggcgttatttttgctcctccttccacctttcgtt

SEQ ID NO: 27346 - DNA, 2300 bp, Homo sapien
ctgggttgataaagacattattaggagcttggcagatggaatagtggattagtggaatcagttctgagccctgcagtgagttgaacagctcaactgatggtattcgttagatggtacccgatgtgtctacctgatgacacatccagtgaggaatacaccctctatacgtcagtcagtggcccaggctcatggttttatttgtggtgcattttagggtacatggattaaggacctgccagcttccctcagcccatcacaatatagaaccaggggttggccagatagtaaatagtttaggctctggggccatgtggtctcttgtaattacagatctacctttagcacagaagtagccatagacactatgcagatgtgtgagttggctgtgttccagttcaactttatttgcaaatacaggtagcaagccagatttggcccaagagccctggtttgccaaccctgctttatggtgaggtaaggtctatggggcgttatttttgctcctccttccacctttcgttttatacttctgggtgttttgaaattaaagtgagatgaatgtggccattccagtagtctacagtttgaccttgacatactgaagtcaaacaatttttttttttatattttcctaagttacattcttgttaggtagcctttcccctttttgagacagatgtaagaagaaaatgttttttactttataagctcttacttcagaagagggtaatgagttttatactgtaaacacttcagttggaacttaaaagatattgagatatattcctttttaatcaggcaaaactggaattgaaatttatttgggtagctaatcagaaaactaatcaatcaaatgtttttttcctttttttttttgagtgcaaagctgagacccgactctttatttggatgggctgttcctttaccttatcatacgttaattgatgtaatgccaggtcaagaaacagcattttcagttaaatgaaatactgtgctgctgttaataatgagtcctctgcagatgtatggcgatgtctttgtgaactataatgaaatgtgagaagaatgtagtcttcatatgattagaactgtctaggaatgtgtttgatacaatcataaggataaattgccttagactttttacctactgttaatgggaagagattttggcctgaatttttattgtcttcaggaaatttctgttttatcttaaggttggttaaatatataaacaacgattcagtaggaatttttaaaatccctaatggacttcaatatgaaaagaaagtaaagaatgtttttttctaagccttaagccaatacttagcacatttcataccattttagcagcacttgtcagaaagaaaattttaaaaatatagtggattttgtttggttgccagaatgcacacttaaacttgttctgcaattttctcttcatttgatccccaaatgaacctctggaaggtagcctattcttaagtttcctcctgcactttaaaatcaccctgcttgcacctcttcacgtaggtctttgaggagatgtgcaccttgtctttgccaaggtgtgcctctggcttcctccccgatggtttccacagctttccttctccttgcagcaggcgtttccacttaatagctgccctgtcagcatctctctagagatcccatcccaaatctgtaaaccttcttggctttttttttttatgaagataaaatatgtaacaataagacactagaccatatagtagttatccagtaaatcatagctgtcatcgttgttgctattttagaaatcctacattttatcgtcttgcatggtccgctcctttttgactaccaacttgcccatgtgttttctcctaaaacacgttgctcaagttgcttgtccctggagccctggcattttctcctcctcaccattgttctcatacctctaccatgggaaccttggcagcctgctttctggccccatcttgccaaatgcccatgtagctaccacaccgcggctttttcttgatctctgtcctctaccccattgtcattctggacaaggcagtctcccgattttccttgtcctatttgatgatacgttttatatttgcttctctgactttgagtcctcttgttagcccctaaatgtttgtactccccaaggttctgctggtgatctcctttcctctccccctccaccctttctattgatctcacctccttctcaggcttcagagagccgtctgtgcaggtgactatgaaatgtgtatttctcatccacctgctttgagcttaagatttacatc

SEQ ID NO: 27347 - DNA, 2300 bp, Homo sapien
tgtggaatacagtaattctgtccaattcagtaatttgggagggagagttcttctgcacttatgacatgtttcgtgaacatcctttgtctgctggggaatgttctagggcttcagtgggaaacaggctgactcccctgcccacatggagctcacactgagtaaggagaacagacaataagggaataaacagaacaatgttcatgttattttaagtgcaaggaaggaaataaacaggaggctgagatggagcctcacagtgggacgggtacaggatgtacatgagcatttgtgatgagccttctgatttccaactaagtcaacacttggatttttgtctctaagagtcactggcagcctgcagggcgatcacctgtccctaggtttgcccagaactgaggggtttcacgggatatgagccttgaactcctataatgggcagacccaagcatactagtacagttcgtccccctatggagattctaactcaagtttccttgtagtttaatatttttattactatttccatgtctaatgaagtttgatacttaaccatccactgtggcttttattatctttcactcccatctctcttattttcataaaaagagattaattctatagtacaactaaagtcttataattcttaaatgcagtcactcaacaccaccagttaaacacctacttaaagtccttcggggcctcaatgataggtcagggtatctctcaggggtaagaaatgtctatcgacagctagaagatcaggtagtggcacaaccaagcgtccaccaaagcctccagctgggagaaggtgggtggttgctaagcagggatgagggcagggcgagctgctttgtttttctaattttattttgttttggatgaacaattccaaccaaaggctttgaagaagagcaattttctttgcctttgaaatgagttaaaggcaaaacaactccatcctttcatgttaggaatcattttggtaaagtagtgcggctttctgtttttttttttaactaaaagacaagctgaactctggattgcaaatgctttcatggctattagaagtatagtttgtttgttttttctctttaaaacaatgaaatgcaaattcttggctttctcttcaagcaaggagcggcgaggggaagccactctggaggctggatgcagatgtgttgttgtcagtgacactacaatacttactagtttttgcaaagtcccagtgaacttcatgttcgttccctgcctttttagtctcaaggttgatgtgtaacaatgcctgtgcccactgtaatattccaaaactaccatgtcctttccattctttcccccgaccccattgtgtttcattttctttttctttttttaaaatttaatttaactgaattttaagtacagggcttgcagatttgttacataggtaaatgtgtgtcatggtggtttattgcacctatcaacccatcacctaagtattaagccccacatgcattagctatttatcctaatgctctccctccccccaccccgctgtgtttcattttcctctcatatctcgtgaccacataattccttctttaatgacaaattgtattgaatgaggtggccagtcttagaagtgctgtaatctgaaagaaaaaaatgaaactttccacttcatcactctggtatattattatttttaaaaagatgcaagttgtcatatgaaaatggaggcattaattccttaacctattccaaaactttagctcatatttgccaagaaaacagaatgcgaatgggaagccgtgtttctgcttgaggcagtaggaagcaggagaccaaaaagtcgtcttaatgttaagcaaaactttgaatcagcatttaaattagatatgctttaacggctaatgttatttgaaagctgaatagccaatgtcaaaaatagatttccctttctttccaaagtgcagacggggtccagaaaggggcaaaaataaccacatgcctttcttggactcctgactcttaccacccaaagggttttcttgtgtagcaaccaacaattccttggatggaaacactggataggctagtcattattttgagattgaagggactgcagattcttggcagacctctgttgtttttctagagttgtaggcaagtagttggacaaaaagcaagaagctgatcgatgttgctggctttggattctttgtgaacaaatgagacaaggtgagtagctgccctgctcaactccctcttcgttttggtgtggggcgggggtgggggtggggagggaaaggttctgatgactg

SEQ ID NO: 27348 - DNA, 2300 bp, Homo sapien
gctgctttgattcccctctcctcggcgccagaattcaagagtgaagttaaaccgcaagggctgagttagaagattggcctcagttccctgttcccaccagcaggtggcaccgtctcctagcggaattcttacttgaacgttttgcttccatttctgcagaggcatggtgaacacagttacaccaccaaagtgttcctcctggctgagtttgcctatcttgttcagtgaagacaacccatgaggacaaatggtgttaatgagaagcttttgcggagttacagagatcctcgtatttctttaaaatacacctaataacgttaactctgcaataatttgtagatcatgttaaatcttagctatcttcctcttgccacccagtgtgcttcaagccacatggttcagagcaccatttaatgtgaaactccaattttaaaacaaagtgaaccttccttttacaaaaccatgagacaagttacagagtaatgaccacccacatgaccttgaagtgattttgagtgagtgagtgtaacttccgtggctgccatttaaattggattcaaatccaaatggctccacctccatgtcatcagacctcttgtgccctgattcccttggctaagttcacagtaccttccacatcaggttgtggcaatgattacctgaggttaatacgataaaagcacatggtaagcactcctaaatgatagccaatataaagactcagttctcccaattccaagggtccccaccatgatagaaaaggatcttttggtaaatagagtatgtttagctcttgctaggtctttaaatactttgctgggggccaggcaccatggctcacacctgtaatcccaccgccttaggagactgaggctggaggatcctttgcggccaagagtttgagaccagcctgggcaacacagcaagaccctatttctacaaaaataaaaataaaaattaaccaggctttgtacacacttgtagtcccattacttgggaggctgaggcaggaggatccctcaagcccaagagttcaaagctgtagtgagctatgattgcgccactgcactccagcctgggtgacagagtaagactctgtttcaaaacaacaacaacaaacaaaaacctcaaaacctctttgttggacttaacttccagctcctccatgtagtaccttagtacccttgcagcccgtttctcttttacaagacaacaatgttgttataaactcatttggatgtggtcccgtggaggagtatttaccagaatctagcttatttagcgtcttcagaacacggcacttgcctggaattatactgaccccctcaacccataccaaccacccagagatggctgttcttggctcctctccctggggccctgtccttcccacatcgtcttcttcttctttcttcttctttcttcttccttcttcttccttcttcttccttcttcttccttcttcttccttcttcctcttcctcttcctcttcttctttcttctttcattgagacagagtctcactctgtcacccagcctggagtgccgtggtatgatttcagctcactgtaacttctgccttgtggattcaagtgattctcctgcctcagcctccagagtagcagggactacaggtgtgtgccaccacacctggctaatttttacatttttaagtagagacggggtttcaccatgttggcaaggctggtcttgaactcctgatctcaggtgatctgcccgcctcagcctcccaaagtgctgggattacaggcgtgagccaccccacccagcccttcccacgtattctggcagggaatgctgttgtcccccaagcctaccctaagaggaagacttcttctggggaaagatgttcactgtacccaggccctgccctggctggagctggcaggaagggtcccagagcaggaacttgtgccactctgcccaaagccagagtccctgaggcacacaccccatcaggcaccaaggtgaattccaactgccagttagtatttaactttccacatacgattagattaaacatgtgggttcataaaagcataggattgcagactgcagttgcaagggcttagatggttgtaaggtgaaggtgcccagcaggctgaggcttgtgtgcaacccagaagagagctcgctaacgccagcaagaaggttcagaacagcctggctttggaaaggaatttcatcctgcccacacactgcataggtaagtcttagcacacattctttattttttgaggaattaagtaacaaagttatctatgtgccttttccagaa

SEQ ID NO: 27349 - DNA, 2300 bp, Homo sapien
ataccaaccacccagagatggctgttcttggctcctctccctggggccctgtccttcccacatcgtcttcttcttctttcttcttctttcttcttccttcttcttccttcttcttccttcttcttccttcttcttccttcttcctcttcctcttcctcttcttctttcttctttcattgagacagagtctcactctgtcacccagcctggagtgccgtggtatgatttcagctcactgtaacttctgccttgtggattcaagtgattctcctgcctcagcctccagagtagcagggactacaggtgtgtgccaccacacctggctaatttttacatttttaagtagagacggggtttcaccatgttggcaaggctggtcttgaactcctgatctcaggtgatctgcccgcctcagcctcccaaagtgctgggattacaggcgtgagccaccccacccagcccttcccacgtattctggcagggaatgctgttgtcccccaagcctaccctaagaggaagacttcttctggggaaagatgttcactgtacccaggccctgccctggctggagctggcaggaagggtcccagagcaggaacttgtgccactctgcccaaagccagagtccctgaggcacacaccccatcaggcaccaaggtgaattccaactgccagttagtatttaactttccacatacgattagattaaacatgtgggttcataaaagcataggattgcagactgcagttgcaagggcttagatggttgtaaggtgaaggtgcccagcaggctgaggcttgtgtgcaacccagaagagagctcgctaacgccagcaagaaggttcagaacagcctggctttggaaaggaatttcatcctgcccacacactgcataggtaagtcttagcacacattctttattttttgaggaattaagtaacaaagttatctatgtgccttttccagaaaatgataaaaggaatgattttcctggtacatggcctggctcctcatccactcttccttctttccttcttgtgttttccttactcatttctttgttaattgccttagaatgaaaattttgagagtttttaaaatggaggattcatggtaaacgtaggtaatcatattgttttctcttcttgatataaaaatgaaagactttgctgccttttataggcccaggtgatgtgagcgatctaccatgtttcaagaaaagaaaactttggggctgggcgcggtggctcacgcctgtaatcccagcactttgagaggctgaggcaggcggatcacctgaggtcaggagatcgagaccagcctggccaacatagtgaaaccccatctctactaaaaatacaaaaaaaattagcctggcgtggtggctggcgcctgtagtcccagctactcaggaagctgaggcaggagaacggcatgaacccgggaggtggagcttgcagtgagccgagatcacgccactgcactccagcctgggcgacagagtgagactccatctcaaaaaaaaaaaaaagaaagaaaagaaaactctggactttggggtcaaatgagtgttactttcctaatagtgtcctgattgctgttgtcatgaataacacacattcatgacaggaatggctggaattaggggatcattctgtagcctggagacagggcacaactaatgacatgtgtaagctcaaatcatggtcttgatcttatgtcttgtacccagttgagccaactggtcacagcaatgaaaacagtgagttattggaatgtgtgacctctgctaggacagtcagtgctggacactggcttgggtgatgtgagttctagtccaggcactgtggccaacttgagaggcttgtgatcttggacaggtgacttaagccctctaggctatagttattccacctatcagagagcaaaccagcctaaatgatctccaggggcccagcctgtgctaggactcagcaagaagcattcactggaaatgtaggtcctcctaggttgatacacatgaattgcccatatttgaccatttctaacctatataaatggctatttcatataattccagagaacataaatggtagttgtcttagcattactaaagtaaatgcctattatgatattctacttaggggtaggataagtatgtataccaaatatggtttgtttcgatttgatttttgagacagggtctcactgtcactgctgagtgcagtggtgtgatcatggcttactgcagccttgacctcccaggttcaagctatcctcccacctcagcctcctgagta

SEQ ID NO: 27350 - DNA, 2300 bp, Homo sapien
tatcttctaccattcagaactgtattgtctctctgaaatgcaaacattcaaactctccttgctggatgggtgccttgctctaacttactgctccccatcacagacagaagtttgtttctactctagataggagccaattaacaaacccagatcacactgaccaaccccttcccactttctatgcatttccacttcctggactctgctcaagccccatccccactcagttacctttgcacaaagggaagttgagctgggcctcttccctctggcaatagctaatgatttcagtcaatccttactgctttaactggctttctttacctttgacacaggtaaacacatggagagcaaaatcgaggtttttctggccgggtgcagtagctcatgcctgtaatcccagcactttgggaggccaaggtgggaggatcacttgagctcaggagtttgagaccagcctggccaacatgatgaaaccccatctctactaaaaatacaaaaattagctgggtgtggtggtgggtgcctgtaatcccagctacttgggaggctgaggcaggagaattgcttgaacctgggaggcagaggttgcagtgaaccgagattgcatcactgcactctagccttggcgactgagtgagactccatctcaaaaaaaaaaaaaaaaaaaatcgaggttttcctaattaagtacattttattatcatcactgaaagtacaggtggtaacatagagggttatcagccaacttcacttttggggaatgggagaaatgctgactctctccaagcatgttgggtgtctagtggttgaagccatttgccaagattgtcaccctaggatccactcccaccaaacctgggcttttcactttcaacccagcaactgaaaatgccagttcaaacaacttgctgtttttttctaccccacttgcttttagagttccttctgcctgttttattggctccatataacctgaataccacttatttcttaaagcatagctcagatgctattttaaaaggagcccaggatagtggctgatttgatagaatctatacccagattacccagggtcaagtcccagctctggtacctgcggcctttaaaaccacgaaaaaattactttaatctctgtgtctccatttcctcatttgtgaaatggttatcattatagcacgtcccttacagccttgttatgagacttaggcaatagccactagtgcttagaacaaagctatttttgtaactttctccaggaacacttcccttaacagaaccaacccctccacccctcagtttgttcttccctccacaccctctaacattctaacataaccacaaagagtcctgatgggatttggagttacactgcctgggttcgaatctcaattccgccactgccattcgcgcgttttctattgccagccaccttactctcccctggcctcagtttcctcatccttagaaggggagcagagcacatggtggtaactccctgcacattcctctctttccttgtattgggtgcccagtttgtgccctcacatggcgctagcactgagtgggctcaaactctgtacgcgtttactaagcatattgactgaagaaatctggaaacctagtaccgcggcaccatatcgttaccccaaaggaaaatgcatgcacgctgtcagagatgacgaacactgcgtctggaaacttcttaagggcacccacgtgtcctcagctgcagacagcagcgaggagacacccagggaattcgagacagcggaaggcggaagggtcccgcaacaacccaccctccagctcaggtgagttcagagtgagaacgcaccgccaggcttggacaaaggcacccggcctacaccccagcggctccccgccggggcctacgtggacttcagcctccagccacagggacaagagctgctggccagggctgcccgcctgggctcactgcgcctgcgcagtgagcagcgcgccccaggtcttctgcccgggcccactgcgcctgcgcacggagtagtgcactctcgtcggcggcaccggcccactgcgcctgagcacgtagcggtgcatttcgggacctgtagttttccccggcaggacggtagaagtcgtggtttgtgcgcggccaggcgctggagcctccgctgccgggagcagtaagtgtgtgacgtcggggtagaagggagtgacccaaattccaaaagctctttgggatgctgcgatgtcgcggccggccccgcgctcgggttttccctcctagacaaaagtctgccggctcccggtcgcgc

SEQ ID NO: 27351 - DNA, 2300 bp, Homo sapien
tcccatagcaagagacagcaggagccaaatgaatcttcaacaaagatatctaacaaatgggtgcatttattattgaataggtaatacacatacggttaaaaatatttaaagcataaaaatatttagtgagagctctccctcccacacctgccatatatctacctggttctctcctccaataggtaacccctcttcttaatttcttggatattccactggtgttttaaatgcttacagtggcaaaatcagatatatatatatatgcttcctctcaatttttggatacatgttaacatgctctcttctttacctttttcataacagcacaccttagagagctttatacatcagtacataaatagcttcctcgttctttttcacagctgtgtaatactccattgtatatgtatattataattttttttttgagatggagtttcactcttattgcccaggctggagtgcaatggcacaacctctgctcactgcaacctccgcctcctgggttcaagcaattctcctgcctcagcctcccaagtaactgggattacaggcatgctccactatgcccggctaattttttgtacttttagtagagacagggtttctccatgttggtcaggctggtctcgaactcccaacctcaggggatccacccacctcggcctcccaaagtgctgggattacaggtgtgagccactgcacccagcttgtatattataatttttaacagttttattgaaatataattcatataccataaaattcatccatttaaagtatgcattcaatttttttgtatattcacagattgtgtacagtgagcaccacaattttagaagttttattacccctccaaaaatgctatatacccttagttatcacccccaatccctcccgctagtgaaccactaatctattttctatctttgtagatttgcctattcttggcatttcatataaatgaaatcctacaatatgtagtcctttgtgactgacttcttttatttagcacaatgtttgcaagtttcatccgtgttatggcatatatcagtacttcattcctgtttattgctgaataacattccattgtatggataaaccacattttatttattcattagtcagttgttggatatttgggttgtttccattttttgctattacagataatgctgctttgaacatgtgtgttcaagtttttgtgtaaacttacatttttatttctcctgggaagatacccaggagtagaattgctggatcatatggcttattttataacttacttacccagtaccccattgatggaaatttcatcaaattgtatcttaaaaaccagcaaccatcacaaacgtggcaagttagagtcctagagtgaggattaggaagaaatggaactggaaacaatggctggatgatttaacttgccagtcttccaacttttccctccctgctcctggggaaactttacccgcagacacttactctaacactttccaattaagcctacctcaactccaatggggtctgtgactctgggaaagagaagagccatttctcaccacctggcacaggagtccactgcccactgacccctcagggaaagcccaagtcccctcaggtgtgtcacccttggggtgtcactcccttcctgtctgggtttcctcatctgggagactgtccagaggaagctggtgactcttgaccatggagtttcctggccctatgatgacagatctctgccacacctggccatctgccacacctgcaacaggtgcagaacacaggggaattcaatagccatccaagctctaagcggagagccagcctcagggggagcttctggccacctcagttcatgatgggacctgagagatggagattccttaataccagcacgttttaaaaatttgttttgattgagaacttcttaacaagtcaaagctgggaagtgctttctgttctgatgcaacagaagacacagcaaatcggatcctctgattaattgcatgaaagcaaagtcatccacttactaagtttctgtttggtgctgccctaagattgttggaagatcatattactccccactctggaaactcagtgcagctcaactgcagtaggactgattcttccctaggagacggagttctcctttcatcatcttccccttctgtgcatggtagccgcttgaacttgcccctccaagagtcaaggacaagaccaccccatggaatgtgagtactcagctacaatgcaaggatgggcaggttgagattttacatatttcacgtcattaaatt

SEQ ID NO: 27352 - DNA, 2300 bp, Homo sapien
cctgggagaaaatgcccagataagtctacaaatgattagaagttagaatatgaccagcactgtaggaaagatatatacaaggggtcaaagaaggggagaggattctggatcagggtcagacacagtgtggatatgagctggcatttgaagggccagtaggattttaacaagggaatatggtgggaatgcctcacctacagcgagaacagcaaacataaaacaagaggccaggcacggtggctcacgcctgtaatcctagcactttgggaggccaaggcaggtggatcgcttcagcccaggcatgttgagcctgggcaacatggtgaaaccccgtctctactaaaaatacaaaaattaaccaggcatagtggcatgcacctgtaaacccaactacttaggaggctgaggcaggagaatcacttgaacccaggaggcggaggaggttgtagtaagtcaagatcgcgccactgcactccagcctgagtgacagagcgaggcttggtctctaaaataaaataaaataaagcaagagctaggaaggctgggggctgattccatgctgcacaaagacctgggatatatactcagggtagattccatcattctcactgttcaggtgaggaaactgaggctccccagatttatgtcatttgctgaagatgagagtccttccttccctcctgatgtgtgacttcagctgtcattcattatccatccccaaacgcccacccatgttttcatattgagtttgatggagtctcctcaccagctcgctggcctgactctctgagtattcagtgtttatatttccatccttcacaccccagactctctctccatcacccatagagaggtctgggaagctcctggtaaaagcaccagactcaagccacaccccacatccccctgggaggtggcaggaaacactttcctaatcagagaggacagtctgattctgggcctctggacggttgcattctgattccttgagcgaccctggccaccttagtacccactgactctggggataggggaaggatagaagaccagacaaagccagccaagtgtcgggaagcatctggtggccctgggtggcttcttttctgctaggagggaaacatgtttccaaaatttggacatagtgttgtgataaagatgaaaacaatagacagttggttccaaggacaattgactcagaattcttgtctcaataagatcatattcaccaaaatgaggcttatccatcattgcttttaccctaattctgcttcttaaaccaaatgaggccaaatgatgatgttaagactggatgctctttcgaagaaatgcataaggagtcctgtcgagcgtgataaaaaaacccagagtcaacctagggaagtaagttaaggagccctctagtttatctaggattgacctggggctggaacccagattcctgagctctgactccgacattcctgtctcctctactcacccctagaatctattccttttagaagaaagcttggagtcagccacaagaaccttacccagtcactaaaggcttaagaaagaatgatcaggaactgggggaatttgctaataataacaaaagaatgagaggggtgcactcagggcagggggcttgaagaacggctcctctgtttacgacacactcaacaggggtgtgaggtcacagtgatgagaggcccaaacttgtggcctccccgtgaacaaatgccctacacatctcccctgcaggatcaatgggacagggctcaatattgggaggaaggctgtagtatttacttggcaagcctgctgtctacagcctgcccagtttatgcacgggtaggccacagttggtcttagaaataaaggctttggaaaattaaaaaaaagaaagaatgagagtttcccatgctgggaaagcttctgttctgaaagcttccaggctgttatcagtgctgataggcgacacagccggagcacgtgggagaagtcagaagaggtggtgtgtgcccagagcagcgaggcgccacccactgccctcttctcccctgggttcagctgggggccttacggaactccagggtgctggaggccccgttggtctccatttgcaggtgtctcgctcagcgcagctgcccagagccctgtgtcctgagtgatttccagtagattagcagctctgggtctaagcttttaagaaaaaaaaaaaattgcactacccttcagtaggggcagcattcacatctcacacccaggcagaagcagaaacggccaggaatccaccccactttctgggcctgacaagg

SEQ ID NO: 27353 - DNA, 2300 bp, Homo sapien
ttaacatggtggttggtgtgcttccttatagattttgggaataatgcctggcatctcatatttacaatttaaggccttgagttttgtggggtttttgttttgttttctgtttttgtatttttcacgtaacatgataatataaagatctcccctgttgggtttttgtttgtttgtttgttttgagtcagagcttcactcttgtcgcccaggctggagtgcagtggcgtgaccttggctcactgcaacctccgcctcctgggttcaagtgaatctcttgcctcagactcccaagtagctgggattacaggtgcccaccaccacgcccagctaaatttttgtgtttttagtagagacaggtttcaccatgttggccaggctggtcttgaactcctaacctcaggtgacccacccaccttggcctcccaaagtgctggaattacaggtgtaagccactgtgcccggccccatgttgttataaattatttgtaaacattttaaggactccacataatattctactatgtagaataatatcatatgtactacaatttaattacctatattttctatttttggatgtttagattctagttattgcaagtaaaaacacaaagaacttttacatgcataaggatttttctacagctctgatcctttccatagaataaatagatttcagtctgggcacgctgactcacacctgtaatcccagcactttgggaggccgaggcgggtggatcacctgaagtcaggagttcgagaccagcctggccaacatggcgaaactccgtctctactaaaaataacaaaaaatcagcagggtatggtggccggtgcctgtaatcccagcaactcgggaggctgaggcaggagaatcgcttgaaccagggaggtggaggttgcagtgagccgagatcgtgccattgcactccagccggggcgacagggtgagactccgtctcagaaaaaaaagaaaaaaaaaaaaagaataaatagatttcacacagtgcaatttcatgtcataggctatgaacatttcaggactttccaacgtggccatgtgggttcattttgcacccacactgtagggcaatgctggttctgcctggtgcacaggacacatcggtgcaccccttggagggcctccaatcaccctcgtccccatgagaacaccgaggtcgaagcccaggaagaagtgacctgccaaggaagaccatggaggcagtgaccctagagaatgtcttctagtcctaggtcaggaacctgcctctgcgacccgcctgcagagcaggagcctggagcctggacgtcattccctagaaggttcatgggattgtcttttggggactgccccttctcctcttgcctgccaagctggtgagcaacgctatgaaatttgctgggaagtcacctgcatcattgcatggtttgctctctggacaaggacggctcgggctgaaaggccccaaggacgttagggtgtgctcgccaaggctcgggtgcctccagcgactgtctgccgctccgggccccctcctgtctggtccacagctgcacccccagctcagggctgcacacccagtaagtgggtgcttcataaatgtttgcctaataggtgtgtggccacagctggggtgcgggacgaggctagaaagagtcgtcgggagcggaggttgagcggtctttggaggattatgttcagagatatttgaaggcccgcacgtccgagggtggggtggttcccagacggcctttctcctggctgcagtggcttcccccctggcaacctcaaactcccgcaggaaggtaggtagatctgtccgttggtcggctttctcgatcctaatgcaaaccttctgccggccttgagcctctccgacaggatctaaaacgcttccctacgcgcgttggtgttggtctggggtgcagagtgtggaggacccgggggggccggggctggtctggggtggtcccggggaaccctgggctgggccgtgcgtgtgggcggagtggggcgggacgcctggcggctctgggaggccccgcccgcccccatccctgtgcagcgctcaggcccttagaaggtgccgccccggggcggggctgtctgtggcctcagcgctcggcaggcgcgcactcagctccacacccggctctctcggcatctcagacccgggtaagttagggtctcccacctccgcggccctcttccggggcgcaagtggcctagtcgggcaaccccggggggctcctggaacctgcgtctccggacgcgcagcgggcgcgcttcaggctggaag

SEQ ID NO: 27354 - DNA, 2300 bp, Homo sapien
tcagtgtttttaacttaccatgttgtcttttctctgcctagaaaatgatctcattgtcccagcccagccctgctaaccccacaatgaggtccacgaggtcctgctcacccctgttcaaattccagcagctacctctgtgcccagccacagaacatgtttctaggggctgcttttcttttcttgagtggccctaagctgtttcttaccagattagtaatatattctatcaaaacctactgaagaaacactttcaatcagtggcaaagcgtgcattctgcacagttctgcctgttgaatgtcggtcatttcacattttactgaacccctctcttacaaaacaacgtgtgggtcctgggcacattcatgatgcagtgactttcaaacccatcagcctgggaacccagaaacttcttgcattattggtcacaataagcgctactgaaatgattgactctttaatatttctcctgcaggtgtctattaggaatgtctcttccccctaagaatcgttgccagctactcccgctgggtctcccatcatgcccccttcttttccattgtatggcatattttcttttttatcgtaattgttaaattgtttgtcttccctgttgaaacataatttgggtggaagtgggattcctggtagccaatggctcatagtagacgttcaacacgcaagtggattggatagatggaaggatagatgggtagatggaaagttggatggatggatggatggatggatggatggatggatggatggatggatagggattttggaggaagaggagtgagcagtcactgaaaagaatagaaaaataatgaggcttgctccctctccctagtcagaagagccagtaagcagcttagagctttaatcccacaaattgtcaggcagctggcgcaagaacagggaaaaagagagagagagagagagagagaccctgtctgtggtaggttatggtcatcagtgaaaaagaacaaaaacctttgttttaaaactctcctcaaaacagatgattggctagagggtgcggcacaaaggaacttgtcagggtgatggagacattctgtatctggattgagcaatgcaagaacctgggtaaagacacagtcatggtaacagctgtatacatctgttgaaaactcatcaaacttatcatatttagaaagggtacattttgcttcatgtaaagtatgcctcaataaagtgtacttgattttaaaatcaggataaaggaaaaaaacattgatcttggataatgggcaggggttggggagaaggtcttaattatcatcatatccttttaaaaacgtttttcaagtgtgtgatgctctgatgacattcttaagacacagcaaggcaaagcagtatcccaaatgagagagtgagcattccaataaatattttctgtaagacactgatatgtctatgactatttgctaaatttaaaaatcaacttggaccatatttactcccttaaagtctaatagacgactaatttcttctatgttcagaacaaatatgttgctactttaagaacagcatacataggtgtggtcggccctctgtgtctaaggcttctgcatctgtggattcaaccaacaatggactgaaaatattccaaaaataaaataaaattaatgaaacaacaacaaaaataaaacaaataaaaaaatgccaggtaacaactacttacaaagcatttacatagtattaggtgttagaagtaatcaagagatgatttaaatcaccatctatgattggctgatatgcataggttatatgcaaatactatgccactatatataaaggacttgaacattcgcaaattttggtatctgcaggggattctggaaccaaaccccatggataccaagagacaactatatataaaatactgaaagaggcatggagagtgattttcaggcctctacctaaagccctgaatattagaaattactgaatttcttctcaggaaggaaattacgccataaaccagtgttgccacacacccagagaacaagatgacccgacgccccagcctggtcatgccacatgagctgagcagtgggtaggccactgagccagtgatagaaatcacaaattacaaaacgtcagagtactttctggaaataagccttcctctccagggaacaacgcatttgacacttgactgggatacactaccggatcctccgagggtgatggttctcaagaaggcagaagcaatggtgaccaatagacctccttaaaggctgagccgctgggcaccttcctactcctctcgaccgtg

SEQ ID NO: 27355 - DNA, 2300 bp, Homo sapien
gtacaaatgtcagccaggagggccctgacactcttgaaagagggatttgagcagtggccactgcatctacttggcactcgttcgctgtgtagaagggtcaccgagtccctcatcagaatcctgaaagaaggagaaacggtgggcacaggcagcacacctcaatcacttgtgaataatttccttctgtctttcataaacatagctatgattgaaatgacctttcacgaacagcagggaaggattgtggaagaaaatgaggtatgtgagaagcaaatccatctacctgattgccatgtaactttcggtgagtcacggagtgagaatttcagatgtgaattaaggattgccaagagtggtgatatacttgaaaagtttcctccacgttctactccctgttctactttagaatcaggaggccagagaggcaggagggaagagtacttgttattcatagtggaccttcttcctgaataatttttagggtaattatgtatgcagcttccacctgagtcactgacctttgggtgaatgttactggatatgtacctatgatacccaggcaaactttctgcgggttctacgggcactgtgaagtgtgacagactttggctgcgcgttcacttttgatcataacacgtccatagagtgcttttaatctcctgcaacttaacatatgagaaaatcgatttattttgtagtgagttctgcacatttcacagaaaattaaagctctctgaaaacccaaatcttctgtgggcagtaattcacacacaatattctggaaatgtaaaatcccaaatgcctgctgacttcaaatcaatgtttatagcttgtgtctgaatagctccatgaattgctccgctcctctccttctactgcccttcgctttgatttagccactcatttccaggggctgattttctttttttgcatggccctaagctgtttcccatcagattagtaacatattctatcaaagcctattgaagaaacactttcaatcaatggcaaagtgtgcatcctgcatgatgctgcctgttgaatgtcggttgtttcacatttgactgaacccctctcctacaaagcaatgcgtgggtcctgggcacattcatgattcaattactttcaggcccatcagcctgggaaccagaaactttgtgcattattggttttacaatttcagctgaggcttccacagaacaactcagaagaaataggctgtcctgagtgagccttttccttgacttgtattttctattctaaggtctattggcttcactggcagtgggaccactgactttttccctcctttatctaaggggacctgttgagagtctctatttggaaatatttcctgcctgtccttagtgggggtcaatgcctgaatctgtccaataatcagatttgaccaacttggtggaagtgtggattttccagcacgattaaaccttgaacatatatggcttgaaaatgtgcaaatactcttggaaatgacaggatcatggttctcaagacagagaaaaaaaagtagcatgtgaattttcatagataaacgcctaatgctaatgttgatcaggattaatgtcatttcctagatttcagcaaataaacactgggttacttaggcctttgtgggcttcccaggaaggtcaccaccatttgaaatgagactttcaggggaaaagctgccagagattaaacagaaggcttacagatgcatcttctgaagataacttagtatcttccatggacatcttttctaatagaaaagaaagctcttcaaatgaccaaaaccattgctgttttgtggaggtgctggtgaacaggggtttcatcacagtagcatctacctgtacaaacgaaatactcgaagttctgatttcagttttatccattttcttcttttgcaagtgatgcattcttagtgtggtggactctccatgaaccacagcacagaattaggagtttctaagctcaaattgacaaaggatgtctccttctgaatttaaaatgtttaaaaaggtttaaaagccttttaaactgcagaatttagaaggttcacagatttattctagaaataaaatgacaacttttctgtaaggagcatactgtgcccatttattatagaatgcagttaaaaaaaatattttgaggttagcctctccagtttaaaagcacttaacaagaaacacttggacagcgatgcaatggtctctcccaaaccggctccctcttaccaagtaccgtaaacagggtttgagaacgttcaatcaatttcttgatatgaacaatcaaagcat

SEQ ID NO: 27356 - DNA, 2300 bp, Homo sapien
tgtgtatgttgtaagtgaacttttcagaaagaggcctcttctgacagtgaatagtgttttacttttgtagccagcgttgtgaataatttcatttcgtcttaggaaataaatgttataaagatatttgtatgtttgtagtaattatgagggcctggcctcaagctcccagatttctctaacaagagaaaatgccgccagagcaaataataaaactggagaaattaagtgtgagatcagtgtgcctcctgggcagcagctctctttgatggtgattaatataatcattttaatcactacacttttcttcttcatttgattaaaatgtaagttttttcatcagcagctatccggctaattgagctttaataatactgtataggaatgaatcctgtatgctctatttgaggggtggtatttgtgcctggtggtgttatatgctttatatccaaagccatattgggacatgcgaaggtttctttttttaaaaaaaatcaaatgtaactccataattgtatataatgcttatgggctcgcaccatagtgtttggactagattgcagagcacattctatgtttttaaagtactacaaagtgagttcacttaacatgagccttatgtgagtaaaatcactattttttaaatgaagtagagatgccatccaaaagctataataactaggtatcagttattagaacaaataagattcttttataagagaaaggcatcatagtaatctagattttaaagataatgtgaattctcttttgttctggtcctaagccctgaacctgtattctaaaaatattcttcaaagtcatctctcccaaattctgaatcataacttcaaaactaaacagtgggtcacagtgcctattgatgaggtcatacaaaattccaaatgtacgaagacacacttttgccagaaacttgcccgtgctcaagagaggtggggaaaaagagtgagaggcggccagatgaactctaccgtccgccagctccgcgttccttcgcacgtgcctctgcgggatccctcgtgggaaagtctcagaaatgtccctaaactgaagaaaagccggggaatgcaaggagagcaaggtcgtaggttgttccgactgctccttaacgacctgcctggcagggaccgactaccctgctcctacccgcagccccatgtggagcaggcatccaccagtgcctccccgcgcttgctagcagtgaacattcctgaagacactctcctctcttatcctgaatcctcgctcccactgcagagacactgcgccttccataggttctccaaggtcctcagtgagctctgtccgcgctgcctaccatccacaccctgcgccatccccttcttcctggccagccccttctgcctttcacacgggctcccacaaactgtcctaagtgtttttgcctggtaaaaagattcacaaaacccggcgactagaagcccatgcagtcttccttggagctttgactgtccaccagttaaactccctctctgaggagttgcagtggcccccagctgcccccaccgacagccacactccaggacccagcctagggggctgtcccctgagcaacctaagcttgtaatcccccacctcgagctttgcattctaagagctcaggacatctcctaattctcactagccctatggcaccagagcgaggtgtgcacagacacgaaagccaggatgcagaaaatggtccatttgcagaacattaatttttaaaccagtatcattttagagagttaaaaagtaacagactgagataaaagcgatcgtggaaatttttaaaaactacttattttaagaaatgcaaaactttctaccaactttgttatttttcaagtcagtatttctttttttcaaattagctgcagttcttttaagccttaaagaaatctttgatatatgcaacactgccctgagctgaacggtggggttggagttggctagccggggaaggctataggacagagaaaaaagggggggtgagtgggggaaggccataggacagagaaacatggggagcaaattaccaaactgtacctccctggaaaatgctcattctactttttaaaaaagtttgttaccgtaagtagtgtctatgtattggcaactgttctgctgattcgatgaatgtaataaatcataccttcttaccttcttgtaaaatcacctgcattgggactaaaggccatagtcccctaagaggggaaaggcttttctctaagaaagaagttaggagttcttgaaaggattgatgatccacttcctcagtaaaa

SEQ ID NO: 27357 - DNA, 2300 bp, Homo sapien
ggatacaagtagaaattgggacattcatccaataaaatgtcactggggaaaaaaattttaactacacttcaaaatgattcctctttttgtcctttaaaatttttattgaccaagacagatttcaaaatgttttctctaataccccaaagtgaaactttgattgaggttttcaggaaattccagggatcaagtatgtcacccggactttggtttccaggtttcccaaagccttgaaatttccctacagtctaattgctgtttattgccacagaccttcatcctttttcttttgtaacattttccatcttaagaagggtcgtcccattcggccgaggagcgtgttgtctgagtagctgaatggaattactaccagtggaaactatgctgcaagagaggttgataaagcagctgtgaagcaaacctcagctgttttttccattctccccaagcaaagttaattagcatagggaaaatgactaaggtgttgacgtcacctctttccagtagaaacttacactttgtccctgtctgcctgcaagcatgcaggacttgactcaggaatttgctgtccaaacaggatgctgtggaagctgcactttttttttccccagggagtgggggctggcccttactgctttataagcaccagctcaagaaggaacctacagcctcttggaaaggaatctcactaggggcttgactgcgtgggtctgtagcgctttcactgtaagaaagcaagatgcattttagaaactttaactacagttttagctccctgattgcctgtgtggcaaacagtgatatcttcagcgaaagtgaaaccagggtaaggcttctaatataacgtgattttctttagttttcaaagcattatgctaactgggactattaactgaatacttgggagaatgtggctctcttgtgggtttgggggttttgaaagaaatccaaagtctttcgagccttgaaaatcaaaagctgttgcctgaggaattaactgaggaaggaatttctaaagatctcaatatttgacaacatccaggcccctgaaccaactcactaggaaggcgagagttggggcatcgtgtgtttttcattctgtgtatgttgtaagtgaacttttcagaaagaggcctcttctgacagtgaatagtgttttacttttgtagccagcgttgtgaataatttcatttcgtcttaggaaataaatgttataaagatatttgtatgtttgtagtaattatgagggcctggcctcaagctcccagatttctctaacaagagaaaatgccgccagagcaaataataaaactggagaaattaagtgtgagatcagtgtgcctcctgggcagcagctctctttgatggtgattaatataatcattttaatcactacacttttcttcttcatttgattaaaatgtaagttttttcatcagcagctatccggctaattgagctttaataatactgtataggaatgaatcctgtatgctctatttgaggggtggtatttgtgcctggtggtgttatatgctttatatccaaagccatattgggacatgcgaaggtttctttttttaaaaaaaatcaaatgtaactccataattgtatataatgcttatgggctcgcaccatagtgtttggactagattgcagagcacattctatgtttttaaagtactacaaagtgagttcacttaacatgagccttatgtgagtaaaatcactattttttaaatgaagtagagatgccatccaaaagctataataactaggtatcagttattagaacaaataagattcttttataagagaaaggcatcatagtaatctagattttaaagataatgtgaattctcttttgttctggtcctaagccctgaacctgtattctaaaaatattcttcaaagtcatctctcccaaattctgaatcataacttcaaaactaaacagtgggtcacagtgcctattgatgaggtcatacaaaattccaaatgtacgaagacacacttttgccagaaacttgcccgtgctcaagagaggtggggaaaaagagtgagaggcggccagatgaactctaccgtccgccagctccgcgttccttcgcacgtgcctctgcgggatccctcgtgggaaagtctcagaaatgtccctaaactgaagaaaagccggggaatgcaaggagagcaaggtcgtaggttgttccgactgctccttaacgacctgcctggcagggaccgactaccctgctcctacccgcagccccatgtggagcaggcatccaccagtgcctccc

SEQ ID NO: 27358 - DNA, 2300 bp, Homo sapien
agatatagaattacatgtttttgggcaatctagtgaaagatttatcatttctatgagcaaagacagttgaataatcttcaaatacctcaccgttctttttttttttttccatccatataacgaaatcaaaattgtatattcgggtgagcccacactgttgtctcagatgaacagagatgtttgagatttgcccacaaaattgagctggaactttgtgtcatgattttaaaagagaaaagaagacagtgaaatcagcctcttgtgtctaaattagcctcttctgtctcttctgatcaccttttaatggaatttgcccaggtgcatgccaggagaagagaaaagggggagacaaagagttggagagggggagggaacatcagagaagttccaagcccctctggaggagtggaatgcaggactgtgtctgctcccctcacctctgtttccccttagcctctcctgcccaccaccacaatcttcatgtgcctgctggacagacaaaggctccctgtactgaaaatgcaggactgcaagcatacacattccctctcgaagcatcatccaggatgaccacttccccttggtgtttgatgcatgttgcattgttcagtattctacacttttttggaatacatgcgtttatgtcttttcaggttgggagttatggataatttggcaaagcaaacaccataactggtttcttacataactctacagttggcagcaaggcacagtgcgttgaaattaagcaacactcactcatccaaaaggactttgcttttccttttttggaaggctaaatgccctgctttgtttcttcctcttgcatgtattttaaattattggctgactttaatgattctttgaagttaatttttaaatgtgaatggcaggattccatttaacttctggaagcttgagagctgtccctgtgtgcccctaaatcagagaatgcttaaataacttgagtgcttttaggtgataataaaattggagagagtgagaagaacataggacccaggctgccatagggatctaaactggtaaaatacttagaaggttcaagagttgcaaccttttgaaagaactagagtcagtcttgcatcgcagagcacttctccaaaccaggcatcttccctgcatcttccctttcaattatagtgtacattctttccatttcttcttcctttcctttttttttttttttttacatttagtttatgagtctttaagcaggacctcttaacccatttatgcctagtgttccattattggaacgctaagcatgtgggagttatttatatcctattgctcaaggtcattgccaaggtctgatggcaaaaattcaaaaaattgcaacctctggcataaatgggttaatgcttctttgctcagtttcaaaggctagattgctcagtttcaaaggctagtgtttttgtatcctttgcctgaattcagtagtgctttgaaaatgatcgaagtgtttcatatccccagttctcaaattataataatgaagttttcaaatgaaaatcctaggattgttttaggttctgtttgctccattccactgtgggatacaagtagaaattgggacattcatccaataaaatgtcactggggaaaaaaattttaactacacttcaaaatgattcctctttttgtcctttaaaatttttattgaccaagacagatttcaaaatgttttctctaataccccaaagtgaaactttgattgaggttttcaggaaattccagggatcaagtatgtcacccggactttggtttccaggtttcccaaagccttgaaatttccctacagtctaattgctgtttattgccacagaccttcatcctttttcttttgtaacattttccatcttaagaagggtcgtcccattcggccgaggagcgtgttgtctgagtagctgaatggaattactaccagtggaaactatgctgcaagagaggttgataaagcagctgtgaagcaaacctcagctgttttttccattctccccaagcaaagttaattagcatagggaaaatgactaaggtgttgacgtcacctctttccagtagaaacttacactttgtccctgtctgcctgcaagcatgcaggacttgactcaggaatttgctgtccaaacaggatgctgtggaagctgcactttttttttccccagggagtgggggctggcccttactgctttataagcaccagctcaagaaggaacctacagcctcttggaaaggaatctcactaggggcttgactgcgtgggtctgtagcgctttcac

SEQ ID NO: 27359 - DNA, 2300 bp, Homo sapien
aggaagtcaaagtcaacaagtgagccgtgatggtgtcactgcaatctagcctgggcaacagagtgagaccttgtctgaaaaagaaaagaaaaagctaaggcttgtattccatgtctctttttgttccacttcattcttctagtaattcacttttatcatattatgtttatccgttggcaacaggttggaaatttaaacaaaaaccaggtttccctggtagatagtttgagaagtgctaactaaagacatcacattcctgctgggctttcagggcttggcagtgcacagagggcagcctgctccagctcacactctgtggcaatgtcacctatcctatcccgtgccctcaaatgggggctactgctccactgacacgctggttgggaaggtgagggcgctgcagctgaaacagctgtattacacaggagtacagccataactgaggaagatgcttctttaataaccacttatatgagtgtgtgtgtatatgtattgaacaaactgttcaacagatgggaaaacatggcctacacaagaaatggtgccactacatagccccagaactctttcctgaccaacacattcattttttgtcattttaaaatgcagtattaggtgaattcaatgagcctccttctatgtgtgctcggcaaaatgtgtggcttacataactagcacaaagagctggtataccttgtgatataatacacttcacagtatctcttccccagcgaccatgtatacacatttgcctgaagctctgcaagggcggagctcacacctgggttttgctccccaatgtgtgtgtgttcgtgtgaaccatctaccaggtgtcggggctggagactacgttcacgcaggaacactttccgtcacctgctgaacctgctacgtctctggaatgtactacacaacagtacagcagaagtggagatatttctggcctaagggaaaggggcactatttcagagctgcataaagatgaaatgggctgtctagggacagaggaagctgccttttcctgcgagtaggtagaggccgggcaaccatgtggcatgtggctgggcagtccagccccagagtggattgcttctgggcaaatgactcccagagtcttctcctaatccagggtctccaaattctgtgcgaaccccagacccactcaatattccaggactagggtctgtggcaggttacccttcctgaacaaatggccactaacattccctgagtccacatggctgaaagttacacttcatggcaacaaactgtaaataaaatatgttccattttccttccttgaaaacaaatgtggtcacagtgacctggaaggccacattcaaatttaggattctcagctccctggagtccctcactggaatggacaaagaatggagagtgggaccaggcctcacctgaagacccaggccttacctgaaaaaaaggggcagaggaggggtcagaagcacaccaagcaaactcacttcactgttctctgacctgatggtttttgtgttggtccctgctgtgttgctctcagggaatacctgagactgtgtaatgtataaagaaaagaggtttacttagctcatggttctgcaggctgtacaagcacgcaccagctctgctcggcttctggtgtggcctcaggaagcttctactcatggtggaaggtgaagggggagcaggcgtgtcacatggcaagagaaagagcgagagaggaggaggtgccaggctcctttaaccaaccagctcttctgtgaactcatagagtaagaactcaactcactactgcaagaacagcacccagccgttcatgagggatctacccccttgacccaaacatctcccaccaggcctccctgcaacactggggatcacatttgaacatgacatttggaggggacaaacatccaaactacaccagctttaaactaacaaacttgatcaatggtactgctttgcctcccacctccccaccccctaaatcctgctgtggttctatgtaaaatttcaaaatttgtgtagacacaaacaaaatgcttcaaagtaagaaaggtacaagtaatttccactaaaaagaaacccccgaggctgggcgcggtggctcacgcctgtaatcccagcactttgggaggccaaggcgggaggatcaggaggtcaggagaatcgagaccatccaggctaacatggtgaaaccctatctctattaaaaatacaaaaaattagccgagcgtggggggcacatgcctgtagtcccagctactcgggagactctggaatgtactacacaacactgc

SEQ ID NO: 27360 - DNA, 2300 bp, Homo sapien
ttctcactgtatcatactgtccaaaaaagaattctatttttcaggaagagacatgtctgctcacttgaggtcctcttatttttccgctattccccaaaggaaaggggtgatctcttaattctttcgttatgtcctattgtacatagcatataatggtaattcagaaaaattacttctaattacataaattttcacaatggtatagtgactaatacgctgaaatagaaaagtaaggcattgttatcatggtctagttcagtctttattgcgactatatctgataatatacggtaagcatctaaccacttgccaggggccacagagccacagggagactatgtctcgcttaaattcccaaaagtgggcccctgtgcttcaaaacgtccccgcatgggaaccacaaaaacgttgcctccccagttatcaccccaagggcccaagagccgaggactctgcccggcgtccttcagctggcaccagctgtcagaaaagcggaactggggacgaggactttgcccctaaccaacatggccgccctgaggcttcgggcttcgggcggcagaaggaaggtcacgtgaagagaattccgttcctttattggccccgtctcctggaagggcggggtacaataacccaaccggcgccggccttaaaggggccaccgttggatctgccggtggccggccctaggggctgggggggcggtcgccgcgccgggcttctgcccctcccgcgcggaacggtgacgggcggggctggcgctgggaggccgtgtcgctgggagactgctgacagcccgccgcctgccgccgcgcgattccgagggggttaacggcggagccgccggccgggcgcggaccggagcgcgtgaggctccggcgcgcaagcccggagcagcccgctggggcgcacagggtcgcgcgggcgcggggatggaggacggcgtggccggtccccagctcggggccgcggcggaggcggcggaggcggccgaggcgcgagcgcggcccggggtgacgctgcggcccttcgcgcccctctcgggggcggccgaggcggacgagggcggcggcgactggagcttcattgactgcgagatggaggaggtggacctgcaggacctgcccagcgccaccatcgcctgtcacctggacccgcgcgtgttcgtggacggcctgtgccgggtgaggaccgcgccgggcgggccgtcggggcggagggcggacacttgttgcccgaggaggcggcgcgggtcgcagcgcccagtcccggccgcgcgcggggcggggaggcagcgacgtcccccgggctgctcggccgcggacccgtcagggctggggcgtggggacggcgccccgagggtcccggtcccctagcacccccggggcgcgcggagctcactgcagagtcccacaggctcgccccggcccccgtgtgcgcccaggctggtgcgactaggggggtgaattcgctccccaaggtggggcagcgccgccgccccctgcgctctcgccatcgccccgcatttactcgctggaggagggggtcacctcattcctagggaggaggaaacagacattgagcggcgacgtgactcagtgttcataaataggacgacgtccctgcattcccaatctgcactattggaagaaaagccaatgtttgggtgaggatccgtggttgctcattagccagcggctggccagttttggtggaattgtgttggggggaaggggaccatctttcagacctttaggatatttagtcaagaaccttgcccccttgtgtgaaggtgtggcttgccgccatcggggacacccagtacatggggagtcgactccttcccccgcctccccccacccccgcaaaatccacacaatttagacactttggagggtgaggggcaggtatgagtaatcaataatggtggtggggaggaagaatttatttcaaatctgcagttattgtgcagaataaaatgtggacaacgtgggcgtcacagaatgaaaccggtctttgagagatgccccattaggagagcagctgtcaaaaaaagcagtgctttcagcgcttggctgtgggtccacaaatgctgtcaatgaactatagttgaaggctgctgccaatacaacaccactgtgaaacagaatggtgtatgtaagtgtcatttatttataatttatatgttcacttactttctgaaaggaattacaatggccgtgtgcttaggtaagcttccaggcatgctttctagagcagcaattgtcaggaactcagggtcttactgattgatcttactc

SEQ ID NO: 27361 - DNA, 2300 bp, Homo sapien
caaacggttacactctttgggtttctgattagtctttataaaggaggcaaatctgtctcggtgaaatgcatctgtctcagtgagcagaggggtgactttgaatggaatgggaggctggttggctctaagcaacttccagctttagttttccttagtgattttgggggcccaagatttccctttcacagtatgacggttccaatttcttcacatcctcatatcatattctattttatgagttatctctagatgggtattattattcctcttgggtttagctccctgaggacacaaactgtcctaagactatgataatagtaatcatagaaccgtgcacatggcaagttctgaataaatctcagctgttggatatactttttgttataattactaacacttcctaactagagagtaagcctactctaagaaaaaatataactgtaatttcacaacctccaaagaacccagtgcataaacagctaccatttattaagcactgactgaattcttagtaatatgtcttcatttttttcagatgaggaaactaagattcagcttatttgtacaagtagttaaaaagcaaagctgaaattcagacccaagttctcactgtatcatactgtccaaaaaagaattctatttttcaggaagagacatgtctgctcacttgaggtcctcttatttttccgctattccccaaaggaaaggggtgatctcttaattctttcgttatgtcctattgtacatagcatataatggtaattcagaaaaattacttctaattacataaattttcacaatggtatagtgactaatacgctgaaatagaaaagtaaggcattgttatcatggtctagttcagtctttattgcgactatatctgataatatacggtaagcatctaaccacttgccaggggccacagagccacagggagactatgtctcgcttaaattcccaaaagtgggcccctgtgcttcaaaacgtccccgcatgggaaccacaaaaacgttgcctccccagttatcaccccaagggcccaagagccgaggactctgcccggcgtccttcagctggcaccagctgtcagaaaagcggaactggggacgaggactttgcccctaaccaacatggccgccctgaggcttcgggcttcgggcggcagaaggaaggtcacgtgaagagaattccgttcctttattggccccgtctcctggaagggcggggtacaataacccaaccggcgccggccttaaaggggccaccgttggatctgccggtggccggccctaggggctgggggggcggtcgccgcgccgggcttctgcccctcccgcgcggaacggtgacgggcggggctggcgctgggaggccgtgtcgctgggagactgctgacagcccgccgcctgccgccgcgcgattccgagggggttaacggcggagccgccggccgggcgcggaccggagcgcgtgaggctccggcgcgcaagcccggagcagcccgctggggcgcacagggtcgcgcgggcgcggggatggaggacggcgtggccggtccccagctcggggccgcggcggaggcggcggaggcggccgaggcgcgagcgcggcccggggtgacgctgcggcccttcgcgcccctctcgggggcggccgaggcggacgagggcggcggcgactggagcttcattgactgcgagatggaggaggtggacctgcaggacctgcccagcgccaccatcgcctgtcacctggacccgcgcgtgttcgtggacggcctgtgccgggtgaggaccgcgccgggcgggccgtcggggcggagggcggacacttgttgcccgaggaggcggcgcgggtcgcagcgcccagtcccggccgcgcgcggggcggggaggcagcgacgtcccccgggctgctcggccgcggacccgtcagggctggggcgtggggacggcgccccgagggtcccggtcccctagcacccccggggcgcgcggagctcactgcagagtcccacaggctcgccccggcccccgtgtgcgcccaggctggtgcgactaggggggtgaattcgctccccaaggtggggcagcgccgccgccccctgcgctctcgccatcgccccgcatttactcgctggaggagggggtcacctcattcctagggaggaggaaacagacattgagcggcgacgtgactcagtgttcataaataggacgacgtccctgcattcccaatctgcactattggaagaaaagccaatgtttgggtgaggatccgtggttgctcattagccagcg

SEQ ID NO: 27362 - DNA, 2300 bp, Homo sapien
tgtccaagctggagtgcagtggcgtgatctcagctcactgcaacctctgcctccggggttcaaaagattctcttgcctcagcctcccgagtagcggggattacaagcatgtgccaccacgcccagctaattttgtatttttagtagagacggggtttctccatgttggtcaggctggtctggaactcccaacctcaggtgatctgcccgccttggccttccaaattgttgggattacaggcgtgagccatggctcccggccgttttcatttcttttaagtatatacctaggagaggaattgctgggtcatatggtcactctacatagaactttttgaggacttgccaaattgttttccaaagtggctgcgccattttacatgcccatcagcaatatattgtgaaccctgaaaatttgagacaggtctcaattaatttagaaagtttattttgccaaggttgagggcatgcccatgacaggcctcaggaagtcctgaggacatgtacccaaggtgatcaaggcacagcttggttttatacatgttagggagacatgagacatcaatgaatgtatgtaagcagtacattggtttggtctggagaggcaggacaacttgaagcaaaggcaggaagactactgcaaaggcaggaggcaggagggagcttccaggtcacagataggtgatagacaaacggttacactctttgggtttctgattagtctttataaaggaggcaaatctgtctcggtgaaatgcatctgtctcagtgagcagaggggtgactttgaatggaatgggaggctggttggctctaagcaacttccagctttagttttccttagtgattttgggggcccaagatttccctttcacagtatgacggttccaatttcttcacatcctcatatcatattctattttatgagttatctctagatgggtattattattcctcttgggtttagctccctgaggacacaaactgtcctaagactatgataatagtaatcatagaaccgtgcacatggcaagttctgaataaatctcagctgttggatatactttttgttataattactaacacttcctaactagagagtaagcctactctaagaaaaaatataactgtaatttcacaacctccaaagaacccagtgcataaacagctaccatttattaagcactgactgaattcttagtaatatgtcttcatttttttcagatgaggaaactaagattcagcttatttgtacaagtagttaaaaagcaaagctgaaattcagacccaagttctcactgtatcatactgtccaaaaaagaattctatttttcaggaagagacatgtctgctcacttgaggtcctcttatttttccgctattccccaaaggaaaggggtgatctcttaattctttcgttatgtcctattgtacatagcatataatggtaattcagaaaaattacttctaattacataaattttcacaatggtatagtgactaatacgctgaaatagaaaagtaaggcattgttatcatggtctagttcagtctttattgcgactatatctgataatatacggtaagcatctaaccacttgccaggggccacagagccacagggagactatgtctcgcttaaattcccaaaagtgggcccctgtgcttcaaaacgtccccgcatgggaaccacaaaaacgttgcctccccagttatcaccccaagggcccaagagccgaggactctgcccggcgtccttcagctggcaccagctgtcagaaaagcggaactggggacgaggactttgcccctaaccaacatggccgccctgaggcttcgggcttcgggcggcagaaggaaggtcacgtgaagagaattccgttcctttattggccccgtctcctggaagggcggggtacaataacccaaccggcgccggccttaaaggggccaccgttggatctgccggtggccggccctaggggctgggggggcggtcgccgcgccgggcttctgcccctcccgcgcggaacggtgacgggcggggctggcgctgggaggccgtgtcgctgggagactgctgacagcccgccgcctgccgccgcgcgattccgagggggttaacggcggagccgccggccgggcgcggaccggagcgcgtgaggctccggcgcgcaagcccggagcagcccgctggggcgcacagggtcgcgcgggcgcggggatggaggacggcgtggccggtccccagctcggggccgcggcggaggcggcggaggcggccgaggcgcgagcgcggcc

SEQ ID NO: 27363 - DNA, 2300 bp, Homo sapien
ttcacaggtccacaatccttttatacacattctgaaatcctaaaaggctctgaatactgaaagctgttttgggaactcatctagaatcagaaccagaaaggcttgaactcagctggaggtgaacctaaactgggggtggggggcctgaagcttgtatgattttaccatatctcaccaaatgtgatgcctgtcttactgcagaaatattaatgtgtttgatcacaaagtgatgttctgtgttatgtaatatacagtaaaatcactcaatcatctttctaacaattctgttttctgaaacacatccgggctcatgggatttgcataaagcactgtaaacctgtactgtgtttgctgttccgggctgaacgtgctggcttcatctttctttacaagataagggtgatggctgctaccttgccccggtgaatgcagcaggattccttttctaggtgcctagagcttttacggctcacgtgcatctctggctcacctgtgtgagtgtcatgctttgactagatgccactttgtggtgatgaagcttctggcctgtacctacccagacagagcacagccttggagaaaggtagcatgaagctgagtgtctctgggctcctgtcctgtcatccatcagtgatgagcaatgggaagtagaaggagacacattatgttcatggccaaaggtgtgaccccaagccacatcaaaggcacacccagctctttcaacgaaaacaaccttctgtgggcatgaggggctcatgtatcttaggccaatatcaaagccatataaagcctgatgaatcaagtcagtcttgagctgggatccccgttccaccacatttacatagtgccaccttgggtaacccagtttcttggtaacccactagaagtagcctggcttataataaacttacgacatacttttcaccataataacttcctttttaaagtaggtattgggtctgtgatcctgggagaaccctaacccagggaattccatagctcccctctttcacatcttggattttcttttctccacctccagattcccaagctcttaacttggaggcagaagcactggtggtgagtttagaaatctaggagaatcagcaagatacacagactcttacagtcttaagagacccgggagatgaaggtgtaacctttttccagcgcagggctcccacgatcctccagacaggcccggagaagcggaccctcatggacaacagcgcccatctctggtcagagaaactcgactggctccttgtgcgtctatatgaggggcctctggaacctctccgggggccctgcagacatgggaaggcggccagcgtagcctccccagcttcttctctcagggatttacacccttgctcttggacatcaggcacaatgtggacatcttcagttgggtaccgggggagcttgatgcttcactcctggggtaaggtggggattaggtgtttgggtgtcggggtgtgtgtttggagggggtgatttaagtgactctggaacttgaagccattctagagaacaacacccaagcggccaggagaaccagaatcttttcatcaacatccacaagggtcacgagaaaggctgtcattggccaagctcctaggctacccaaacaaaggagggaggaggggaagacaaaccccgcccaagccccaggggatggagttggcaccaaggacttctggtcaaccccaggacagcggacagcgggccgggcacttccaaaggcgcaggagcgaagcagccctctccagccgtgcactgcacctccgcggcccgcgggcgagattggggtcccggtgggaagcagacgcgcaatcggggagaagctccagcagtggaggaagagtccagggagtttcagctgggcagaaggggcgcagaggcttggggccaagcggagtttgccctgcgggtcctgcgcaaggccccagtgccccggctaaacctttgccgcaggatcccggagccggcgtccttcaaggagcacagagggccccgtagcacgccccttgcccagcgccaccgacccttaagcagcgtcaaggaaggagtcccgatcaaggacagggatctgcggccatggccgaggccgcggagccggagggggttgccccgggtccccaggggccgccggaggtccccgcgcctctggctgagagacccggagagccaggagccgcgggcggggaggcagaagggccggaggggagcgagggcgcagaggaggcgccgaggggcgccgccgctgtgaaggaggcaggaggcggcgggccagacag

SEQ ID NO: 27364 - DNA, 2300 bp, Homo sapien
ttacatagtgccaccttgggtaacccagtttcttggtaacccactagaagtagcctggcttataataaacttacgacatacttttcaccataataacttcctttttaaagtaggtattgggtctgtgatcctgggagaaccctaacccagggaattccatagctcccctctttcacatcttggattttcttttctccacctccagattcccaagctcttaacttggaggcagaagcactggtggtgagtttagaaatctaggagaatcagcaagatacacagactcttacagtcttaagagacccgggagatgaaggtgtaacctttttccagcgcagggctcccacgatcctccagacaggcccggagaagcggaccctcatggacaacagcgcccatctctggtcagagaaactcgactggctccttgtgcgtctatatgaggggcctctggaacctctccgggggccctgcagacatgggaaggcggccagcgtagcctccccagcttcttctctcagggatttacacccttgctcttggacatcaggcacaatgtggacatcttcagttgggtaccgggggagcttgatgcttcactcctggggtaaggtggggattaggtgtttgggtgtcggggtgtgtgtttggagggggtgatttaagtgactctggaacttgaagccattctagagaacaacacccaagcggccaggagaaccagaatcttttcatcaacatccacaagggtcacgagaaaggctgtcattggccaagctcctaggctacccaaacaaaggagggaggaggggaagacaaaccccgcccaagccccaggggatggagttggcaccaaggacttctggtcaaccccaggacagcggacagcgggccgggcacttccaaaggcgcaggagcgaagcagccctctccagccgtgcactgcacctccgcggcccgcgggcgagattggggtcccggtgggaagcagacgcgcaatcggggagaagctccagcagtggaggaagagtccagggagtttcagctgggcagaaggggcgcagaggcttggggccaagcggagtttgccctgcgggtcctgcgcaaggccccagtgccccggctaaacctttgccgcaggatcccggagccggcgtccttcaaggagcacagagggccccgtagcacgccccttgcccagcgccaccgacccttaagcagcgtcaaggaaggagtcccgatcaaggacagggatctgcggccatggccgaggccgcggagccggagggggttgccccgggtccccaggggccgccggaggtccccgcgcctctggctgagagacccggagagccaggagccgcgggcggggaggcagaagggccggaggggagcgagggcgcagaggaggcgccgaggggcgccgccgctgtgaaggaggcaggaggcggcgggccagacaggggcccggaggccgaggcgcggggcacgaggggggcgcacggcgagactgaggccgaggagggagccccggagggtgccgaggtgccccaaggaggggaggagacaagcggcgcgcagcaggtggagggggcgagcccgggacgcggcgcgcagggcgagccccgcggggaggctcagagggagcccgaggactctgcggcccccgagaggcaggaggaggcggagcagaggcctgaggtcccggaaggtagcgcgtccggggaggcgggggacagcgtagacgcggagggcccgctgggggacaacatagaagcggagggcccggcgggcgacagcgtagaggcggagggccgggtgggggacagcgtagacgcggaaggtccggcgggggacagcgtagacgcggagggcccgctgggggacaacatacaagccgagggcccggcgggggacagcgtagacgcggagggccgggtgggggacagcgtagacgcggaaggtccggcgggggacagcgtagacgcggagggccgggtgggggacagcgtagaggcgggggacccggcgggggacggcgtagaagcgggggtcccggcgggggacagcgtagaagccgaaggcccggcgggggacagcatggacgccgagggtccggcaggaagggcgcgccgggtctcgggtgagccgcagcaatcgggggacggcagcctctcgccccaggccgaggcaattgaggtcgcagccggggagagtgcggggcgcagccccggtgagctcgcctgggacgcagcggaggaggcggaggtcccgggggtaaaggggtccgaagaagcggc

SEQ ID NO: 27365 - DNA, 2300 bp, Homo sapien
aagagggttcccaggtcatcagccactgggagttttctctgactcagctctgcacttccacttgctccagaacagggagtgaggaggagatgggggtggccttcgaaatggccatagggtggtgggaccccaaggtggggaacagcctcaggtggacgaggggatgcttttcagggcccatctgccgggacttgttgtgaccacttggatgtatgtgtcataactgtccaccttccacccttcaggctcccagcaacttcaagatacctggagagattctcagaccctcccctctaataggcagagaggaaattaatgctggcgtggggaggggagagtgggagaggatgtgacgcacaggcccagagcttagggactctgaattcagtaatctgggtctattggtgccccttcatatgcagtaaggtcacctattaactctgtgtttatggagctgtatttatcacctggaaagtgatatcatcctgcaagtcttcttatcaatggatcatccaattgggggttcacattgttttgtcttacacattgacaataatgctggtagcatcagccttatctcttgcccgagattggactaaggctgaacttctcacagcatggtttctgaccactggcattgtatcactttggaggaacatgttaaaaattcacattcctaggccccatgcagcaggacccactgaatcaaactctgtatattttttaaattactattttaacattcttttcttttgtatttaggtaaaacttactgcattaggctgttctcgcattgctataaagaaatacctgagagtgggtaatttataaagaaaagaggctgaattggctcaaatgctgcaggctttgtaggaagcatggtgctggcatctgctcagcttctggggcagcctcacaaagctcacagtcgtggaggagggcaaagggggagcaggcacgtcacatggccagagcaggagcaagagagagggaagtgccacgtacttttcaacagctcaatcttgtcaatcttgcaagaactcactgactatcgaaagggcagcagcaaggggatggttctaaaccattcatgagaaatccaccccccgacccaatcacttcccgtcaggccctgcctccaatactggggattacaattcaacatgagattggggctgggacaaatatacaaaccatatcacttatattcagtaaagtacccaaaccttaagacttttatcactcacatacacccgtgtagccaccgtgcagatcaagacatagaacaacattgccaccacccagaagccttccttttgtccttctgagacaatagtatcttccagggacatctgctgttgacttccaccatcatagacaagtttgccctctacctaccctgaatcatgcaggaagctttgagtctggtgtctttctctcaacattgtgtgtgtgagatgcacccacactgttgcttgtataatagctaattcttttccattgtggtgtagtatctcaaggcatggaaatactacactgacacaagtattctactcttgatagtatctgggttgtttccaggttttagctattataccaaagctgctaagaatagttgatccttggagaggatcgagagatagagggaaggaaagggcgtgtctttctttttcacattggtgataaagggagttcccattgctgctccttccatcagtgagctgctgctcagaggcccagtgtggcaggcagtggtgaggtggtggggaaggaagaaagaaaatgctcagtgcagtgcatacatgtgcatgtgcgtgcgtgtgtggtgttctctcccctaacccctacatccaccgccaactccacattgaggctggtaaaatggcctcaggaggatattcgcagcatcctgaccgttcttatcaacctgcaatgattttgcatgtgcatgttgtggtgttggcacttataattgtgagactggctcagatagaaatctccttctccacttgtaggctggttatgatggtgagagtatcggaaattgcccgttttctcagcgtctctttatgattctctggctgaaaggcgttatatttaatgtgaccacagtggacctgaaaaggtaagacaaggcgtctgccttactgaaataactgtacctagttctctgcacacacacacacacacacacacacacacacacctgaggccaacggtgctgcatgggcacgtccatcctcagtcggagtctgaactgaagcccacatgtgggccaagcagtcatgacagggtcggct

SEQ ID NO: 27366 - DNA, 2300 bp, Homo sapien
ggatgtggtggtgtcaacctttccctggggtggtggtggctgatctgtggcaccccacatgacaatgtctttgccatggcagtagatgctgttaaatcaggccctgggtttgtcttggcttgacttgtttccattttcaattgaaaattaaatgtggatagacttcagcctgactcggtctgctccctggaccttggccagtgagttctgagtaactgcagacagggtgtggtcaccgggatttggttattggatttttttccccctgtggttttgggcaggttgctccatgacgggcagctgtatcgtcttagaaccggactttccgggagagcctttgggtcactctgggcgtcagctggaaagggctgctcttggagcaagctcactggcccacaggaggagctgccttcttgaactgtcaccctgaagccaaccaaagtctgggcaacgccagctccagtgactgccgctccatctcctaggcaatttgcatcgctgtttctgtttgttaggccttgaccattcctttgttgtcatcctgcgcttccctggccataggccttttcccagccccaccacggcatgcccacctgtgcttggggaggggcggaggaaggagccccagccagccatgtccctgtttcgtgctccagtgaccactgctatgaggactttcccactggctcaggctcagttagtcgagctggtgtgccccgctcttagctgttccccaactctcctagagtgtgctaattctgacccagctctcccaggtggaggatgcttttcaaacatgtccttgggaacctctgcagacccattcccagcccattctccatgattccaggcctggccaggttgaaaacttctgtaaattaaaactcaaataaagagagtatagcttgggcataccttttgcacatgcatatatatgtatgtgtgtgcatgtgtgtgtgtgcatgtatgtgtgtgcatgtatgtgtgtgcatgtgttgggattttttattttttaaatttatatttattaaaaaaattttttttgaaacaaggtcttcttctgtctcccaggctgggctgcagtggtgtgattatggctgactgcagcctcaaactcctgggatcaagcaaccctcccacctcagcctcccagagcactgggattacaggtttgagccactgcacctggcctatttaaaaagtttgtctagagcaaaaagtccctagacctgccagtccagggcactaaatcacaagaacaccaaggccaaacaggcttgaagtctccaggctcctcactggcaaactctacttcctgatcccttagtgggttgaggtgccaacagccccctggggaggagggggttgcattatggccgtggagagactctgagccttatcaacggtgtggggatgacacccttttcggagcactttgtgaggctttgtgccatgctgggcgcttggcgtcagagacaaatagaatcaataactgtgcaaaaaaagttgccagataatttatcccattggcaccgagcctagaattataatcagatcttgacttcttcaaagccttcttgctttggattttccaaatcgaaaataaatattgggggcaattacctttccttagttctctgatgtatgaaggggagttttcatctattaatttaagaaccctctcatttcattcggaaggtattagcccatggaacttgttaacttaatatcaacacagtctgtctaggttttgactgaaaagagaaaggggttgttatgctctaggttaatattttcctctctttaagaagtcttgggtatgccagacacttctcggacaaaaacagctgttttcttcccattgctgaacgcattgtttgtgcgagttcacttacttgctatactcagaatatcctccaggagtcagcaaatcccaacctctggacgtggctcagggccgccctgcccattgctgagctgatttggaatttgggcctgagagaggaagtgattattggatgacaggctgcctcctagggggcttctctgggcttgccatgaaagcacttccggaggaaaagcagagctccatcagtctcttttggagagctgtgaacgtgaccagacctattaattacttaactgaggtgctgaactttgaaaatgaaagttccggtggggagttctgtcctttccagcctggggagctctgtcagggctctcctgagcgtctctttcagcttatcaagctcgctcggggaccgtctctggtaagtacaggcaacccctccagccaaccc

SEQ ID NO: 27367 - DNA, 2300 bp, Homo sapien
tccccaaagtcttaactctttccagcattaactcaaaagtcgaaagtccaaagtcttgtctaaaccagatatgggtgagatgcaaggaaacatttaaagcaaattccattagctttgtgaaatcaaaaacaagtctactataatacttccaaaatataatggtgggacagacacaaggtagaaattcctactccaaaagagaaaaacaggcaagaaaataggggtaactggtcccatataagttcaaaatccaacagggtaaacaatattaagtcttaaaactggagaataatctcctttgactccatgttctgccttctggatacaatggggctaagactaggcccccaaggccttgggcagccctgcccctacagttttgctgggctcagcccaaacttcacctctctcacgttgaagtcttgtgtctgcagcattaccaggctagagttgcacactggtggctctgcagttctgggttctcagggatagccccaattctgtgtctccattaggcacagccttagtggggactctttgtggcagcttcaacctcacatttctgttcaacattgccctgctaggtactgtctgcagtggtattcccctgtggtaggtcttggcctgagcttctaggcagtctgtggcatccttcgtaatctaggtggaggaagccatgcttccacagcatgtattctgcatgcctacggaattagcaccacatagagaccatcaaggcatactgcttgtgcccttcagaatggcagcctaggtatacctaggcccactgaagccacagctggggtggccaaggtgtgctgcaccaggatgcaggaagcagagactagaggcagccctgggcagtgagcccatgaagggtgccccaggcctgtcccctaaaatcattctaccctcctagagctctgggcctatgatgggaggagcaacttgaagatctctgaaatgcttttcggggtctttctcccattgttttgatgaacagaatctggcttcctcgcattcatactaatctctttggcaaatggttgcttggccacacccttagtactctcttccaaatacactttcactctttacatggccaggctgcgaattttccaaatctttccactctgcttctcttttaattgcaaatttcatctttaagtcattcttttgctatcacatctcactatatgtagttaaaagtagccacacagcagcctcaatgctttgctgcttaagtatttcttccacaaatatcctagttcatccctcttaagttctgcattccattaagtcctaggacacagacacaatttcacccagctctttgcaaccttatattttataaatatggcctttactccagtttccaataccttgttcctcatttctatctgcagcctcatcagaatggcctttaccagcattctaccagcactctggtcacatacacttaagtaatcacttaagtaatctctacgaagatttagacttcccctagttctaaggtcttctttcagagccctcaccagaattgcccctaatggcagaaccgttcttggcaatgcaggcttttttctagcctgctcctccaaacttgttcagccttcacggttatacagttccaaagccacttacacactttcaggtatttgttgtagtaacaaccccacatcttggtaccaactttctgtcttagttcttttgttaaatgcctgagactgggtaatttataaagaaaataaatttaattcacagctgggcacagtggctcatgcctgtaatcccaccactttgggaggccaaggcaggcagatcacttgaggtcgggagttcgagagcaggctggccaacatggtgaaacccccatctctactaaaaatacaaaaaaaaaaaattagctgggcatggtggcacacacctgagtcctagttacccgggaggctgaggcaggagaatcgcttgagccggggaggtggaggttgcagtgagctgagatcatgttactgcactccagcctgggtgacagagtgagattctgtctcaaaaaaaaaaaaaaaaaaaaagaaagaaagaaaacaaaagaaatttatttcatatggttctggaggcagggaagtccaagagcatggtgctggcatctggtggggtccttgctgcattaacccaaggcagaaagcaaggggcacaagaaagcatgtgcaagagagcttgcttttataacaaaggcacttcaccaataacccactcacatgattatggcattaatccatttatgagggcagaatcctcat

SEQ ID NO: 27368 - DNA, 2300 bp, Homo sapien
gctactctaaagaatgtgtgaactatattgctggtgttctttctttccaaaatatgaatttgatattcagtacttcacttgtaaaattttaggaacaacttttaaaaaataagtatccagaatattttcatgtgaaacaacttttccttttccttttgttctttctttcctataagaaaacgctgttttacgctaatcatgttttgagtagacccttgggctttttctcttgaaattggaaagttaacaggtataatatgcaagtcttgttcagccaagaccttcagtttgttcttgacagtaggaaaatgcttattttccaggctcagccctgaaatttctatgttatatttacgaagatactttaagaaatacagcatgtgtttctggctttctttgaaatggcagtggtagttttcagaaaaatatccaatttgtcagagtagttccacagtggtgctgtccagatgcatgaatgtttttcagctttacagaaatgtcagtaaccgggggtttggcgagcttgccgggatttatagaaaggctcaggaaccctaccttgctaggactttgtcagaagggttatgccagctcctctgactctgtcagcaagaaaatactgatatagaatagcaccaatacttacctagaatcacatgtgctggagggtcactcaaaatagacatctcaaattatctgaagcacggtacagattgagagggggcaagttgtcatgccactaaaccactgtttatttgttggggtcttaactattaaagggctgaggtttatttcaacttcctattttaccaggtcttaaactggtaaagccattttgtcatgaaatagaatagaaagccattttgtcatgagtagacccttgggctacacgtttctcccagtcaggacaccatcattaacttctacgatcgagtcttagaattcttttttaatttatttcaaaagatagaacagggcagattctagagctagtggtaccgatgcctgttcagtcacaactcccacctagagatgggtttgggcaacccgagtgagtgattttaaaatttcacccctgattgaccaaatatgatgtatcacatttaaggtgtcgtaatttcctcctttctgggaatatgaggatggagtaatagatgctggtacagaaaactgaaacctagataaactaggaagcccattttgttgttcttctgcatgctggttgtcataagcatgtaggaagaagatttaactctttaactggaccagttgtgagctattttgacgtgggtcagacatttgtacatattattccattccctcaacaatcctgtggtatcatttatagacagagaaatcgaaattcagaggttaaaaattgcccagtatctcaaagattgtaagtgatgaacttggacgcaaacccagaccttccttgctacaaagccagtgcaagtgggatggccgttccctgggcgtgcactcttgggtcaaggatcgatttactacagggctgaccagtgtcgagaagaatcccaatcaccaaaggagggatggaaaaagtgttgggctatccactcacttggcattcttgtattgaacatgttctattataattagatgttgataataagaagaattttggggccaggctgtgtggtgggcaccttaataaactgtctcctttggtacatgtgcatttgtttataaagtttgggagaaaagaaaactcagaataatgaatctctaaataagagtgaaagagggggtatatgagcagggagaaggcttaccagccactctgtttactttattggggccattgccttcctacttttgaagttcattgggaccaagtgcttatcatccaaacccagtcaacatctaatccacttttatgagtatgcgtgcctcactttgagtgttccatatggccaagaggggtccctgacctctcaaatcatctcttgatttttagtattccaagtaacttctgtcttgctaattattttcccccaaaattaaagttacttaggaaggactatattctggtgctgctgtctgcaaaactctgagatactgaaatgaccctgtttctcagttgtatagagttatttaagtccgtctgattctctctttatcatctggatagacaaaaggaagaaaacctttccaccttcctgtaggagaaggagataaatcctctttccagccttggaggtaaaatatccaactgcattgcattgctttcctttctctctccctctccttccctctcttccttactcttctagcaattt

SEQ ID NO: 27369 - DNA, 2300 bp, Homo sapien
cgcgcgcgatgcactcttctcagggacagagttagaaagtggacgtttgggcggggggagggggggatttacaactggaattaggcttaaaaaaatcattttaaaagaaaaatgtagtaagttttctttccgagaccccaggtccattaaaacaaaactgaactcgggtgctggcagtgcccagggggagcggaggcggagagggttgaggccgcgggccgcccgccttagccccccggaagcccgggctcctgaagcacagatagccaagagcggcccgagtcaagccccaggaacaggggcttcgggaagagaccccgaccgggccgcacagcggggaggcctggtccgagagtccccacctggccggctgcgactctatattggaacctcggaaacgcgccttggccgttccagctcaagtgggctctggggcggcttcctgtcttttatcctcgaacgctagttcttcccgggcgacccgaaggccacgaggcgggccgcacagccccgcgccgtcgggggcgttccgggagctccggggactgcgcgcggcgtccagggagggcggctgctgccccctggcgtccgccagagcccgcggcgcgtcccgacagctccgcgcagtccgggcccgcccgggaaaggcctccacgccagtcaaccccggccccctcctgcgtccgggcccgcggcaacgcccggggacagtccctgcgcggcagcggccacagcaccctagccctgggggagggaggagcgggcgtcaggggccccgtgaggtcggcgagggacccccgcgccggggagcttaattgaggggctccgcggggaccacaaagcagcccgcggtggaacggggccgggatccggggactgggttgcagccccggggtggatgagaggccccgggaggtgcagggcccggcagggagggcgtggagggactcatggtgacgggagcagcctccgctgggagggagccccgccgggcggggtcggagttggcagcgcacgccggaccgggggcggggccctccgagctccgcgaaaatgcccgcagcaccgcggggaccggcgcagggggaagcggccgcccgcacgcgaagccggggtgggttccgcacctggggccgctcgagcgcacgggggcggggagaggagcgggggccgcttccggggagccggaggggagacgcggggcccgggcaggctgtccggctgctgcgggtgccggcgctacaaggcccgggagcaagccgcgtggctgctttcaactttccttccagccgcgcgttcttggggtctttcctgactaggaaactcttcgctggccgctgacgcacgcagcaagtgagacgcgcggagggatcgagccgcggcccgggcgcagcggtaaaaaacacccattacagaaaccgacccaagggaagacgctgagagcaaacggcacgcgcggacgccgtccggcctcatgcaaggaatcagcgccgcttcgccgcagctgccagccggacggtgcaggagcgcggagtggctcccccgggccccgcggccaaatcgcacccccgccctggaagcggaggcctggccctgggcggccgcgcaggatctggggccgtccgcgggctgcagcccggttcgggagcctcgtggcggccactgcgcctgcctgcagcggctcgcggggccgggcctctccgggtgcggcgcgccggccgggtcctcctcgggccggcggggcctgctttctttttccaggtctccggaccgtggccactcgcggagccgcacaagcctgcgtgtggctgcggaaaggggtccgcacgcgggcggggccccgggccagcatgcaggcttggatgcggggcgcgggggtggcctccgactccccgcccgggctgcgtacagtagcgcgcggcgcggcggcgggggcgcgcgggccaattccaggagccggcggcggcgagccgcgccctggctgataccggaaaggcctgtgattggccgccggccgcccctatgcaaacgagctgagggaatggaattcctccggccgggcttacagtaaaagcacgttcatttccaggcactctcattcatagagccagcgggcgcgggcgggacgggcgccccgcggccggacccagccagggcaccacgctgcccggccctgcgccgccaggcacttctttccggggctcctagggacgccagaaggaagtcaacctctgctgcttctccttggcctgcgttggaccttcctttttttgttgtttttttttgtttttcccctttct

SEQ ID NO: 27370 - DNA, 2300 bp, Homo sapien
ctcagtcccgaagatgacagcgtatagtgaggcttcaacgagccccagccttagagtgtctttacactctaacctgtcctacaaagaccccactggaagaaatagatatctggctagagctaggcccaaagagaaaagttgagaattcaggccgttcactgcctcatccaaacccttctcctaagcatctggacacctaaggctaaaagcatctggggagtttctaaaattaaatctcccaaggatattctgtatggccccttgaattgctaagtcattattaagtgtgagtcgactctgcagtggcagctgcacattacagccctcggctcttagggcccttccagggaatattaagtgtgggagagaaaaatgaacctggtttggggttcaactcaggcttgactttattagggagggtaacaacacaggcccattatgttcattatgttcacaggggatttgcactgagaagcaatatgaaacacgcatcacatttaaagattcacgagcctcataaaagagatgtagcactattattcttttttagatgttagcagtgtcaacatgtggccagctaacttctcacaagtgtaagagaaagcggtctgttgagtttcaattcctgctttagtcaaaacaggagtaagtaaaaattgtgtctgttccttttgaaagacttgtgccatggaagctactatcgttgtgggtctttgtgtgtgtgaaattaagtggatgagggaaaaccgagggagtgttgtgggagttcagcctttctgaagtgcctgtgctggctactgcagcttagaatccaggactggcatttacaacccatcatcacacaggttctcttgaccctatgtgtcgaaatttcacgtgcgcagagtgctatggcggatgtaggcagagcagagccaaatgaataaggtagtaaatcaggaaaataagcctttcttcatcttggaactacaaaacaaaatgacgttttagttgtcagcaggtaaagccagtggggccggaaaatgaaatacgtgtgaccacagtggtttgcccacttacaaaattatcctgtttttagcatcttcaaacaggcatgtctttctaaggtagaggacgcgctatataatattcattagtcagccccaggagaagtgtctcctcctggttccccttctattgtggcatcctcatgtgctcaaagtgtagttttacctacaggtgtaaattagcctattgatttgaattgaactagagaaaggcaatacagggagctttcccaagtgacaatacaaataaacatctgcagagtaaccactgctttgtcccaaatacagaaattctctctgctttgttttcctttagcttcctaatttgtgtgtgtgtgtgtgtgtgtgtgtgtgtgtgtgtgtgtgttaagactgtactatgattttatctctttactgaaagagatacatactaaagttgtccatttagggggaataaaaccacataattttggtttcattaaaacagtccttttatttcaaaagtaaaattctttccctttcccaggctttaaaatacctgtgagttgccagcccgttgtaggggtcagactctcaccaaaacatttctttttatttatttttcccttttatagtttcacttatgccatgatagacgttaccaaggacttaactctcccggagctgatgcctagcattttaaatgatgggatccacatcctgtcggagcagcggcttgatgccagcgttgaattactattgaataagcagcaatgaaatctttatcaaaataatcagtagttccaaaaaccacaaataacaacaggagccgagttgtactaaatcagcaaagaccattgagatataataagtgactgagtcacttttttctacatccccccctcttgcaaagtctactcggctattttcttgcacagcctgggggagggcaggtggagggaaggaagggcattgctcagaaaagaaaaaaaaaaattgacatcacttaagtcacatgattggcaagaaccaattgagatgggctgtggaaaggggaacagttaaatttgtaatttgggttgtgtgaaaacttctttgggcctcataaacaaccacagaaccacaagttgggtagcctggcagtgtcagaagtctgaacccagcatagtggtcagcaggcaggacgaatcacactgaatgcaaaccacagggtttcgcagcgtggtgagcatcaccaacccacagccaaggcggcgctggctttttttttttttttaatctttaacaatttga

SEQ ID NO: 27371 - DNA, 2300 bp, Homo sapien
aaacagatcaactaagaaattgcatgaacctctgtccagtgtccacctcatgccttgccctgtggtagatgcctggtccagaggacagcccagcccttcccatggtggtgatcacaatacagtgagtgtgggcaggggatgaatacagggttaagactcacataacctagcaaacatcgatagtgttacatcagaagcgaacacatgctgtgaagaaaatgatgctggcttatggaatagagtgaggccggggctgaacagccaggaggcagggccaggcactgttcatacaatagtcaaacatggcttctctgaggaggtgactgtattagtccattctcacactgctataaggaaataactgcgactgggtaatttgtaagaaaagaagtgtatcagtctgttttcatgccactgataaagacatacccaagactgggcaatttacaaaaaaagaggtttaatggactgacagttccccgtggctggagaggcctcacaatcatgatggaaggtgaaaggcacatctcatatggtggcagacaagagaagagtgagagccaagcgaaaggagtttccccttatcaaacaatccgatctcatgagacttattcactgcaatgagaacagtataggggaaccaccgccatgattcaatgatctctcactgggtccctcccacaacatgtgggaattatgggagatataattcaagatgagatttgggtggggacacagccaaaccatatcaagaggtttaattgactcatggttctgcagactgtacaggaagcaaagtggcttctgcttctgtggggggggcctcaggatacttacaatcatggcagaaggtaatggggaagcaggtgtcttacatggttggaacaggaggaagagagacagtagggaggtgccacacacttgtataacaaccaggtcttgtgataactcattcactcactatcacaagaatagcaccaaggggatggtgataaaccattcatggaaactccgcctccatattccaaccaccttccaccaggcccttcctccaacattgaggattacaattccacgtgagatttagtggggacacagattcaaactgtatcattctggccctggccccttcaaatctcatgtccctctcattacaaaatacaatcatgccttcctaacagtccctcaaagtcttaactcattccagcattaactcaaaagtctaaagtccaaaatctcatctgagacaaggcaaatcccttctgtctgctttgttctagccatgttggcagccaattgggtggtgccaacccacattgagggtgggtcttcctctcccattccacctactcaaatgtcggtctcctctggcaacactcacacagacacatccaaaaacaatactagccatctaggcatccttcaaatccaatcaagttgacactaatattaaccatcacagtgacctttgagcagacacttgcgtacagtgaaggaaccagtcatgagagctggcaagaagcatgttctgggtggctcttcaaagagttgcccaacagaaggctagggaggaagtttatgtcaggaaggaatttggactttactggaaaatatggaagaaacaagaagaaatctctgctggtatcttgtctacagcttacaaacacctttggtcttttccacattggagacacacacaggtagtttgtgtgcatgtctatgtatatatccacactcttaaatgcacttcaggtacatagaacaggcacatataccctagattttccctgtcatcaaaaggtcccttatgactggttttgggacaataaacagatgctggccatgtccactgccactacccacttctaccgatgccaacactgccgatgcatcatggtggcctccgccacggggcattcctctggacactgcaaaaacacactttccaatgaatggcattagcaggggaattgaaacctattggctactgtgggccagtgctcccagctgtactctgatagtcttataatctgtgttttgtgacataacaaagaaagttaaaatagaccttgagaatcagaacagagtaggcatcaaagggttgtggtgtcatctcatcagaggggtaatcagaaaacaagcacttagtgcacacaaatgagtatggatatgtaggccggactagtgacagtatcttcatgagattggaagtgcaatcagacaatagcttgaggatagatatttgggtaaggagacttcaggtggaaaaatactttatgctgagaatcacaaaacattac

SEQ ID NO: 27372 - DNA, 2300 bp, Homo sapien
tttttaaataataatttttggtatttttttcagaatgttggagctgagatcgggagaatttgttattttcagtgaatgccagtgagcaggtgggtgtcctgttagacactggaagcctgatgtcccctaggcaggcagatgctgcgctaactcttggaggcaggccccagtcacttctgtattccccagggcctggcacataagctgtcatcagtggatgctggctgcgttgctgttgaaaacttgcagctggacgatgttggactttggagaagatatctgattttgaatcctggttctgccactcactcatctgagtccttgggcaaaccaattaacctctctgagccttgtttttgtttttgtttttcacatgtaaaatgaaaaataataggacccaccacatagagctggaaaaattaaatgagatgatatttagtgctttctatggaacctgaggtacgtgtacttgtagattgcctgtgtccccaattagagtgtaagccccatgtgcacaaggatttgtcttattcactgctgtatcccaatgcctggcacagagcaggtgctcaataactatttgtcagattaatgaatacaaatgtattaccaatttttctatgatattactgtaaaaagaaagagaacagtgtaaagattgggagaatgaagacatgagacaattatattggaaaacataaaattattggagagatatttgtgtcaatatgagttatctggatatatcagtattggacatcaattctacttttaagtatagttaatattttagttatggagtcattcatttttctggattatattttcaagattccagagagaaattgacttaccccttttaaaatctttaattgatatacatatatatatatatatatatatatatatttttttttttttttttgagacagagtttcactctgttgcccaggctgcagtggcgcaatctcagctcactacaacctctggctcccgggttcatgcaattttcctgcctcagcctcctgagtatctgggatttcaggtgcctgccaccacacccggctaattttgtttttagtggagatgggatttcaccatgttggccaggctggtctcaaactcctgacctcaagtgatccacccacctccacctcctaacatgctgggattacaggcgtgagccactgtgcccggccccatatattttaaacataattgtgtattcttatttttggctctccaccgaatatggcaatgactgtgactgtccctctcttccatgcactctcttcccctttcttatttcttgctatttttctctgcctccaagataaaatattacagtgcattaaaaatatttctgagaattaatgttgtagaggaatgtcagcttctcagggaaaagtttaaataaagtcaaaatagtgtttttccttaggggttactcacctttgtactaataattctataggcagccagtaattgacctgcccttgaaattaccagaatctggtgtcaattagtaatcaatttgggggatcaatatgtgtctaactgctgggactcaggctggcactgatgctactactttgcaaagtcacgagtggatttaaaagtgttttagggacaattcttgaacccaccaccagatgggaaaggtactccattgaagtggagtgtagcattgggtttgttcaaacaggttttgtcactttgctccttcctagactggatggttcgcatttttctggatgcaggaaagagagctattcacttgggctgtattttaacattttatgtaggaattaaagtacatgttgttacagattctgatactatatgtgctcttaaaatatccaaagggttacatattttcaacctttaagaggatgctattgacatgtaagtttgacttttttttcccctcaaagtaaactttggtttcccatttcataacttccaatcccctctcttccatgtcatcccccacgttctttgtcggatcattaacaataggttaatgattaagaacaagtgcgacagagatcaacagctctgcgttcaagtccaaactcttcccctcggcaaggcacgtgacctccctgtgcctcaggttcttgcagagtggaaatgcccacttcacagaatggctgagggtgtggatgaacggtggacgctcctgcccggcacccatgggtgctcacgacgattgtgttttactgttggctgcaatatgtcatgacttatcatgtgtgatccttgagtgaataggcaggtgagtgcaatatttctatacc

SEQ ID NO: 27373 - DNA, 2300 bp, Homo sapien
cttcaggtgaccctgtcaggttggcctgacgtcaggaggctcctgttgttcttctagaccccactatccctcccgcagtgcttgccttggccccttttcttcactctgctcttcaggcctacagagcctcgtgctgcatcctctgtccggtctttcccagcagcctgtggtgcggagccttccttccttctccctcgttcctccttccgggactgaagcttagcttgctttcctgccccgtcccttttaaactggtgttgtagctgtcacagcatttctcttcgctctgatcgctgactgacttgctctttttcccactgagctctgaaatctttgagaatggggtctttgtcttgttcctctttgtcacctcagtgctcatggcagggcctggcacatagtaggtgttcagtaaatgtttattgaatggatgggtatttgtggggaaagggttctgggaaataatgaaagaaacctgatttgggaggtggtcacagatcgcctcctccccagcgctttccccaggtggctcatttaggaaatgagtgtatttgcagggcatgcaggggtagaggcctggcttggagagcggaagagagtccatcagttggctcacctgtaaccactttggggtgtgttgtggagggacatggctgggatctgtgtcctggccgtcgccttcatctgacattccactggagaagagcagccatgccttgtgagcccacgtgctaagctttcgtgctctctacgtgagatcagagcttagggaggttcccgctctgctttcttagcccaggaacaagggctgtctgcttgttacttttgtagaaagaagtatctttaataatcgggagcaaaggagcctgggattaggtgagtgtttctgtggttgatgttgacgaaataatatcaggagtgtgtagtgtgataggatgctagacatggggactccgtcagcagtgatttatttttattgggacttttggtgcatttatgtgccaaaccaatgagtttatagtttactgtaggaagaccacagcacgaactacagcctgtgggcgtgtggcccaagagccctgagctaagaatggtttttacactttgaaaggattgtgaaaatacaacaacttgtgacagagaccacatagtgctggcaaagctgaacgtatttactctctagctttttacagataaagtttattggcaccaccatgtcctccttccctgggctgtgagtggacgtgaccaataaactgctgatgatctcatctgtgctgtgtcgggtgtcgtggtgtggccacccccagagccctagggcaggactccctccgtcatcaatggggtgaagtcgaggtggatgaaaccggaagtggcattttccctatgcgtagttacatttattgatgggtgtttgaaagctgcacctgactcacattaatattatgtaataacttaatcagctttggagttttacaccttactttaaaaaataccttaacagtttttctttctaggtaaaagcagcgtttaatgaagaaactcattcttacgaaattagaacgacttcacgttggagaaagcatgaagaggtattcatctgttacggccctcacgataatcaacggctgttcctggaatacggatttgtttctgtccataatcctcatgcttgtgtttatgtctcaagaggttggaatcaactttgttcttaacattaacactatataatttttttccccatttggagatgtgtattttcagttttaataaaaatatcaaaaccttaagactgacatacatatcactaattttcttctaggtaggcctagccttactcttactggctgtaatttcagtgttgaagtaaaaacaacgaagttttgactgatattttgagaagttttcattgcattgggtcagaagatagaatggaagaaaaggaaaactgctaaggaaataaatacagtattaaaggatggaaatgtttatactgagacgttgtcactggcactaaagaaaataggattagagagcaatgaataaaaaatatttattaagcacctactgtgggtaagacactgtgttaatcacagagataaatctacctatagtccttgtttctggaggttgttgccatggtgagatttgatttcatgtatgttcttttgtgatctattaacctagccatcatcattgattttattatttttgagtcagagtcgcactctgttgctcaggctggagtgcagtggtgtaatcttggctcgttggaacctccgcctcccaggttcaggtga

SEQ ID NO: 27374 - DNA, 2300 bp, Homo sapien
tttaatattgcttaggtggaggtgagtgcttgtttagctgctagagaaaaagaaaaaacttgtaaccattagaacagaatttattcttgaagtgacttaactctttcctggaatggccttaggtcttgtttataatttttgtatcttattgccacaaaaagtctgttccatcagtctcatggtctctattttaacatcaatgctggccagttgtatctaaactgtaaaagagagagggtataatgaggcatgtctgacctcacattccatcagggctgggaactaagtttctaagtttttttctggggccatcttggccaaaaggggttccattcagtcagtaggggcttaggatttgtttagtttacagctgttagaaactatgttagtgtttaaatcttttagtgttggggggcaggggtgaataaaatcatttgtgtttagaatctgtagtttaaataggatttgtgctccgtatgctgagcgccggtccactgggcccacttttctttctctatactttgcctctgtgtctcttttttttctcagtctctcatcccacccgatgagaaacacccacaggtgtggagcggcaggccaccccttcactatttacatagtatttacattgtattagatgttataagtaatctagagatgatttaaagtatatgggaggatgtgcataggttatatgcaaatattacaccattgtgaaagttgcagaatcaaaatggagtcacttgtgtcaaaaccctgataaatgcagctggggaaggccttgaaggaagggttctcatgcactacgcctcataacaagaattgtcacaaaagaccctaaccttgcagaaaggcccaatcttaaacacagaaaatccttctgcaaggacatctgtccagcaactttggactgatgctacctttgttattcattcttttagccaaagataattgatttaaagcaattcatataatcttcattttccttttaaaaacatctccttgcctcaacctcccccaaaacgcacacagtttactatggcatgcatattcccattgcaatgctactcccagataaatctcattttcttttagggagcctcttttgttacttaggtttacaccattgtatacaagggacttgagcattctaattctggtatccgcagggtcctggaaccattcccccacggacactaagggacaactgtacttgtttttcatgacagaaaacatgtttaggagtactaattttttttcccccatagaagatttccatagaagggttttggagagagacaccacaggaacatgctatcagcatgatttcttcctgatgttatccttgaccacccggtaaggtactgtttgccaggtttctccactgtagtccccaacaccattccaggctgtactctttggaatcaagttactaggcatagcccataatcaaagtgggggtgggtggggcagaaatcgagctcccgctattggaagaaggggtatttagatatattatttagaattttcctgtgaggcgggtcctggggccagaatgaaacggtggaatgggggcggggattggcgagcaaagtgactcgacccggcaaacccagcctggcaggaaagcccgaggtctgggcgaacagggccgcgcgccctaggtggtttaacttcgtaaggaaagactccgcaggccggcttttcagtgcgcagcttgctcgcctgcgggttactgggttttctgacccctgactcgacgtaggggttatggggctgtgggtgtgccgacctcgtccccgactgtactgggcgttggcggcgagtccgcgaacactgcgcatgcgcgagccggaagctgccgcccgcggcggaaggggcggacccgggagactgaggacttggattgcttaaggacaccaggcaggcgcgacagccttcagcctctccctctgcagttttggccggttcctttaacttgccttcatctggggctgtttggtatttccacgtgccttgggcccgcccactgcagcctccatcttggaagcggccgccggcgcctaggtgagctagtaggacttccgggtcgggcctccagttgcccgggtaacgggagcagagtcggcggggtgcgttccttagtctttcattcatcagcgtaaaaagaactgagtttaggtcgcaggtcccctccagggcaggcattatcgtgtgcgctgcagtaacctctcatcttgtggagtcctacacttagcgcatgttgctccggcgcgctgcgtaaagctgaggagcctgag

SEQ ID NO: 27375 - DNA, 2300 bp, Homo sapien
gatctgcccacctcggcctcccaaagtgctgggattacaggcgtgagccaccgcacctggcctaggcggttttttattaaggtgcactttagaatgagggggttgtccaagatggtgatgctctgtcattgtggaacagggggttagttaacatctggtggtgcacaagcggtaattgttttaatattgcttaggtggaggtgagtgcttgtttagctgctagagaaaaagaaaaaacttgtaaccattagaacagaatttattcttgaagtgacttaactctttcctggaatggccttaggtcttgtttataatttttgtatcttattgccacaaaaagtctgttccatcagtctcatggtctctattttaacatcaatgctggccagttgtatctaaactgtaaaagagagagggtataatgaggcatgtctgacctcacattccatcagggctgggaactaagtttctaagtttttttctggggccatcttggccaaaaggggttccattcagtcagtaggggcttaggatttgtttagtttacagctgttagaaactatgttagtgtttaaatcttttagtgttggggggcaggggtgaataaaatcatttgtgtttagaatctgtagtttaaataggatttgtgctccgtatgctgagcgccggtccactgggcccacttttctttctctatactttgcctctgtgtctcttttttttctcagtctctcatcccacccgatgagaaacacccacaggtgtggagcggcaggccaccccttcactatttacatagtatttacattgtattagatgttataagtaatctagagatgatttaaagtatatgggaggatgtgcataggttatatgcaaatattacaccattgtgaaagttgcagaatcaaaatggagtcacttgtgtcaaaaccctgataaatgcagctggggaaggccttgaaggaagggttctcatgcactacgcctcataacaagaattgtcacaaaagaccctaaccttgcagaaaggcccaatcttaaacacagaaaatccttctgcaaggacatctgtccagcaactttggactgatgctacctttgttattcattcttttagccaaagataattgatttaaagcaattcatataatcttcattttccttttaaaaacatctccttgcctcaacctcccccaaaacgcacacagtttactatggcatgcatattcccattgcaatgctactcccagataaatctcattttcttttagggagcctcttttgttacttaggtttacaccattgtatacaagggacttgagcattctaattctggtatccgcagggtcctggaaccattcccccacggacactaagggacaactgtacttgtttttcatgacagaaaacatgtttaggagtactaattttttttcccccatagaagatttccatagaagggttttggagagagacaccacaggaacatgctatcagcatgatttcttcctgatgttatccttgaccacccggtaaggtactgtttgccaggtttctccactgtagtccccaacaccattccaggctgtactctttggaatcaagttactaggcatagcccataatcaaagtgggggtgggtggggcagaaatcgagctcccgctattggaagaaggggtatttagatatattatttagaattttcctgtgaggcgggtcctggggccagaatgaaacggtggaatgggggcggggattggcgagcaaagtgactcgacccggcaaacccagcctggcaggaaagcccgaggtctgggcgaacagggccgcgcgccctaggtggtttaacttcgtaaggaaagactccgcaggccggcttttcagtgcgcagcttgctcgcctgcgggttactgggttttctgacccctgactcgacgtaggggttatggggctgtgggtgtgccgacctcgtccccgactgtactgggcgttggcggcgagtccgcgaacactgcgcatgcgcgagccggaagctgccgcccgcggcggaaggggcggacccgggagactgaggacttggattgcttaaggacaccaggcaggcgcgacagccttcagcctctccctctgcagttttggccggttcctttaacttgccttcatctggggctgtttggtatttccacgtgccttgggcccgcccactgcagcctccatcttggaagcggccgccggcgcctaggtgagctagtaggacttccgggtcgggcctccagttgcccgggtaacgggagca

SEQ ID NO: 27376 - DNA, 2300 bp, Homo sapien
ttcccacaaaaaagaatggaatcatttcctttgcagcaacatggatgcagctggaggctattgtgcaaacgcagaaacagaaaaccaaataacgcatgttctcccttataagtgggagctaaacatttgagtacacagggacacaaaagatggtaacaataacaccggggattccaaaagggggagggagggggtaagggttgaaaaacgaactattgggtactatgttttctacttgggagcattagatgcccaaacctcagcatcaggcaatacactgatgtaacaaacctgcacatgtacccccgaatctaaaaacaaaaacaaaaacaaaaaagcccaaaacacagttccatggtatatattaaaagaaaagatgttggaaaataatattgttaaattatgaactgtgaggttctccaggtcgttcctttgattagttaccctcacggatctgcttgacactggctgtgttcctcttgcattttatgcttgtttaggatattcaataagcctttctacagcggtagaccatggactttgagacctggaatcaatctgtggcttaggtgcttagtagttatttaactcaagcaatttactgaattctgtgaaagataaagccagacactaaggtggtaaggacagattttagtcaataatgaactcctgtaataggaaagagggtccagtggaaacaaactttcatttgtacagagatgactgtgccttttaaagggagagtgaaggatcaggaagtgggaggagttagggaaatgacaaattgccaagggttgctcagtggaaatgttggttaggccagctgtgtctgttagctggcaattagcaaagttgggattctattctcccactataaagactgaaagacagaggccgtatcatttctgatgattacatttcagaggaatggctttcaggtccttgagaaagacattctttcttttttttttttttttgacacggagtttctctcttatctctcaggctggagtacagtggtgcgatctcggctcactgcaatctctgcctcccagtttcaagagattctcctgcctcagcctctcgagtagctgggactacaagcgtgtgctaccacgcacagctaactttttgtatttttagtcgacaaagggtttcgccatgttggccaggctggtctcgaactcctgacctcaggtgatccgcctgccttcacctcccaaagtgctgggattacaggcgtgagccaccacacctggccaagaaacactcctgggtgggagatacatctcaaagggaccgagagaattcacagctctaagccgtttttagtaaatgctttaagaaagggcagtcaggggcctattgtcagaagttggttattacaaacacattttttcttttttttggcagcttaaacattctcaggaaggggctagagtcatcctaggggtgatagggtcatcctagccatgcagccttgagctgtgttaaaaaaaaaaaaaaagaaaaaaccaaaaacaactcacaatgtataaatttagaaaaggaggccggacgcggtggctcacgcttgtaatcccggcactttgggaggccgaggcaggcggatcacgaggtcaggagatcgagaccacggtgaaaccccgtctctactaaaaatacaaaaaattagccgggcgtggtagtgggcgcctgtagtcccagctactcgggaggctgaggcaggagaatggcgtgaactcgggaggcggagcttgcagtgagccgagatcgcaccactgcactccagcctgggggacagagcaagattccgtctctgaaaaaaaaaaaaaagaaaaggagatggggactttatttcttctaaacgggtacaacctgcaaggtagccatcctggaggctggggagctgactccagcagaaacagagacgggcactttgaagggggaggctttgaggcaggagctttagactgaacaggttggctaaacttacacattcaacagtttacaggaggagctgtgaatattcatgaaggtggtcctgatacatgcatattgaagaaacatgcatgtaacatacgactcatgtatattcactttgggatggtgacttgacatttaaatgtattaccattaggccctatctgtcaaaaggtctttcaggacatcaaggcacgcaagtacacagcctctgtaaaccagaaccagtccattccatagtccatgatcttcttatcaggagaaagttgttgaaatcagtctcttgtctaatcaaagctgtagttatggcttgtgtg

SEQ ID NO: 27377 - DNA, 2300 bp, Homo sapien
gataaaattatataggactaaatacatacacaaagtacacatcaaactggggaaatctgagtatgattggtggactgttttgttgtcaatatcttcactgtgatgttgtactatacttttgcaatatgttactattgagtgaaactgagtaaagggtaaggaatctctgtattatttcttacaactgcatgtgactctataattagctcgacaaaaatttcagttgaaaaaaagcaagggtctttccttgattattaacttgttttaaagcaactgattggaaacctaccttgaaattgcaatgtaattgcaatctatttaaagcagtggtgttcaacagacctttctgcaaggatggaaatatcctaaatctgtactgcccaatacagtgaccactaacacatgcacatattgagcactggagatgtggctagtgcaactaaaaaactgaattacaaattttgcttaatttgaatttatgtttaaatggccacctgtgatagtggcaacctatgggacagcacagaaatgaaacttgaccttattcccaattcccttgtaagtaggaaggaggaacactcactttgaaaccatgcaattgtcccataggacagatgtttatggtctctttttttttccttttttttttttttgagagggagtcactctgttgcccaggctggagtgcagtggcatgatctcggctcgctgcaacctccgcctctggggttcaagcaagcaattctctgcttcagcctcccaagtagctgggattacaggcgcctgccaccacacccagctaatttttgtattttttttttttttttttttttttagtagagatggggtttcaccatcttggccaggctggtcttgaactcctgacctcatgatccacccacctcagcctcccaaagtgctgagattacaggcgtgagccaccgcgccaggcctggtctcttttgaataaacaaattgaccctcccagtctaaaaacttgagaaatttacatttgtcttatctgagttcctttctcagggaactagccatcagtcctcccagatagcaccaaggaactgaaacttatcggatcaccacatctggaaaatcagacaccagacccctcacctgcaacaattgcctgatgcctgttgacccactcctcttcatctctccctaactcctgctattttcccacatgcagttacatttcttccctgctatatcctaattttaatcagttgagaagatggatttgagactgatctctcccccctaggctgtagcacccaaataatgccttcttccctgacaataatggggtctcagtgactggctttctgtgctgtgaaccaccagacctagaccaaactcctggcatttctctaacaatttcccaccactgaactaagttataaattctgaggatggatccctgtttcttcattttaagatggggattaaaaggtacatcctagagtgttattgtccgtgtaaaatagggctgtgaaaccccctacacctatgcacagataaactgatggccctgcaaatgcccagagaagtaaccttataaagatttagtgaatgtttcccaccattattggaaaatctggctaagtcagtagctttgttttcatatacttagggggaaaatcaacaaaaacttgatgccctgttatttccttccagtttcttctgcaactctagctccaaagactgcagttcctgcagtatttttttttttagaacaccaggaaaaaaagaaaaaaaaaccatgcaaatgtactatttcttcaaacacaactaggaatgattgaacagctgggagaatatgaagaaaacccctcagagaaccaagggcaagcagtgagttcagatctaggcacatggccactaggaatggttcttcactgccacgtgggcagccaacagccagtagctagagaccagcctcggtcttcggcctgcgggttctgcaaagtcaggctagctggctctccgcctgctccgcaccccggcgaggttccggtggggaggggtagggatggttcagccccgccccgctagggcggggcctgcgcctgcgcgctcagcggccgggcgtgtaacccacgggtgcgcgcccacgaccgccagactcgagcagtctctggaacacgctgcggggctcccgggcctgagccaggtctgttctccacgcaggtgttccgcgcgccccgttcagccatgtcgtccggcatccatgtagcgctggtgactggaggcaacaagggcatcggcttggccatcgtgcgcga

SEQ ID NO: 27378 - DNA, 2300 bp, Homo sapien
atagaaaagactgtaggatggaagtttaacattctctaagaaggtgcctgttctgccttgagaaggcagtagtatgtctagaatgactctttttaacccactgtcaatccagtcctgtgaatttcttaggcaaggagacctctggctttaatcacactccctagttctctgtcagtctctgaaccaagacacgtagggtttttttgagccactttttgggccttctgtaaagtgtgaaataggtatgcctgaagacagaataaagcagcacggaattgttcctcaaaggttaagatttagggttttaaattgaagctcacattttcttttcttttctttttctttttttttttttgagacagtgtcttgctctgttgcctaggctggagtgcagggacatgatcagagctcactgcagccttaaactcccaggctcaagggatcctcctgcctcagtctccccagcagttgggactacatgtatgtgccactatggccagctaatttttaaattttttgtagagatgggatctcattatattgcccaggctggtcttgaactcctggcctcaagcaatcctcctgtcttggcctcccagagtgcagggaatataggcacgagtcaccatgcctggattctttatcttgaattaagagatttgaagactttttttttttttttttttttaatgaggggaaatcaatgggccaaagggacccagagaaatatcaggaactttcctgatagttggcatcagcttattgggttggcacatctctgtctgatttgtgggcagtagccaataagcttttgtagcataaatccactatcagtcactggaggccacccaaagttccattgtttgccaaaataccccatgatgttgtgtaattgtcctacagctttgacacaagtcaatacaagtctattccagcaccagacagtgaaatgcagacatcagcacatagttccatagtcaaggagactaagcgtaagtagaaaccttccttaaagcatctgtgtaaaagcagaatcttttacttgtacagttagtcccatatcagttggttgcttacaagctctattagtaagtttggttgaagtgctaatttctatgaaaggatacccaagtttcattttaacggagacagaaaattcccacttttttgcatgacgttataaagagtacttggtttttggccatctggcttgttatagtatttgccgtttatacaaccaactgattcactacaagggatcagtactaatggaaactgggaaatgctcaaagggatgttgtatcagtccattctctccctgctgtaaagcaatttctgagactgggtaacttacaaataaaagaggtttaattggctcacagttccacaggctgttcaggaagcatggctggggaggcctcaggaaatttacaatcgtggcggaaggcaaaggggaagcaggtacaacttacatggctagagtagaaggaagaaagaaagggaggagaggccgcacacttttaaacagccagatctcatgagaactctatcacgagacaacactggggggatggcgctaacccattcatgggaacccgcccccatgatccaatcagtcccacgaggacccacctccagcactgggaggattattgacatgagatttgggtggggacatagatccaaaacatatcaaatgtggacataattccaatggttggttaaattatgtttaagccatggagtcacgaggggtagtacaaaggcagtattaggaacaggggcccacatgggtgacatagttaggagataacaagtagctatttgcaatccagaaccttaaaccagcagagaaagggaaaaaaaaaaaacaaaaaaaaacaaaggtaaataaggaacgaaagtaactaaaaacaaaggtatgtaaggaacaaaaacgtgaagacacgtacagcagtcagttgttctaggcatttgagatctcgttctaatgtctcgggaggtgaatcagttttctcagaaatgttgactattttcagtgagcagcaaaaactgtgcagccggagggccctatgttaaaggaggctccaggggtaaggcgacagagggcttcaggcacgcggctgctgctgccactgctgctctgagacaaggtggatgagtctgctgccggatcaagaaaaaggttgtcatagctttttgcttctaggctccagagaactgggtaaaaattggaagcccttctgtatgagtgagcagagaggttcatagttagctaaggccagagtgggaagttgttg

SEQ ID NO: 27379 - DNA, 2300 bp, Homo sapien
caaaactccatttcataaaaataattttaaaaaatactattatatgttccaaaattacatatgatttctaaaattctgatgtctaagtatatgctatcaatcataattaagggtaaagttattgtaaaccactgaaatgaataaatttgttaatcatgttgttaactataaatatcctggaaatcttgtcattcacagacaattgttatcttgctttgttccttctcaaaagatggtttataatcaagctatattaaagaatttaacaggcattctcaaatacaggtttttagtagctttgaagattgtaacattggaatagagaatgtatgggactcataatgagcttacatgttcacaaatatcaagcaaaacaagatttaactagacggacagcactcagaaggttaaagcaactttttgactcttgcttggaatattgctgatccttgttttatttttcagagtgaaggaaacttactttgaactatttatggcctttaataattgagtaaggtatactactgtaaacaaaatttggagtgtgtttgtttttctctgcctggttcctctagaatttggaaactatctgtgagtactcttaacttatggcaatatttgcatcagtgcaataagaatccatttttctttgtcaacaggacacaattgaaaaaactggttattttaccaaggctttgactgaaagggtgtgtttccctttaaggaatgaagcttgacatgcagacccaataaaagccccttaaggagaactggcctcataccttgtctacacagttcctgcacaaggttcctaaattgtggtcagtaaagaatgtcattttctaacaggtccagcagctccaagtttatcttagaccctcaagaggagaggattacccaactcacaggtatttgaggatacaaacccatggctgggctcagctttaaagatcttatctgaaattccttgtggaacagagtttcatcaaagccaatccaaaggcctacatagaaacaaccattcttgctgcactttatgcaaataatcaggccaagtataagactaaagtttattctacgaacaacccacacagtcctatcataatttgtttttaccaaaaatgaggactggagagagaaattgttctccaaagcttatcatacatttgtcattaaatcctagtctcattaattgtttttaagcttttcgcctacattttagactaaccctgcttattcctgtgaatcaagtggtgatctcctgcagcttggaagaatcaaagggggatggttaacataaaaacctggatcaatatgctagttctggacaattctcctgcaaattctgccaggtaatgaaagtgagtagggtgcccataacccagaggtttctttgtttgggaaaataaaaccaaggaacttcatagacctccccaaaaggaaattctatatcttaggttaacacctctagtaaagtagaggaaaattgttagatatgagttctaaatttctcttcaaagaatcaatatgtcagtatgttcaattctttgccttctacttataaacttaacttcctcataaagcaacctttttccattacctgctccacccggactcattctgattacctgcttctccctgactcattctccaccctgactcattccgatttctcactctgccataaccatttttcctgccaaaccgctcaccccgtcactctctttaaattagccaattggaattagtttagtttgtgcgatctaaccctagccaatagggaaatgacacagcatcaggggccacgtgcatcagggataaggaccccttcccctcctttgtccaagtgtgcgctcaccatcgctccatctgtcagggcgcacccttttatagaagaacatggccttgcagagaattaaaaagaaaattttatatttgagtgctatttcttttgcggcaccgaaactttataacaatttcagggctcacccttgattacatttcccccaggggcggtctccggttctctctcctgaggaggcgcaccccgcccccttgtggtggcctcaggggtgagaaatcaggaccacccagtgcgaggaataaccggagctctctgcaacgctgaaagaaactggccagcaacctagcttaaaggatcctcacatctgcggcgatgactctgtgcacagaccaaggaaggagaagccgccggagccagtaaagtactcccttggtggtcaaattccggagggctaaatgtgtgtgtgcatgaatgatcacaaataaccctacctgcg

SEQ ID NO: 27380 - DNA, 2300 bp, Homo sapien
ccatccgccacgctcatgtgctgattcaacagtgtcatatccgtgtccgtgagcaggtggtaaatatcctgttcttcactgtccgcctggattcccagaagcacattgacttctccctctgcttccctattggggtggccaaccccagccacgtgaagaggaagaatgccagcaagggccagggtggggctggagccagagatgacgaggaggaggaataagcctgcttgtcccctcctgggctggtggattgtctagttttcctgccaaatgataaaacaggatcaatgctttatttaaaaaaataaaattatgaaaaacagaaattaaggtcactcaagaagaactaggccaggcacggtgacacaagcctgtaataccagcactttgagaggccaaggagggagaatcgatgtagcccaggagttcaaccagtctgagcaacacagtgagactcccatctctaaaaacaaataaaaataaaataaaataaaaaattatccaggcaggccgggtgtggtggctcacgcctgtaatcccagcactttgggaggccaaggcgggtggatcacgaggtcaggagttcgagaccagcctggccaacatggtgaaaccctgtatctactaaaaatacaaaaattagctgggtgtagtggcagcgcctgtaatcccagctactcaggagcctgaggcaggagaatcgttggaacccaggattcggaggttgcagtgagccaagatcgtgccactgcactccagcctgggtgacagagcaaaactccgtctcaaaaaaaaaaaaaaaaaaaaaattatccaggcatgactgtggcacacttgtagtcccagctactagggaggctaaaggggaggatcacctgagctcaggagactgacgctacagtgagccacgactgcagcactgcactccagcctgggcgacagagaagaccctattaaaaaaaaaaaaaaaaaaaaaaaaaacagaaatagaaagcctaaatagccccatatccttaaaacaaggttccaaatgatctttttttttttttttgaaaagtctcactctgttgcacaggttggagtgcagtggtgcaatctcggtttactgcaacctccgcctcccgggttcaagcagttctcctgcctcagcctcctaagtagctgggattacaggcacgtgccaccacacccaggtaatttttgtatttttagtagagatgggggtttcaccatgttggtcaggctggtcttgaactcctgaccgcgtaatccacccgcctcagcctcccaaagtgctgggattacaggtgtgagccaccgcgcccggaccaaatgatctttaggagaaaaaagaaggaaatactgggggaggcacagtaggagatcacagcaggggcccacctccggaacctcaagtaaggacttgagagagaaggtagagtcagagtaacagagacacaggcgggttagccagctctgcatggaaaaggctgagtcgtgatgatgtcatggttctccccaaatctcaaagtcactgatcaaacaactcagtttacactgaagacgatggatgagactctaattttgtgcccacagcttgacacacctttgggaatttggtttaactttctttgccggtacacagatctgtgagaacatatgatcaatccagatctttatagatctatatcctccctggacaaacctaaatgcagacacttttagcacccgtaggagttaggtaggattaaataaaaacattccctcccacttgggggcacattcactgggaatcccagagcgatgtcgcctgcccacacctgctaagtgcgctcacagggcatctagttccctctcttgagttccttttaagcaagcaaggcaacctatgtccagagaagcagttactgtgtctaagtaagtcactgcatcttaggaaaaagcaaacattcgcattttgcagtgcatgatgggcgcacacccaagaaaattactcagcacttgtttttctcactttggggttttcccaaaataatttcttcagtccagttgccaagaatctggagcccccgactgacccatcaaggtccgatttggcttcggacacctcgcagatcaccccgcggctcagagcccggatcctgaagggcgcagcgtgggcagggggcgggcccgggagttggaacagagggcacagacggcccctcctcggaggggagggaccggagccggggcctttttctttaagactcgcagcactggatcccagaacttagtctgcgcggcggcattgacactag

SEQ ID NO: 27381 - DNA, 2300 bp, Homo sapien
tctagactcatcagtgaagctggacctgccaagcactggagaccacaggactttgtagtcagtcctagatatgatcctggctttagctctgagatcttgggcaagttaattaacctctccaaacctttatttcttcgttcgaaatatgacaaatatgacattgattcctaccttaaaggatacagtggtttcaatgtgtcccctaaagtcatgtgttagaaacataatccccaaggcaacagtgttgcaaagtggaacctttaagatcatgagtgaagactctgccctcataaatggattaatacctttatcaggggagtggattcctgatagaaggatgagtttagtttgcaccttgtgagcattctcttgcccttctgccttctgccatggtagaacacacaagcaggcccttgccagatgctagtgccatgcttttggacttcccagcctccagaattgtgagaaataaacttactttttttttttttttttttttgagacaagtgacagagtctctgttgcttaggctggagtgaagtggcatgatcatagctcactgcagccataaactcctgggcacaagtgatactcccacctcaacttaccaagtaggtagaactaaaggtgagcatgatcacacttggtcaatttttattttttgtagagatagggtttctctatgttgcccaggctggcattgaactcctggccttaagtgatgctcccactttggcttcccaaagttataggattattggcatgagctactgtgcacaggcaaatttactttctttataaattacctagtttgtgatattccattatagtaacacaaaatgaactaaggcaaaggactatagtcagaattacctaaaaccatgttgggaaagcattaagcaggacatatggtctaatttgccataggttctcaattcatgatttttttctccttttgattccaagcccaattgttttttttcctacagcatagggtgaacccccaacatcggaggcaggtctcagttaatttagaaagtttattttgccaaggttgaggatgggcaaccatgacacagcctcaggaggttctgagaacttctgcccaaggtggtcagggcacagcttggttttatacattttagggagacatgagacatcaatcaatatgtgtaagatgtacattgggccaatccagaaaggtgggacagctccaggtgaaggcaggacagctggaagcctggaggggacttccaggtcataggtaggtaagagaaaaatggttgcattcttttgagtttctgatgagcctctccaaatgaggcaatcagatatgcatttatctcagtgagcagagtggtgactttgaatagaatggaaggcaagtttgccctaagcagttcccagcttaactcttccctttagcttagtgattttggggccccaagatttattttcctttcacaatactataaaacatgttaatgcacttctattagttaggttccttttgattgcaagcaacaactacccaattcaatatagcttatgaaaaagaaaatatattttaaggatacaagggtatcttggagcatctctgagaattcaagatttcaggaatgatctgaggacagggaagggagtttctctttgggccacttcttttcttttctttttttttttttttttccccaagacagggtctcgctttgtcatccaggctggagtgtactgatacaaacacggctcactgtaaacacctcccaggctcaagcaatcctcctgccccagctccccaagtagctgggactacaggcatgtactgccacacctggctaatttttgtattattctgtagagacagggtatcaccatgttacccaggctgttctcaaactcatgagcgcaagccatccacctgccttgatctcccaaagtgctgggattgtgctggcaggagccaccacacctggcttaaatgctcctcttgatggttggcctctttctctggcaatggctggctccctctgctcctcaggcacagggggtgagatgcacagtaacaactctgatccaatccagctggttctttttagaggaaaaacctatagctggagcagtcaacagaggcaaggtcaccttgtggcagctgcagctgcaaacatgggaaggaagcagggggcaggggagggcaggagatcatattttggaagagggtgctgggcagaccatccaataagggctaatggcagcccttctctaagaatgagaaatgtcattctgaccagcagttgacagtt

SEQ ID NO: 27382 - DNA, 2300 bp, Homo sapien
gcagaaccagattcgagctcaggtcagtgagatagtacaggtctccactacattatgctactgataaaattattggttcagttctcaaatagctcttttgccaatgatcttgcaatctatcctggatatgtctcctgtgagagattgaagagttcagtaaaaccgacagttatacaggctataaataactagacacagaaagaagtaatcacacaagaagtgtatctgctcagataccttaaaatcgaaaatgtcagcaagaaatctctctctttacccatttttaatttcatagaaaatcaaattcagggttgggcactgtggctcatacctgtaatcccagcactttaagaggccgaggtggaaggattgcttgagcccaggagtttgagaccagactgggcaacataatgagaccttcgtctcaaaataataataataataataatttagaaaaagaaaaaaacaagttcaagagaaaaaccaactgccagatcccaaaaaagttcactgtaaatatgtctatatgaaggaacatttctcagttcgatgaaaatgaggacagtgaccctaccacataagcaaaaacatttagcaacagataacagatatgtactattagtaataaaattgataatgatccttagtccacagcacagaaacactcatcaccaatgggcttaatcaactctgggacacactgttttgaatgtggtctttcaaagtggcaattaaattgtactggaaaaaatttaagccacctaatggcagcagacttgtggggccggggggacggtcttccctcgccttaccaaaaaaatcctagcaaagtcttcccaattgtggggctgcagtcgcgagtgtaaggcaacactgcgggtaacagtccccgcgagcagccgggaaccctgcagggcgcaggggccaggctggcagagcgcgcactgcggcccggatcccttctcctggggactggctggaagactggggtcttccccaacgaggaaagcccttagttctcacaggtctgcgtccccagcctcctccccagccagggcaccagcaaacaaaggctgagcgtctcttcgtgggccggccccgggagggcgcgcgggccgcgacccacccctggacctgcacctgccgccccgctcggcgagggcgtggccggcatcatatcctccgcgccagggtcgggtaaccctaggggaccccacccagtctccccgctgccctcccggtctccggccccgagctctccgcccccgcactgcagcagagcgcgccgcaggcccgggccgcgcgccggtaagccacctgcaccccgggccgccccacggcgccgcccaagccctctggacccggagaaggacccgcgggccggcggggaggagatgcccggctcctccggcttcgcccagcggctgaggactggacgccggacagggcgcaggcacgacttaccgcggcagtggccctgttggcgggcgcgctcacgtgcggcgcggaggagccctccgggctgggggagagagactgggcagggctgcggcgcggccgggagccagaaccgccgaggaagagccggagaaccagcggcagcggctcttccccaccgcgcgggtcggggcggagcctggaagccgggcctcggcgcttggggcggggctggaaggcggggctggacgcctggaggcgggctcaggggcgggacctggaggtgggccataggcgcgcgggggcggggtttccgcgggcggggcggaactagaagacggggcctgaccgaaggaggcgggatcaagggcggggcctggaagtgggctgtccctacaggggcggggcctcggctggccgggctaggctggaaggcggggcctgactcatgaaggtgggatcaagggcggtgcctggaggcgggccataacaacaggggcggggcctcgacgggctgggctggactgaaaggccaggcttgactcacggagtcggggtcaggggcggggcctggaggtgggccttagacgcgggggcggggcttcggcttgggagcagggcttggggagggccccggcgtactggggcggttcagtcgcctcagccgcggtgtgagggagcgggagtcttccttagcttctccgccatgggtgtcgcttcgtagccgggctgctccgggaaaggcctcgtacaggtgagcggggcggcgttcgcgcctcacctggggacccccgacacaaccgagtggaaggggacattggtcagtgcccgcccaaggtcgtccgcgcgtgtgtcggccctcg

SEQ ID NO: 27383 - DNA, 2300 bp, Homo sapien
tgctttggcctcccaggatttcagatgtgagccactccgttcagctggtgtcccttttaaaagagcactaatcccatgacataatcacctcccaaagtcttcactttcttttttttttgagatggagtcttgttctgttacccaggctggggtacagtggcgcagtctcacctcactgcaacctccatggctcctgggttcaagcaatgctcatgcctcatcctcccgagtagctgggacaggtgtgtgccaccatgcccagctattttttatgtttattttttggtagagatgggttttcacgatgttggccaggctggtctcaaacatctgacctcaagtgatctgcccgccttggcctctcaaaagtgctgagattacaggtgtgagtcaccatgcccagccgccagggaatgtatttagcagttggtagaggaggaggaaagaagttcagagaggtagatgggaaacaagctctggtgctggaggggccagaggagtgtgtgggccaagtggaggctgctaggctgcttaaagaagtggtctgccgcagagtgctactgagaggtaaagtgaggaaacagaaaggacctctgccattggtgacttgaaagtagtggtggttgccaggcgcggtggctcacgcctgtaatcccggcactttgggaggctgaggtgggcagatcacgaggtcaggagttcaagaccagcctgaccaacacgtgaaaccccgtctctactaaaaatacaaaaattagctggacatggtggcacgtgcctgtagccccagctatttgggaggctgaggcaggagaatcgcttgaacccaggaagcagaggttgcagtgagccaagattgcgccaccgcactccagcttggtcaacaagagtgagactctgtctcaaaaaaaaaaaaaaagaaagaaagaaagtagtggtggcctggtgaagattggattgggtctggagtgatcggaaattgaagtatgagatttcatgaaatttttataactgtactggcctgtaaatgaaagactcaagcttaaagaacgtgttgtaccttcagttcagtttcttccatttaccatatttgcctttttatttgattgactacatccaacttgtttagcaatctacccagctaaccgcgttcactcacgtttaactatatagcattgctctgtatttgtctttcctttcagactgagcagtactggtgaaatactatttgtcctcatatatcaattaggattgtggttggctataacagaaaacctgatagaacagtggcttaaacaaattagctgttatgtgcagaaaacatacaccagacattacagcatccggggttggcatgtggtgccttcatcatgccatctggggctgcaggggctctgtcgttccactcagccatcgttagtttgtgactttcgtgcatgtttcatgacaggtgcaagatgtagcttcactccaacatcatgcctttgttctaggcagaaagaggaagaaaggaggacaaaaggcttatgccaggaagtctgcctcctttccaacagccttttgacccacagcttctactgacatctcattgtcaagagctgtcacatggccacctagatgcaagggagtctgggaattacagtgttaccatgaacaaaaccagtgctcctttagtacagaaaaggagaacaaggcatgttgggtagatgcctgccacactttaaataaaacagccaggcatggtgatacatcccaatagtcccagctacttgggaggctgaggtggaaggaaggatcacttgagcttaggaggtcaaggctgcagtgacccgtgatcgtgccactgcactgcagcctgggtggcagagtaagaccctgcctccaaaaaaacataaaaagtttagaaatgccatatgatgggaggggctgtgctcatttaaaattaccggctggcaacaacatatagtctagcagctttggagctttgatcctggaattaattttgtcagttacttggagccctagcacttctatgctgtctgctcctgtttcctgttctcccccagaatccacgagggcgggaactatttatctttcatctcccacagtgcctggcccagaagccttgctaaatatttgaacaggattgcccagtgagtttgtgcacagttgtgtttgtggacacgtgtcttctgtagctctgggttgggaatgatttgtatccccaaatggctctctcatttggttattttttgatttgcttttagatacttttctgctgtgagaatgtaagatggatc

SEQ ID NO: 27384 - DNA, 2300 bp, Homo sapien
aaaaaagaagaaggattctgttggactcacccaagtttttattaatttatttattattttggtttttggttacccaggctggagtgctggagtgcagtggtgcaatctcggctcactgcaacctccgccacccaggttccagaaattctcttgcctcagtctcccaagtagctgggattacaggtgcctgccatcacgcccggctaatttttgcatttttagtagagacggggtttcgccatgtcagcaaggctggtctcaaactcctgacctcaagtaatccacccaccttggcctcccaaagtgctgggactacacacgtgagccaccacgcctggcctctcaccaagtttttaggtaaagagttcttgcagccgatctgtaaagggctggagtagttcactaggtctccaagctccaacccgtgttcttcccaccacactgcagcactaattctgaaacacaccatcaggaggctctgctttaaacaggaggtgcttgtagctaactgatgaagactccggaagctgaactgtgtgacaccacagacctcatgctgcccttcctgttcatggctgctctgtgaaaccgtagtgtgtcatcagataaaagcagcgaaaaaacaaaaaacaaaaaaaactggttcatttaggaccattataacttttttttttttttaaagagctttaatgataagatttttaaatccagagttaatttatttctattagccttcacttccaaaatcaaagctgtaaatcaggcttggtagagcacctgggttcagggctcaaaagggcacttgatgaaaatgtttttcttgggccgggcgcggcggctcacgcctgtaatcccagcactttgggaggccgaggcggatgaatcatgaggtcaggagatcgagactatcctggctaacacggtgaaaccccgtctctactaaaaatacaaaaaaaattagccgggtgtggtggtgggcgcctgtagtcccagctactcgggaggctgaggcaggaggattgcttgaacccaggaggcgaagcttgcagtgagccaagacggggccgctgcactccagcctgggcgacagagcaagactccatctcaaaaaaaaaaaaaaagataaactattctctaacacagaaaaattctaaaaatgatgctgaaacattgagcaagtttgaaaatgataccattagaatctgtctacagctggacataccaagaccttctgggaaccagttttcttagttgaaaaaagggttgactggatgagtcttctcctccaaatctaagttttatgcattataacatttagttacctaccttaaaaaaaagaatgttgaccctaagcttttgtgtcctatatcattgtttaaatctgtattataaagaattttgctaattcaactctcaactcttttttgagacagagtcttcctctgtccccaaggctggagtgcagtggtgcaatcttggctcactgcaacctctgcctcccaggttcaagcgattctcctgcctcagcctcccaagtagctgggactacaggcattcgccacgatgcctggctaattttttttatttttaatagagacagggtttcaccatgttggccaggctggactcaaactcctgacctcaggttatccacctgcctcagcctcccaaagtgctgggattacaggggtgagctactgcgccccgcccaactctcaactcttactcactgaatttctgtgcataagtccaagaaatgtgacgatcaccaaagccttaaaaaaattcctttttttttttgagccagggtctcactctgtcacccaggatggagtgcagtggtgcaagagctccaggctgaggctccagggatcctcccacctcaggcttctgagtagctggactacaggtgtgcaccaccatggccagataatttttgtagttttggagagacaaggttttgccatgttgcccaagctggtctgaaactcctgggctcaagtgatccttctgccttcagcctcccaaagtgctaggattacaggcatgcatcactgcacccagtgaagaaaattctttattcataccaactcctatcagggacccttgaatgcagaagttgcaagtttcacagaaccaagtattcctgatgctgatcaagatgtgctccctccagcaccatccaaaccctccacatccagtaacggcaggaactgatctcaggcctaatggtgcgggcatccacactggctcttgtgcttgctgacggcccggggaattcttggaatgggtgaggcaga

SEQ ID NO: 27385 - DNA, 2300 bp, Homo sapien
actatgggcacgcaccaccacgtccagctaatttttgtatttttagtagatggagtttctccatgttggccaggctggtctcaaactcctgacctcaggtgatctgtcctcctaggcctcccaaagtgctgggattacaggcatgagccaccatgccaccacacccagcctccagtttgtctttatacacatgtgacatttcggtgaatatccacatccttatggctttgaaagtcttctgctgacatttctgcaggatacatttctgtttttttgttttttaagacggagtttcgctcttgttgcccaggctggagttcagtggcacaatttcagctcactgcaacctctgcctcctgggttcaaatgattctcctgcctcagcctcccgagtagctggaattacaagcacctgccaccacgcccagctaactttttgtatttttagtagagacagggtttcaccattttggcgaggctgatctcgaactcctgacctccggtgatctacctgccttggcctcccaattgctgggattacaggtgtgagccactgcacccggccaggagacatttcttgaaagagaattcctaggaaaaaataatacgtatttttaaaaattgctcccctccaaaaaattaaaatacttaagtttactataacaatgtaactaaatgatcccatccttgaacattctgtaaaacctatccaccttcctttgtctacttttgtctgtaatgtaaaccggactctggtggtggtgtttcatgtgagaattttaggaatattgatctttctgtctggctttaagacaaagaccgccctacagctaatgtatcatagctgacccttctgtctaaagtcatttgtcatcttgtaattttcagatgacttgcaccgttggtttaacaggaagaaaacctctttcagagaggcatgcgcagtgcccgagcctcaggagagcggctctgaagagcacctgcctctgagccagttcaccacagtggaccgtgaagccatttgggccgaagtggagaaggagcccgagaagtacccgctgcgaggcgagctgagcgaggaagagctgccctactacgtggagcttccagacaggacggcccacggcgccccggacagcagcgagcacaccgagtctgcagatacaagctcctgccacacggacagcgagaacacgtcctccttctcctccccttcccacgacctgcaggagctgagcaacgaagagaactgctgtgcacccatccccatggggggcagggcgtaccccaagcgctcggccctgctggcggccttccagtcagaaagcttcaaggctggggccaagttaagcctggtgcgggtggactcggacaagacgcaggcttctgagtcgttctccagcgacgaggaggcggacttggagctccaggccctcaccacatccaggctgctaaagcagcagcgggaaaggcaggaggccgtcgaggccttgttcaagcacatcctgctctacctgcagccctacgactctcggcgggtcctctatgccttctcggtgctggaggctgtgctcaaaaccaaccctaaggaattcatcgaggctgtgtccaggactagcatggataccagctccaccgcgcacctcaacctcatctccaacctcctcgctcgccaccaggaggccctcattggccagagtttctacggaaagctccagacccaggtccccaacgtgtgcccccactctctgctcctggagctgctcacctacctctgcctgagcttcctgcgctcctactacccttgctatttgaaggtctcgcaccgagacattctcggcaaccgggacgtgcaggtcaaaagtgtcgaggttttgatcaggataatgatgcagctggtctcagtggccaagtcttcggaagggaagaacgtggagttcatccacagcttgctgcagaggtgcaaagttcaggagtttgtcctgctctccctgtcggcgtccatgtacacgagccagaagcgctacgggctggccaccgcccaccacggcagggccctgccagaggacagcctctttgaggagagtctcattaacttgggtcaggaccagatctggagtgagcacccgctgcagattgagctgctgaagctgctgcaggtgctgattgtcttggaacaccacctgggtcgggcccatgaggaggcggaaaaccagcccgacctgtcccgggagtggcagagagccctgaacttccagcaggccatcagcgccctgcagtacgtgcagccccaccccctc

SEQ ID NO: 27386 - DNA, 2300 bp, Homo sapien
accactgcaccccagcctgggcaacagagcaaaaccccatctcaaaaaaaaataaaaataattaaaataaataaagtctctagagctaggcgcggtggctcatgcttgtaatcccagcactttgggaggccaagatggggtggattgcttgagctcaggagttcaagaccagcctggccaacatggcgaaaccccatctctacaaaaaatacaaaaattagctgggtatggtggcaggcacctgtagtccgagctactcaggaggccgaggcaagaggattgcttgagcctgggaggtggaggttgaagtgagctgagatcacgccagtgcactcaagcctgggtgacagagtgagaccctgtctcaaaaacaatagtctctagtggttcaaagcggggatacctagatcctcacctctaaatgatctagagaccccagccttgagtctctaaagcatttctgcgagacagctcatctctgttctgcttttagcggtgcctgtcaaacatggccccatcagagtggaatgtcagggtgcctttgagttcttaaaccaaaaacgcacaactgtgaatatttatattatagtttagtctttggttttcagtgtctgcctcagaaggctgtaggcgcaggactcggtcgctcaccatctgtgttactgtgtgtggcatctcagaattatctgccacatctgacatcagttgagagcccccaggtgccagatgtggccgcagggatgagccttgccatcctgcatttaggtaccacggtgcgttgttggcctccagacattctgtcggttcctagggtgccaagggaattctgtatttcaagctcctataagaacctgctcttaaaaagattcagaaaaccttttttctcactcagaaaaaaagattttctaaaccttttttaggggagcttcctgtagcactcagcctctctgagcctccatttcctcgtctgttaaaccaggctgtggctagcatcctgtcctcatgggttgagggaaagagtaattacgataaaggccgatgctcattaggcacttaactcctagccctccctgaggaacccagggccggggagcgggaccccacattagtccctctagagcagaagccatggtggaaaagaggggacagctccattgctggctcagttgtatctaatgtgaaataaacatgggcggttgtcacaggaagcgctgggtaaatccgtctcttcgacagacattttgtgcctgctgccacgcaccaggctctcttgctttaccggtggacaagagagatgaagtccctgcccctgtggcagaggcagacattaactggcagtgtaataacgatgtgagcagggcttcaaagaaacacagggtttcctgagagtgtgtgaacaggaggcctggcctgacctggggttcctgaggcggcatggcttagctgaggccccaggcggagaggatttaactacggtgggcactgcaggctgagagagcggtaggatttacagagcgagaaacgtggcgggaacacagagaaattcataagtagcaaaacagagggtgctgagtgacatcaggaccatgttacaggtttaaattgattacctgataaaattagttaaatggtgcttatttctggaaattgagcaacaactttcctaatgaatataagcccttccgcagcagatggagtcaggctgaggctgtggggtttccagatggaagcagtgctgcaaagccttgcccggcttcctgcaagacccccactgtgctcacagcagcaagggtgatattcatcgtctcccgagatgctcctggccaatcgagctggccatccgtctctccaccttggctgctcactgccccttccccccgccggcatgacacgccaacatcacacatctagctccttgcggaaagggtttgattcctcccattgctgggatccacccatcagggaagcacctcagcacaacattgggcacaaacatgacagggtccttgctctcggtatggacagcagtggtggttcaatgtatatgatgccatagccccaatattactctgcagtaacttttttttccctattttctagaccataagacaaaaaattttagacttcttaaaccccttgacggcccatcttggggttcagttgacagcggctgttgcggcagtgtggagcagaaagaaagcccagcgtcacagtaagatgaaggtaaagtttaaaaagttacaggagtggttaaacttactgtgacaaagaaataccacagaatcatgtggaatcaaagg

SEQ ID NO: 27387 - DNA, 2300 bp, Homo sapien
gcgggaggattgcttgaacccaagagttcaaggttgcagtgagctatgattgtgccactgtactccagcctgggcaacagagtctctagaaaaagaaaaaaatccaggccaggcgcggtggctcacgcctgtaatcccagcactttgggaggcagaggcgggcggatcacgaggtcaggagatcgagaccacggtgaaaccccgtctctactaaaaatacaaaaaattagctgggcgcagtggcgggcgcctgtagtcccagctactcgggaggctgaggcaggagaatggcgtgaacccggaaggcggagcttgcagtgagccgagatcattccactgcactccagcctgggcgacagagcgagactcggtctccaaaaaaaaaaaaagaaaaaaaaatccattctcttttgtttctttttcctttttgagacgagagtctcgctctgttgcccagactgagtgcagtggtgagaacatggctcattacagcctcagtctcccagggtcaagtagtcctccccacctcagcctcccaagtagctggaaccacaggcgtgcgcccccaagcacaattaatttttttttttttttgagatggagtttcgctcttgttgtcccggctggagtgcagtggtgtgatcttggctcaccgcaacctccacctcctgggttcaagtgattctcctgcctcagcctctccagtagctgggattacgggcatgtgccaccacacccggctaattttgtatttttagtagagatggggtttcgccatgttggtcaggctggtctcaaacacccgacctcaagtgatctgcccgccttagcctcccaaggtgctgggattacaggtgtgagccaccacgccctgccagctaattcaattttttttttgtaaagatgaggtctcctcgtgttgcccaggctcgtctcgaactcctgggttcaagagaccctcgcaatgtagcctctcaaagtgctgagattacagacatgagccactgcacccagccaatttctctttctaaaaataattaatttttttgagacagtctcactctgtcgcccaggctggagtacagtggcgcgatctgggctcactgcaacctccttgtcctgggttcacccacttctcctgcctcagccccccgagtagctgggattacaggcgcccactaatatgcccagctaatttttgtatttttagtagagatggggtttcaccatgttggccaggctggtcttgaacccctatcaagtgaacccccaacctcgacctcccaatgtgttgggattataggcatgagccactgcaccggccttatgcctttaggactcttatttatttattttgagacggagtttcactcttgttgcccagggtggagtgcaatggcgcaatctcggctcattgcaacctccgcctcctgggttcaagcattctcctgcttcagccttccgagtagctgggattacaggcatgtaccaccacgcccggctaattttgtatttttagtagagatgggatttctccatgttggtcaggctggtctcgaactcccgaagtcaggtgatccgcccgcccacctcggcctcccaaagtgctgggattacaagcgtgagctaccgcgcccggccccagaactcttttttttttttttaaatcatgagttagattgatagttttcagggcaaatccaaacagtctacattaatttccgtctttatttcgttaaggtttcacatggacactggtggatatggaatggcttttttctgcgcaattcacatccgaccaggtcaagtgactggagttcaccggtctcgggtataccgcatctcgcgccaggcttcaaactctagatccccgagtctcgagctccagctgggtgtcgagacgggtacgggccggccgcgcctcgcgcatgcgccctaggcccgcagggccccgcgctggaagctcagctcccactgtaccctgctttaaccagtcaggcaattcatcttccccaagctcccaattcggcattgcctggaggcggaagtgggtgggaggggccagacgtgcgcccctccccggaagtgggcggtacccatagggctccacagtcgttccgccacctcccagtcgggttgcggcggaggccgttcctggctttgtagctcgctcaagatggcggcgcagccaccccgcgggatacgcctcagcgcggtgagcagccgcgaggggtggagcgggccgtgtcccaggagggcgggcgggcaagcgaaggggggccggcagtgggcggtggcgg

SEQ ID NO: 27388 - DNA, 2300 bp, Homo sapien
ctcagccctaactactgctagtcagtttcactcttaggtatacgcagatcgccctggatagccacatgtgtcatctcccacatgggacagcagactgaaacaaagggaatagaagaaaacattgtgaaatttattgggggaaagtgatgtaaacttgaataaataaatcatttagaatgaaaagcttaacagtcggaagatagagaaagaagaaaagatacagtatctgtgctggaaagccaccatctgaataagggagtttcagaatgggacgtaggcactggtatggtgtagcaaacatagctgccttccagaatgggaaatcataccagaaaaactgcatttccactaactacagagcataatgtctggaaggagagccactcaaagacataggatcatgacatttttttaacgcagggaataaaagattttttcagaaagaaacagattatgtacgggcaagagatgaggaattagaatggcagaaacacttgaatggcagatgaaaatggaatgatgcttttaaatttctgagaaaataatttttcaacccggaagcctatataacagttaagctagcaatagacttgagagagaaataaagatgttttcatcatgcaaaactttgcgtttgttatgttctgtgtacccttcattaagatgctgttgcaggctgtgctcgcccaatatgagacagtccaaaaaagaggaaaatccttcctgagatctaggaggtctaacacaaggcccaaatagcaaaccagtacaaatattcctccaagtgtggaaaaaggcaatcaaatggtgataaataaatgtgaactatgcacatattaacatgaatgaacagggaatgatgcaaatgaagaaattggggcaattttaattcagataaaattatttcatatgaaaggataaatactggtttgctttatggcttatctttgatcactgattactgataaaaattattatgggcaaatgaaaatggtggtgccattccctgagctgaagaatacaaagaaggggccggggtgggtagcattctgttctggaaatgtgtacattgaaatgcctggaggtgatcaaatgcagagatgtttggcagtaaatagatctggtacttcaaagagatctcaatagtccatcgtcttcatctgtaaaaagagaaaataatctctacttcattaaatcagtgattggtactatacaatgcgtcactttaaaaaatgagcctgggtatttcttagtattgcaaaacttatagctgggcacagtggctcatgtgtctaatcccagcactttgggaggctgtggcaggcagattgcttgagctcaaggagtttgagaccagcctgggcaacatggggaaaccccatctgtactaaaaatataaaaattagctggacgtggtggcgggtgcctgtaatcccagctcctcaggaggctgaggcaggagaatcacttgaacctgggaggcagaggttgcagtgagccaagactgtgccattgcactctagcctgggcgacagagtgacactccatctcaaaaaacaaaaaaactgttacaatactgcatttgttagaatgattacttcaaggtcatctattttgtccatattttataatcttatgttttatgtataaaatttttttcagcttgaaacggagactttctactcgttcctcaattttgaatgcaaagaatcggagattgagtagtcagtttgaaaattcagtttataaaggtgatgatgatgatgaagatgtcatcatcttagaagaaaacagtacccccaaacctgcagtagatcatgatattgacatgaaatcagaacagagtcacgttgagcaaggtggtgttcaggttgagtttgtgggtgacagtgaaccttgtggccagactggttcaacaagcacctcatcatcccgatgcgaccagggaaatactgcagctacccagactgaagtaccaagtttagttgttaaaaaagaagaaactgttgaagacgagatagacgtaagaaatgatgcagtgattctgccctcctgtgtagaagctgaagcaaagatacatgaaacccaggaaaccaccgataaatctgcagatgatgcaggctgccaattacaagaactgagaaaccagctactccttgtcactgaggaaaaagagaattataaaagacagtgtcatatgtttactgatcaaatcaaagtgttacaacagaggatactagaaatgaatgacaagtatgttaagaaagaaacttgccatcagtccactgaaaccgatgctg

SEQ ID NO: 27389 - DNA, 2300 bp, Homo sapien
ttgccatgttggccaggctggtctggaactcctagcctcaagcaatctgcctgctttggcctcccaaagcgttgggattatagatgtgagccaccatgcccggctcagattttgattttagaatgttcacacttacaaatggaaattaaaatgccttgagaagttttttttcgaagctgagttaagagttagtccctttatatcaattttcattattaaaaagttctcaggaaccaaataacattggtccccttaaattgaggcagttctgctcaaaatggatgcttggggcccaagctgaacaacagtggttgttgaggaatctagttagaattgcgttataggaattcccttttttttttttttttttttttttgagacagagtctcgctctctcgcccaggctggagtgcagtggcacgatctcggctcactgcaagccccgcttcccgggttcacgccattgtcttgcctcagcctcccgagtagctgggactacaggcgcccgccgccacgcccgactaattttttgtaatttttgtagagatggggtttcaccatgttagccaggatggcctcgatctcctgacctcatgatccgcccacctcggcctcctaaagtgctgggattacaggcgtgagctaccgcgaccggcaggaattctttagtccaacatttgtggtgcaaactttgaggttttgaacaaatacttttttttttttttttgagaaaatatttgacagcccagggcctctctctagagccgcatcccctgcccgtgttggctcatcaagttggcactgaagtcggatctctaaaatgttcgccaagaaagccaactccttcatgtacttttaatacttaaagcatgtgtttttatcttttaaatccacagttcagagtcgtgacacttcaagaggtgggcagattattcatttgtgaatgaacagcatttatgagaaatttggagaaattttatgtttgagagacacgaagaatccagagctttccaaaacagactgatgatcacacccaccggggagtttatgaaaatgcaagcccctggagcacgggcctctgctggatattcggaatcatggggctgagtagggccaggaatctgtacttttagaacagccatattatctaaagtatatagtcattcccagtccaagctctgtaaatcctgaagagaaaaatctaaaaactgcatatccggattatgttattctagcttcctgtagaaatcaggcttcaaggagcatacagccattctcatcaacatgagacacggatttgtaggcaatttctgtacctttcataaagctggctaaaagcatcagccggtatttatataagaatccatgtctgttctttttttccaaaaatcctagagcagttggctcctcagataaccctgtgtgtttcttttatccagtaaaagcagcgcatccagaggtacttgtttcctggccttctgcgaagcccacagataaattaggtctcatttggaaacgtcccatttcgaaaagcctgaggtatctatctctgcctaccgactgatttacagcctcactttaaaatgttagtctgttcttaaaaagggtttataactgcatctactataataataaaatgtaagcaaccttgcgctaggtactgaacaatttcatagctttgaactctccaaaatgttctagaagccaatacagaaaacccaaaaatctcagtttttgtttgcagaaggggcaagagaaccggttgtgttagccctccaagtgcccagcgccagcatagggtctgtctaacacacagcccaggctctgtaaacctttgctaaaagagcgaatcaacaaggaataagtaatggataataataataaataataatgaatccattcttccttcggtcgtgggtctggcaggcataaattccggccgggattccgaccccagggccagagcaggactcgccttggcgtctatgagtgggcggggcttccctggggtaccgcccacgtcgggcgggacctgagggccgctggaggggcggggcgtctatgaggtcccgcccatgcgggggcggggcctgcggcgcgcgggaagcggcgcgcgctgcgcgggaggtgacggtgcctctgactgtccgggtccctccaggtacggcttccctggcccgggcagctccgcggctcttttggtcgcgtcggtccgggccagaggccctcgccgagggcgggcccctgggccccgggatagctccggagcggcgcgcgttggggcggcggggccccgtcca

SEQ ID NO: 27390 - DNA, 2300 bp, Homo sapien
tttgtggtgcaaactttgaggttttgaacaaatacttttttttttttttttgagaaaatatttgacagcccagggcctctctctagagccgcatcccctgcccgtgttggctcatcaagttggcactgaagtcggatctctaaaatgttcgccaagaaagccaactccttcatgtacttttaatacttaaagcatgtgtttttatcttttaaatccacagttcagagtcgtgacacttcaagaggtgggcagattattcatttgtgaatgaacagcatttatgagaaatttggagaaattttatgtttgagagacacgaagaatccagagctttccaaaacagactgatgatcacacccaccggggagtttatgaaaatgcaagcccctggagcacgggcctctgctggatattcggaatcatggggctgagtagggccaggaatctgtacttttagaacagccatattatctaaagtatatagtcattcccagtccaagctctgtaaatcctgaagagaaaaatctaaaaactgcatatccggattatgttattctagcttcctgtagaaatcaggcttcaaggagcatacagccattctcatcaacatgagacacggatttgtaggcaatttctgtacctttcataaagctggctaaaagcatcagccggtatttatataagaatccatgtctgttctttttttccaaaaatcctagagcagttggctcctcagataaccctgtgtgtttcttttatccagtaaaagcagcgcatccagaggtacttgtttcctggccttctgcgaagcccacagataaattaggtctcatttggaaacgtcccatttcgaaaagcctgaggtatctatctctgcctaccgactgatttacagcctcactttaaaatgttagtctgttcttaaaaagggtttataactgcatctactataataataaaatgtaagcaaccttgcgctaggtactgaacaatttcatagctttgaactctccaaaatgttctagaagccaatacagaaaacccaaaaatctcagtttttgtttgcagaaggggcaagagaaccggttgtgttagccctccaagtgcccagcgccagcatagggtctgtctaacacacagcccaggctctgtaaacctttgctaaaagagcgaatcaacaaggaataagtaatggataataataataaataataatgaatccattcttccttcggtcgtgggtctggcaggcataaattccggccgggattccgaccccagggccagagcaggactcgccttggcgtctatgagtgggcggggcttccctggggtaccgcccacgtcgggcgggacctgagggccgctggaggggcggggcgtctatgaggtcccgcccatgcgggggcggggcctgcggcgcgcgggaagcggcgcgcgctgcgcgggaggtgacggtgcctctgactgtccgggtccctccaggtacggcttccctggcccgggcagctccgcggctcttttggtcgcgtcggtccgggccagaggccctcgccgagggcgggcccctgggccccgggatagctccggagcggcgcgcgttggggcggcggggccccgtccacccccggccccgcgcggcctcctcccggcggcctcagtcccagcttcccgggcccagcgcccggtccctgggaaaggcggggttctcctctcgccccgccgccccggtcccctaccccgtttggccccctcttccgggaggctcctcccggggcgggcccctccccgggctctcagggcgcgcccctagcccctactaagcggggacaggccgtgcagacggccggggcccctaggtagcctttacctgggtgtttcgttttgcttttctggatgtagcggcgtatcataaacttgtggatgtcaggacccagcgaagcattttaggtggagctagcaaggtgttattgtcagatggcaacgttaacatcctttcccaatgcagtgtgcattttaaatggctcctggcccctattcagcgctcaataaccctttgctgctgttaacactgttgtttaatccatcaccagcattttgcagctttctcctgtcttgaagaagtagaacggtgcccgagaaacgtttttccccttcgagactcaggaggatgaaagtcatcacttgtgaaatagcctggcacaacaaggagcccgtgtacagcctggacttccagcatgggacggctgggaggatccacagactggcgtctgccggcgtggacaccaatgtcagggtaa

SEQ ID NO: 27391 - DNA, 2300 bp, Homo sapien
acccaggctagagtacagtggtgcaatcttagctcactgcaaccttcaagcgattctcctccctcagcctccaagtagctgggattacaggcatgcatcaccacacccggctaatttttgtatttttagtagagacggggtttcatcatgttggccaggctggtctcaaactcccgacctcaggtgatctgcccacctcagcctcccaaaatgctgggattacaagtgtgagccaccatctccagcctaaagcatttatgaaatagctaaacagtaatgaagaggccatttggttggggtgacagtgaggacattcaggtttttgaaccagacattttctgaagtggctgaacatcaacgttgaagggccaatgactatgttcatttgaaggtggcacttcatttttctctaataagtttacagaaagcaaatcaagttttacgctgtttctataatggacccaacatcatgtcagagcatttgagggcaaacatatataatggctcgttcccaaacatctcgagagccattcagaccacatggcaggcaaaaggcactggtggccacatcctccaattctctacctgcacagtagggctcagggcagttctgggtaaagaaacttccaccacacacctggcttgtgccccagctccccgctgatgtcctccacccctcccatctggggctgacatttctttcaccaaggtgggtagacaagggccacggagcaatgtgtgtccataggaaagctttcatcacaggggctgattttgcaagggatgaggtgacagtagcaggtgagactgctgagggttaaggagagtaagggactcaaacaccccacccatcccatccctgcacccctccaagaagcctggtctcatatgcagcatccattaaacttatttgactagagacaccccccaccaccgcctttaccaaagaagaacttgcagtaaaatcactttggcacagtcacttggaccaatggtgagatagggtggcctcgtcccacccccgcacccctccaagaagcctggactgacagaggccccagcacacaccctgaagaactagagaaaggacttctgaagataggacaaagtgaaggatgaaacagacatgcccagggagggaccccaggcagtcaagacgcaggctggtaaacaacacgtccacccctcagtcctggccaggcgatccccatggccactgctgttgaaatgatgattaatttggagccaaagttgacgcagctggggtccaggtgggccaggaggtgagcaaaatgagggcaccctactgtgtgctccagaaccctgcttttttaaagaaaaacatagctcagagaaaacagagggagacaacataaaagtttatatggacacacacagaaaaaccccctcccttcagagctggtgatcctgaaaccagagccagttggaagggcctatagcagctctagcatttcacaattgcctttcacagattttcaaaattctttaccgctctgtcgttttctgatactctctctgctggggatgaagtcgaccaaaactctaaggtttaatgactgccctattggatttcgaacttgcatggggcctgtagcctctttgttttggtcaatttctctcatttggaataggggtatttacctaatgcctgtacccccattctatctaggaagtaactaatttgcttttgatgttgtagattcataggcagaagggacttgccttgtctcaaacgagactttggacttggacttttgagttaatgctggaatgagttaagtccttgggggactgttggaaggacatgattgtgttttgaaatgtgaggacatgagatttgagaggggccagggcagaatgatatggtttgtctgtgtccccatccaaatctcatcttgaattgtagttcccataatccccacgtgtcgtggggagggacccagtgggaggtaattgaatcatgtcggtggtttccaccatgctattctcatgatagtgagtaagttctcatgagatctgatggttttataaggggcctcaccctcggctcagccctcattcttctccttcctgctgccatgtaaagaggatgtgtttgcttcaccttctgccaggattgtaagtttcctgaggcctccccagtcctgcggaactgtgagtcaattaaacctctttcctttataaattacccgtctcgggcagttcttcatagcagcatgagaacaaactaatacagcaacccactctatctcaccattgccaagtccaagttattgtgc

SEQ ID NO: 27392 - DNA, 2300 bp, Homo sapien
attcgaagttttactattaaatctttattccttagacttaaaaatacctcttgggagggacaaaatgttgagccattatgagtcatttacaccttagagtttaaaaccagacccaagggcagacgttgatggaagttggaggagccaagagaagagttccctgcccactcagggagaggattgggagagaagggctggagactcgggaccagcctctctaccccctcattttccctcgctctgtgtgtgcctgtggccctgaccctgagaggcaggaggggaaggtgtagtgctagccaggctccctgctactcatacgtgctggagtccaataactatttgatgaacgaagaacaaatcaatacctttctatttagatttcgtcacatcatgtttctgtgactttgccctctggtccaggaaacactgttttatccaagaggagccttgggccagggtcacaggtcagggaattttcaggcttcagcccagaacaggaatgacttgttccaaagaaaatcaagactaataaagatttcacaaaatatctacaaaacagaacgttacgtccatttcattcactgtcacagtgtaatatccctaaaaactatcataatattttaaagcaatttggagtttacattttctctctgcggggtttcctaataatacacaacgaatgccaagaaatcaaagccagttgtaaactaaatgtaatgaacttgtagccaaatcatctcaaagacaaagttataaaaaataatttctaaaaagtgcccagcataaaattatagataatatgggcacattttactattatgctggtacccctatatattccaatattcttaaaatggtgttcagcaaaggcgatgattctatctccaagttagttcattcctttaacagtttcatttcagcctgtgtaactgctttaggtggggtggaggatctaacgaaaaggtctatttcgttgtcaggtaaaattctgcgtggttttacgtaactttcctggcatagatagtgaaatagtatatctggtgggaaacctctaaggatagaggatctgggcctataaatgacctgaaccaaagttgtttttgtttgtgactgttcacttccaaaaacagaccaaaaaagctatgcagatgtgggttatgtcaatcctccatcaataacatttaacagatgcttccgaatgcctgctccaagctcctgacactactggatgtgctgtctttctgtccttcaccgtcccattgccagggacacaagggccaggcttttggtccatgcccagggcgtttgtccacaccagattccttcgctgcatctttttttttaaacaccaaccagagcccggcggattgatgcacactgtggaagacacgcagaagcccaagtaagtccctggccctggagcatttgcggtgtgctcagtgacgaaggggcggaaattcttgtcatgttaaatccatggctctcagcacacttctcaattccagaatcgcccacaacgattttcaaaattgaaaaggaactgggatttgtgccttgagagggtccccaaaccttggagccactcagggtgctggcttttggctacacattcccaccaagagatttcattcttgcaattttcaaggccaaacatctcttaatcagcgaatcattcctcaaagggctggaggcgttcccagccctgaccagttccctcagccaccctcaggtgctgccttcacttccagcagaactctccctagccctcctggacatcgctgtcaagcaagtgtcttgaccttccaagaaagtcaccttcttccgtcagcactggtttcacagtatgccatgtctcttatctccaacttgtagcaaattgtccctctttccacactgtgctccttgacccgtccagctccacattccaccaacagaccatccgaatcacccacagctgcagctgtagaaaaaagcaaacaaacaaaagcagttgctcgttgatcagaatcgaccagcatgcatctagggcccatagcagcctaaaggctgagaagctgagttactcaatagcagaaaagtccaaagcagtgtgaggacaaccgccaggtggtggctcagaggaggacacagtcgctgtgggcaggtggtcagggcgcaggagggaatgagctgtggatttttagtaatctacaacaatcaggcagttccaggacacagggaagtgagtgtgaacagccaatggacccggagccgagagcctgggcaggcgtaggctggactatggacgccctgcaaccctg

SEQ ID NO: 27393 - DNA, 2300 bp, Homo sapien
gcagtcgggtcagcaggaaggaggtgtaaagagttcatttcaaagtccacggcatatttggataaaatacagagaaattttgcttagctccctgggcgtctgagagtgagtgtgctctggaggaggggatgcctgtggttagtgcacaggaaaattcaaattctccccagcctcaaatttgcctctccttcctaaatcccaactccatcccctcctatgcaaacagtcaatagctgcaggcagggatgactgtctgaggcctgggagaactttgttctagtcttggaggatgagcaaatgtaagacacccacaatccagcaggcctaccctgtgatggggtctggatgtcagacagcctcggctgctccctccttctgtactgagaggcttggttccctggcactcctcagccaagaaaaggccattgtccttcccaccacctttttcagggagagggatggatggcagcagagggggcccagggcaaggacctgcccaaggtgtagtgtgatcctgccaagctggcaggcagcaccatggtaatggaaacctgggttggagggagccaagggctggtgtggcttctgggttcctgggtgtcacccattgggtccccaaattgaaacccggctgctagcaattcagccagtgcaggtgcggctcagcacagacggttgaatccatgacacaggcttccctggctgcagccttggggatcctgagctgactcagtttctttgctaagtaaacagtccctatcatcatgcacgctctctcccactttaggaatcaactagaactgtaggcaagaacaggagaaatgccacagtatgggggtggctgtttacgtgtcagaagctccttatgcatatttgcttgcttttggccgtgtcccacatttggaaacgaggggaaatgaatatatgtaaattacagtgcagtatttcagagtggggtcctagaactagatgcctgggttcaagtcgcagctccgccattcttcagctactggcctcaggacccattgcctcaattgtactcttttgtaaaatgggcacaattagagatccatgtcattaggtagttacaacgattatgtaaagccaaagtgctaaagcacttattatagtgcccagaacatgagaagtgtttggtaagtattactatcaaatgataacatacttattaagttataggcagaatctaagcacagcaggacagaaaggccctcctgaacatcctgagaaacttccctatcactctcttttgtttgcctctccctggtcgttgctcttatcttcatacgggaactatgttatttctttgaatctttttctaattgtctgtctcccccaactcaaagagcagggacattttttgttcactgctatagaccctactgtcccccttcacagtgctggcacatagtaggtgttcaataaatatctgttggaggaaaaatgaatgaaaaaaggagagaacggagaagttgggtgctctctgagccctcactttggaaactgggggtccctctaccccagagggcagcccctgccccagcagttgagtccctccgcgcacctacttgcggtgtagggtgggaggcgggttgttgaaatctgctgggattttcacccacctccggccaggtggaagggagacccttgtgctcccccctgcccccgccaggttgtgctatttaatcctgttttatgcgcaggcatttaaacctgaaactgagtatgcaaatgtgttcccagcaaggctgcaaggcattttgcacgtgctggtactggcgtcatttctgaaaagagcagtagtccttggggcagaggcagggacaggggcaggggcaggtgcgggctgcgggagggactcggagcccacagaggtaattccactctgcgcctcaattattcatcgcgctggggctgtctctgcgtggtcacctgcgcgctgcagagtcccccagcgctccggggactgctcgggggctgctggggggcctctgggaggcctgtcgctcgaggggaggccggatcaaggagagtcacgcggctccctggggagaacgggcgccgggccctcacagaccccagagcggccatgagctggtgtgcagccgcccaggaggggtgagtttccagccccggggggtttctttcactgccagcctcgggacttttagcatggaatctggctcaggctgtagcctacagactggtgccataggggctccccggccgtcagtcacaggggatcagctgatcagaaaaaaaggagtttgcatcttccttta

SEQ ID NO: 27394 - DNA, 2300 bp, Homo sapien
ccagcacatgcctagcagagtgcctggcgttaaaggtctcaataagtgttggccattatgaccagctcttagttactataccagttagcatttgctacaaaagccaaagacctccaaactgaatgacttaaaataataaacatctattgcatctcatgattctgtgagctaggtaatcaattcgggtctaagtcagctctgttagggctgggtggtctaggatggcctctctttaatgtctggaactcaggtggaagtctggatggttggagcctctctccacatggtctctcatcccccaggaagctagctttcacttgttccatggtgtgtaaaggattcttagctgcaggagaaggcaagccccagtgcctgcaccattcagatccctgcttgtgtcacattttctaatgtctcattggccaaagtaagtcatatggtcaagcccagatcagatggagcattagccctgccttctgatgggaggtctgccatgtcacattgcaagggcatggatgcaggaaacagggggcattgggggcatttataatcagtgagtgaagagtgctgtgctaggtacttaacacctcttctactacttgattctgccagtattcctaaccgcaatttaataatcaaaacaaaaactcagagagcatgtggtgctcatccaagactacacaagtagtaagtaacagagctgagactcaaaccctggctcaataaaaacagcaacaacaaataaccccagcccgcccatctccaagtctggtttgcttcctggttcaccatgctgaattgccctggtgcttaggacagaggctgagacaccagaagccccagtacatatgatattgttgattaaacttgaatcagaagatagactttgccagggaagaacaaacaatgaacaagggtgagcacggggtgctttaggtccagctctagaataatgtgggctcctccagtgagcaagacagctaacctgtccattccccaggcccctgtggggaaatggaggcggacaagcttagaaaaattacaggggcagaaaacacacagagggaagacatttctttttccttcacctttcctacacaacaaaacagtttcagtcctcctcttcaagttccactatctcactttctttttaaagaatattcttgtctttccttggacttcccctttgcttaataagtcatttcctgtgtgtctctctttcttttttttcttttcttttttttttttaaggcaaagtctccctctgtcgccaggctggagtgcagtggcatgatctcggctcactggaacctccatctcccaggctcaatcaattctccaccctcagcctctctagtagctgggattacaggcgtgcaccaccacgcccagctaattttttgtattttcagtagggatggggttcgtcatgttggccaggctggtcttgaactcctgacctcaagtgatctgcccgcctcggcctcccaaagtgcagggattacaggcgtgagccaccacacccaccatctgtgtatatctctcttggccgcctgggtggattcacccatcattcaccacttccctgttcttttctgtccaactggggcgtgcaactggggcctccacactgaccctcctgccatgcatgtctcttccatgggcccctcttcaagcccttgctttccctctagagattttcctgtctcctaatgccactctcagtccgggctttcttctgaatttgaacaccaagaggcaccagcagtcgccagcaacaatgaggcctaagaaaaccggtcatttgagctgggctagacgtcagtgaaaccatcttggtatttgattggccttttgttgagagaatagggactctgtgagtggagaccgagagagacactggtcccttttcagagtggacagagtaggaatggcacgtactgagagggcagtgttgatagctgaaactaggtgtgccacaggcctgggatctggggaaggcctgagagatatctgatgcaggcgcgggctgggcacccgccgggagtccaggaaggacgagcaccctgaggcccagctaaagcagggggtctgattggtggggagggcaagctgggaaaagctgagagaggcaggcagcccagccaggcagaagtcacgagccaggcacctgccaagagagggagtaagatgttcaagaggagctccggaagaactttcagatatagcactggacttggctgaggacacagcagcacggtgagtggcactcacaacttgtaaattacatctcggcttag

SEQ ID NO: 27395 - DNA, 2300 bp, Homo sapien
aaatccgggaaatttgccttgaggaaagtttccgttcttgttacttgtcgggtttctcccacttccacttagccatgtttctgcgatctgggtaatccctttcaagcccaggaggaattctcccgggtccataattgagggtcggaagccgtgggggtgagaaacgcattaaatcctcccgaagcccaggaggtgccagagcgggctcagggggccgcctgcggaagctgcggcaggggctgggtccgtagcctctaaccccttggagctccttctcccagaggcccggagccggcagctgtcagcgcagccaggagcgggatcctgggcgcggaggtgggtccgactcgccaggcttgggcattggagacccgcgccgctagcccatggccctctgctcaagccgctgcaacaggaaagcgctcctggatccgaaaccccaaaggaaagcgctgttactctgtgcgtccggctcgcgtggcgtcgcggtttcggagcaccaagcctgcgagccctggccacgatgtggactccgcaaggggctagggacaggcagggggagagcccgggtttgcgcacaccttccagcccctggagggagcctgctcggcttcgaacgccttcgaacttttgaccttcaaaggagtccctggaaaaggtcaggagcgcctgctgcaggcacggttgccgaaggccaggccttcctggcgcaggggagggccaggggagggaagcggatactcagtcgctgtccgacggcgagttttcggagcagcaggctcatgatcccgggccagtggcgagagcagtgacaccgagaacccaaatctccgcgcccccatccgcggcccggtgtcctcccggcccctgctgacctccaggtcacgcaccccactgctccacggctctgcagcctgtggcacacggccgagagtccccacatgatctcgacgccaaggtaaggaattgccctgcgtcctctgagcctgtctctggcctggggggccgggaaagctgcactcctggaagaggtggggttatgtgaccgccgctgcaggggtgcgcggaggactcctgggccgcacacccatttccaggctgcgggagccggacaggggagggcagaggggggacaaaaggactctttaggtccaaaatgaccctgaaggagagtccagaatgcccagtggccgcgtctgcaacggagtcttctttctccaattgccttctgccccatcaccatgggccccacctgcgccacctgcgcccaccctgtgaccctggctcagcgaccttggcccttaatcgcccaacgccgattcctcaaaattccggctgcgctgaatcgggctgcttttgccgccgccccggcagttgggccctgtttccgccggcgccctgggagaggcctcaccactcggctgggctccctggcccctcccttcccctggcctgagcgcccctgcggcctcccgctcctcctgagaaggcgacaatctctttgcaccttagtgtttcgaggacagaaagggcagaagggtcacttcggagccactcgcgccgttttcacgtgtgtgtgtaatggggggaggggggctcccggctttccccttttcagctcttggacctgcaacaccgggagggcgaggacgcgggaccagcgcaccctcggaaggctcgatcctccccggcagggcgcctggccaacgagtcgcgccgcctcctctcggccgcgcctgctggtgaccttcccgagagccacaggggcggcctcggcacccctccttccctcgccctccctgccgcccatcctagctccggggtccggcgaccggcgctcaggagcgggtccccgcggcgcgccgtgtgcactcaccgcgacttccccgaacccgggagcgcgcgggtctctcccgggagagtccctggaggcagcgacgcggaggcgcgcctgtgactccagggccgcggcggggtcggaggcaagattcgccgcccccgcccccgccgcggtccctcccccctcccgctcccccctccgggacccaggcggccagtgctccgcccgaaggcgggtctgccataaacaaacgcggctcggccgcacgtggacagcggaggtgctgcgcctagccacacatcgcgggctccggcgctgcgtctccaggcacagggagccgccaggaagggcaggagagcgcgcccgggccagggcccggccccagccgcctgcgactcgctcccctccgctgggctcccgctccatggctccgcggccaccgccgcccctgtcgccctcc

SEQ ID NO: 27396 - DNA, 2300 bp, Homo sapien
ggagagcccgggtttgcgcacaccttccagcccctggagggagcctgctcggcttcgaacgccttcgaacttttgaccttcaaaggagtccctggaaaaggtcaggagcgcctgctgcaggcacggttgccgaaggccaggccttcctggcgcaggggagggccaggggagggaagcggatactcagtcgctgtccgacggcgagttttcggagcagcaggctcatgatcccgggccagtggcgagagcagtgacaccgagaacccaaatctccgcgcccccatccgcggcccggtgtcctcccggcccctgctgacctccaggtcacgcaccccactgctccacggctctgcagcctgtggcacacggccgagagtccccacatgatctcgacgccaaggtaaggaattgccctgcgtcctctgagcctgtctctggcctggggggccgggaaagctgcactcctggaagaggtggggttatgtgaccgccgctgcaggggtgcgcggaggactcctgggccgcacacccatttccaggctgcgggagccggacaggggagggcagaggggggacaaaaggactctttaggtccaaaatgaccctgaaggagagtccagaatgcccagtggccgcgtctgcaacggagtcttctttctccaattgccttctgccccatcaccatgggccccacctgcgccacctgcgcccaccctgtgaccctggctcagcgaccttggcccttaatcgcccaacgccgattcctcaaaattccggctgcgctgaatcgggctgcttttgccgccgccccggcagttgggccctgtttccgccggcgccctgggagaggcctcaccactcggctgggctccctggcccctcccttcccctggcctgagcgcccctgcggcctcccgctcctcctgagaaggcgacaatctctttgcaccttagtgtttcgaggacagaaagggcagaagggtcacttcggagccactcgcgccgttttcacgtgtgtgtgtaatggggggaggggggctcccggctttccccttttcagctcttggacctgcaacaccgggagggcgaggacgcgggaccagcgcaccctcggaaggctcgatcctccccggcagggcgcctggccaacgagtcgcgccgcctcctctcggccgcgcctgctggtgaccttcccgagagccacaggggcggcctcggcacccctccttccctcgccctccctgccgcccatcctagctccggggtccggcgaccggcgctcaggagcgggtccccgcggcgcgccgtgtgcactcaccgcgacttccccgaacccgggagcgcgcgggtctctcccgggagagtccctggaggcagcgacgcggaggcgcgcctgtgactccagggccgcggcggggtcggaggcaagattcgccgcccccgcccccgccgcggtccctcccccctcccgctcccccctccgggacccaggcggccagtgctccgcccgaaggcgggtctgccataaacaaacgcggctcggccgcacgtggacagcggaggtgctgcgcctagccacacatcgcgggctccggcgctgcgtctccaggcacagggagccgccaggaagggcaggagagcgcgcccgggccagggcccggccccagccgcctgcgactcgctcccctccgctgggctcccgctccatggctccgcggccaccgccgcccctgtcgccctccggtccggaggggccttgccgcagccggttcgagcactcgacgaaggagtaagcagcgcctccgcctccgcgccggccgcccccaccccccaggaaggccgaggcaggagaggcaggagggaggaaacaggagcgagcaggaacggggctccggttgctgcaggacggtccagcccggaggaggctgcgctccgggcagcggcgggcggcgccgccgggttgctcggagctcaggcccggcggctgcggggaggcgtctcggaaccccgggaggccccccgcacctgcccgcggcccactccgcggactcacctggctcccggctcccccttccccatccccgccgccgcagcccgagcggggctccgcgggcctggagcacggccgggtctaatatgcccggagccgaggcgcgatgaaggagaagtccaagaatgcggccaagaccaggagggagaaggaaaatggcgagttttacgagcttgccaagctgctcccgctgccgtcggccatcacttcgcagctggacaaagcgtccatcatccgcctcaccacgagc

SEQ ID NO: 27397 - DNA, 2300 bp, Homo sapien
caaaccctcctaagtctgaggcatcgtgccctgcagcagtctggcatggggtgggtgtgaggcgacctcgaagtctccctcgggcctggagggcttcctcagctcatggtcctggcctgacaccagtctgtgcttctctttgctatcttctttaccccccagttttctcagctctgaccctgttcttagcttacagagagacacacactctcatgagtgaaaaagaaagccaatgggaggtggcgaggaagagggagaagggggccccaggcagtcacacattgaaggttcataagttatttttcattttaaaaaagctgactggaagatgaattcccactgttcataaccctgctgccctctgcttagttcaaaggaagcagtgccgaacttcatttcagaactacttttaacacatattacattgtaaaaaccaaccattacatctgagtagcactttctaaaaagttaaaacgctaaaatatcaagatatttcatttttgttaaagtcacactttaacaatacgattgattttttttaagctactttctaggcaggaatgcacaagattgttttttgaaaggaaatgaacagtggtttctgctaaaaaacgcctccaccgtaaaatggagtgaggcccatgagacagctgtgcaacgcatggggacacagtcaggggcagaagaggcccgacttctgacaggtgacttctgaactggcggcagggtccacggcacaaagctgaggtggctgccccaggacactgcagggtcctagccagggaccctggggatattattcctggcagctacaggaaggttcccaaggaactttagaaacatcacagcagagtggagactcagacagggaacgggacagatctggactcgaatcccagtgttgatatgaacatggagtaagggaatccatctctctcagtctctccagtcacctataaaatggaacattttgtgcagtgtcagtaaaaatgaaatatgatggaatttgcaaagtggtccctgtcatgtcgatcctagaacttcttgctgccagaagacaagcagcgcctccccttacctcctcctcttggggataaggagggaagtcagggagacagagggaaggaatggaatggtggggacaaatgtgtgtgttttacgactcctcaaaaattctatacgtgatgcctctcctctctgtacccatccctcatcacttctacctacacacactaaggtgatctctatctgggctaaaaaccttgtaagtgacactagcaatgggggatgcagaatcttcacttccagttctagggtctctgaacctactcagcaaagctacacatagttggttgaactggctcttcggctgactttgtttaggtgactgcttagaaacactgttggtcagaggtgtgcccaggcagataatagaacagttttattgatatattcttccattctattctggatttgacactacggcctgccctttcctcaatgcactctgttggtatgctttaaatcatatcccctttccgctcttggtgtagaacaggatgaatgtttcagtaggaggcaacacgggaatcgggactgttcaaagagcagagccatcacaatcctcccactggagctccccagaagcagagagatgcctgtgggtcaggccctctgttagagacacccgcttcatttccgtagctcctggcatacctgcccttcttacgtttttggctaatcttccccacgtccagcataagagcgtccacattgctgctaaataaatcatttcatggctcccaaggagcccagtggattcagctttcagaatgaggctcctttttggtaagtcaagcatttactaatgttggtctgtattatccaatcaaagtgaatacaagccactgtttcttaccctgacacttcaccataaatactagatgcctgcgcatccactgccttctatcttaaactggtgctattacagaatttacagatgagcaaagaagcttgcatagagagaaatattcatggtgcccacagccacctctgtggctgtacctcagcggtagccctgatggcagatccctgcctctgacggcgagccttcactgcgccactgcacaccagtactcagactatctgtccccactcctccgccaggagtctccggatcctccacaagatcttctcaccccccttttcaggctgttcagatctcataaatatgtccatttttctacaactgggtgtggagcggctcttggtggagagtgtccacagccttgaccataagt

SEQ ID NO: 27398 - DNA, 2300 bp, Homo sapien
actttccggctgccactgtcctgtagagaagtgtaggatatggctttagtcctgtttatcactttgtttttcttctatttctggtccacagagatgcttgcttttaagcccagttatttctttttggattttctctcttttaaaaatctatcgctatatgcaagggggaaaatatactatgttatctaaccaaaagtctgaagttctgggagtgggtgttctatgcagctatattaaagcagatgaacaaatggccaaggtactttaaaaatctatctttatggctaggcgccatggctcaaacttgtaatcccagcactttgggagatccaggcaggagtttgactgctcgagaccaggagtttgagaccagcctgggcgacacagcgagaccctgtctctatgaaaaataatttctaaaaaattagctgggcatggtggccaggaagatcacttcagctcagagttcgaagctgcagagagctgtgattatgccacggcactccagcctgggcgacagaacgaaaccttgtctcttaaaaaaaatctatcctagctgggcgcggtggttcacgcctgtaatcccagcactttgggaggcagaggcgggtggatcacctgaggtcaggagttcgagaccaccctggccaacgtggtgaaaccctgtctctactaaaaatacaaaagttagccaggcatggtgacgggcacctgtaatcccagctactcgggaggctgaggcaggagaatcgcttgaacccaggaggcagagcttgcagtgagccgagattgcaccactgcactccagcctgggtgacagagagagactgtctcaaaaacaaacaaacaaaaactatccttagattaagacatggacgtggtgtacatgattgcttttgctgcatcttgccacctattttcagcgagggccagaataggaagccactggatggaattctttgctgtgcttcgcagctgttcagaacacgttctttacataatgccttttaaagaaatgaggttctatgggagaagcctctgtgtcaggactaattatgcttcccttggagacaagaacaccaaatcatggtgatgttttccttttcccactggtgttaggatgcttacagtcaaactgttgacccacatgtagcaagaacaccatagggagccttcctggcacagcctttttagaggcagccttcttggtgcttatctgtcttcaatttctgtttcctgtccttatttaaaaaaacattattgcatcccgtgaatgtatgtgattgaccttaaaatcttttgcatgaaggcttagtataatttaataaaaacggccttatcttattttcccaagtcgactgggtagcggctgtggagcgctctgggactcccggtgtgctgctggttagtaaaggttggccttggcagctatgaacataggcagagccccctcctcaatccgcctcccacccctccaaggaagggaggccggacttggcttaaacaggtcgggcagccactggagcctcccctcccccgcatccacaacatacccatcccactcctcagccctggcgcggccccgcaccccggcctccactccctcgagccccctctccgggtgcagccccggcgtcccctgaccccggtgcacaccccccgccccagcgctgcccctcgccgccgccaccagccctgggcgcggcctccggagctccccatcacacagccgggcgcggcctcacccccccccgcccctcccgccgcagcctccagttgcccgcgtcaccttccgggtccccgcctcccccgccgtccccacccccgcgccgcctggcccgggggggcggcgcggcccttccggccggggcggggccgggcctggggcgctggggcgggcgggcaaggcgggctcgccctgccggcggcgcggccatgctcatcacgctgtgctacctgtacctgtgggcgcgctggggtcgccggccggctgagctcgtgcgcgccacggtgcggcggctgcgtgcctcgcgctgttccttcaccttctgcggcgcggccgcgcagcccccgggcgcccgcgtgtgcctgagccgtggcggccgcgtcttctgcgtcagcgacagccaggtgggcgggtcgggcgggcgggcgacccgggccccgcgagccggaagtgcccccgtccctgcgcctcgtccccgccgggagcccgggagttcgggagccccggagtggcgccctcagtgcggcctgtgcggcccgggaggggctgttgccccggggcccagagagaggcc

SEQ ID NO: 27399 - DNA, 2300 bp, Homo sapien
tgacacccctggcattgtcctaggattcatgggtctaatcccagctacaatgcgtaaatttagacgtggacaataggggatctgtaattagctggatcattgcctctaggagattttcttgactaagaaccacaatatgaagctttgtgtttgaggacctcataattctccaagacagtttgtgaaaatcagtataaatctaaaattgaaaggaaaatgtgtttgacctgaaaaataccgagtcaaaaacaaaagtcacttttaatgggagtgtacattggtataactgctttggaaaacagtttagcattatctcttaattctgcacattaattagcttgctggacgtatgcctggtgtagtaatgggtccacacccagagaaatgcttgcccaggggctccaggagacgagtggatgttcagaacaatattatttgttagaggaaacaaactggagataaccccatgttgatccccaggagaatggctaaacaaagtaggatatgatcacaaatagaatattagatagcagtgaacatgaataaaatgcagctttgcgaaattgtatgtgtgaatcttagaaacattgaatagaaagaatgcaaggcttggaaatctgcttattgaataatattcttataaagcaagaaaaaaaaaacaaccatacctagcctcagctcttgtgttatgagaaaccccagcagtgataggatgtctcatttgaaattttctttgtggtagggctattctgcacaacatccataaacacttcccgggcatcagacttgattcattttcctatttatttcctcctctttgggagagagtattctaattaacatcatgtgtgtcccaccacagattaaagaattcccccattcccctaaactgagaaggagaggctgcaagtctttgcttgaaatttttgtgctgaaagtgaagcattcagggttccagtggcagaattaggactccatccttagggtagcaggagaagtctggtagtgcctttagaaaaggaaggttaaggccggatgcagtggcttacagctgtaaccccagcactttgggaggctgaggtgggtggatcacctgaggtcaggagtttgagactagcctggccaacatggtgaaacactgtctctactaaaaatacaaaaattatctggacatggtggcgggcgcctgtaatcccaatacttaagaggctgaggcaggagaatcacttgaacctgggaggcggaggttatagtgagccaagatcgtgccactgcactccaggctgggtgacagagtgagactccgtctcaaaaaaaaaaaaaaaaaaaaaaaggaaggttaagagttaatagattaatagattcagctctcagttcctcatcagaattagggaggagtaacatggggaaagaaatccagaataactagttaagcccatacattgcacctccttcatcaaataacccatcaggagtgccaaatttggctacttttgtctgtcactcattttattcagcaaaaccttaagccaacttcattattttgccaggaaaacagacccatttcctgcccttgaaggtttgcagtctcaagggggaaagcagtacaacctttacaagcagttatcaaggtgggtgggtggtgttgcaggcgagcgtggaaggggcccacctggccagggggcaggccatacctccctgggaggtgacgtttgacctatgaggcaagccctaaaggacaggtagggatcccccgcggatgccgtgctggcgaggcagggcctgagcagccagtggagaagggcagcgggaagtgcgctgtgcaggagccagacgtctcagcccgtgtggccagaggtggcaggggcgcggcctgagcggggctggggcgcgggcaggatttggggctgcgccgaggggcgtcccgacctggccctttgccacggtaggttccggctcccatgcctccgctgccatctgcgctgtccttggcgactacgccttcacccccctgggtgcgtttcagcggtcccggagcctggcgggagcggggccaggagcgctccgcggccggtatcaggcctgcaggtagggacgcgcggccgcccggggctctggggactcgggtgtccaggtgccgaagtcgccgcttccacgggggactcaggcccgtgagtgggtttcctaagaacttaccagattccacggctcgggtttcctgccttggatcctgctttttattccccagggggagttatttatagacaggaatcgtgtgttcaaggcctggctcttcggac

SEQ ID NO: 27400 - DNA, 2300 bp, Homo sapien
tcaacctcctaggctcaagagatcctcccccctcagcctcctgagtagctgggactacaggcgcacgctgccatgcctggctattttttttttttaagagatggggtctcactgtgtcacccaggctggctctgaaactcttgggcccaagtgatcctcccaccttggcctcccaaagtgctgggattacaggtgtgcccatgacactcagctctaatttttttttaaagcgttatttttagaatagtttaagatttacagataatttgcaagatagtgcagagagttcccataaaccagtttcctcatatttgtatcttacattagtatggcacatttgttaacaattaataaaccaacattggtacgttatattattgatattattggtacattatttaaatttcctccattttctaccaatgtcctttttctgttccaggatcccatctaggacaccacttacatttaaccatcatgtctccttagatgcctcttggctgaggcagttcctcacactctctttggttttggtgaccttgtcaacctccataacagagaggttctctaaaagaaaatggtatttatttgggaacagggcattgcaatggagccatgtgggccattttaagctatgtgtgtgaaattcagggaggtaaaggaagaccaagatttttaaagaaaaaatgaggaggattacatattgtttttgataattagcctcagctacaagtatcgatcagggtgataccagtctgaagttggacaggctattgctgggcagatgtcctggcaggaatcttcttttgggaaggctgacatggcctctgtggacagtgttgatcttttatgagcatttgtgacatcacgcatttaggaacaagaatcctcttcatggctttccccagctctatttgtcattttttttttctctctcttttaacacaaatgactccaccattttgattctgaccacattcacaaccttgaccgattttaggttggctattttgtacaatgtccctctgctgggatttgtctgatgtttttctcacgattaaactgggttattggtttagggagtttggtataaaaaatctatttggtctttgtccccagttcctgacacagaactcctaaaccccttggaatttcctaggcaataggagtgtttttgttattcataatgactcccttagtcaaatcacagtttctactaatgaggtggctaattgcgggctctaggatggattcagggtggggctggtgcaacacaccatgtgatcagagggttgtaactttcattcagctccaacatgtccctactcctcttgcgggaagggaaaggggctggaggttgaattcaatcactaatggccaatgacataatgaaacctggataaaaatctcttaaacagggttcggagagcttccaggcaggtgggcacacagaggtgctgtgaggacagcactcccgcccttcaccccccgtgctgcgcatctcttgcactcggctgttaccgagttgtgttctttacaataatcttctaacagtaaagtgtctccctgagttctgtgtcgtcccagggaattgctgaacctcacgggagctgtggcaatccctcagtttctagtgggcagggtagaaatgcgggcattctgggcaccccgcttgtggctggcgaagggagggcagtctccctgggctaatcccttaaccagtagtttcgcgctaattcagctggtgtcagagaactggggaataggtcgtcgatgctggaaagggcaacgtggtgtttggtgccggtcagggaggaaggcgcggagggaaggtgtaggcctgccttccgcagggcagggtgaggttcggccctgtaaggccgcaggagtgggcgaggctagagcgagcgcggcaagaaggcggcagaagcgcgcctcccaggcagcgtgggcgagagaggacaggtggccgagaggcagaagctggctagcggcgaaaggcccgcgttcccgagcgcgcggcaccgcggccagggcaggaggaggccaggcggccccgcggccctgcgcagagagcccagttgcaccaccaggcgggccacgagagggcgcagcgcggcgcggcagggattcgcgggcgaccacccggcgcaggagcggccgcgtttcggcctcagaagtaagtcggggcgctgcgggccgggacaggggtgggcgttcgccgggggcgtgctggggccgggcgagggtcaggcagtccaccgcgagcctctgccagggaacagccgtctcctgagtcg

SEQ ID NO: 27401 - DNA, 2300 bp, Homo sapien
gtgtcaccacacccggcctgggtgaacatttttatggcacacaatacaccttatcaaactttttcattgcattgccaccagctacctagaagacactcatttaaaaacatccacacctagccaggcgtggtggtgtacacctgtagtcctagctacttgggaggctgaggtgggaggatcatttgagcctggaaggttgaggctgcagtgagccgtgatcatgccactgcactccaacctgggcaacagggcaagactctgtctcaaaaaacaaacaaacaaaaaacacaacgaaaacaccccttctgcacccagttgcccagtgttctttcattttcttttctttttttaaaaaattatatatatatatatttgagaaaaataacagcgtctcactctgtggcccaggctgggctgcagtggtgtgatcatgtcttactgcagcctcaacttcctcgagctcaggtaatcctcccacctcagcctcctgagtagctgggaccacaggcccactccaccacgcctggttaatttttgtatttttgtagagacggggtttcaccactccggccaggctggtctggaactcttgacctcaagtgatctgcctgcctctgcttcccaaagtgtgcagattacaggattgagccaccgcgccctgcccagtgttcttgtaaaaccccattctgcatttagattaaatatggtaccttattgttgcaatatggcccactaatgttctttgcctccttctagcctcctcccattaattcccccctcttaaatgtttgcctttatttagatttaattattgttgctcaaaatcttaattaaaaaaatgtgaaaacactttaatgtctgaagttcttcgattttttttttttttttttttttgagacagagtctggctcttgttgcccaggctagagtgcactggcgcgatctcggctcactgcaacttctgcctcccgagttcaagcgattctcctgcctcagcctcccaagtagctgggattacaggcacccgccaccacacccggctatttttttgtatttttcttagtggatacggggtttcatcatgttggccaggctggtctcaaactcccgacctcaagtgatccacccgcctgggcctcccaaagtgctgggattacaggcatgaaccaccgcgccttgcggaagttcttcgatttttttttttttttttggaaagggaatctctctctgtctcccacgctggagtgcagtggcacactctcggctcactgcaacctccgcctcccagattcaagccattctcctgcctcagcctcccaagtagctgggattacaggagcctgccaccacgcccggctaatttttttatttttagtagagacgggtttcaccatattggccagactgatctcgaactcctgacttcaagtgatccatccacctgcctcggtctcccaaagtgctgggattacaggtgagaaccaccgcgcctggcctagttcttcgattttttaacatccatcacagtaacttaaattatataaagtaactacccctgaggagcccggggtagttgaaggccctccagcgccttcggtgttctgtcgcagtgctctacgtgtgaaaccgctttctcccaccctggccgtgcgctggtgatggtggcagcggcgctccagcgacgcccggggaagtgtccccagggtcgggcaaggtcgcttctgctggtcgggaggccctttctaagcctggctggggctaaccgaaggagaagcccgccgctccaggctttattaaaaattcgcattctttccaaggccgccatcggtgggaagggtgcgctcgtagcacccctcttgctcggttccattcctggccttctgtctcctggaagggtcgccgcgccccaccccacccgcttcgccacgggttcgagccctggcgtcggggcgtccgggagcccactgtccagcaccgaaggcaaggccggtgcacgcggacccgaggattcggtagatgtccccgaagacccgctgccgctctaaggcggtggaagcgagattctccggaaacccagggaatccgatgctcgcacaggaccaaagcccgaggccgcggggaccacagagggacggagaagccgggactcctcacatcccacatccggcaggggaagcccagcaggtgagcgcaggtccccccagtccccgagggagtgcgcccgacggaaacgcccctagcccgcgggcctcgctttcctctcccgggttcctgggtcacttcccgctgtctccagcccg

SEQ ID NO: 27402 - DNA, 2300 bp, Homo sapien
gctgcagtggtgtgatcatgtcttactgcagcctcaacttcctcgagctcaggtaatcctcccacctcagcctcctgagtagctgggaccacaggcccactccaccacgcctggttaatttttgtatttttgtagagacggggtttcaccactccggccaggctggtctggaactcttgacctcaagtgatctgcctgcctctgcttcccaaagtgtgcagattacaggattgagccaccgcgccctgcccagtgttcttgtaaaaccccattctgcatttagattaaatatggtaccttattgttgcaatatggcccactaatgttctttgcctccttctagcctcctcccattaattcccccctcttaaatgtttgcctttatttagatttaattattgttgctcaaaatcttaattaaaaaaatgtgaaaacactttaatgtctgaagttcttcgattttttttttttttttttttttgagacagagtctggctcttgttgcccaggctagagtgcactggcgcgatctcggctcactgcaacttctgcctcccgagttcaagcgattctcctgcctcagcctcccaagtagctgggattacaggcacccgccaccacacccggctatttttttgtatttttcttagtggatacggggtttcatcatgttggccaggctggtctcaaactcccgacctcaagtgatccacccgcctgggcctcccaaagtgctgggattacaggcatgaaccaccgcgccttgcggaagttcttcgatttttttttttttttttggaaagggaatctctctctgtctcccacgctggagtgcagtggcacactctcggctcactgcaacctccgcctcccagattcaagccattctcctgcctcagcctcccaagtagctgggattacaggagcctgccaccacgcccggctaatttttttatttttagtagagacgggtttcaccatattggccagactgatctcgaactcctgacttcaagtgatccatccacctgcctcggtctcccaaagtgctgggattacaggtgagaaccaccgcgcctggcctagttcttcgattttttaacatccatcacagtaacttaaattatataaagtaactacccctgaggagcccggggtagttgaaggccctccagcgccttcggtgttctgtcgcagtgctctacgtgtgaaaccgctttctcccaccctggccgtgcgctggtgatggtggcagcggcgctccagcgacgcccggggaagtgtccccagggtcgggcaaggtcgcttctgctggtcgggaggccctttctaagcctggctggggctaaccgaaggagaagcccgccgctccaggctttattaaaaattcgcattctttccaaggccgccatcggtgggaagggtgcgctcgtagcacccctcttgctcggttccattcctggccttctgtctcctggaagggtcgccgcgccccaccccacccgcttcgccacgggttcgagccctggcgtcggggcgtccgggagcccactgtccagcaccgaaggcaaggccggtgcacgcggacccgaggattcggtagatgtccccgaagacccgctgccgctctaaggcggtggaagcgagattctccggaaacccagggaatccgatgctcgcacaggaccaaagcccgaggccgcggggaccacagagggacggagaagccgggactcctcacatcccacatccggcaggggaagcccagcaggtgagcgcaggtccccccagtccccgagggagtgcgcccgacggaaacgcccctagcccgcgggcctcgctttcctctcccgggttcctgggtcacttcccgctgtctccagcccgagctcgtggccccaatccctggtacctccatcctctggtcaccccttctctggtgccccctccccgacttttctttgtcccgtccccacccttgcccgggcctgccggacccccctccttgacacccggcgccacctccttgagcttttctcgtctcctccccatccccggctccctggtcccctcccggaacttctctggtcccctccgctcctccgacccgggcttttccttcgtaccctgcggccccctccgcacccctcacggagctcctcgggtcctgccccctcccagcgcttgcccgcgccgccccgcccccgtttttaaacctggcgcgcgggtaggtgagcgcgttagcccgagtggatctaggcgcgctcgtaggccggcgccgcagcaaggggcgcgggctc

SEQ ID NO: 27403 - DNA, 2300 bp, Homo sapien
cacttattaagtccctaactgttcctaggcattattttacgtgctttacataaattacccccgttaatcctcacaacagtcagaagaggcagcagagtgaagtcagccagtgtatttgggttcaaatttagaaggcttttatttagtagctttgcaatcttgagcaagttactgaaaccacaggatgctcatctttaaaggacagtaataacagaacctaccccatagaactgtttcatgcgtcataagcatttaataaccatcattatcactacccttttacagataaggaacctgaggctcaaaaaatttgctgagggtcccagctcacatggctaatctgtggaggagtcagaattcgaactcagttgtaacttcttcacttcacttcagttttaatagcctggccattacattcatctgcaagctgtgctgatggtgcaggctgatatattttagttagggttcagaagtactaccactcctccactttcctggtttccaaacagttgcagaacgttggatcacgggcactcaattttctcccttttgtgtgcctcaaaattctcaaatcattttggggagagacttgggacttgctgtgtgagtgggcatattagtgtcttagtgagcatcagtctccttatctgtaaaatggaatgttatggggttaaattaagggagatccaggacgcaaacgacacacctttcaacccgacttctctggcctacttctcctgttccccagatcccgcagggcacactggtgacatcacaagctcctcgggtccaaaccctctcacgccctcattcaaggcctttccacttcttccctccctcttactctttcctaatcagcatcagtgccagggggaaaggcctctgtagaaagccttgactttccagtctggtttcaatgtctctccaccgtgctccctgacactcatcacactgagcattaactgtagatttacccatctgtctcctccacaagaccacgacctccttaagggcagggaccaggctttatccactttgccatcgcgtctggtgctgtataaatatttgtagagactaaaacctcctaggctagtgctggcacacggaacactcagcaaacacgagatcccttcagattttcttaaaaagagacatagggagaaagaatcaacagttcatgtgtgcacagtctaaccaatgtattcttcccttgtcactgaacgccagaaaaagcccctggccatccatcaggaaagtacttactgaagccaaattgggagcttaagaaaagaacaaagccataaatcgctctttctggcaatggcgacggtgaattttccaccatttttcctggggctttagacaatctgtggaaaaggaacacaatcagcgccagcgatgtgctccgtggcaccattgatccattctcgcctcctcgctccgccgcgggtacggcccccgccgcgcagaaccgcctcccgcgcctccgtccgcaacccgcgcccccgcctcgagcgcatacagacacccaggctggcgcgcgccccgcaacagaaggggtggcggaggatagggcagggaggggggttctggggcgatagacgcgcgctccagctctgcaagcgtggcctccctgtgggaggggagggcagggaacaaggctcgcgcggcgcccaccagcatgcgggcctactaggtcgcggcgcccaggccccgggccctgcccattcgtggagacttctatttctcattcgaggcggggtatgggggggccctcgacctcgggtccttcatacgcccacccaggcccctcccgacacctcggccacctcagcgctgagttctccgcgcaagcgccgactggggagccgcagtggggaagaggaaaacctgagggaaaggcctaggcgcgacggcaacccccaccctggcgcaggcgcacaacgaccctccccgggtgggagccagcgagcgcgggggcgggcgtgatcccgcggctcgcgacggcgaaggagggggcggtggggtgcgactgcgcacgcgcgctgccagcccacgtgacgcacctcgcttcaacgccgccacccgctccctcccgccgtcggctgacgtggagggccggaggtggcggcggcggcggcggcggctgctgctgctgctgcccgcgtccgaggctcgcgggcggcgggcccgggtgagtgcacacccggcgcgctgccgggctcccggatgtgtcaccttgtcccgctgcagccgagatgccgggggagcggggccttccacaccccctccgtgggtgt

SEQ ID NO: 27404 - DNA, 2300 bp, Homo sapien
tgagagcaattttatttctttaaaaaaaaagagtatctgaagtaaatttggcaaaagattaaataatcacgtctgtaaaatctgaatcatggattggttagctccccctctgtatttgatatctgaaatattccaaaaattaaaagaaaaaaaggaaaattagacaataagaaaattgggcagaacaaagacaccaaaacgcagcccttgagcgcagagcacgaaaccttgagcaatcggagcagtagctgggtctctaaggggtttgaagtttcttaccctaggtatccttatactatatcccattttccttaggataaatcgcaaatttcttgcaacaaaaaatgtcctaactagagtcgtagttataaggaaaaggctctctccggaggagtaaaatctgtaaaatttctaccttgtttccctcgccaggatcttgggcaaaatggaaagagatttaggtgaatgccataaaatactctataaaccattaaatatcatcaagaacgcctaaggaccgcatcgcccagtaggagagtgcatatattttgaaaggtctctgcaactgagggggttttggcgtccagggcgccactggaaaaggcacggcgcactggtaccagcccaaattcacctacgtctcggcttcattttttatctttgatccccctattctgtctcctgaacaggctggctgaagaggccacactggcagcgtcaacactgcggagcagctggccagactcgatcctgtccaccccccttcccattagcgtctgtgggagagaatgctcagaaagaggcgcgggggcgaggggagcggcgaggttacccccctcctgggtccgttccgtggggacaggccctggactggactgccagttcacacgaaaacaggtggcaacagagtcgtgacacgcacacacagcaaggggtgtgcacgaacgttcacgctcaccaacgaaacctgcacacaagagatacccactcgacagaattaaatccgcacacaagagatcacgcactcaacaggacccatgcgcagacactctgcgtcactcggagacacgcaaggacgcacacttgcgcgagcaaggctctaggcgggggtcgcaattgcagaaggcgcggccacgcgcgctaggggacgcgcagcccacagacaggggcagtaacacaaaggggggccacctgcaaggccgagagcgcccacgcagccgccagggagcgcggacaccgacacaaaaggggcgacgaggcgacacgcgagcgcctccacccagcggaggtgtcagccacgcaccggccgaggcacgggcagcggggggttgcgcacaaagggactactcacaccctcgcaccggcatcccagggcctcgctcgcgaaggggcaccagaccaagggggcaaacccactggggtaggcaatggcggccacaccccctcatcgcgcgggacccaacccatgcagacacagtaggcacctcagcgagggacgcgaggagacgcgcacacacccacactcaccacacacccacggagggggtgtggaaggccccgctcccccggcatctcggctgcagcgggacaaggtgacacatccgggagcccggcagcgcgccgggtgtgcactcacccgggcccgccgcccgcgagcctcggacgcgggcagcagcagcagcagccgccgccgccgccgccgccacctccggccctccacgtcagccgacggcgggagggagcgggtggcggcgttgaagcgaggtgcgtcacgtgggctggcagcgcgcgtgcgcagtcgcaccccaccgccccctccttcgccgtcgcgagccgcgggatcacgcccgcccccgcgctcgctggctcccacccggggagggtcgttgtgcgcctgcgccagggtgggggttgccgtcgcgcctaggcctttccctcaggttttcctcttccccactgcggctccccagtcggcgcttgcgcggagaactcagcgctgaggtggccgaggtgtcgggaggggcctgggtgggcgtatgaaggacccgaggtcgagggcccccccataccccgcctcgaatgagaaatagaagtctccacgaatgggcagggcccggggcctgggcgccgcgacctagtaggcccgcatgctggtgggcgccgcgcgagccttgttccctgccctcccctcccacagggaggccacgcttgcagagctggagcgcgcgtctatcgccccagaacccccctccctgccctatcctccgccaccccttctgttgcggggcgcgcgccagcct

SEQ ID NO: 27405 - DNA, 2300 bp, Homo sapien
aatatgatgctgagcaaaaaaaaaaaaagcaagttgcaaaaaggcatgtatattttaatgccattaaagtttaaaaacaaacaataatatatattgtgtatggattcaccttgatcaaagtataaaatatgcaaagtaaagatatacacaaacctcaacgcagtggctatctctagaaaaggaggggaaggaactgagagcaattttatttctttaaaaaaaaagagtatctgaagtaaatttggcaaaagattaaataatcacgtctgtaaaatctgaatcatggattggttagctccccctctgtatttgatatctgaaatattccaaaaattaaaagaaaaaaaggaaaattagacaataagaaaattgggcagaacaaagacaccaaaacgcagcccttgagcgcagagcacgaaaccttgagcaatcggagcagtagctgggtctctaaggggtttgaagtttcttaccctaggtatccttatactatatcccattttccttaggataaatcgcaaatttcttgcaacaaaaaatgtcctaactagagtcgtagttataaggaaaaggctctctccggaggagtaaaatctgtaaaatttctaccttgtttccctcgccaggatcttgggcaaaatggaaagagatttaggtgaatgccataaaatactctataaaccattaaatatcatcaagaacgcctaaggaccgcatcgcccagtaggagagtgcatatattttgaaaggtctctgcaactgagggggttttggcgtccagggcgccactggaaaaggcacggcgcactggtaccagcccaaattcacctacgtctcggcttcattttttatctttgatccccctattctgtctcctgaacaggctggctgaagaggccacactggcagcgtcaacactgcggagcagctggccagactcgatcctgtccaccccccttcccattagcgtctgtgggagagaatgctcagaaagaggcgcgggggcgaggggagcggcgaggttacccccctcctgggtccgttccgtggggacaggccctggactggactgccagttcacacgaaaacaggtggcaacagagtcgtgacacgcacacacagcaaggggtgtgcacgaacgttcacgctcaccaacgaaacctgcacacaagagatacccactcgacagaattaaatccgcacacaagagatcacgcactcaacaggacccatgcgcagacactctgcgtcactcggagacacgcaaggacgcacacttgcgcgagcaaggctctaggcgggggtcgcaattgcagaaggcgcggccacgcgcgctaggggacgcgcagcccacagacaggggcagtaacacaaaggggggccacctgcaaggccgagagcgcccacgcagccgccagggagcgcggacaccgacacaaaaggggcgacgaggcgacacgcgagcgcctccacccagcggaggtgtcagccacgcaccggccgaggcacgggcagcggggggttgcgcacaaagggactactcacaccctcgcaccggcatcccagggcctcgctcgcgaaggggcaccagaccaagggggcaaacccactggggtaggcaatggcggccacaccccctcatcgcgcgggacccaacccatgcagacacagtaggcacctcagcgagggacgcgaggagacgcgcacacacccacactcaccacacacccacggagggggtgtggaaggccccgctcccccggcatctcggctgcagcgggacaaggtgacacatccgggagcccggcagcgcgccgggtgtgcactcacccgggcccgccgcccgcgagcctcggacgcgggcagcagcagcagcagccgccgccgccgccgccgccacctccggccctccacgtcagccgacggcgggagggagcgggtggcggcgttgaagcgaggtgcgtcacgtgggctggcagcgcgcgtgcgcagtcgcaccccaccgccccctccttcgccgtcgcgagccgcgggatcacgcccgcccccgcgctcgctggctcccacccggggagggtcgttgtgcgcctgcgccagggtgggggttgccgtcgcgcctaggcctttccctcaggttttcctcttccccactgcggctccccagtcggcgcttgcgcggagaactcagcgctgaggtggccgaggtgtcgggaggggcctgggtgggcgtatgaaggacccgaggtcgagggcccccccataccccgcctcgaatgagaaatagaagtctccacgaatgg

SEQ ID NO: 27406 - DNA, 2300 bp, Homo sapien
tttcatcaagtttatggtatggttttttttttttttttttttttttttttttttttaagatagagtctccctctgttgcccaggctggagtagtgcagtggtgccatctcattgcaacctctgcctcctgagttcaagcgattctcctgcctcagcctcctgagtagctgggattacagccgtgcgccaccatgcttggctgatttttttgtatttttagtagagacggagtttcaccatgttggccaggctcttcacaaactcctgacctcaagtggtctgcccacctcggcctcccaaagtgctaggattacaggtgtgagccaccgctcgtggtatggcattaattctctttttaatctctgttttatttgtatatgtgttccccttttctcatgttgaatattatttatgtctgacttctctttcttgatcagtcttagtaaaagtttgtccatttttaaaatcttggcaaaggattaacttttggcctaatttgttctattatttgttttttatttcattgatcttttttctcttttattatttcattttactttcagtttattattttactatttttttcacttaaattacacacttaatattaattttcaaccattccgatttcctagtataagcatgcaagactgtaaacttcctcaaagttcatttttgcttatctaacatagtttaatttatagtgttttcattaactttcaaatctaagtatttttacaatttctattttgattttttctttgacttatgagttacttagacatttttaaattttcaaatgtgtctatattgttttcctttaattatcgatttcttacttgtgttgccagagaatattttatctttttagcatttttttttttttgcccttgctttatggccttgtacatagtgaattattagaactgttctgtgtacacttgtgaagagtatatattctgtaattgttaagtgtctattaggtaaagcttgttatttgtgttgttctgatagtctttatccttattaattttggtttatcctatcattaactgagagaagtgtgttgcaatattccaccattactagtttctaacagatttcctgtagttctaacaatttttgttcttctgtattttgagacttttattagctacatgcaagcttaacatttttttcctagtggctcgaacctttactatattgtgatcttctctaagtttgcttctttgtcttagaggctttttgtctgatcccgtctttcttttggtgctaatttacctggaatattcttttctttcattttactttgattttttttagtgtccttacattttaagtgtctcttataagggacatactactggatttttcttttaatctcaccagacaacttctgtcttttaattggttatgttccaggtgtcttggttggtgtttgactcagttttagatattaaaaaaaatctaaaagtatttttattttacctttgttcttgacagatcattttgatggatgtacaattgtaggttggtgtttcttttctgtcagtagggtaggaatactattctgctgttgcttatacaaagtgtgctgccagttttatttatgcctttttttttttttttttttttttttttgaggtggagtcttgctgtgttgttaggctggagtgcagtggcgccatcttggctcattgcaacctccgcctcctggattcaagcgattctcctgcctcagactcccaagtagctgggactacaggcacctgccaccatgcctggccaatttttgtatttttagtagagatggggtttcaccatgttggccaggatggtcttgatctcttgacctcgtgatctgtccgcctcagcctcccaaagtgctgggattacaggcgtgagccactgcacccagcctatttatgcgttttttgaagaaaatatcatttttcttttagttacattggattttctgtcttttgtgttacatcatttcacttctaagtctagatagagattatatttatcctattttggatgcatgtgtttcatgattctgcattttgtctttcatgagatctagaagtttctgagccctgtattctttaaatattatgtctcattagtctcttctctcctgctggaactttaactggatatatatatacactaaactgtttccagatcacttattctttatctttcatattttttatctctttgtttctctttaccagaatttacagtgctggataatttcataaggcatatattttagttcaccaattttctcttca

SEQ ID NO: 27407 - DNA, 2300 bp, Homo sapien
agggacatactactggatttttcttttaatctcaccagacaacttctgtcttttaattggttatgttccaggtgtcttggttggtgtttgactcagttttagatattaaaaaaaatctaaaagtatttttattttacctttgttcttgacagatcattttgatggatgtacaattgtaggttggtgtttcttttctgtcagtagggtaggaatactattctgctgttgcttatacaaagtgtgctgccagttttatttatgcctttttttttttttttttttttttttttgaggtggagtcttgctgtgttgttaggctggagtgcagtggcgccatcttggctcattgcaacctccgcctcctggattcaagcgattctcctgcctcagactcccaagtagctgggactacaggcacctgccaccatgcctggccaatttttgtatttttagtagagatggggtttcaccatgttggccaggatggtcttgatctcttgacctcgtgatctgtccgcctcagcctcccaaagtgctgggattacaggcgtgagccactgcacccagcctatttatgcgttttttgaagaaaatatcatttttcttttagttacattggattttctgtcttttgtgttacatcatttcacttctaagtctagatagagattatatttatcctattttggatgcatgtgtttcatgattctgcattttgtctttcatgagatctagaagtttctgagccctgtattctttaaatattatgtctcattagtctcttctctcctgctggaactttaactggatatatatatacactaaactgtttccagatcacttattctttatctttcatattttttatctctttgtttctctttaccagaatttacagtgctggataatttcataaggcatatattttagttcaccaattttctcttcaactgtgcctaatatcctctgtaacccatcctgtctcttttttttcttttaacaattgcatttttaattactttttttttttttttttaagatggagtctctctctgtcgcccaggctggagtgcagaggcgcgatctcagctcactgcaagctccgcctcccgggttcacgccattctcctgcctcagcctcccgagtagctgggactacaggcgcccgccaccacgcccggctaatttttttgtatttttagtagagacggggtttcaccgtgttacccaggatggtctcgatctcctgacctcgtcatctgctcacgttggcctcccagagtgctgggattacaggcatgagccaccatgcccggccgcatttttaatttctaaaagttctgcctggttcttttttgatatgtccagtcattcttcatgttctcatgttatatgctgatttttgtgactctatagctattctgtagactatatcagacattcccaatgtctgatatccttgaggagggggatgtctaaatttattgcttttttgtttttttttctgttgtctctcctcaatgtagctgtcacctcatgtgtttggtgatcattgattatgaacttctgtttgatctttgtggtgatcttgagagtctaatttgaggatgcttgctttctgaaagcatttctatcagctttgtctgggagccagaaagtttagctggcatcacttttgagttcctacattttgcttctggcccagggctcagtgtcctgatcctattactgctcttggcaccactacttgtagcactaaactgtagccaggtttaatttctagctcaaggtttgttgcttttgcgtggagagggtgccttcacatgttcccctatttctatgagctcagcaaaaacatccaaaaagtgtttttttttttaatctaggatatacctttttcctcccaacagtacattcccccagagtgtatagttgaccataactgatgggatcagaagctctttattttaatatttaattttagtagtatatttttgtttgattgtattataaaaaattttatggtaccaagcaagctttcttggtgataccaacatttccattaaaactagtttacatctaagttaagatttgagttatcctaaagaaaagtattaagtaaatagcagtacagatggcaaatggattgcacaatatatcctctggatccatagtgaccctgcagagataaacctgtgatggtcaaacaatgtgaaaactgctgtcagagacatgggcagggtgctcttgtttacagagaagaggtgcaaaaatcaacttgatggtagtgggaagatcag

SEQ ID NO: 27408 - DNA, 2300 bp, Homo sapien
cctattttggatgcatgtgtttcatgattctgcattttgtctttcatgagatctagaagtttctgagccctgtattctttaaatattatgtctcattagtctcttctctcctgctggaactttaactggatatatatatacactaaactgtttccagatcacttattctttatctttcatattttttatctctttgtttctctttaccagaatttacagtgctggataatttcataaggcatatattttagttcaccaattttctcttcaactgtgcctaatatcctctgtaacccatcctgtctcttttttttcttttaacaattgcatttttaattactttttttttttttttttaagatggagtctctctctgtcgcccaggctggagtgcagaggcgcgatctcagctcactgcaagctccgcctcccgggttcacgccattctcctgcctcagcctcccgagtagctgggactacaggcgcccgccaccacgcccggctaatttttttgtatttttagtagagacggggtttcaccgtgttacccaggatggtctcgatctcctgacctcgtcatctgctcacgttggcctcccagagtgctgggattacaggcatgagccaccatgcccggccgcatttttaatttctaaaagttctgcctggttcttttttgatatgtccagtcattcttcatgttctcatgttatatgctgatttttgtgactctatagctattctgtagactatatcagacattcccaatgtctgatatccttgaggagggggatgtctaaatttattgcttttttgtttttttttctgttgtctctcctcaatgtagctgtcacctcatgtgtttggtgatcattgattatgaacttctgtttgatctttgtggtgatcttgagagtctaatttgaggatgcttgctttctgaaagcatttctatcagctttgtctgggagccagaaagtttagctggcatcacttttgagttcctacattttgcttctggcccagggctcagtgtcctgatcctattactgctcttggcaccactacttgtagcactaaactgtagccaggtttaatttctagctcaaggtttgttgcttttgcgtggagagggtgccttcacatgttcccctatttctatgagctcagcaaaaacatccaaaaagtgtttttttttttaatctaggatatacctttttcctcccaacagtacattcccccagagtgtatagttgaccataactgatgggatcagaagctctttattttaatatttaattttagtagtatatttttgtttgattgtattataaaaaattttatggtaccaagcaagctttcttggtgataccaacatttccattaaaactagtttacatctaagttaagatttgagttatcctaaagaaaagtattaagtaaatagcagtacagatggcaaatggattgcacaatatatcctctggatccatagtgaccctgcagagataaacctgtgatggtcaaacaatgtgaaaactgctgtcagagacatgggcagggtgctcttgtttacagagaagaggtgcaaaaatcaacttgatggtagtgggaagatcaggaaatgcttcctgaaattgagtattaagaactaatagacattaggtggttgcagaataagttttgtttaggaaggacaagcagttgggtatgactggcttctaggttgtgtgttgtggagtgactggggataaaagcaggagcaagatcacaaaaggtcttctatgcttatattagggaagttggactttattctcaagctgaagggaagctgttgcatggttttaagcagtaaagtgatatgatcagagttttagaggatgccaagattgaaggcaagtctgaccagttaggagactgcttgttaaattagttcagaggagaaacagtgaaggcagtggcactgggcatgaagaagtatatgtgtgctaattttagatttcttagggaagcagaaatgacaagagttagtggtccattggacagaaatattgaaggagactggggagtctaggttgactcccagggtttaggtttgggcagtaaaatgacatgtagaacaattaactgataaacagcatacagaaagaggaaagaacttcatttcatatgtttgtttttgaggaaaagatgtttgtttttgaacttcctgattcagaggggcttgtgggacatcttggttaagatcctgtagtagttctagtagggtctagaagtcaagagatacaaccccgcctgga

SEQ ID NO: 27409 - DNA, 2300 bp, Homo sapien
aatcacatcaccatcaacaaatattttgtctttgggtaggtagactttatcagggcagatttgaggaggtgtccttcattatgctattgagataagttgagagtttttgtggtttttaatttttttttgaaagctattggatagctttttaaatttcagttggttatggagtcaagtgttgttcttggtactattaaatttagaaagggcattctgatgtttattttctgcagtagttatttgcagtaacatacaaaccagtgtacctttataaaaaaaattaagtgcaatgaactttattattattattatttttgagatggagtcaccctctgtcgcccatgctggagtgcagtgacgagatcttggctcactgccatcttcgcctcccggattcaagcgattctcctgcctcagcctcccgagtagctgggactgtaggcgcctgccaccatgcccagttaacttttgtatttttagtagaaacggggtttcaccatgttggccaggctggtctcgaactcctgacctcagatgatccacccgcctcggcctctcaaagtgctgggattaccagtgtgagcctgtagaaacctcacctctactaaaaatacaaaaattagccgggtggtagtggcacgtgcctgtaatcccaggtagttgggaggctgaggcaggagaattgcttgagcctgggacgtggaggttgtggtgagctgagactgcgccactgcactccagcctgggtgacagagtgagaccctgtctcaaaaaaaaaaaaaattcacatgtctaaagattatactaagttattttactgctagaaccctattggagactattttggaattcttgtcttaagatcttaaggggtaacttggtcatgtaaatgcttgtcggaagtgtactactgagtacatatagtagtgttcctaaaatgtaggccatttttccgttagaaaattcaagtagaattgactgaataaggaaaaaatatgtcctttttttatttttcagaatgattcattccttattggaggcttattgagaattggttgtaaaatagaaaatgtaagtgttaaacactgaaactggcacagccactgtggatgagtggcagtcatctcactgctcatttccccttgcattgggtccatacactcaatgttctatatgtggtatttggtagtattgacttctatattttccttaaggagactcctcattttgggggtttggatcattttctctcttttttttttttttacccatgtacatagtgtaattttgagcctattttacaagttgattctttttctcttttagattatttacctggcttatgtttccccaaatgaaattattaggcctctggtatgaatattttttgttatataattactaggtaatctccagattcaatgttaaaccaatttttaatgatactgatgccataaacatctatgtttaccttaagcccattgttaactttaatttttgaagttactttagacattagaagtacaaataacatttctgtgaattcttgatccttcatggagatcactgcactgagtgcccatttgcccagccacatcttcctcttgttctttatctccttattcttctgtttgccacagaccacgtaaaatatgtagttcctttggagaactttaatctataaatttaaccttggggtaaggatggaagtctttgtgtagatgagatctgagaaccctcatccaccttgttatattgcacttgcctgctaccccaggcagtctggccaggttgtagacctcaaattgcaggtctgtagtaattgcagaagcatcttgagctctgagggtggcctgaagtcacctgaagaggtaacatatatgagtccatagtatctgttaatttatatgtcagagtctgtctactctaagttacatgccagagtagcaaaaaataagtggttgtaccagttttgtagtaaggatctgaaatacttgcataagatgaatttataatgccacatgcaaatttagaattaataaccaaagccccattcttcatttctcttttgaaacagaaaatcttggcaatggaagaagctctgaattggataaaatatgcaggcgatgtaacaattctaactaaattaggatcaattgacaattgttggcctatgttaagtattttctttactgaatgtaagtataaatgctttaaattgttacttgactcagtttttaaaggtgtttgggaaaatgagatatgtagttaagtgatttctgatttatcttagaatttaa

SEQ ID NO: 27410 - DNA, 2300 bp, Homo sapien
atgggaataccactgacaggtgctcaataatactattgaacggcttttttggagactggcttgaacgcgcagcacgtcctggaggaacaggctgcttccgatcagccacagggcttcgttctgacagagctgcctggccagcccgttttggccctgtcagctgagtggcttcaggctgaccagggggtggccctggcaacagcgcagaaggagcctcccctggggaatcaccagcagagaacacactaggatccctgtgaagtgctgcgtggtttccagtcacgtcgcttgcagaagtcacaagcccttggccatcgtcgcctgaagactcagggagtaactcgggatgaacctgtgaggaacacaccacaccatggatcacttagggcttcccttgaaggatgaaacgcccaaggacaaaggccgatgaataaatacagtaacgcagcgcagaggctccgtgcacaggaaacctgaataccatgaattaaatattttcgttttaaaagaattcttgacaataacttgttagttattagaacaagagtaggagggctcagacttctaaataattatctctataagtcactattttctctgtaagatgagaccattttgcctgcctactggccctccttcagcctctacctggttacacttttccccttctgagctaaaccatgtagctgacagatggaacatcatggccaccacactccccagagctgtctccatcccagggggccgcctcctcttccctgccagctctcctggcagctctcaggcctccgtccacgcctgcagtgctgacactcctccccatgcagctgcctgaggccaaatctttttaaaagtttgcagtctagaatattttcctgagatccaaatctgcaaatccacttgggtgattccaaggcaactcaaagtcagtgttttggaaaccagcctcaggcagcctccccagtcctgctcttcccctagtactcctggacggaagcccaagactcaccctcaactcccacgtggacacatggggcctggtctcctgagcagcatggcacctgtaaatgtacccccaatcacctctcacatctgttctcttccctccacccccactgccatgccccatccaggacaggctgatggcaataaactgataatcgaacaaatggaaatcactcaagcccctccccaacattcccccacattagtggcaagctcatcttcaaaaagcatagtagcttcccgtaatcctcagggatacattctgagaccccccagtgaatgcctgaggtcgcaaagagtaccgaaccctacatatactgtacatgaatttctttttccttcttcacaatatcatgggtagatttgttctgaccatagatcttagcaacctcaggatacgatcttttctctttccttattgggttgagaactttcagcttttcacttaaaggaagcaatatattgcttctctatggcatatctgattgaccagcatcattactcccatgctttggggccattatggagtaaaataggggtgacttgaacacaggcactggggtaacgcgagaagttcatctggtcaccaaatcagcttctaagtggctcgcgggcagggagcagcaacagcatgaaaacactggacaaagggaggaggtcacaatgtgaccatgtgagaatacagatttcatcacgctactcaaaacagtgtgcaatttaaaacttaggaattatgtatttctggaattttccattgagtattttctaactgcggttgactgcggataaccgaaaccacggaaagcgaagccatgaagaaggagggactcctgttctgctgctgttcccttatttgagacctatcctgtctggtctaatgaagctagaagtgtctaagctgctgtaacacagcttagagaagaaggctccattggctttgcccctgcgtcatactgggcttctattacagtatgaaaggagtgtgttctctgtctctctaggctccaggagcactgtgtgttccatctggaactctaaccgtccaaacacacccctctcactcctttgtctggtaagttcctattgcagatctctgtctctgggagacttccaactgggaatctcccgctgaggccacacctctagattaggttagtggcccctgatccacgccgctccagcattctgccatgagaaacctcactctgctgcaggtaacaatgggtttaaagtctgcctttccccaagtccatgtgcactttgagggcacagcccacatcagtctttatcaccac

SEQ ID NO: 27411 - DNA, 2300 bp, Homo sapien
tatattagaaataggcaagagatttgaataggcacttcgcaagtatccagatggtttgtaggcattttgatagccacatttgttcaaaatcaatcaccaaggaaatataaattagaacattgctggcagggtgatagggtttggattcgtgtccctgcccaaatctcacgtcgaataggaggaagggcctggtgggaggtgattggatcatgggggcggatttcccccttgctgatctcatgatagtgagtcctcatgagatctgatagtttagaagtgtgtggcattcccctttggctctctctctcctgcccccatgtaagtcatgcttgcttccccttcaccttcctccatgattgtacattttcctgagtctcccagccatgcttcctgttaagcctgtggatctgtgagtcaattaaacctcttttcttcataaattagccggtctcaggtagttctttatagcagcgtgagaacggaccaatacacagggtattttaagttgtcttgaagtttcctggttctagcaggtaggaccatgtacttagcaaggacctgttttgctgttctctggggcatgggtgaaggtctggggtgtgagaggctacagtgagctgtaatcacaccactgcactccagcctgggggacagagtgagaccctgtctcaaaaaacaaaaaaaaaaattgaatcatgtatacacttatatcaaaaaccaatgtactcctgattacctcaacttattatgttgggattattgaggtctatagtatctgtatggtggaaataccgtataatgcaactcttcccaactctgtgtttagtggggtgacactggtagcttgaaatcaaccatcgttggagtactaacaccacagtcattggcaaatgctgttttgcttccctggaaaagctggtaaagcctggagttctgctggtctggtggtgctggtctggtggtgcttgatacctttctcatttcacatttgaaatggtgattcaggcactcagcaaaccctgctgggatgatttctgctgagagagctccttcccattgctctttggctagggtcctcacttcccttgccaccgcctggccttgcctggttctctgccatcctggaaaggagacactgctctctgcagcgtctctggcccagagacaggccgagtctgtcattgcattagcctcttagtggttccttgggggccactcccagcagaacctctgtccctgccacaacaggtcctgtgctacgaaacaccaaggaagtccccttcctgcctctggccaggccctgcctgagagggtgcatgtgaatgcaaagcaggtctgtttcaggagtgcccaaaaagaagccaccaggaggacacctccatgccagaggtgactcatcttacctcccagaggaaggactggggccggtcccttggccttgccaggacagcctccacaacgagcagctggtatggttacagggctcctgtggcaggcactttcaaagagacaagcttgctctctgtaacatgtgcctttgtgtcaaacagacctgtcattgttttcagcaaataccttgggacttcagtgcataaataccattctaggtatttttcagaagttgtgtataaaggcattctgcctaattccttcagtcctctatttcagtttctatttatttggtgtgatagaaagctcttaatttagatctccccaccgccagttccaagaaatctgccaccagctccaagcctcatgtcctgaagtgccacctcattcccgcggggtgagccagcagcctctgaaaagaggaagccattgaacagatcacactgtgcctcccgccgctggctgccgccccagcgccagcaggactccggctttgactggggactcactggaggccacatcgcttttgcttccagtttccaaactgccaccacctcgaaactgccagacctttgaaagctgaggcacagtgcctcaccccttccttcagaagactgtccagctccccctccttcccctcctccctcccccactggggacctctcctaggggaggggtctggtgtcctcagctggctcctctccaccttcgcttctacccgggggctccagtgcatctggctttatctctggggtgagccatgcggccctggtcatctggacgggccactgaactccacacattcacctgttcactggctcatccattcattcatctggtctcatgtgctgccctgttctaggtgcttccatacaaaggggacagaagagatgatggaaggcctcagtact

SEQ ID NO: 27412 - DNA, 2300 bp, Homo sapien
tgaaggacaagctgggaggcctgggccctgggatgtcattggcctcatccctcagaggctggacatgtgtcgtggggagcctttcagacaggtgagggaggaaaggccactcctctgtctgttctgcacgtctcccttctccgggctctgagggcacgcgaccccagtgggccactcagactcccgtctcccacctctgtagcctgtcttcggaagcgctgacctcagcagtaatgtgattcatttctagacaccgtttcttcttcgggatagctgctgcttccatgacggacgcagtggcctttcatctccttttcctgtattgattctgtttctcaggggttggttctgtttgtcgagtgtgtgtgtctttttcttgcttttgttttccttaaatgtgtattgatcctcggttgtcagtttacatttacaaatgaggatctaatgtgtgtggtggtgttgtagaggctgtatccttagcccaggtgagaacctgttctcctggtcctcagcacctgctcatcagaggcgctctgccctgggtgtggcacgtggccggggtgtttgtaggcagcttgtctcctgagtccagaggctcgctgtctgcattgtggctgtgaatgacgtgggacacttgtcctaccttgccccgagtctgcttttccgggtgggagatcccctttgcaggaagctgtggtgccagtctgtggcagcttcccccatctggtgagctcacctgtgatacctgcctactgcccttcgcaggcccccgcccgatggcaggctgaccacacgccctgcgagcacacccgctctcaccgctccccctgccacctggaggacgggtgccccgaactcccgggagccggattgtctgtccactttctgccggacagaaacacttcactggggtggtccccacggggcgttccttgtggcttttctaggtataggtttatttgtaaacacgaagaacttttctttccacagaaccattcaggtttattgttggaaaataagaaaataacacataaagcaaataaaataaaattgcttattcacaaaatgccactggtggttttttgttttgctttttaagtagaaaagagatgtattgtagaaaatcttgtagatttttaagtagaaaagagatttattggaaggatataagacagctttacaggaactactaggctggagctcagactcaaaatagtataggtttattttatttgtatatgttaatatcatgtcagtgggaggagagggaaaatgattgtttagtcagtatcttgagctgaatgttgaaagctatcctttttcatcagtcgcctaaaagaattttaatgtgtactgctactgctttttgtttttctacacaaatagcttctcttagttatttttaaaactctgtcttggccaggcacagtagatcatgcctggaatcccaccactttgggaggccaaggcaggaggatcacttaaggtcaggagttcaagaccagcgtgggcaacatagaacctgtctctacaaaagaaaaatgtaaaaattagctgggtgtggtggcatgcgatcgtagtcccagctactagggaggcttaggcaaaaggattgcctgagcccaggaggtgaggctgcagtgagccatgtactccagcctgggcaacagagcaagaccctgtctctaaaaatgtttataataaaaacaaataaataaaagctccatcttgaatgcagacttcttcagaggtctgtacctttggggactgccaggtccagagtcccgggcttttcaggtccagagcttcactgcctgatcaggtggccaccagccacacatcaccattgaccctggacacatggctggaccaagtagctgagttggatgtgtaaatactgaccagatttcaaagactcaggatgaaaagaagaatgtaaaacatcattcatatttttgatattgattatatgtggaagtgataacacttttgatatattcgttaattttaccttcttttttaatgtggctaccagaaaattccaaattatatatgtggcttccactcgcagcttgcattatgtttctgttggacagtagtatgccaatatctgatcctttcagtaactgggatccagccagaggtaaagattcctagaaaaattgtctctgtctagaccaagcccattcaacccacagcccaccggccaggatggctttgaatgtgacccaacacaaattcataaaccttaaaacatgagattttgtttctgtgatttttttttagctcatcagctatca

SEQ ID NO: 27413 - DNA, 2300 bp, Homo sapien
ggtgggaagtgatgtagctgggaaggacataggacaatctctccaaggtatcagagggcctgctggaaggggagtctggtattctatctgttgcctgcagatctgttcctccagcactcttgctgacttatccctgtctgtatggcaagggggaacaacaaaattgaagagggatatagcaggggagagaggagtagccacggggtggtcttcagtccagcccttttgtgtggcaaagatgtgtatttctcctgggtcaaattcttcctatgcggaagataaatggtcctgagtgatcttgcctgagaggctgagtgtactgcccggtgctgacggcggcgggggcgggtgatggaaaagatctcccatggaactgtgcggcagggagaaggccccacccgacctccccatctgtaccccacgaaaggaattttaaacgagacagttaccagagaggcaggaatcaactaagaaaattcagcagtggctagttaagagatatttgtctcattttctctcctcttccttatctcaacacagaagccaggccttgcagaggtacgttgagaagtgtctgcatgccagaaccacgctttgcaccttcccactcacactaagggatttagggtcccacttgagacatgagatcgacactttaacacggtctgatttttggtaactcaaatggaccagaaagttaaggtatcatctaaggtgtgagtgagggatggaaaagatttaaaaggatagcgattggaggctgggcgcagtggctcacccctgtagtcccagcactttgggaagccgagacgggtggatcatgaggtcaggagttcgagaccagcatggccaacatggtgaaaccccatctctactaatacaaaaattagctgggaatggtggcgcatgcctgtagtcccaactgctcgggaggctgaggcaggagaatcgcttgaacctgggaggcggaggttgcagtgaaccaagatagcaccactgcactccagcctgggcgacagagcgagactccgtctcaacaacaaaacaaaacaaaaaaaccaagtatacaatgttgatacatgtgtttcttttcctgtttctctgcagtgtctactgagattgattttttaccacttgaaaatgatgggtgagtctagcggaaagggatccacttcttgaattcaaatagactagactgtgattttcaagtccctaatgaattgttctaaaatcgctgagttttgaattgccaggaaaacattgaagacagagaccaaagccctgagggcagagaggagctgcaaaccaagacctgaatatttgaaaataccatttattaaccttcaaatgcaattgtagctgcagcaccatcactgctggcctgtaaaacattttatattcttaagagggaggcattcgtgatactaattctttttacagatagtttctgatgttatcccaaaagcaatgcactttaaaaaataatgatcagaatcaaagaatttaaacaaaaagcaaagaatttaaacaaaaagcacttttcaccgcattatttaattaaatcatttgtcaaaatgaaatttgaccttctgcttattggcaaaatcctcatttataacatttacaagagattttaactcaataaacgaagtacgttaacagtgcactgccctgccctgcagtaacgccccccacccccacaaactgtatctggggtcagctgttgctgggaataaaaataataggcagattcactccagctttcagtctttcatttgcaaccaatctccaagccccagagcctgggggccgtgcctttccacccttcacgcggggcgcacggatctgaatatttaacacccggttccaggacacgcgcctggggaacacccacaatccctcgcggcccgcggagcccggctggcgggtgacccagcgcccgcggctccgagaggagcgaggtcacccggcgcttcccgagaccttggccctaggcccagctggcgctgggacgcgaggcaaccgagccgccggccaatcagcgctttgcaggactagcacgcaggggccgcacccctgagggtgaccggaaccgctcccgcgggaagggcagggtgcggcgcctggccgcagacagacaagggggcgccggctcttcagaaccccagggagaaagcggtggagggctagagttgaggagactaaggacatttgaggagggcaggcattaccaagttaaaacctcctgaaagacaactccattgggcgaccgtctgcgccgcacagcctgacgggagcgt

SEQ ID NO: 27414 - DNA, 2300 bp, Homo sapien
gttgtataggtggaagcttgagcttgggaggaaccaggtagggacctctcctctgaataaggggcgctctgggccacttcctctttcttcaaaacaattaagttgaccgtggaccttaatcacactagcagggcaattttgaaacaataatccgaaagaacttttgccagctacggcaacttttttatatcatggagatcagcctgaaagcaagctatttgcccgaccactttttgaccaatttattttcggtttagtcaggtttcttccaagtctgtgctaatctgaatggttaccttagtaattactttttgactaatttattttcggtttagtcggatttctttcaaagtctgtgctaatctgaatggttaccttagtatatcaatgtcctagtaactgtagcaaggacatttttgctggaaatcatttaaagcaggtgtatttgagtcatgtagcatagacagcggcatttactgcgagttttttacatctaatattgtttataagattttatctgttgtcacatttgtgaaatttatgaaaaaaattggttacgaacactatcacaaggtggcaaaatcaagcttagaaatcaattagtgactctgctgtaaaatagtatatatatacacacacactctttttaggtatacatttattaaatgccattagagttggtacaaaatacaatttttagctggtggctctctaccgattacaacgcagccagcacagcatacttgggttttcaagcctcgggagctcacccagcaatacatagctagggagaaggggtagggagaataaaaatcagcgaaagccaggatattaataaagagttttgatggttaaggacaagcaggcgaattaagactctggaaaccgagaaggtgtatagaaaagaaaaccagagagctggacgacaaggacacagtaacagcacaaggggattcatctaaagggcattccgatggagcaggcaggctgcgccccgaaaggtggggagaggttggaagcagatgggcaggcacaggcgagcgtgcactgcctgaaaaagttttcatgatggctccagcctaatttcccaacgctggtctcgggcgccacaaaacctgggcggcccgaccggagccaggtgccagcctcagggccgccgggcccggcgcagcgtccggaattcctgcgatgtctggggcgcggcggtggctcctccccgcccccaccacggcctccgccggcattttccggctaggaggcccgccagcccttcgaagaaccggctccacgcgcggacggtcgcggccgccgcgcttcccggggagagaggcgagcgcggcgcccggaccgcggtgagagccctccaggcccgggcgcgcggggtgggcttcccgggtccccgcccgaaggccgcggcgcccctcctcctccccctcccccgcccggggcagcccgcccctccccccggcgcgggcggggctgcgggcgccgacgcggaagcgcggggcgctagggctgcgggggcggcggcgcgggaggccgcgcgcgctccccgggccgcagtcggcgcgggcgcggggcggggcggggcggccgggaggcggcgggcgatcgcgcacaggcctggccgccgcctcgcccccccttccccagcccctaccctccctcggcctagccgtccccctcctctcccctcccccgggcgaatcacgcgccctcctctgacactcgtagcggacccgagctccgaatttatccttcacgtgacctgagggggttgggtggttggctggggacagagggggagacggaaaggagggaacggaatctgccgttacctgagcaacaggccccgcccgccggctcggggctggggggcgggaggaggacgtcagcacgtcagccggggttttgcgttttgattgacagttgctatagcgaccgggtcggtccgtcgccattttgttggttggtttttttttaaaccctttcgcttcccgcccgaataataataaaaagccccattggagtgaggcgggggtggcggcggcaaccgcggcgggggtatccggggagactgctgctgtcgctgctgctgatcgcggcccaggtcggcctcagagagcggacaccccgagcggggggtgcgggcgccgccgccgccgcttctgctgctgctgttcctgctgctgctgttggtgccgctgccgccgccggcgagcaggcgggaccggtgtgagtgcgagtgtgtgtgcgagggagcgtgtgcgagggcgattgtgcgcgcgagtgtgcgggtg

SEQ ID NO: 27415 - DNA, 2300 bp, Homo sapien
atatatatacacacacactctttttaggtatacatttattaaatgccattagagttggtacaaaatacaatttttagctggtggctctctaccgattacaacgcagccagcacagcatacttgggttttcaagcctcgggagctcacccagcaatacatagctagggagaaggggtagggagaataaaaatcagcgaaagccaggatattaataaagagttttgatggttaaggacaagcaggcgaattaagactctggaaaccgagaaggtgtatagaaaagaaaaccagagagctggacgacaaggacacagtaacagcacaaggggattcatctaaagggcattccgatggagcaggcaggctgcgccccgaaaggtggggagaggttggaagcagatgggcaggcacaggcgagcgtgcactgcctgaaaaagttttcatgatggctccagcctaatttcccaacgctggtctcgggcgccacaaaacctgggcggcccgaccggagccaggtgccagcctcagggccgccgggcccggcgcagcgtccggaattcctgcgatgtctggggcgcggcggtggctcctccccgcccccaccacggcctccgccggcattttccggctaggaggcccgccagcccttcgaagaaccggctccacgcgcggacggtcgcggccgccgcgcttcccggggagagaggcgagcgcggcgcccggaccgcggtgagagccctccaggcccgggcgcgcggggtgggcttcccgggtccccgcccgaaggccgcggcgcccctcctcctccccctcccccgcccggggcagcccgcccctccccccggcgcgggcggggctgcgggcgccgacgcggaagcgcggggcgctagggctgcgggggcggcggcgcgggaggccgcgcgcgctccccgggccgcagtcggcgcgggcgcggggcggggcggggcggccgggaggcggcgggcgatcgcgcacaggcctggccgccgcctcgcccccccttccccagcccctaccctccctcggcctagccgtccccctcctctcccctcccccgggcgaatcacgcgccctcctctgacactcgtagcggacccgagctccgaatttatccttcacgtgacctgagggggttgggtggttggctggggacagagggggagacggaaaggagggaacggaatctgccgttacctgagcaacaggccccgcccgccggctcggggctggggggcgggaggaggacgtcagcacgtcagccggggttttgcgttttgattgacagttgctatagcgaccgggtcggtccgtcgccattttgttggttggtttttttttaaaccctttcgcttcccgcccgaataataataaaaagccccattggagtgaggcgggggtggcggcggcaaccgcggcgggggtatccggggagactgctgctgtcgctgctgctgatcgcggcccaggtcggcctcagagagcggacaccccgagcggggggtgcgggcgccgccgccgccgcttctgctgctgctgttcctgctgctgctgttggtgccgctgccgccgccggcgagcaggcgggaccggtgtgagtgcgagtgtgtgtgcgagggagcgtgtgcgagggcgattgtgcgcgcgagtgtgcgggtgtgtgcgagtgtctgtctgtctgtgcggggactcgggggcgggcggttcgggctctcctggcggaggagccgccgccgccgcccgggccccggcgcttctcgctgcgcaggttcggagcgcgcgccattttgtgagatttacaaaatcctcctcgggaagaagccgccggcagcagccgccgctcggcgcccggcctcgccgacgccgccctctgcgccgggccggccgtgcggccccgccgcctggaatcggggcccggggactgcggtatttgccggggagggggctgtcgcctccccggccccgggcgccgctggaaccgcgagccgaggagagactgagcaggctgcggcgcggccaggagccggagcgccgggggcggagagaggctgccggggcggcgctggctgcggaggccgcggcgggagcgcggcgcgggagcccgaggctgagactcaccggaggaagcggcgcgagcgccccgccatcgtcccggtgagtgtccggcccggccgcggccccgcccggcctggcgctcggctcccccggcggcccgcagccgggccggagccgaggccggccgggcggagggagggacctgccattttaggaggaggcgccgc

SEQ ID NO: 27416 - DNA, 2300 bp, Homo sapien
gtattttatcttttcatatgggctaaattttgtaaattgtgaaatatgcgagcatttatataacatataaaatgaagtaataaaaaacaacttggtattttcttccagcttaagaaatgaggtagtacttaactagtacttttgaagctccttgtatcatactgattttttttcatctgctacttgtaatacttcatactactttagttattttgaaattagatataatttttagtttggtgtcattacaaaacactgtcacattagagaacatattgcacctgccatttagtttattagctcctgggttagtctgaacttgcctgtcatgctgatgcattcatttcagtcccagtcttacattctggatctctgtttattagtgtatatatatatatttttggagacagagtttccctcttgttgcccaggctggagtgcaatggcatgatctcggttcactgcagcctccgcctcctgatttcaagcaattcttctgcctcagcctcctgagtagctgggattacagggatgcgccaccacgcccagctaattttttttgtatttttagtggagatggggtttctccatgttgatcaggctggtcttgaactcccaacctcaggtgatacgcccacctcggcctcccaaagtgctgggattacagagccactgctcccggccttgtattttttatttttcttttctttttctttttctttttctttttttttttttttttttttttttacaaatcttggtgtatcagtgctttttattaggtgacttgatttctccccaacccctgcctgtggaatacagacaccaagagactaagctcagtacctatctgagcataccgtgtgtttaacagcctgtggaaactgtcctgtccctgaagatacgctgtagattaattttatgcagtgattttaagacaactaaaaaaaatggtttgtaagtttaacttcaaaaaaccatgtaagctcggttcctggattgttcgtagaccttcacattgcctttggcaaactgagctagaacatactgtagaagatttgagggtcatgagaggttcctgtggtaaagagagatgtttgtcattagcatttgattgttactccatagtttgtgaatggctccatttgtggggcagatgatgaaaaatatactctatatttttctcaaaaaaatgaaaatatgactgtctagatttttaagcttctttaagaagaaaatcgtatctgtagcttatctgcaaagcacatttggtgtgtggaattatctgcttattgtcatataaaaactctgaccttgtattaacatttttgtttttgaaaagtggctagcctgaaggaaggatatatggaataatcactagagtccttatttaaagtaatccaaggtgaagatttctggagtttattgttacttagcatatgatggtttggttgctgtataagtcagcagaaaattatgtaactcagagatactttaggtggcctttcatatgagtaatgattaatggataatgtttcaaaaaggtgtcagaaattttgatgtgtcttacctttagatttttaaaatagtaatgaaatctaatttctaacaatttttaataaagaatactgataattgattctactgtcttacaaagaacttttgtgtcagtaatatctacttctatcgaaactggcgaggtgtaagtagcattgtaacattttctgggtgaagaatatgatgttgagagcctaaaggatttgattatatagttcatagctagagattgaatttatgttttctttccccatagttcatgtcataattttaaagactgaccattttaggggaaaaattattagaaaatgatgtcctttgagtaaagataatcttgattcaattatttttacaaataaaactattctgatgcagcactctagtgttcatccatctagtcatacaccccccacaatatgataccagctagttgtaggtctagtgtttaatgtaataccgtaacaggcatttgaattggaatggtagttcttcaggaatggaatctggaatataggcaaagatttcagagacaattcctaatttaaaaataactcatattgtctctgaggttcttttccagtgaagtgtttagtattgctgctatttggagtacaaagttggagcttttaaagaacctgggagttcaaaagtataaggagaaataaatgaaaagcagaaatattttgaggcaataagtatagactcaaatctatattatgacccacttgtagcaccacttggaa

SEQ ID NO: 27417 - DNA, 2300 bp, Homo sapien
agtaatccaaggtgaagatttctggagtttattgttacttagcatatgatggtttggttgctgtataagtcagcagaaaattatgtaactcagagatactttaggtggcctttcatatgagtaatgattaatggataatgtttcaaaaaggtgtcagaaattttgatgtgtcttacctttagatttttaaaatagtaatgaaatctaatttctaacaatttttaataaagaatactgataattgattctactgtcttacaaagaacttttgtgtcagtaatatctacttctatcgaaactggcgaggtgtaagtagcattgtaacattttctgggtgaagaatatgatgttgagagcctaaaggatttgattatatagttcatagctagagattgaatttatgttttctttccccatagttcatgtcataattttaaagactgaccattttaggggaaaaattattagaaaatgatgtcctttgagtaaagataatcttgattcaattatttttacaaataaaactattctgatgcagcactctagtgttcatccatctagtcatacaccccccacaatatgataccagctagttgtaggtctagtgtttaatgtaataccgtaacaggcatttgaattggaatggtagttcttcaggaatggaatctggaatataggcaaagatttcagagacaattcctaatttaaaaataactcatattgtctctgaggttcttttccagtgaagtgtttagtattgctgctatttggagtacaaagttggagcttttaaagaacctgggagttcaaaagtataaggagaaataaatgaaaagcagaaatattttgaggcaataagtatagactcaaatctatattatgacccacttgtagcaccacttggaattctaccaataagagatttatttgggcaaactataatggttgttggaaattgcaaatcttagtgtgaattattttagtccagttggtttctttctttctcttacctgaaatgaactatactgaggcaataggagctttgtatagtaatttaggagtgtaaaacaacttagggaaaaggattattaagcaggatgattgggatgacatcatgtgaaatttaggaattggaggcattgggaattgagagggtgctaacaaaggaaaacagcttattttagaatttgtctggaggatgtagaattgaagaagttttggtatttcttctgcagcggccccagtgcccttgaccaggaacatctcttggagtcagtagttttcatgaggctgacctaggaacttggccaacatatgcaacattgttctatttaaaatattccttgaattaaattcgatagtatcaatttaaaacataaagttttcactcaactcctttagaagttagattttagcttgtacttgtctttacctcttctgctgattatcagttgacaacactgagattactttcattttcctgtaagtcattatgaatttttctggtcaaccatgagttatcagtggaagcaataagtaggaagtactgtaaaagaattacaataaaataagagaaaccacttggagagcaagagggcttgtggacttgggggagcggttgtgagaaatgtctcagaacttaatttacaaataacattggtagattgacatgttgtctttcctataaagtaactttacctctgtcttaatagtaaactactatgaaagtgaattcgtgttcctcttgatttgtgaactgatgaaaattacaaaatgtggagttttttccccagataaagtaaatggtggaatattcaggtttatttgatacctagaaaatacctgaaattttccgtggtaataggcacattttgaaactgttttttttttctctgacaattgaatatattttatatatagttgattttgattattgaagactaaggaaaatttaagtttgaatgttagaaaatgaattttgcaaatttgaagtaattttattctttatgttttgggattgtagttatgttagatattcctcagttggggtaattgtcttgcatcattatctcttatcataatctgtttttcttcacacagtgttatagttttgccgctggactcttccctcccttcccccaccccatcaggatgatatgagacttgaaagaagacgatgcatacaggtgactcaagttttgaaatacagtaaaactctggctaagagaatgtgggaatcgatggtctattttgaatgggggaggtttctgataaatagcagttagtggggggaattgtag

SEQ ID NO: 27418 - DNA, 2300 bp, Homo sapien
ttatggatttggactcgaaattagaagagcctaccatttcagatgcaatcacttttggacatgcttttgcagacagtccttaatgctgaaaacacagagaatgggtaattcaagaggcctttcttttaaaatagacttttgtgacccactaattgtaaggtattgcaaggtcactttgcgtgtgtcataaagttgacttccttattggttgaaggtcacagaagtagtggtttgctttgatggaaatagctacagctgtgtcccttcctgctttttactttttcttttgctttttctcggcacgtggtatctccaccatttcttctgcacaaagatgtcttctgttcatcctgaacatttttaaaaaatgcagaattttatgtgactgcttttttgcctcacaattatgctgtgaattttacaaaaatttattttcttttttgataatttattgtaccaaagctgtttttatagcacatagatgtctgtaaccaataatgtagcagttctgcactttgacacaaggtgtaactagaccatttttaaatgtcagttgaaaattatggctgtactattgcttaaacaaaactggaactgttgttgaatccatagccaatacatttacagcaatctgtgtactgaacatagtagattgacatctaattcaagattacaacatctgttacattctaagtgtgttcaggcttctgaaggtaaagggacactggatccagaagctatggaaccagcagttgattcttgtattcctgattaacctacttgtaaacttgaaagcaagaccttgattgcaccaacaggtccagagtatgagtgcaagcaaagcagaactctcatgcgtgacctgagcagacaggctggtatttaacaggtgcctcgtgttgagattacgctgccttaatgtaacacagtctggcagttgctaaatttgtgttcccattttaaattgaccaattttggggtgtgacacttttgagcggttgaattgggagaatgaagataagtaatttacctgtccaggatcaaaagaagcctagaaaagaagcagtaatctacctctgccgataacctgtttaagatgactcagcagaacaccgcgtttcattctattggtcaattccatgtggctgactaggtcaattttttttctgaacaaaagcaggtttttatatgtaaacagtgagaaaagaaaggctaaacactatgtaaatgtgaatggaaacttggaaatactcgtttttataaactacaaaaactttttgttgtttatcaggaaatccatatttattttgtaattaactgtcaagcctgtggatgatttttttgaacttggtagttcataaaggtttacagtgaataaaaggatatcatcttgagtatagcaatatcaaaaggaattcagtagttactgctgtttaggaatataaggttaagatatcatatgggtcaggtcattttttttttctgtgctggttgccacatcttagcaagcaccaaaaaactaaagcagtttttaaaccgatatttacgtaaagaaaatcataaaatccaatgcttctgcatactgtgttatgttacagtccagttttgtgtgctttactacacagtttggttacaggacttctgtgcattgtaaacataaacagcatggaaaaggttaaatacctgtgttcagattgtaagatctagtccggacttgctgtgtatattgtaacgttaaatgaaaaaagaacccccctttgtattatagtcatgcggtcttatgtatgataaacagttgaataatttgtcctcagactctttactatgcttttttaaaaattaatttaagaaaaatgtaaacatagtaaaaatcttcctatgcaattaaactggtccaggtctggtaggtatagtatcaaagttgagttaaatgtgtaaaaaggaaactatttgagatacattgacataggcatcagcaatctctgaaagtaaaaattggaggtttaacagatcattttgatttttcacattgatttttttatttgaatgtttacataattttgtgattcaaaatgctcatattttagttggtagcatttcgactggatgtgagggtctgatggttttctctgatatgctttgacgtgcttggatgaaggaaggaatacgaatactcattcttccttccctaactcctcgtacggggccatatcagaattctagaattcttgccactgtgattcaattgctaacctaaagtcttctctttttacaaattcacctgcttcagtatatattaa

SEQ ID NO: 27419 - DNA, 2300 bp, Homo sapien
atttttattgggattgtatttaatctacagaggaagctgggaagtgacatcttgacaatattgagtccctccatgaaatggaatatctctgtatttacttagttcttctttgatatcattcaccagttttgtagttttcctcatgtagatcttatacatattgttagatttataccttaagtacttcatttcaagggatactaatttaaataatcatgtgcttttaatttcaaatttcacttattcattgccggtatataggaaaacaattgactttgtatattaactttgaatcctaaaatcttgctataatcccttattagttccaggaaggttctggggcttgtttttgttttgttttttggtcagttatttcagattttctacatagatgatcatgtcatctgtaaacaaagacaaagttttatttcttctttcttcccaatctatatatttttatttcctttccttgtcttattgcatcagccaggacttccagtatcatgttgaaaagcagtagtgatggggacaccttttttttcctgatcttagtgagacagcttcaggtttctcaccatcacgccatttagtatgatgttagctgtaaggttttttttttagatattgtttatcaggttgaggggcttctcctctattcctgctttactgagtgtttttatcatgaaagactgtttggatttttctgcatctgttgatatgatcatgcaatttttcttcttttgcctgttgatattcattacattagttgatctttgaatgttgaaccagccttatatacctaggacaaattccacctggtcatggtgtttaattattttcatatattgttggacttgatttgctaatattttgttgaggatttctgcatctatgcttatgacaggtattggtctgtagttttcttgtaatgtctttgtctggttttggtattaaggtgatgctggattcatagaatgagttagcaagtgttctctctgcttctagcttttgaaagagattgtagataatcagtatcatttcttccttaagtctttggtagaattcaccagtgaacccatctgggccaagtgctttctggttggggaggttactaaccattgattcaaattatttaacagagatatacctattcagattgtctatttgctcttgtgtgagttttgacaaattctatttttcaaggaattggttcatttcatctacattatcaaatttgtgggtataaagtcattcataaaattccttcattatcttttattatccttttaacctccatgggattgctagtaacgtccccgctctcatttctgatagtagtaatttgtgttctttctctttttttcttagttagcatgccttgagacttatggagcttattgatcttttcaaagaatcaactttgtttctatttattttattgatttcctattttcaatttcgtgaatttttaatctaattttaattatttcttctcattggcttactttgggtttaatttgctctttttttctacttttttaaaatggaaacttaaatgattgatttcagatcttcttttgtgctatctgcattcaatgttataaatttccctttaagcattgtttttattgcatcccacaaattataataagctatgtttttattttcatttatttcaaaatattttttcacttatcttgagatttcttctttgacccatgatatttacacgtgtgttgtttaatctccaagtattttggcattttccagctacctttctgttactgatttctagcttaattccattgttatctaagagcaaacattgtaggacttgtattccttttttttttttttttttttttaagacagagtctcactctgttgcccaggctggagtagagtggcatgatcttggctcactgcaacctctgcctccggggttcaagcgattctcctgcctcagcctcccaagtagttgggactacaggtgcccaccaccaaacctggctaatttttgtatttttaatagagatggggtttcagcatgttggccaggctggtcttgaactcctgatcccaagtgatctgagaatttctattcttttaaatgtgttaaggtatgttttatgacccagaatgcagtctaacttgatgaacattccatgcaagcttaagcaaaaagactaatctgctgtagtttcctcatctttttcaacaaacatttgaaccccatagtctctgctttaataattctagtatccattccaacctacaccaccatcagttctagactgtac

SEQ ID NO: 27420 - DNA, 2300 bp, Homo sapien
tccacttctggctgtgcacagggccagcttggggaggtagcaagtggatgagcaaaaccaggggaaagcaaggcaccagccagagctgtgttctcagcagggttgtgttggcccaagtggggacagcagccatgtctggagacatttttgattgtcaaactggagggggtgctactggcacttagaggtagaggccaggaatgctgcacacagcttgcaaggcgcaggatggcccctgcaacagagagtgacctggctccaaatgccaatagtgctgaggttgaggaaccacgagagaaagcagcaggctctgcaggcactggtggagatttctagtgccaatagctctatgtccccttccccacctccaccagtccccattgggacctgagaccttattaggagtgactacagtgctggtcccagttgactaggaagagggctcctggtcaggctgacgttgcactcaggagtctaactgtccagtggcagaaatcgataattggttccagttcctctccccaggtgccacgatgctggcagtgcccaccactctgctggccttggactgcaggactggtccctcctgtggcttgagacaagctccagctagtctgctgcagtgtgacagcctggggatggggagggagaggactccggtacacagcctgggagatggcttttccatggcaacagctcagttcctggtaggcagccctcacctgctctgatcctgccacatatgtgcagctccctgtgttccatccagagatcaacttggccaaaagaatttattttcagttttttggggaaaaccaataaaaacacctccaaatagccctgctttgccaggagtaccaaatccttgggtttgcagaaatactaacgagtgcttttatttgacctttcctttcttctcctttccctttctttcttcttcctccctttttgttgttgtttgtatttgaaatttatgctttatgtttcatatgagttcatcatgatggggctgttttccataacatttttctttagcaaatttcttcaaagtatgtgttaaaattatttttgtttgactattgcataagctccaagagatcagaaactgtttctctccatccatttatccattcattcaatccatccatccatccacttcctcacccatatacccacccacacaccaaaccatttgtccatccatccatccatccacccacctatccacccacccatccagtcatttcagtcatccatcagttcactcattcacccattcatcaacccattcatcaacacacccttctgttcactcattcatacagccagccaacaatccattcatccatccattaattcattcattggcaaaggcaagcatttggaattgctgctctttgcctagccctacaaaagttcttactgtcacagagatatttctctagtggaaggctagaaattcacaaaacaaagtgttaaatgcatttgagtgttatgcacaaaggccctatggggccaaacagaagccggctaacttggcgggtggtggtgtcagagaagatttcaaagaggatgggacctattaggagagccttgaaggataaatgcagggcagtggggtcagtaattatctagaagcgacagctagtgagtgattcgttgggctgctgaagtgaagatggggacatgagatgatactggtcaggtaaggtagcattgtaaaaggacttcaatgatgtccaaggaatttgcatgttatcctgtaatcctgtagacaataggagttatccatgaatgttatggtcggtgctgttttagagagaaacttctgggattgtatagagaggtggggatgctctcctaagtgtcttaactgattggtttgaaaactcttttctggggtcataggcttcttgcataattcccagaaatacccagaaagcctccatgataggcagtggtgcctggacctgcagctctgagggaaggagcctggaggagaggactacctgcactgagcaataacccattgatgaatggattgatgaatgtatgggtgggtggatggatggatgactggatgggtggacagatggatgaatggacaggtagatgaatgaatggatagatgggtggataaataaatagaaaagactacagagctttgtacatgtggctgagagacccacgtaaactcagggagcacctactgtagtggtgaagcatgtagctgttggagccagtctgagggggccaattcccagctctactgcttacatggtttaaaacacaggcacaaa

SEQ ID NO: 27421 - DNA, 2300 bp, Homo sapien
ccaggagggtgtcacagtgatggtggctgcattctatacagtgtgtatgtagtctgggttctccagagaaatataatcaataggatggatgaagagatagaaagagagagatatacatctgtctatgcagatacaaatatacatgatttattacaagcattggctcacacagttatggaggctcagaattcccaagacctgcagtttcctggagacccaggaaagctaatgatgtagtcctagtccaagtccaagtccaaaaggaagagaagaccagtgtcccagctgtagtacagtcaggcaaagggagcagattctcttttactttgcctttttgttctgttcagggcttcagcagattgaataagggcaatcagttttattcagtctattgattcaaatgctaatctcatccagaaccactctcacggaagtatctagaaggttgtttaaccaaatatctgggtgccccatgcccagtcgagttgatatataaaattaaccgtcatagtctggatacccaggaatttgacagcagccacgtgcagccgagagttcgttggtcaactgttctgtgagctcgaggagtgaagatccttggatactggctcagtctcagggagggctgggggagaaacataatgctgggtcttgcccaacatttcactctgaattgtctcgagagggctttcttcctcaggaatttctgcactgagatggaactttacaaccttttttcactccaaaaggtaaaaaatgagtaaataatatagttgaaaacaagctgttgttcatatatactcctagccagtagaggaaaccagttgagagagaatgagtgggatctataaatctcacttttgtatcagagagacaggaaaaaaggcatgatttgctctatgccattgatatacatacaaatatctggctcttgtcaaataagaattttaattaaaatggtcacaatggtatccagcccttctgctgacatagggaatccctgagcaccagtgaccatggatactctcagttgtttcaaaaatgaataacgaagatgtttggtaaagctcttccaggttaatgttgaagatttttccaaccatgtctagaaaggcgacagtatgtgatacaccaattcatacaaaaggtggccctgaggatttagagagataaacagagtgccaggctgagtgtaatccctaccatacagaaggccccctcggtgaaggtcagtcaaacttccactggccaatgaacacactaacccttgggctgagcttggattgacagtacatgacaaatggttaagactagtgttgatttccacctttccttcattcagcaagcactctatttcttccctgttctttctgtgtttgcctgagatcatgcaattatcaataacagtagttataactaacattcattgagtatttactgcatgccagccctgttctaagtgtttcacacgtattaactcacaaaatccttactgctcctctataatgtagattctgttattaccaccctaattatatgagtaaggaaacagaggcacaggagagtgaattaacttgtccaagggcacatagcttttgtattagttatctcttgctgtacaatttaccccaaaacttagtggctgaaaacaaccaacacttattgtctcacagcttctgtagatctagaattcaggagctacttagctgagtacttatgaggttgcaatcaagatgttggctggggctgcagtcatctgaaggcttgactggggctggaggatccacttccaagatgatacactaatatggctgttgacaggaggcctcagttccttgctacgtggacatctctataagttgcttggtgtcctcacaacatgatagctaattttccccaaagcaaacaattccagagagaaagagaaaacccacagcaccctttagacttagtctctaaagttacacaccatcacttccactttatttaacagaaatgagttactaaatccagccaacatgtaaggggaaggaacgtaggctccatctcttgaagagggagcatcaaatattttgtgcctgtgttttaaaccatgtaagcagtagagctgggaattggccccctcagactggctccaacagctacatgcttcaccactacagtaggtgctccctgagtttacgtgggtctctcagccacatgtacaaagctctgtagtcttttctatttatttatccacccatctatccattcattcatctacctgtccattcatccatctgtccacccatccagtcatc

SEQ ID NO: 27422 - DNA, 2300 bp, Homo sapien
atgcaagctgactgcccagccgagccagcagggtcaaagagctcagtctaaaaattaaactattgaaagcactacaagaaaacaagggagcattattttatattggttttataggaatagaggaggcctttccaagtgtaacgtggtggccccaggcattcctttgctggtggctgcatcactccagtctctgcctccatcttcacgtgaccttcttctgtgtgtctcttataagggcaattgtcattggatttaggggccaccaggataatccaggatgatctcatcttgagacccctaacctaattacatccttataggaaaaagaccgtttttcctataaggccccattcatcggtactggggcctaggatgtggacatatctttttagtggtcaccagtcaactcactacagatgggttggtgcttaagcagtgagcagagtggtcctctgtccgcccaggggtgttccttggggtggggccaattctgggtcctgctgctcatccctgggccatctgtccctgcagcctattgggaagttctgcaaatccagtggcctccactagatcaggagtgatggggaaggaacacagggctgcttcagggagcagcgggctcagccctgccagttagtggggaaccgcgcttcggccaaatcagagctggaacattcaagccagcctttgttttcccaagtaaatccagcttgcttccatactgtttctcagtctctggcgtcaagcgagggaagcattcctggaaaaatatgtcctctgaatcatattaccatcctgatttacattataatttcttcagctatgtattcccagagggaggaaattggctacaagacatcaccaaaaattcacacataagcacaaagcaagcctgaaagaaaaatcctatttgcagaaaaaggagccagtgttgcaaatgtggcttcccccgtgacagaaatggccctggttaccagcaagaggcagcagggaagaagcccccctttctggagggattttccaggttcttgcttttttaaaaacagcatttaaagagagcagcttgaataaatccttcctcagggtttcctggagtgatcatcttgttcctcccttctcccctcctcctcctctgtcttctctaccctctcttccttctttaagcccactggcttctttagtttttatttgcgcattgcagataacacttctctgctgaggacctctaggtgcactgtctctttaagggccagaatggtctgttttccctgcttaacatatttgtttgttcgtttgcatgaaaagggtaggaaagaccaaagcctggcagggaggtagaaaggaagacaggacagaagccaaccccaagggagtgagatgcacagagttccggtgtggggagcctgaagtggccccacagagctggggtctggacctggggccaggcttctttcttggtgcgtcccaggggaaggagcaattatgtgaagtggcagagggagaaaggatcccttctgcagcgggggtgagctggcttctcgtcatgcctactgcactggctgagtgggcaggaggccaggcatgaatctttctgatggtctgagaggcacagtgaccacgtttggtgagcctgccctaaacagaggaaagatgttctgtgtcacacctactccaacaacaactgaactggtctctagtaataagcaagaaatgatcaaactgccctataattgttgtctgagtctccttgggctgtcataacgaagtatcacaaacaggtggcttgaatgacagaaatgtatggtctcacagttctggaggctggaagctgagatccaggtgttggcagggttggttcctcctgaggctgtgaagggaggtctggtccaggcctctcccccgggttatggtagttgctggcgatctttggctcttgttgcatcaccctgacttctgatgtcatcttcacacggccttctccccgtgcacatgtctgtgtccaaatttccactccattttttttttttatgaggacaccagccacatcggactatggtctgctcttctccagtaggacctcatctaacttaactaattacatctgcaatgggcctatttcccaataagatcatattcttaggtactaagggttaggactttaccatatgaattttggggaacacaaacagtaattgtgaagtgttatgttagcataggaaggttaggggaactcagactggtatttgaaacagttaccctagcctaaggttaggaatattatttggaaaccattgttttct

SEQ ID NO: 27423 - DNA, 2300 bp, Homo sapien
gtttgagagaccaggctctcaggagctcagaggagccacaatttgcagctctgaagcacagctcgcctgattttcagatgtggctgcagtctcttagttacacccatgcagatcactttatcagaactctacggaataaatgaatgaattcagttaagccaattgctcttgtctctggtgtttatcaaatcccaggctgtgttaatgggatccatctcattcaacacgtgctcttatgccattcacaaagtgctattgcccacatcaccccggcagctgtttcaagtaggggagttttcaaagtatttgaaggagacaaataggttacttccaactcttgactttcttatttagtctaatatcttgtaagaaagatactttgtgaaatcattctactggtaaaagtatatatcatcaaaattagcaggcatacccatagcagcttcacagattaaacagaatgccctttacacaactatagtcaacatgggttgttcttttaatgttctaaggctgtgtccaccgaaatcctgcatcttgcatttgtattcctggtctctcagggattatttggttcagttgttctttgtttatttgtaacactatcactagatccagcaggcattgtggagcacgtattacacatactacagatattacacatactcatatcttctgtatatgggatatatgactcagaagtaatagcaagtcagattacaacctcttagggaaaatcaacagcaaatacaagctcacaggccgtgtgtacggttgacttttacatgactttggatgcaaattgacacaaacacctctccatattacagtcatttttagagggcagacagcattcttgaggggacctgaattgctaggtaattaaaatgtatgtatgtagaataaaataatcttggaaataagaggtttccgtaagccttctctctaaaataaggtcaccttctttgaggtagagattctgtgccttgtggaaggaaagccacttcataaagcagcacaagaatagccagttattgaaagggccattataaaattactagccaatggtattcgctactcttacaatttgtcaatccattcatccctaggaaaaagacagcataaaagagagttctgttcataggtagaagcaatttatgggaagactttggaaatgtagaaccattgtttttgatgaccataagaaaaagagggggtgcaagaggggagcactatgaggggcccctggaataacagcacaaagcaagttagattcaaagagtggagtagacctttgtctaaggggcttatcctgacaaattcaactttgaaggcagcctgggtcattcttggaaaaggccattctttgtctccagtgaccccagagacatcatataaggatggggtgatgatgcagcagccgggaccaggtcccagttgcagtggacaggacagaagggactgaatggggcagcaggctggggcgccaccaggtgcaagcaaagctcagggatagggcccctcccctccgtcccggccgctcgctgcgccccctctgggcggtgcaggctccggctcccgcgccggggctgcctctcacggatttcagcccggtgggaggcagtgcccagagcctctttttccttatctcacaaaaccctaaaagccgaacccctacaaccagcagacaaaactgctccccgagcttcggctctttcctgctttccaggcgtttctccgggaataacttacttagtggcactgggagaaaggttgggactggggggtcggggaccgaaacccaaaagattcccccagcatggagcacccacgtttccagtggcgggggatgcacgttggtttgtgcccagcccgcccccaccaagcccggtcctcgacgcgctgacacgctagctggcatgggcggcggggtgggcgtctctgggtctgtggctctgtcctgctcgcccccgccccttcctcccggaccgcgccggcgctgtgcggctttttccccagcacgcggcgctgcactcgcttttatctcggagccgcgtcgcttcgtgcgctgccagcggggctcagccagtcggctggaattgagtagcattcattgaatctgcggatttcatgacgtctctctgcgtggtccaccacttttctcctaaccggggattttttttttcttctgccactcttatctttccccacttcattccacccagtctccctcccccgtccctgcccaaacgcgcgcccctccgcccctcccttggccccagcgcccagccctgctctcc

SEQ ID NO: 27424 - DNA, 2300 bp, Homo sapien
tcggcctcccaaagtgctgagattacaggtgtgagccaccctgcccggccagtaagcggaatattcaattggattccagagtttatgcttttagctatcaagctatactctttctcactatatttccctgagctttggtttccttatctataaaactggaaccgcactgcctgtttgcctttagagctataggtaataaatgttatgcatttattatggtaaataacatgtagtagagcaaagcatggaaattcaggaagtaacaaagagcagtcataagaatgtctatgtggtaaatctagataaaaattacttgtatacacatttacagtagcgcctttaaaacacacaccgatagcactttagtaagtcaagaatgcatgttgcaccaattagagaaaacaccaattttttaaaaaaacatataaataacaagctaatagaagaagaaatgtaattagaaaaatttaaataagcccaaaaactttaaggaaggacaaaaaaaatcatagaacagagaaaataggaatcaatggtaagatggtagatttaaccttgaattacagtaaatataaacagactaaatattgaaattgaaatataaagctcatcagagaaggtaataatatcaagcaaagctaaacaagctgcttactttaaatataaagatatcgacaggttgaaagtaagtaagggatggtaaaactactatgcaaagcaaaagttacaaaaccaaagcaaagactggctcgtttcagaataatcaacgtttcaggtttaatatgaaataatcgtaaatttgtttatacctaataacatagccataaaataaaaattgacagataaacaatcatgttaagagcctgtataagccagatttctccagaaaaacagaatcaaaaggatatatacattaagaattatattaagaaatttattttagcatattggcttacatgattgtggggctggcaagtccagaatccgtaggagaagctggcaggctgaaactcaggcaggaaacgatgttgcagactttaggcagaattttttcttctctaggaaaattcagtttttgctcttaaggcttctgattgtataaggcccattcacagtatgaaaagtaagatttatgtaaagccaactgattgtagatgttaactacatctacaaaatacctttgcagcactacctagattagtgtttgattaaataaatgggcagtaaaggccgggtgcagtggctcacgcctgtaatcccagcactttgggaggccgaggcaggaagatcacttgaggtcaggagttcaagaccagcctggccaacatggtgaaaccccatccgtactaaaaatacaaaaattagcctggcttggtggcgggcacctgtaatcccagctacttgggaggctgaagcaggagaatcacttgaacccaggaggttgtagtgaaccgagatcgcgccactgcattccagtctgggtgacaagagcaaaactctgtctcaccacaaaaaaaaaaaaaaaaaaaaaaaaaaaaaggcactaaagcctggcccccatgatgacacaggaaactaatcgtcatggagactttatccacacttttgaatatatgttacatttcaacattaaaacacacacacacacacaaaatcataaagcaatcaacaaaattaagctgaatgcttcgtaattgctggattccctgggaagctgactctgagatggagattagcgtgcaggacatttcttacgggttgttcttgggatcaatacctgtggagaggagaagctgaggcaggatcaggaagcggggaagtagagtgcaatgctggtgaagcggcatcactgtctggggtaaatatccggggttcatcatctctcgtcaagatgattaacgacatggacacacatgggtgagttaagaagcggaaagtttaataggcggaagaaaagagtgaggagaccagctctcagacatccttaagggaaaggctggcccgtgactgacggcagcaggttttacgggcaggcttgaggaggcggtgtctgatttacgtggagcccagagattggttcgaccaggggtgacgtttacgtagcgcgcagggaaggctggtcaccccaccctaatcttgttatgcaaataggcttcccacttggcaggggccgtcttgtccactcgtttctgtaaacatgggtggcaaaaagagaagatggagctgccatttagaacatgcctaatcccaggtagtgttttttgttgttgttgttgctgctgttgtcgctttttgagtcg

SEQ ID NO: 27425 - DNA, 2300 bp, Homo sapien
aaaaacatccttatatgtggtttcatctagtgctcttaaaccagactcactaacctactgtgttttaaaatacagcttgccaaagtctgtgttaatattatttaactttgatgtgtatctgtgatggttagttttgtgtgtcaacttgactgagccatgggatactcctaacaggttgaatgttatttctgggtgtatctgtgaaggtgtttctggaagagatcaggatctgagttggtggactgattaaagcagatggctctcctcaatgtggctgggcctcatccagtccatccagggtcagaatagaagaaaaacggagaggaagggaggactttttctctttgcctgattgagctggaatattgatcttctgccctctgtgcttctggttctcaggcctttagacctgggctgcaatctataccatcggccctccagctcttaggcctttgactttcatcagctttcctgggtctccagcttgcagagagcagatcatggggcttctcagcctccacaatcacatgaaccagtacctgataataaattggttctggtttttccagagaaccctgattaatatactatctgtgcattcacttaggagaaacaaagtcattaaatgtgaaaaaaaaaaaagaactgagtcactcagaagaatcatactatagttgcccatcatatattataaagaacaaagtattctaaattatttacgaataagaattctataaagaaaatgactgattatctgcgcttacacaaaatatttcatggaaattttattaccgtgctcttttttttttttaatttaaccatcattatgttgtgcattcatcatctggagtttttagttgtttagaattccctgttggcagccaaattcctgtctgggaaaatgtatgagccagccttcattttccacgatgactttccaaggaaccattacaattaagagaatgtaagttactcatctccaataactgtacatgaagcaatattccgaggatttgttaactgtctttgacaggagatcatctactcacagtaggtgcttaacaaatgccatcttgaatgaatgaagaccctttctcacagtaacaaagttgggtccaggctccttcatttttgctcagcaagatgaagctaaggaaacaggaaataagtcatcaaccaaatcatagtaacaaatcgttctattccattctccataattcacccttcagtccaggggaacactaacaattgcccctccagatacaaagaaattgcctcctctgaagacagctgcctcacctaaggccacatttccttccaggttgccccacttccaatgagtcactgattggcaatccataaaggtcagctctcttgcctcaactcagcatacctctgacagatcgtcccatcttcccgtctcccttgaggtttgactggggttgctgctgacccagtgatataggagttaagaagaaagtacttaggcagatagtgaaggtatgggagtcctcagtaaggtcttccttttaatgaaaagcagcccccaaatcattttcttttctaacaaaaagcaacctggaaaatcgagctgcagacacagacaagcaagctgaaagcttgcacaggcaaataccggcagttgtgccaataaaaatatactacctggggccggcgctgtggctcacgcctgtaatcccagctactcaggaggctgaggcaggagaatcgcctgaacttaggaggcggaggctgtggtgagccaagatggcgccattgcactccagcctgggcaacaagagcgaaactccgactcaaaaagcgacaacagcagcaacaacaacaacaaaaaacactacctgggattaggcatgttctaaatggcagctccatcttctctttttgccacccatgtttacagaaacgagtggacaagacggcccctgccaagtgggaagcctatttgcataacaagattagggtggggtgaccagccttccctgcgcgctacgtaaacgtcacccctggtcgaaccaatctctgggctccacgtaaatcagacaccgcctcctcaagcctgcccgtaaaacctgctgccgtcagtcacgggccagcctttcccttaaggatgtctgagagctggtctcctcactcttttcttccgcctattaaactttccgcttcttaactcacccatgtgtgtccatgtcgttaatcatcttgacgagagatgatgaaccccggatatttaccccagacagtgatgccgcttcaccagcattgcactctacttccccgct

SEQ ID NO: 27426 - DNA, 2300 bp, Homo sapien
aaattattgcaaaatgtcagctcctgtaaataaatctatgaatcgagggctaaattcataaaacaaattttaaaagtttgagtggtggttttgttgaagattttttattgttgtataaaaccagtcgaaatttcttcaggtaaatattaagttacttatgcaaatttctaataacagttcatagcatacagaaaatggcctttattgcttcagatatctctgtgttaaacttcaattatggcttcagtaatagtgaatctttcctttaaattaaaacacaatatttatactatataattctagggggggtccaaagacatggaaataaaagtcataagaattgaatgaaataaaattttccttgaaaaacagaaacagaaattataatgctatatctatttgaataagagcagctaaataacagtagctaaactaaaaagagataaatcaagataactttaaagagatagcccaggctgctgtgtctcactgtgactgtgggtgttgagggccctgctgctgggagagctgagtgaaacctgctggccctgaatccctaagcctcacagcacctcacttctccttgctgggaacctgatgactcaggggacccctggtccttgtgggcctctgttggctgtacctgaagcagcaggagcaaagaacccctagtaaaaggcaggaacttgaactccatgtcagccaggatctgcctactgcaatcatcttcttttcttagctcccggagctttctctcagtggacagaactgccctccagctttcctgagctctttccacacaggcaagaatctccttctgatagaaggaagtgattctttccaattctttgctgatattttcagccatctccttgtagaggctgtgaatctgctgtgtgtattcacatttctacacacgctcagaagtttcttcttcatttctaacctgtgtgtttccaccgcaggtgatcttctctgaagttgcgctatgtgttcttgatgtgattcaggtaggatttgaagcttcagctgcaggttctggatcccacctgcaagttgggaattttcaaactgcaaagacgctttctcagtttggagatgtttgatttgtcctgtgagctcttcattcattgattttttttcccacaattgtcaagctatttcttgatttttcttgactttcacagaacacatttaagtcaccatcacccaggacgctcttcagatggccttctgactgatagttgggcgggaggggctggggcaggcagtcttcattttctgctttcctctttagctgtactttcgagtcctcgtcactgtggtccctagagaaatctcccaactgcatggtgtccagcaggttttcagccatagattttaattggctcatggtatctttcatgacctgttttatttgtgcattcaaaggtttccagcttttctttctctccttcctttcctgtactgtctgcttccatcttgcaatttcttggtcgagcacttctggactttctgctaaatgagtgttttcattcaaactgttatttccttctgaagtttttctccatccttctttgatccttttaagatgtgtcctgaatcagtcacttgagaacatttaggagactcacttttccatgctttttccagaaagccgcctgtgtcctgcagggaagacctgctcagatttgtattaatgattgacaagcagggggattgtaatatttaaggtctgtggcaacttgagggcttcctgggtctgtgtctttagcccagtgttctgcctgccttctacatggacctcctgaagagaacaccttttgttcagctcttttcctcttcataaagtgccttgtttcttaataattaagaccacacagcagtacaaaccaggatctcccagggagccctggggtttatctcatgatctcagccttcaccagctctgtagccccagcagctccagagcagctggagagacatttggggaccagcagcccctctgtggctctgcctttgcttgccagtggcctgtgggccacagctgcctactcggaaccctgcggagtgttctgtctctaatgctcacaagtgcctggcaaccaggatagaagatcagttgtgctgggggaggggagccagccaggttgtagaaacagcatccctgactttgttctgctaactgtgcagagagaggtgatagtctccgcccaggccatgagggacctggaaatggctgatgacacggtggagctcggccacaccaggcccagctggccccacagcaaaccagaggg

SEQ ID NO: 27427 - DNA, 2300 bp, Homo sapien
tttttgttcatggacatatagaaagaaaggctcagttatgtcaggcagtcctaagactggggcctgtgttaaggcttctttgatttttttaaatgctttctcctggtcagcctcccagaggaggggttccttttctctccccttgaatctggccatgttcagtataatagaggggtccctgagtttcccggggaggcatctgcaaagcccaggcatggccagactggaggcagcaggcttgatcatcctgactttcctccttgacctggggcagtggttttgatttttctttttgaggcaaggcccagggttcgttaccatttgaatttgactcctcgggggctggccttagtaaaggcgggtagattggactgtagggaggattcctatctcctctggtgattcctgcagaactggtttttcctgtggctttccctttgtttctgtagctgacagcgaagctgatttttctttcactttaagcttggcttgagccacgagtgttttgccataagctgtcaggcagagctgcaaccacgcaggtcagttttggactatatgtagccatgagtcaatataaggaaattggtctggatgccctggctgtcctcccaacccagtcaccaccttaaatacatggccaattgtttccctatctatagttccttcgaccagccatctcacaccaaaagaggtccattctatttcacagagagttctcaacctctggggggtcaacttgatcccacaacactctgcataacttttcttgaagttctttaacatacattgtaatggggtgggttttgacagcttccttcccatttcctcccagttatgacacaacttattcactcttttactttctcttcagactgattagaccatctccctcatgggaactttcagatgctgcttagctttaatggagggttcatatgagtcccaaacctggaccaccacaatcactgaattgtggggtgcctccctaagccatatgtggtagccccggaggacgtttgccactagtcctggttggtcccacactttgctaggggcgtatggtctatgctaagagacctgtggccccacacacttcactccccacattgactccttttagaactgcctctttcacatgcattcacacacttccctgctccccattccttttctctgggtggggtgtaggtttcatccgactttgtgagccactcccacatcctgggtcagactactcagtgcacccctaggagttgatcaggctccccttctgtccttatgggatgggtcctgtcttgggccccaaaccttaccacagtcctgtggcgcactatccctgaaatcatcctgtaatcccttggattctgttgcgctgtcagggaggggtactggatcacggaagaaccaatcccttctctgggtttaagttccccgatggcatgcctgaggtcacaggtctcccccagctcagggccccagacccacaggcaaaggagacagcaaacctgtcatctccactcctggctggttcaccaaaatattgcaggaatgaggagactggagagactactgggtggaacaggaggattttattgagtgtgctcaggcccagcagattaacaaccaaaggctgagtcctgaacaaaggcagggcttgatttttatacacacttctgaaagggggttggctagtttgaaacaagcttacagtggtgcaaaacgcagtggcgtgaaagcaggtaacaaaggcagtttatcaaacagtggcaggcctgtaactcaggcttgtttaagcatgtcatgtgactcctgctatgcggcccaggtggctgtaatctaggcttgctcaagcttatcttgtgtccttcactgtgtcacccggatggaaagcaggaacttacagaaaccagccacagaaaacaggaatttgcaaacttacaaaacttcccaggatacaatagcacacggggttgggtggggggtcggggtctcgagttgcctaaaggagaaaaatttgtttttcctctttttaacttttgcttcaataccacattttgtttatacattcagcagctgatgggcatttgggttgcatccactttttggctgttctgaagagtgttactgtgaacattcatgcacaaatttttatgtggaggtatgtttttatttctcttgggtatataactaagaatagaatgattggatcatataataactctgtatttaatattttgagaaattgccaaaatttttcttttttttaatgttaccacccataacgtttgaacattcca

SEQ ID NO: 27428 - DNA, 2300 bp, Homo sapien
ataatgaaaaatgcatggattgaaagtgaaaagagctgttttgagcttcaattcatcgctctgtagctgtgtgactttgcacaaatcacttatcttctttggcttccatctccttgcccttaaaatacaactaatcatgcctacattttgatctgagcatggacttaacaacatttctggcagtgttttacaaattgaaaaaaaggtgttcaaatgttagtttattaagtaaagcttaggctggaaatacagattaaatataaggagataattaaagttccacggtaacaaatcatgtcttccatatgtaatcttttgtcaacccacttgacaaatatgcatattttttgagggactatgatgtgccagatattgctggaaagatgtttggtgaataagacaggtaccattgagctctagactggaacacagatggtaaatggaaaagcttgagggcaacttcagacagtgataagtgagatacacaacaaaaggagtcttggggcacggacttggatcaggaccagatcagataaggacctcccagaggaggtgccattcaggctaggacctgaacaatgagtcagctcagtgaatgaaggccagaggggaccattccaggccgaggaaacagcccctgcaaatcatcccacctgagcagctggtatatactcagatcctttaattctcagttttccctctttcatcgttctgcacctctgtgcttacctgttttctatgggacttttagcatatcctcgcgggaggtctatctgattctagactccgggagtaccagctctaagaagtccaaatctcgtgtagcttcttcatcctcctgccctgaacccctgggagcccagtgtcttctttccagggccaccatttatactcccaggctgaaaaggagtcccttgcttccagggaaagaaagagcaaaagagaaggagactgaggcataccatctccactgggaaaacagaaatggaatgatttatgccctgagctttgagtcagcagggagaggggggagaaaataaggaagtctcagcccttccttcctaaagacagaatgacaccccatcccttccagctcccacttagttcaagcacccagaacagcagcagctgcacttggggtgaattgcagagcccagtactctggggagaggaagtatcattcatttccaacagaagcaaagtgttcctcaccctgtctgctctatgtcaaaccagatgccgtggtctggccccaccgacatgcctgggcaggggacgtgtgggtatatcatcgtctcccatgggaaacagaccgtttgcgtctcttggcattgcctttggaccagtgtagagggctctctctaggggaagtgcttttgaaaaacccattccatctcttaggattgaccacgatccccatgcagtctggccgtgagaaggccaggagagcacatgagccttggacgggcctcccttgatgtggtggctgcaagagtcactttgcataggatggacatataaccccattcccgaaagaagcttactgcctctgcttccagagatcttccattagaagccttcttcaaggatggaattctgaccatttctcataaagatgccagactatgcaagaatgctggaactcagattccaacatgtatcccgaagcccaatttccatgatccagaagaaccaaattttgcccatgtctattcagcttatatatatatatatatataatatttatcagggaaagcagggcaatagaaaaaaatcagctcaataaaggggttgagctaaaaacatgagttttcctctgtggcattttgcttaggtatgtttgacataggtatagtctgtatggattcattctgattccaccaggaggcaagagattttgttaatattcatttggggaggagagaggaaagagaaaaagaaaacatgggataaaggagagattgttagaaaaggtaatctggttatttatttatagtttacttagccaaagggaccttaaaatgctttgataagaatggccaaagtttcttcaaagattaactggcattctttaaaaaggcatcagttttcttttgcacaggtgtttggagagcccggactggatgcccactagaatcctgtgctggtttgtagatttccttaagaccttaagacatgctgacatcatggtctcctttctcagattccttctctctttttctctttctcccccactctctctctctgtctctcactttctctcctttcctccctccctccctccctccctccttccctat

SEQ ID NO: 27429 - DNA, 2300 bp, Homo sapien
aaatttattatctctctttttacaaatgaggaaactgaagatcagggagacagtgtgacttgtccaaagtcactagcccagttgcctttcagaaggcatctcactccatcttcaggatgaccccaggggctaggctttcacactttaactcctcctagaaggtcataacctgaagatctgagatttgaacccaagtctgtctggctcctaccctgtacctttcccactatagcatattgcctccctatcaccaaaatgcccaacacgaagttgaacatggcataatatcaaatgaacttgtgatcatcccgttttgtcaaaactaagagaacataaaaaaaaatcagcaaatttgaccagagcagtgtatttatggcaagaccaaggcaaaacttgattctgcattctttgcattatagtaacagactgaaaaggttcataagtgtattcatatttaagggagtgtgtaactgttctacctgggtcaatgtagaattccctatacgttgcatgcatcatcaggaatttcatatgcagcagataggcatacagcctggtttctccaacagccaaaggcatttctgagtggcaacaacactgatctggtgaagctgagtccatctggacattggggagccccaggccagcagggtttctgctaagtggacctttccaaatcctctcagggacaaaacctggttgggcatcttcaagaaaagatgctcttgtaaagttggtgtagctgcttaaataagccccgaatagagtctagtccgtctctctgtgcttttctttaaatttcccttcatagaaagctaaaacttaaagaggtttcagagaagctagtctgaccccatctcccagtatcattgagaaaactgaagctcggaggggctgggtcatttgccggaggttttgcaggacacagaagagcttgttctcctaatgtggcctagaactcttcaccaggcctcctcctatcccaggtggaaactaaagaggaaaagatgaagccaaactcaggcggaagcaacataattaaactggtttatcgtttggcaacagagatcagaggagtgagtggaaagtgaaaatcagtgaaacacttgcagtttaaaagaggcatgcgattcctgcttttcctaagcagttgaaatgtgtttatatgtctttcctggagctctctcattgctaatgtggtcctataaggggaagtcctggagactgagctgggtgtatttgagtattcttctcaatggaaggcaatgagcttgtgtgctacactgcttaggccacacgatcccccaagcctgggctgccagacgtcgccatcattgttccatgcagatcatgcccatcctgtgcagaaggtcactataggaacacatggcacagggaagaaaacgcccatagaaattcacatggtgcttgtctaaaccgaaggcaggtgagatccacccactgtcatgggaagctgctagcatgctcccatttgtttataataatttctccaccgttagaggctgctttaaaaagaaacggccaaaacctgcgatccggtgccacaattgagacagaaagcatgggaccatgacagttttaagaattactaaagtatgaggcttgaccagatcatttttccaaggatccagagccctttagagagaattcaagagggagaatttctggtgacttctaccacctctgaagaattaaaaaacttacttgtgctgctttccaggcctctgtggtagttaattctgcttggcagtttttgttgtcaaatagcttttaagaaatctggagctatctcagatataaataccttaatgatgccagaggactgtctttcacccataaaaactgaagccatgtgccagaagccctcgtggctcaagggctctgtccttggacacggatgagggcagctgggcggtgggaccgaggctctgcctgaatgctcagcttctgcaagctggggtggagagtgtgttcctgcctaccggctcagccagcacaggagcacgtagcctgcaggtgtgggttgtacacaggcttccccctgctgagtcagttccccagatctcttcatcacttccccagatctctgggatcttcagctgagattgggccccagcacctggactcaaggtaaggccccttaggatgcttgtagctgatcaatcagggtagtgcaaaggaagaggggaaaaagccacccagaccttaaaggagatttctggaagatccaatcaaagtgattcaccttaacctcaggcatgacttttccccattatctg

SEQ ID NO: 27430 - DNA, 2300 bp, Homo sapien
gcctcctcctatcccaggtggaaactaaagaggaaaagatgaagccaaactcaggcggaagcaacataattaaactggtttatcgtttggcaacagagatcagaggagtgagtggaaagtgaaaatcagtgaaacacttgcagtttaaaagaggcatgcgattcctgcttttcctaagcagttgaaatgtgtttatatgtctttcctggagctctctcattgctaatgtggtcctataaggggaagtcctggagactgagctgggtgtatttgagtattcttctcaatggaaggcaatgagcttgtgtgctacactgcttaggccacacgatcccccaagcctgggctgccagacgtcgccatcattgttccatgcagatcatgcccatcctgtgcagaaggtcactataggaacacatggcacagggaagaaaacgcccatagaaattcacatggtgcttgtctaaaccgaaggcaggtgagatccacccactgtcatgggaagctgctagcatgctcccatttgtttataataatttctccaccgttagaggctgctttaaaaagaaacggccaaaacctgcgatccggtgccacaattgagacagaaagcatgggaccatgacagttttaagaattactaaagtatgaggcttgaccagatcatttttccaaggatccagagccctttagagagaattcaagagggagaatttctggtgacttctaccacctctgaagaattaaaaaacttacttgtgctgctttccaggcctctgtggtagttaattctgcttggcagtttttgttgtcaaatagcttttaagaaatctggagctatctcagatataaataccttaatgatgccagaggactgtctttcacccataaaaactgaagccatgtgccagaagccctcgtggctcaagggctctgtccttggacacggatgagggcagctgggcggtgggaccgaggctctgcctgaatgctcagcttctgcaagctggggtggagagtgtgttcctgcctaccggctcagccagcacaggagcacgtagcctgcaggtgtgggttgtacacaggcttccccctgctgagtcagttccccagatctcttcatcacttccccagatctctgggatcttcagctgagattgggccccagcacctggactcaaggtaaggccccttaggatgcttgtagctgatcaatcagggtagtgcaaaggaagaggggaaaaagccacccagaccttaaaggagatttctggaagatccaatcaaagtgattcaccttaacctcaggcatgacttttccccattatctgctgtttttaatttcaagtagtataaatcttactgatctgaagaagacttctgcttctgaaactaccagcgcttaacaatgattgagccctactctatgagattgcaaataaaaatatattaaccttggcaggaaatcaactgattaatacttataccctacactctaaagactggaacctcaatttatctgcataaacagaggctttgggtataaaagtaaaatgtagttggttatgccaaagactgctttcaatagtaatgcaccaaacatgcttttgaaaatagcaataaactattcatttaggttagatatacaaataagtaactttcagagttagcactaagttttaagcctcaaagactttgatttcagtgacaagatgtgtaaatgcagcggttagaaaaagtacacatactgaggtttctttcaagattatatatagtattattcaaaagtcttattgtatatgaaaagtgacaagatttttgcaatatgaaacaacagtagctagctaatactctagttacctttacagattgtctagttggtcacattataccttaatttttcaggatccaaccaaggcctggttaactcttactggcaatgtttgaaagggatgaaagaggtcctatgcatattactctaaattaatcttagtgcaggaagacaagtcatatttgaataactttattttgtatccctagctactgtcatcctagtatttgaaaagctccttttctcccaatgttcagaaagtcattttccaaacttgcaaatattaaaacctattcatgtctaatacttttctacttggtctatttccatgtcctgtcaatgacctatcaattaccctattcaattacccatgtcacttgagatttctcccaccagaatttaggttgcatattttcacagggcaatttattttaaaatcagaatggtccataaaactaatagctttgtg

SEQ ID NO: 27431 - DNA, 2300 bp, Homo sapien
cactttgggaggcggaggcaggcagatcacttgaggtcaggagttcgagagcctggccaacatggttaaaccccatctctattaaaaatacataaattagccgggtatggtggtgcatgcctataatcccagctcctcgggaggttgaggcacgagaatcatttgaacccaggaggctgaggttgcagtgagctgagatcgcaccattgcactctccagcctcggcaacagagcaagactgtctcaaaaaaaaaaaaaaaaaaaaaaggtcaaatacttgcttctctaccagtattatctgcaaaaacagaagccttccactctgatttataccacagtcagacaaacccaaacgctgtggatttccttctccttaaccaaatggtactgttttgagccatcttctcctctgttgtaggtttggactaatccagacaaaaatagtgagtgagattccactagcctgttgaagaaatctctttcctaaggagaaaattgggaccaggagcagtggctcacacctgtaatcccagcactttgggaggtcgaggcaggtggatcacttgaggtcaggagttcaagaccagcctggccaacatggtgaaaccccatctctactaaaaatacaaaaattagctgggtgtggtggtgcacacctgtaatcccagctacttaggaagctaaggaaggagaatcgcttgaatctgggaggcaggggttgcagggagctgagattgtgccactccactccagcctgggcgacagagacagactccatctcaaaaaagaaaaaaagaaaattgagcagtgcattacggaggctgacacagtacaattcgcctcctcaccccctccacactcacttccagacatcagtgttcctgttttgccagtcatctcacaacaatgcatgtccaagccacgctgtgattagagggagaatatgcttattacccaagttcttcgcatgttggagcagggagaggccaagggtggtaaaccacaggaaatttccatttgccctccgctgcggcactctcactctatagggaagttagttgttattaggtaataatgttcagcggaggttggtcactcgtaacaacagacagatgtgtaatgttttatttgggttagccagctctctcacaaataaagggcctgaaattaaactgtctttatgaaaatattcagtaaatgatacctctggcttattccagtgctcagattctttgccatggaaaatggcaaatgagtcccctgttgggcccggaatctgtttaaacttgtctttgtcgagtacagaagggttgatgttctatgagattaaaaaaaagtttttaaagaattcgcatcgaggagtaaagggaacaacgatgcaaaccacatttagagatggaaaagaattttttttagtacttatggaatttcaaacaataataatggaacagaaacataggaaaaaagctacatatctgaccacagaggcaaattgcattattacatgctcacatgcaatgcaaatgtggattggtctgtaaaggaacactttttgcttttctaatgtatagtagggtgagaggagcacctctccaatttgccaaggcatcactagcaaactccagctaccgaattgcttggggaaattgagttcttttgaagacaggttcttgggaactgtaccccaagaacttctggttaagtagctcaggtgtggagcctgagagcctgcatttctgacgatggagatgctgcggttggatgaggggagaagggtcacactattctataccaccctgtttccagtagccagtgagatggataactcatctcaacatagagtgtgaccacgaagagagatacctacccgtaaaatggactaagattcacaaaagcttgtttccagctctaaccttgttactggctcagtaaccttgaacaagttactcaaactttttgatccttttatctccctagatataaagtgtagagtttagaccagatcagcactcctcagtgttctcaaatgtcataaaaaggctaaacacacacacacacacacacacacacacacgtatatatagctacagttaagcaggttttataactgtaggacgtctcagaaactgtaataaacaaatgtgcaatgtggctctccaaagagtgaaaacaatggggtgtctgggggctcagcttcagctccagtaggcaaatccttccaaaagtatttaaccacaaattcctttatgtgtatggaacacctgaatcacacacttcagcaagagaacccctaatgtcct

SEQ ID NO: 27432 - DNA, 2300 bp, Homo sapien
aacagagtgagactccatctcaaaaaaaaaaaaaaaaaaaaaagaagagaaaagaagataaaagaaaagaaaaggtaggttggggcagtaacccagggatgggtgactcacagtgggaagggaaggagggaagggtggtgaggaagtgctgggaaggtggatgcagcaggacaacacacatgtgtaggagtctctgcagaaagggtgcggaatgctgtctaatttaaccagtaaaccctgaacaccactgtctcctctatcagggactctataatgaaacggccaccatgcagagaagagacagattctggtctaagtagagttgttacctaggagcctggcttgcttcatggtcagcacaataacgctgaccagagttcggttccctcggatgtgggattagacaaagggtatggaaatgaagatcatggcacagcaaaccaagagtggaggagacagggatttgggtctgtatccccaaggaccttcaaagaaacagtcaacaatcacctttctgaaagtagtcaggtacccactgaccacagggatatcgtcagattcccagtgacctccctctggagctcgttcagctctgaaagttagtgatgcaaaagctcttccccctcagccatcacgacgttcattctccagttgcaggttcacagcttttatctccacaggagcagtcctttaaggttgatcgcttagcaatggatgacccgaggtgtataactagttcttatctccaagttcaagtccctgaatagggcctacagtaaatagtcctctggcttgttcagtctgctttaaattctttacaggtcagataccaatatttgtattggttctcataatcacagtagcagtggtcaaaacaggttatttcaggtacaaactgagtcgcgaaaacatacttgactagtagtggagctgtggaagtgtgctctctcccaggtcacgctcaaattatgggcccatggaagaccaccatcagagcggcatgggaggtgtctgagtttgccacccttgccttccctgggttgggcagagagggagtcccaaccaacatcctcacagtcaccctcttctccatccacctggatgggccataccttccaaatccaccatatcctaaaatgtgaaaacaaagcagctccaggacccactgtcttaaccaggtagcatcagtcagctggcttgtctgacagagagattgtgccaatgaatttggccagtgttgtgatcttttaacacagtttataatactagctcacaacccctggctttgcaactcagtcagaggcacctatgagatgtcttaacataaacaaacaaatacaaaattaaaaagtaaaaaaatttttaaaaccctagccaaatgttttggaaatagtttttatttttttagtttatatggaaatattttttaaatgctcacagaattacaaaatctctaaagcttgagtcaaacatgaatttctattttccactcgcaatacacgtggtggatgtctttaggaccaatcttgcagactctaggcactgggtcttgcccatgtttcaatggcctgtgaaatcttttacatgacagagatgacttactacctcttagtaccccttagctgctaagcctttccatcatgcttcccaggagcaagacagtaaactttttctctgacgttagagaagagaaaattgccagcctgaagtcactaggcagtaaccagggcagtgtcagtatttgaacagcctgagaagcttcctcattcattctctttagctccctgggcccccagtctttctcattagaaagaaagagtagttgccaagcctagatcttgaaccagttcgaactgagacttgtgtattccggatatgtgatagagtttaacatgaattctggaagcatgtatgaatatggagaaaccatcccaccaccctgaacacaatgtcatcagctgtgaggctggtacaatgatacctagcttatcgggctgatgtaagtcccagggagaggacaaatgctaaaggcaagctatacccttctgggaaatgccctctctccctgctcattattcgtctggcaaacatctaattcccctttgccatgtggccattcctctggaaagcatctttatgcctttcatgggggattgagttcctccccacccctgctcctacgccctgtattgctagaagtggttcctctaccataaaatctatcacattagggaaaacatttatgtgtacatatgtgtctctctggctctaggtcactctactgaaacatctagaactgg

SEQ ID NO: 27433 - DNA, 2300 bp, Homo sapien
ataacgctgaccagagttcggttccctcggatgtgggattagacaaagggtatggaaatgaagatcatggcacagcaaaccaagagtggaggagacagggatttgggtctgtatccccaaggaccttcaaagaaacagtcaacaatcacctttctgaaagtagtcaggtacccactgaccacagggatatcgtcagattcccagtgacctccctctggagctcgttcagctctgaaagttagtgatgcaaaagctcttccccctcagccatcacgacgttcattctccagttgcaggttcacagcttttatctccacaggagcagtcctttaaggttgatcgcttagcaatggatgacccgaggtgtataactagttcttatctccaagttcaagtccctgaatagggcctacagtaaatagtcctctggcttgttcagtctgctttaaattctttacaggtcagataccaatatttgtattggttctcataatcacagtagcagtggtcaaaacaggttatttcaggtacaaactgagtcgcgaaaacatacttgactagtagtggagctgtggaagtgtgctctctcccaggtcacgctcaaattatgggcccatggaagaccaccatcagagcggcatgggaggtgtctgagtttgccacccttgccttccctgggttgggcagagagggagtcccaaccaacatcctcacagtcaccctcttctccatccacctggatgggccataccttccaaatccaccatatcctaaaatgtgaaaacaaagcagctccaggacccactgtcttaaccaggtagcatcagtcagctggcttgtctgacagagagattgtgccaatgaatttggccagtgttgtgatcttttaacacagtttataatactagctcacaacccctggctttgcaactcagtcagaggcacctatgagatgtcttaacataaacaaacaaatacaaaattaaaaagtaaaaaaatttttaaaaccctagccaaatgttttggaaatagtttttatttttttagtttatatggaaatattttttaaatgctcacagaattacaaaatctctaaagcttgagtcaaacatgaatttctattttccactcgcaatacacgtggtggatgtctttaggaccaatcttgcagactctaggcactgggtcttgcccatgtttcaatggcctgtgaaatcttttacatgacagagatgacttactacctcttagtaccccttagctgctaagcctttccatcatgcttcccaggagcaagacagtaaactttttctctgacgttagagaagagaaaattgccagcctgaagtcactaggcagtaaccagggcagtgtcagtatttgaacagcctgagaagcttcctcattcattctctttagctccctgggcccccagtctttctcattagaaagaaagagtagttgccaagcctagatcttgaaccagttcgaactgagacttgtgtattccggatatgtgatagagtttaacatgaattctggaagcatgtatgaatatggagaaaccatcccaccaccctgaacacaatgtcatcagctgtgaggctggtacaatgatacctagcttatcgggctgatgtaagtcccagggagaggacaaatgctaaaggcaagctatacccttctgggaaatgccctctctccctgctcattattcgtctggcaaacatctaattcccctttgccatgtggccattcctctggaaagcatctttatgcctttcatgggggattgagttcctccccacccctgctcctacgccctgtattgctagaagtggttcctctaccataaaatctatcacattagggaaaacatttatgtgtacatatgtgtctctctggctctaggtcactctactgaaacatctagaactggaggcaaaacatttcggtttgttcaccatcataccatccgtggctggcacagaggaggcactcagcaaatgaacaaaccaagctgaatgaagaagtaaactttctgaagacaggaagcttactgaagcctggttcatctatatattcccagagtctaacaccacgcttggcactaatgggcacttgatagatgtttatttttgcatgaatggcatgtaaatttattacctaattaaatcatttggaggacaggcagtaagattcagatgtaaatactactggttgcatgcttctgctctgcaagactggcttcttgtgacatactgataatcggtcactgtgaatctggggagtgtccttgt

SEQ ID NO: 27434 - DNA, 2300 bp, Homo sapien
ctccaaatatattaaattttgctattgttaaacacggaagaaaccaatgaacaagacaacaaattccaaatggactgaactatgaaaagggaattttctcagctaacagcatgagttttggtcaaaagagagagagggaaaatgcatttgaatagagatgtggattaattattaataaaatccatatactcttaggctaaatacttataattgcttgatactactttccaaaagctctgtaaaatatattatgggtttttatacaagttgaaaaataaaacatgtaccatataattttttaataaaacgagattgcccagtgggaagtgggattgagggggacacagatagggcttcatcaagaagttataaaatcaaaacacaaaacgctttatagcaaacggggcacaggagtacaccaaggctccaagtttcacttccatcttgagaatctgacaggtgcacctgtctgtttctccggagctctgttaaggcaggtttgaggaggtctcttccctttgttgtcatagggaaaagtagatttggcgctgatgttgagatcgacaaccacaacaaaagaccttcacatgtttgtctttccttttgtctgcagggggtgcagcttttattttcccaaatacttcagtatatcctgaagctacgcaaagaattacaactaggccaggtacgaaaacacccctgtgtgatctcttcattgagagacatcccagatgtcctgctgagatccgtgccctaagtcacgtgatacaaagagagctgatcccggagctgaagccagtcccagacagtcttattctgcctctgttgatttggagactaaatccactcaaaccatttcattcaaagaccacactaaaggaattaagagcagattagccctttaactagcttttcagaaagacagatgggcaaagaaggcatcctggatgcctggcagttaggaataggccgacttttgaactaacagaaggatctgtccctcctcgggggaagagcacaaaacaaggacactccccagattcacagtgaccgattatcagtatgtcacaagaagccagtcttgcagagcagaagcatgcaaccagtagtatttacatctgaatcttactgcctgtcctccaaatgatttaattaggtaataaatttacatgccattcatgcaaaaataaacatctatcaagtgcccattagtgccaagcgtggtgttagactctgggaatatatagatgaaccaggcttcagtaagcttcctgtcttcagaaagtttacttcttcattcagcttggtttgttcatttgctgagtgcctcctctgtgccagccacggatggtatgatggtgaacaaaccgaaatgttttgcctccagttctagatgtttcagtagagtgacctagagccagagagacacatatgtacacataaatgttttccctaatgtgatagattttatggtagaggaaccacttctagcaatacagggcgtaggagcaggggtggggaggaactcaatcccccatgaaaggcataaagatgctttccagaggaatggccacatggcaaaggggaattagatgtttgccagacgaataatgagcagggagagagggcatttcccagaagggtatagcttgcctttagcatttgtcctctccctgggacttacatcagcccgataagctaggtatcattgtaccagcctcacagctgatgacattgtgttcagggtggtgggatggtttctccatattcatacatgcttccagaattcatgttaaactctatcacatatccggaatacacaagtctcagttcgaactggttcaagatctaggcttggcaactactctttctttctaatgagaaagactgggggcccagggagctaaagagaatgaatgaggaagcttctcaggctgttcaaatactgacactgccctggttactgcctagtgacttcaggctggcaattttctcttctctaacgtcagagaaaaagtttactgtcttgctcctgggaagcatgatggaaaggcttagcagctaaggggtactaagaggtagtaagtcatctctgtcatgtaaaagatttcacaggccattgaaacatgggcaagacccagtgcctagagtctgcaagattggtcctaaagacatccaccacgtgtattgcgagtggaaaatagaaattcatgtttgactcaagctttagagattttgtaattctgtgagcatttaaaaaatatttccatataaactaaaaaaataaaaactatttccaa

SEQ ID NO: 27435 - DNA, 2300 bp, Homo sapien
cagagaaaatgatgtacattggcaccagtagacaatcagagttaaccaggcaaagggtattaggagtttggtgtattatcttgtggcttttctgtaagttggaaattatttcaaaatagagaggtaagaaatcccactcttcacagtttgatttgcattaggcaagaaccagggagttaaggccaaatcatcactgaagcattaggtcccagtagaaatgctgatctttcctgctgcagggaacaactgagggctggattagcaaccacgaggcgtgggtgaggcgggaccacacaggattttcttccgtggctatttcattagcaaagcgttcatcttatttaaagctggtgtttggtaaaggcataatcaggtgccatgtgttgtggaggccacagttaacattttacattgatgcttcttaggagagaacaaaaagcaaggacactcagggaagctgagagagcttttctcctccgcactccagaattctagtggaagctgcccagataaaacagctcaggactttgaaattttcggggaaacagaattttaatcagcctgccatcttattcattgttcagagatgaaaagagcggaaatcaacaccccctcataatgtaggtgctgagaacttaggttctgatttccacagaatgattttcttacaatatactctctttcttttcttttccttctttctttccctccctccctccctttctccttccttcctccctccttcctcccatcctccttcctttctctctctcttctgtccttcctttctccttctccattttttctcgccctcttccctccctcctcctcctcctctccttcctctccctttccccccttatctttctccttctcctccttcttttgtcctaacatgaggtgataaatcagaggtatataataaaagccagaatgacctgggctggtggacagaactctgacacatgccggcctaaagtctgagtgaaatccatttactgaacgtccagctctgcaaccaggaattgtcagatgactcaggatttagtctattgtgttcttggggtcgcctattgagaccacacctctttatgggtcctgcgttcctgtagctagattcaaagcaaaatgtttcttccaagcaatttcctgaaaatgagtaattaaagtcctgaaaccctctaaggaatgttcaggcctgcattcgctgtacttccttcgaggagaaaacagacctgtgaccctgaacttatagcttggattttagacatgtaatggggccctcacatggcatctctgggtagccaaaagttctatgaggatctgttgtctgcaacatggatgtctgtcagagtgagaccagctcactgatattccgggacatttgtagtcacttcagttatttgggttttaataaatacttgaaaacaagacttaggaaggtttatttttcctctttattttttgtgtttactgtaagcctagagtccttgcgttttcaacaactttgttgtagagcaaataaaaagtgcaggtatttggaaggagaaaatgaaactgttctggaacacttatatgaaatgttgaataaatataggttgttaaaaatcagccaggcaatggctgttactgaacatggccatctattaacatgaaataaactccacctgcaaagtttccttttaggagaaaggagctcaagtcctctgtcctagtaattctgcgaagaattgggctgcgaagggctgacacccagggcagtggggtgccctcaacgccttggctccaaggtgcttgcagcccgtgtgaagccatgcggagtcccatcacatctgcatcctgccttggtctcagtgcagtgtgtcacacggcggcacaccggtcacacctgctgtggcagtccccatcccaattgatgccttttctttttttaattaaaaaaaaaaaatctcctggctgcatatcatcaagaaaaacaacattgttttcagggtctcttatctctccactcccaaatatcctgtttctttgggctggacagccaggaccaatagaaacctcttcctgccattggctgacttcatttcccagacttagcacaatctcatccgctctaaacaacctcatcaaaactactttctggtcagagagaagcaataattattattaacatttattaacgatcaataaacttgatcgcattatggccagcactattaaggtaaggaaagggttccttttaatttgacaaaatcttgttcttgttactcttttctttggtttcctttatcaaggcagat

SEQ ID NO: 27436 - DNA, 2300 bp, Homo sapien
aaatactttaaaatactaattcttatggaatgtgtcaagtggtgtttttataaaaactttccttttaaatgacattttaattagaattatgatgtttgtcctgcaatacagaacgtgaagttgtctcttagttttctttcggcctctcaagttaactgaaatgatttaattcattgaaactgatttcctcctatttgacctaaatcatgggtcagactgaagggaatgctgcggccataggtagggattagattagacagcagaaagaacatcctaactataactacaagatgcaatcagttggaggagatgatgtcatatgcaaaattctaggatttgggatactgagattcttcaaggttaatgacccacattttatgaatgggatcggtatgcgtctttcatgttttaagaaattatctttctctctctctctctctctccttctgcagtgtcttttgggggaactggagatggtagtgagggagagtcacaaacaacattgtttcaaatattgggtttttactgagctcattttgaaatcatgttccttctactattaaagtgcagttcattattcttaaaacgttaaatgttattttgttcatcagcacgcatattgtttttagcactgttctatattgtgataatattcaccatatactgatgatgattgagaaacgttggcagcgtattaaaaaacttttagagtattaaaaaagagtcattggcctgtgggctactgattttattgaataggttcagaacctgtttactttaaagcattcccctaaatgttaagggttcactatggtgagacttgaaaattagtggctaattggaagatttcaaaatccagtgaaatatcttggatctggaatatttggagaataattagaaagaaaaggaaccaaaatatgcatttggtagttaaggagattcagatcgaatctttttgaaggccatgtgaactggagtatggggacttctgtgtgatttgtgagcacattcaatactaaaggaaatgcaatcgactttgcaaatgacgattcgagcacagagtggataaactgacaagaccctattactaaatacccactttgaaatatacattctgttctttgtacctcaggggacaaaaagggtgcatgcttgtcagaaatttaatctgttttcaatatttatttttattggtatcttctcttggccacctatggagaggtgggcttgtatcccaactaccatggtgtgcctgattgttcaagaaatttcctaggaatgcatttgtagtttcacgaaggctgtccatcttaacaggggaaaaacttccttggctggagtctcacattttaatgagctcattttggcatctctagggttaaagatcctctcagaacctataggtactggaaaaggcggtttctaaactcagctgctcaggtccattttatttttttcccccagcaaacaggaaatggagccctgaaactttttttttttttcctaactggaaagtgcgcggggagggggcacactcaccctgcccacatccaaccctgagcctgacccagacttgggggtctccgtgtgttttttcttccctctctttttttctattattttggcagactttttggaatgtctgggagctaagggctttgcttcatggagcagaattctgaagcaagaaaaagagaaagttatagactaaaccacagaaatgtaaacacgtctgcagctaaaataactccactttcattgaaaacactcctccctcacaatcagacttctgtgtgctatggtcaataaaactgcatgttaatagcgaccaattaatagattatgttgctcggccttaaaagttgagggagttttaattattatttttcaaattaaaggagtgcttattccctcccttcccttggggtggggggcggggggagacttagctttctttctggctgtttgctgaaattcttggctgttaaagtttggagagggagggacatgggtagttttcacttggtcggaatggggagagtgtgcaagagatcgctgcgggacaggttcctagagatcgctccgggacggtcgtgacggcccccgagggacatgagagaagaggagcggcgctcaggtaagctggattttgcggtcggaattcgcgtagaaacgaaaacttctggaaggggcttagccccgagccccggaggcggacaagctgagcctcctggctgcaccctttggaggctgctggttgcagacgccgtcgtctcccaagggcggctgtcaccgcgtgc

SEQ ID NO: 27437 - DNA, 2300 bp, Homo sapien
acaatatttcactggatctgtgtgatcaaccaatggataacgtattctgtagcacagcactgaggacagcttgtgtttgcttttatgtgtcctgtgagaggccgttgggaaaatttcaaatcctttgtgggtgttaagtgtccaatgtggactgatgggcaggtggaggtgtgcaggtggagagctgagtcacggctgtgtttgttatggtggctcctgattggtttctaggttggcttgctctgcccatgtagagtgacaaggtgcatggatgatgctttaatccaagaagtcacagccccatgggtcaggcaattgcaggtgaaatctcaagcaggtgattcttaagcccagctctgccccaggagatcccaggctgatcagataacctttcagaggttcgatatcctcacctctcatgtgtaaaaagtggcaatgtcaagctctcggaggtgttggaaaatcaggtgagatttaggggaatcggaagcttgagagtgcttggtcagtgatcaaaagctgatttctagggaagggctaaagaggagcaatcggtctttacattgaaggtgagttgtttgtttgtttttagttaagattagtgcttcttaaatgatagttattttgccatgtcagaagacacttttaaagaagaaggcctctgggaatataaatgcaaaagaaaaaccagtacattccaacttagagctaatttaagaaaacaatctttcagcaaacttgacaactgctctgagaatgtagcttctgagaccagtggtggctctaatcctaaatgactctaataaacaattctctctgccattagagttatcagagaaataatttatatgatacgtttcagcttgatagacaccatcatcccattgcaaacccctatttagtgaactagattccaagctctattaatcatttgagtagggtgtctgtttggatgtgacgtatctacaattaggcttaattaaaaccacccacatagagcatgctgaaagaccagcatttaaaaataggagctgaataattagggtcattaataggaactgattatttagtttatgatggcttaaacacaaattaggctcagcagttttctggtttctaatgaaaacgcagagggcagagcaaagctcacttaaagggaatccctcattatactctgggaatggccatcgttcttcatcatcctctgttttagggtagcccattcaccaaagcatttgcatcgggctggtacaagtaacctgcgcctctgtgaggggtggaggaaaagtgctctgcccggggccaagctaggtaagccaggggcaggctggattcagccttccccagggccctgggaggagcctttgtgctctgcctgaactgcacagggtaggtggccaccctccctgggcagaggcctcctgcaaccgactctttgtcatctctctgttgcggttactgcgtggatttttctgaggccacaggaaatctactgatgcatctcccggatcacccacagtctatgactgcccgctcttaaataaacagtttatgtacatgatgctgtgctgtttgtgatgtttcacattctttggccttaatggggggcttatagagcttccaactgagtaagacaaggatatctttcaaagcaggtatgaataaggcaatgagatgctccacctctaccagggcctgagctgagcttacgagtgtaaaatccagagctggcgctgattcggtgtgggggtgggatgggagcagggtaggaaagtgagaagctgaattcagtagagcatcagaggctaagatttattggctggtacccagtgaaaatggaaagacttttctggccatgatttttttttcccatagacttgagctggattttattcacaagaatccaaaataagtattttaagtgtgtgtgtgtgtatgtgtgtgtgtgatttgtgtgcgagtgtgtgtgtgtcttattaggtgattaagcacgtaagaggctaagttcctgttcctttcctttatgttggaaataattttaaccttgttctcctggctcagaatccttttcaagctacaagcagatttcttgtgagttgcaggatggtttctggatttgttgcgtgagacgtgacctaccctccaatgtctgaagtcatctcttgcctgcctggaaggcctgctgtatgtttcgggcattactgtttatcctcacgtcatagttttacatgtgagtcactctcatacaaaatgttcacttctattttgttttggaggaaggttagggtgttttaagctag

SEQ ID NO: 27438 - DNA, 2300 bp, Homo sapien
aatctcagtgttgtaatgtcacaaaggtttgcttcccctcatccccattccaatacagcctgagcagctctgctgggttcttctccatgtgataacccagggatctagtctccttacgtcttgtgaagccaccatggtcaatacacagcctccagggttgtcacagaaggggaagaaggtgtgtcaaagatcactcagagtgctttatggccaagtctacaggactcccatcacctctgcccacacacctctcaccagaacccaatgggaggaaaaggaggcttggaaaggtggtcctcctgtgtgtccaggaagagagtatggggtggcttatctatctacactacatctacaaatgccaagcgttgcttgtggcctcatgtgaatgtctgattaatatgacattttatcctaatactcacagatgtctggcagcatggacaccagactttgagatcgctgactgattctggtatccgcctgacacaaccagtgacggcttttgcaacttctgacagcctgcccagcctgtgtgctcacaactgagtggtcgtttctaatcactaatagtgctcaggcccgggaagagtgtgacatgtgtcctgaggtgatttgtgatgggggctttgttttgacatttttttctgaccatttgagaaagaaccaagttccagatcatttggcttcatgacaaacaacaaaggagctaggcttttctaccttaaacctcggccagccggggtgccccctcccaggtgatgtcagaaaggcggccatgccctcggggtgaagggtactagccatcctccccctgcctgtaccacagagcctaggatggggcctgggatggagcctgggatgctctggctggggcctggggcggggagtggcctgccagcctgtgttatcttctagcattggcacccccaatttagtccgaggaaccctccaaagcagctacagtttccttcccttcctgggaaagcttggcccaaaggccaggaaggtctttgcctcggcttctcagaaggaagggaagacctgctttgggcatatggggtagaattttctaccatgtaaagggtggtatggtcaaaatgtgaacttgccttatgtcactaattcctgcgaaactttaaattcttcattgcatccctcacattcaacgagggaatttgtcaaaatgctttctggcaaagtgcctgacacaaacaatgtgaatttctctgtgtagaaatgaccctttctgcctggtgctagctttcctgataagctcactgggaatgttcctcctgccgaaatgcagatttgttgatcatcttttggatttcagatccttgctctgggagaacgagatgcaggcccgttcctactgaggaccattgtcccatagcccactcttgctccagagtcctgctggcttctagtttcttctcccatggacccccaaattccggggacttatttcctaatgcctcccacttagtattccctgaaataatattctgaggagttctgaataggggagtcttcaaataaatcagcaagtgccgtgagaatgcatgagtaagggaaggcgtcatgacccaggcctctcgagcaacactagggaggcaagcggacgccatcctgcatgtgtgcagctcacacctgccacccacggcacaacacacctttccacagggaaacacagtgttctctcttccacccctcattgtcatagcccagtgaagattcacctattgggaaagaaatgaaaaccaacatgtctttgaacttaattgttttcttaacatttggggctgggacatctgtctttgcttaaaaacacatctatttatatcaacaaccgtttacattgagtccttggagactgacttaagcagatgttgcctgatgtgggttttcgtacttagaaaaaatgtggaattcatttctaccccactccctcctcaataaagttaaattgcagaaatttgcaaaccttagatttcagtgtacacaaaatacatcctcctagcttttcataacatgtgactcatgttattgtgatgaagggactaatgaatcattttcgtactacgagggctggaagacggcagtcctgagggagccgacttgcttagaaggttggtaatgcgattactcattcaatggagaccagtgtaaaagctgagtgttgtacatacagctatgtttatacaaccactgccttggcttggaggaaggggcaagggcaaattggaagtgggtgggaaagactggaggtggctttctgaggcaaagcgatgcccaggaat

SEQ ID NO: 27439 - DNA, 2300 bp, Homo sapien
ctgatcactccaccctgtgcaccttctgacttttaatttccttccaacaccctcgacttttgatctccaagcacaagggctatacttttatttattaggtttaatttactgtaaagctcattgttccctgtgaatcgcacgataacagtcaatgaataatcactggcttcagccagactgctttttaattctgctgagtaactggcaagccaactagtattaaggacaaaaatgtaaggaaccctgatattgccccagaactaggataagccattttattatgaacatgtgactgccctcgtgcagaggtggatcagctacagggcaggacccagggcaagggggctgcttggggcagcctcagactctttggaaggggaaatagggaggaccagggacctgggtgggaggcaggagcttaggcttacgatgaccccagcacacaggcccagcttcctcttcccacagcctccctgccgtcttagctctgccatttggtcttccggccgggatccctttcccaaggctttcacacatttaaacccgcgaggggcaggactttttttttttttttcgtgtatatgatagttttttcaaaatgttttctataaaatcctccctgaggagagcttggaaaaagattcttaatagctagatcattttgagtccttctctaccatgtactcaacactctaacatattctgcacatttggttctatgtcatttgccatagtcttaaggacgtaggttccataatcatcccttattctgtagaggaggcccaaggttagtgagcagaggaaggttccactgtcgggaaccggtggtcttcaaactcctgtgctcctcttttgatatctttctgctcatatatgttggaaacagcccagcatgagcaaagcaccacctcctagcccccagcctgtgccagccctgcaaagaggaaatatggctccactcagggagcccatcagcgactcagggagccctggagcacctggcactcagcacccatgaacacgagggcaggcatggtgggacaaggcagtctgcttggggcaagtgagcttcgggaagtagctgagctttggggagcagctgtctatacccagcttctcagggctgtgcaagtagcctgagggagaaagaccctatattagctgaaactgcagcccagatgagtcagtattttctgctacggttttttaaaaaaatagtaacatactcatgtctccatggtaacttactatggatctgtattccatttatggaactctttcttgacctatctgtgttctctaatctgggcctgaatatacactgagaagccatcagaatcaattcagtctccaagaaataatcacttcccctatacgtgattgtttcagccgtatagattctgactgtgactcatgccacggtgatacccggagaccttcggggacccagaaacattaaggtgcaccgatatctcaattatccggataactctagacctagagtcaccatggaaacctagaaccctgagtcacagagaagctgggccattcctctcccttcccggtggtgccgcagttcttgagatgtgagcagctttcagccccgtggcctcgcctaagctggggtttcctatttcatccacaacttcaggaatctaaactttcctgcaaaatattgagcatgtgacctgagtccaaacagccatggactcaagcaccttctgataaaaacggaaaccacagtgtagggggtggttttgaccagggtttcggagtcagataaactcaggtttccaccttgaatttctcatcaatctgacgtggcaggttattcatcctaaggttcagttcccacctgtgtaaagtgggagccgcaagtcctccgagagtgacgatgatgtgcgtggagtgcccagcccagattgaagcgcggccaaggcgggtcgctatctgggcaccgctcagctccagagggcgccactcccgcggagcctgcgggatcggggcttcccgggagcagcgcgatcagcaccacgactcggggacacagccagggcccggtttctacaggaagcgcctcatttggagcctttttgtgatagaatgatcattagtcctaagcccattcagaggttcaagaatggggtcggctcaatttcagggccttattacccaagcccggctgcccttcggtgccaccagcaccactgctccgtcgctgcggaattccaaaggcaggtttggcgttagggccttggccccagagaggacgccgagcgctccacggaaagtctccgccc

SEQ ID NO: 27440 - DNA, 2300 bp, Homo sapien
cctgaggagagcttggaaaaagattcttaatagctagatcattttgagtccttctctaccatgtactcaacactctaacatattctgcacatttggttctatgtcatttgccatagtcttaaggacgtaggttccataatcatcccttattctgtagaggaggcccaaggttagtgagcagaggaaggttccactgtcgggaaccggtggtcttcaaactcctgtgctcctcttttgatatctttctgctcatatatgttggaaacagcccagcatgagcaaagcaccacctcctagcccccagcctgtgccagccctgcaaagaggaaatatggctccactcagggagcccatcagcgactcagggagccctggagcacctggcactcagcacccatgaacacgagggcaggcatggtgggacaaggcagtctgcttggggcaagtgagcttcgggaagtagctgagctttggggagcagctgtctatacccagcttctcagggctgtgcaagtagcctgagggagaaagaccctatattagctgaaactgcagcccagatgagtcagtattttctgctacggttttttaaaaaaatagtaacatactcatgtctccatggtaacttactatggatctgtattccatttatggaactctttcttgacctatctgtgttctctaatctgggcctgaatatacactgagaagccatcagaatcaattcagtctccaagaaataatcacttcccctatacgtgattgtttcagccgtatagattctgactgtgactcatgccacggtgatacccggagaccttcggggacccagaaacattaaggtgcaccgatatctcaattatccggataactctagacctagagtcaccatggaaacctagaaccctgagtcacagagaagctgggccattcctctcccttcccggtggtgccgcagttcttgagatgtgagcagctttcagccccgtggcctcgcctaagctggggtttcctatttcatccacaacttcaggaatctaaactttcctgcaaaatattgagcatgtgacctgagtccaaacagccatggactcaagcaccttctgataaaaacggaaaccacagtgtagggggtggttttgaccagggtttcggagtcagataaactcaggtttccaccttgaatttctcatcaatctgacgtggcaggttattcatcctaaggttcagttcccacctgtgtaaagtgggagccgcaagtcctccgagagtgacgatgatgtgcgtggagtgcccagcccagattgaagcgcggccaaggcgggtcgctatctgggcaccgctcagctccagagggcgccactcccgcggagcctgcgggatcggggcttcccgggagcagcgcgatcagcaccacgactcggggacacagccagggcccggtttctacaggaagcgcctcatttggagcctttttgtgatagaatgatcattagtcctaagcccattcagaggttcaagaatggggtcggctcaatttcagggccttattacccaagcccggctgcccttcggtgccaccagcaccactgctccgtcgctgcggaattccaaaggcaggtttggcgttagggccttggccccagagaggacgccgagcgctccacggaaagtctccgcccggctcccagggcgcacactcgcgcgcacgtggggccgaggccctgctcccggggcctcagggccagccggcgagggacccagccgagtgacagcaggaggcggagggaaggttgggccggaaggtgtcagccccgccccgcgctccctcgccgcctccgccctcctcttctctcccctcgtgcgttccctctcctctccctccgctcccccaaccctcctgctgcccccttccctctcctcccgcttctccccatcctgcctacctcccttcccctcctcttctctctcctccccttccctcccctctctcttctctcctccctcgtttcctcccctcccctccactcggccgtccctccttcctcctccctcctccctcctcctcccgctcctgaagagcgcgccgcgtgggggacggcccggttacttcctccagagactgacgagtgcggtgtcgctccagctcagagctcccggagccgcccggccagcgtccggcctccctgatcgtctctggccggcgccctcgccctcgcccggcgcgcaccgagcagccgcgggcgccgagcagccaccgtcccgaccaagcgccggccctgcccgcagcggcagggtaa
